United States Patent Application Publication US 2018/0126003 A1 - sequence listing, part 92

SEQ ID NO: 167349 - protein, 519 aa, Artificial Sequence
  derived and/or modified sequence
MGHLENTSVVFPRAIFSLCEKETRKLTLCLFSRSSSAEHPGASKPPISSSSMTSRILLRQQLMREQMQEQERREQQQKLQAAQFMQQRVPVSQTPAINVSVPTTLPSATQVPMEVLKVQTHLENPTKYHIQQAQRQQVKQYLSTTLANKHANQVLSLPCPNQPGDHVMPPVPGSSAPNSPMAMLTLNSNCEKEGFYKFEEQNRAESECPGMNTHSRASCMQMDDVIDDIISLESSYNEEILGLMDPALQMANTLPVSGNLIDLYGNQGLPPPGLTISNSCPANLPNIKRELTESEARALAKERQKKDNHNLIERRRRFNINDRIKELGTLIPKSNDPDMRWNKGTILKASVDYIRKLQREQQRAKELENRQKKLEHANRHLLLRIQELEMQARAHGLSLIPSTGLCSPDLVNRIIKQEPVLENCSQDLLQHHADLTCTTTLDLTDGTITFNNNLGTGTEANQAYSVPTKMGSKLEDILMDDTLSPVGVTDPLLSSVSPGASKTSSRRSSMSMEETEHTC

SEQ ID NO: 167350 - protein, 495 aa, Artificial Sequence
  derived and/or modified sequence
MLYAFWFSHSSSAEHPGASKPPISSSSMTSRILLRQQLMREQMQEQERREQQQKLQAAQFMQQRVPVSQTPAINVSVPTTLPSATQVPMEVLKVQTHLENPTKYHIQQAQRQQVKQYLSTTLANKHANQVLSLPCPNQPGDHVMPPVPGSSAPNSPMAMLTLNSNCEKEGFYKFEEQNRAESECPGMNTHSRASCMQMDDVIDDIISLESSYNEEILGLMDPALQMANTLPVSGNLIDLYGNQGLPPPGLTISNSCPANLPNIKRELTESEARALAKERQKKDNHNLIERRRRFNINDRIKELGTLIPKSNDPDMRWNKGTILKASVDYIRKLQREQQRAKELENRQKKLEHANRHLLLRIQELEMQARAHGLSLIPSTGLCSPDLVNRIIKQEPVLENCSQDLLQHHADLTCTTTLDLTDGTITFNNNLGTGTEANQAYSVPTKMGSKLEDILMDDTLSPVGVTDPLLSSVSPGASKTSSRRSSMSMEETEHTC

SEQ ID NO: 167351 - protein, 117 aa, Artificial Sequence
  derived and/or modified sequence
MGHLENTSVVFPRAIFSLCEKETRKLTLCLFSRSSSAEHPGASKPPISSSSMTSRILLRQQLMREQMQEQERREQQQKLQAAQFMQQRVPVSQTPAINVSVPTTLPSATQVPMEVLK

SEQ ID NO: 167352 - DNA, 1560 bp, Artificial Sequence
  derived and/or modified sequence
atgggccacctggagaacaccagcgtggtgttccccagagccatcttcagcctgtgcgagaaggagaccagaaagctgaccctgtgcctgttcagcagaagcagcagcgccgagcaccccggcgccagcaagccccccatcagcagcagcagcatgaccagcagaatcctgctgagacagcagctgatgagagagcagatgcaggagcaggagagaagagagcagcagcagaagctgcaggccgcccagttcatgcagcagagagtgcccgtgagccagacccccgccatcaacgtgagcgtgcccaccaccctgcccagcgccacccaggtgcccatggaggtgctgaaggtgcagacccacctggagaaccccaccaagtaccacatccagcaggcccagagacagcaggtgaagcagtacctgagcaccaccctggccaacaagcacgccaaccaggtgctgagcctgccctgccccaaccagcccggcgaccacgtgatgccccccgtgcccggcagcagcgcccccaacagccccatggccatgctgaccctgaacagcaactgcgagaaggagggcttctacaagttcgaggagcagaacagagccgagagcgagtgccccggcatgaacacccacagcagagccagctgcatgcagatggacgacgtgatcgacgacatcatcagcctggagagcagctacaacgaggagatcctgggcctgatggaccccgccctgcagatggccaacaccctgcccgtgagcggcaacctgatcgacctgtacggcaaccagggcctgcccccccccggcctgaccatcagcaacagctgccccgccaacctgcccaacatcaagagagagctgaccgagagcgaggccagagccctggccaaggagagacagaagaaggacaaccacaacctgatcgagagaagaagaagattcaacatcaacgacagaatcaaggagctgggcaccctgatccccaagagcaacgaccccgacatgagatggaacaagggcaccatcctgaaggccagcgtggactacatcagaaagctgcagagagagcagcagagagccaaggagctggagaacagacagaagaagctggagcacgccaacagacacctgctgctgagaatccaggagctggagatgcaggccagagcccacggcctgagcctgatccccagcaccggcctgtgcagccccgacctggtgaacagaatcatcaagcaggagcccgtgctggagaactgcagccaggacctgctgcagcaccacgccgacctgacctgcaccaccaccctggacctgaccgacggcaccatcaccttcaacaacaacctgggcaccggcaccgaggccaaccaggcctacagcgtgcccaccaagatgggcagcaagctggaggacatcctgatggacgacaccctgagccccgtgggcgtgaccgaccccctgctgagcagcgtgagccccggcgccagcaagaccagcagcagaagaagcagcatgagcatggaggagaccgagcacacctgctag

SEQ ID NO: 167353 - DNA, 354 bp, Artificial Sequence
  derived and/or modified sequence
atgggccacctggagaacaccagcgtggtgttccccagagccatcttcagcctgtgcgagaaggagaccagaaagctgaccctgtgcctgttcagcagaagcagcagcgccgagcaccccggcgccagcaagccccccatcagcagcagcagcatgaccagcagaatcctgctgagacagcagctgatgagagagcagatgcaggagcaggagagaagagagcagcagcagaagctgcaggccgcccagttcatgcagcagagagtgcccgtgagccagacccccgccatcaacgtgagcgtgcccaccaccctgcccagcgccacccaggtgcccatggaggtgctgaagtag

SEQ ID NO: 167354 - DNA, 1560 bp, Artificial Sequence
  derived and/or modified sequence
atgggccatcttgagaatacctctgtcgtgttccctagagccatcttctccctctgtgagaaggaaactagaaagctgacactgtgtctcttttcacgttcctcaagcgccgagcaccccggagcttccaagccccctatatctagctcctccatgaccagtcgaatcctgttgagacagcagctgatgcgggagcaaatgcaggaacaggaacgccgcgaacagcagcaaaagctccaggctgctcagttcatgcagcagagggtgccggtgtcacagactcccgcaattaatgtaagtgtgcccactacactgccttccgccacgcaggtgccgatggaagtgctgaaagtccaaactcaccttgagaatcctaccaagtaccatatccaacaggcacaaaggcagcaggtgaagcaatacctgagtacaacgctcgccaataagcacgccaaccaggtgttgtcgctcccttgtccaaatcagcctggtgaccacgtcatgcctcccgtgcctggaagttctgctccaaactccccgatggccatgctgactctgaacagcaactgcgaaaaagagggattctataagtttgaagagcagaatagggccgaatctgaatgtccaggcatgaacacccatagccgggcatcttgtatgcagatggacgacgttattgatgatatcatcagtctagaatcatcatataacgaggagatcctgggattaatggaccccgcgctgcagatggccaacactctgcctgtgtccggcaacctcattgatctgtacggcaaccaaggcttgccaccccctgggctgacaatttcaaactcctgtcccgccaatctccccaacattaaacgcgagctgactgagagtgaggcacgagccctggcgaaggagaggcagaagaaggacaatcataacctcatcgaaaggcgccggagatttaatattaacgacagaataaaagagcttggaacattaatcccaaagtctaatgatcccgacatgcgatggaataagggaaccattctcaaggcatctgtggattacatccgcaagctgcagcgggagcaacagcgggcgaaggagctggagaaccgacagaaaaaactagagcatgcaaaccggcacctgctgttacgaatccaagagctggagatgcaggcgagggcacacggtctatcactcatcccaagtaccggtctgtgtagcccagatctcgttaacagaataatcaaacaggagcctgtcctcgagaattgcagccaggacctgctccaacaccatgcagacctgacctgtaccaccacgctcgaccttacggacggtactattacttttaacaacaatcttggcaccggaacggaggctaatcaggcatatagtgttcccactaagatgggaagtaagctggaggacatcctgatggatgatactttgtctcctgtaggtgtcaccgatcccctgctgtcttccgtgagtccgggagcctccaaaacatcttctaggcgctcctctatgtctatggaagaaactgagcatacttgctag

SEQ ID NO: 167355 - DNA, 354 bp, Artificial Sequence
  derived and/or modified sequence
atgggacacttggaaaacacgagcgtagtgtttccgcgggctatcttttcactgtgcgagaaggaaacacgcaagctaaccctttgtcttttcagcaggtcatcctccgccgagcatccaggtgcctccaagccccccatcagttcaagtagcatgacctcacggattcttcttagacagcagctcatgcgcgagcagatgcaggaacaggagcgacgggaacagcagcagaaattacaggccgcccaatttatgcaacagcgcgtccccgtgagtcagacaccagccattaatgttagtgtaccgactacccttccttctgccactcaagtccccatggaggtcctcaagtag

SEQ ID NO: 167356 - DNA, 1560 bp, Artificial Sequence
  derived and/or modified sequence
atgggccacctggagaacacctctgtggtgttcccccgggccatcttcagcctgtgtgagaaggagaccaggaagctgaccctgtgcctcttcagccgcagcagcagcgctgagcaccctggggccagcaagccacccatcagcagcagctccatgaccagccgcatcctgctgcggcagcagctgatgagggagcagatgcaggagcaggagcggcgggagcagcagcagaagctgcaggccgcccagttcatgcagcagagggtgcctgtgtcccagaccccagccatcaacgtgtctgtgcccaccaccctgcccagcgccacccaggtgcccatggaggtgctgaaggtgcagacccacctggagaaccccaccaagtaccacatccagcaggcccagaggcagcaggtgaagcagtacctgagcaccaccctggccaacaagcacgccaaccaggtgctgagcctgccctgccccaaccagcccggggaccacgtgatgcctcctgtgcccggcagcagcgcccccaacagccccatggccatgctgaccctgaacagcaactgtgagaaggagggcttctacaagtttgaggagcagaacagagctgagagtgaatgtcctggcatgaacacccacagccgggccagctgcatgcagatggatgatgtgattgatgacatcatcagcctggagagcagctacaatgaggagatcctgggcctgatggaccctgccctgcagatggccaacaccctgcctgtgtctggcaacctgattgacctgtatggcaaccagggcctgcccccacctggcctgaccatcagcaacagctgcccagccaacctgcccaacatcaagcgggagctgacagagagcgaggcccgggccctggccaaggagcggcagaagaaggacaaccacaacctgattgaaagaagaagacgcttcaacatcaatgaccgcatcaaggagctgggcaccctcatccccaagagcaatgaccctgacatgcgctggaacaagggcaccatcctgaaggcctctgtggactacatcaggaagctgcagcgggagcagcagagggccaaggagctggagaaccggcagaagaagctggagcacgccaacagacacctgctgctgcgcatccaggagctggagatgcaggcccgggcccacggcctgagcctcatccccagcacaggcctgtgcagcccagacctggtgaaccgcatcatcaagcaggagcctgtgctggagaactgcagccaggacctgctgcagcaccacgccgacctgacctgcaccaccaccctggacctgacagatggcaccatcaccttcaacaacaacctgggcaccggcacagaggccaaccaggcctacagcgtgcccaccaagatgggcagcaagctggaggacatcctgatggatgacaccctgagccctgtgggcgtgacagaccccctgctgagctctgtgtcccctggggccagcaagaccagcagccgccgcagctccatgtccatggaggagacagagcacacctgctag

SEQ ID NO: 167357 - DNA, 354 bp, Artificial Sequence
  derived and/or modified sequence
atgggccacctggagaacacctctgtggtgttcccccgggccatcttcagcctgtgtgagaaggagaccaggaagctgaccctgtgcctcttcagccgcagcagcagcgctgagcaccctggggccagcaagccacccatcagcagcagctccatgaccagccgcatcctgctgcggcagcagctgatgagggagcagatgcaggagcaggagcggcgggagcagcagcagaagctgcaggccgcccagttcatgcagcagagggtgcctgtgtcccagaccccagccatcaacgtgtctgtgcccaccaccctgcccagcgccacccaggtgcccatggaggtgctgaagtag

SEQ ID NO: 167358 - DNA, 1560 bp, Artificial Sequence
  derived and/or modified sequence
atgggccacctggagaacaccagcgtggtgttcccccgggccatcttctctctgtgcgagaaagagactcggaagttgacgctgtgtctgttcagcaggtcatcttctgctgaacatcccggcgctagtaaacctcctatttcaagtagtagtatgaccagccggatattactgcggcagcagcttatgcgagaacagatgcaggagcaggagaggcgcgaacagcaacaaaaattacaagccgctcagttcatgcagcagagagtgcccgtctcacagaccccagcgatcaacgtaagtgtgcctacaactttgcccagcgcaacccaggttcccatggaagtcctgaaggtacaaactcacctggagaaccctactaagtatcacatacagcaggctcagcgccagcaggtcaaacagtatctgtcaaccacgctcgctaataaacacgctaatcaggtcctgagcctgccatgtccaaaccagcctggagaccacgttatgccccctgtgcccggttcttcagctccaaacagcccgatggctatgctcaccctgaattcgaattgcgaaaaagaagggttctacaaatttgaagagcaaaaccgcgctgagagcgaatgccctggcatgaatacccacagtcgcgcgagttgcatgcagatggacgatgtaattgacgacatcatatctttggagtcaagctataatgaggagattctgggtctcatggaccctgcgctccagatggccaataccctacctgtctccgggaacttgatagatctctatgggaaccagggcttgccgccaccagggctgaccatctccaactcctgccctgctaatcttcctaacatcaagagggaacttaccgaatccgaagcccgagctctggctaaagagcgtcagaaaaaagataaccacaatctgatagaacgccgacgtaggtttaacatcaacgatcggatcaaagagctggggaccctcattcctaagtcaaacgacccagatatgcgctggaataaggggaccattctgaaggcctctgtggactatatccgcaaactgcagagggagcagcagcgcgctaaggagctggaaaacaggcagaagaagctcgagcacgccaatcggcaccttcttctgcggattcaagagcttgagatgcaagcaagggcccacggtctgtccctcattcctagcacaggactgtgcagcccagatctggtcaacagaatcataaagcaggagcccgtgctggagaattgctcacaggacctgctgcagcaccatgcagatttgacctgcacaacaacgctggatctcaccgatggaaccattacctttaacaacaatctgggcacaggaaccgaagcgaatcaggcttactctgtgcctactaaaatgggaagtaaactcgaggatatcctgatggacgatactcttagccctgtgggcgttacagacccgctgttgagcagtgtttcgcccggtgctagcaaaacttccagccgtcggtcgagcatgtccatggaagagaccgagcacacctgttag

SEQ ID NO: 167359 - DNA, 354 bp, Artificial Sequence
  derived and/or modified sequence
atgggccacctggagaacaccagcgtggtgttcccccgggccatcttcagcctgtgcgagaaggaaacaaggaagttgaccctctgtctgttctctaggtcgtcaagcgccgagcacccaggtgcttcaaagccccccatatctagcagttccatgacctcaaggatactgctgcggcagcagctgatgagagagcagatgcaagagcaggaacggcgggagcagcagcagaaactccaagcagcacagtttatgcagcaacgggtacccgtgtctcagacccccgctataaacgtatccgtgccaaccaccttaccaagcgcaacacaggttccgatggaggtgctgaaatag

SEQ ID NO: 167360 - DNA, 1560 bp, Artificial Sequence
  derived and/or modified sequence
atgggccacctggaaaatacctcggtcgtatttcctcgggctattttcagcctctgcgagaaggagaccaggaagcttaccctgtgtctgttcagccggtcttcatccgcagaacatcccggtgcttctaagccaccaatatcctccagctccatgacttcccggatactgctgcggcagcagctgatgcgcgagcagatgcaggagcaagaacggcgagagcagcaacagaaacttcaagccgctcagttcatgcagcagcgcgtgcctgtttctcagacgccagccattaatgtaagcgtccccaccactctgccatctgctactcaggtgcccatggaggtgctgaaggtgcagacacatcttgagaatccaactaagtaccacatccagcaggctcagaggcagcaggtaaaacagtatctgagcacaaccttggccaacaaacatgctaaccaggtgctttcccttccctgccctaatcaaccaggcgaccatgtcatgcctcccgtcccgggatcatctgcgcctaacagccctatggctatgctgactctcaattccaattgcgagaaagaagggttctacaagtttgaggaacaaaacagggctgagagcgagtgccctgggatgaacacacacagtcgagcgagctgtatgcagatggacgacgtaatcgatgacatcatttctttggaatcaagctataacgaggagatcctgggactgatggatcctgccttgcagatggcaaacacattgccagtttccggaaaccttatcgacctttacgggaatcagggtctgccaccccctggtctgactatctccaactcatgccccgctaatctccccaacattaagagagagctcaccgagtccgaggcacgcgcactggccaaagagagacaaaagaaggacaatcataatcttatcgaaagacgccgtagatttaacatcaacgaccgcattaaggaactgggtacactgatacccaaaagcaatgaccctgacatgagatggaataaggggaccatcctgaaggcctccgttgactacattaggaagttgcagcgggaacaacagagagccaaggaactggaaaatcgccaaaagaagctcgaacacgccaaccggcatctcctgctcagaatccaggagctggaaatgcaggctcgggcacacggccttagcctgatcccctcgactgggctatgcagccccgatttggttaatagaattattaaacaggagcctgtgctggaaaactgctcccaggacttgctccaacatcacgcggatttgacttgcaccacaactctggatctcactgatggaaccattacctttaataacaaccttggaaccggcacagaagccaaccaggcctactccgttccgaccaagatggggagcaagttggaggatatcctgatggacgacacactgtctccagtgggggtcacagacccactactgagctctgtcagcccaggcgcttctaagacgagcagccgaaggagtagcatgagtatggaggagaccgagcacacatgttag

SEQ ID NO: 167361 - DNA, 354 bp, Artificial Sequence
  derived and/or modified sequence
atgggacacttggaaaacactagcgtggttttcccccgagcgatcttctcactgtgtgaaaaggagactagaaagttgacattatgcctattttccagatccagcagcgcagaacaccctggagctagcaaaccgccaatctcttccagcagcatgacttccagaatcctgctccggcaacaactcatgcgtgaacagatgcaggaacaggaacgcagggaacagcagcagaagcttcaggcggctcagttcatgcagcagcgcgtccccgtttcacagactcccgcaataaatgtctctgtgccaacaacacttccttctgccacgcaggtacctatggaggtgctgaagtag

SEQ ID NO: 167362 - DNA, 4680 bp, Artificial Sequence
  derived and/or modified sequence
cagacctattccgctccatctctgaagtcaaatgggacaccttgaaaatacttcagtggttttcccacgagctattttctctctctgtgaaaaggaaaccaggaaattgactctgtgcctgttttcaagaagcagttccgccgagcatcctggggcctccaagcctccgataagctcctccagtatgacatcacgcatcttgctacgccagcaactcatgcgtgagcagatgcaggagcaggagcgcagggagcagcagcagaagctgcaggcggcccagttcatgcaacagagagtgcccgtgagtcagacaccagccataaacgtcagtgtgcccaccacccttccctctgccacgcaggtgccgatggaagtccttaaggtgcagacccacctcgaaaaccccaccaagtaccacatacagcaagcccaacggcagcaggtaaagcagtacctttctaccactttagcaaataaacatgccaaccaagtcctgagcttgccatgtccaaaccagcctggcgatcatgtcatgccaccggtgccggggagcagcgcacccaacagccccatggctatgcttacgcttaactccaactgtgaaaaagagggattttataagtttgaagagcaaaacagggcagagagcgagtgcccaggcatgaacacacattcacgagcgtcctgtatgcagatggatgatgtaatcgatgacatcattagcctagaatcaagttataatgaggaaatcttgggcttgatggatcctgctttgcaaatggcaaatacgttgcctgtctcgggaaacttgattgatctttatggaaaccaaggtctgcccccaccaggcctcaccatcagcaactcctgtccagccaaccttcccaacataaaaagggagctcacagagtctgaagcaagagcactggccaaagagaggcagaaaaaggacaatcacaacctgattgaacgaagaagaagatttaacataaatgaccgcattaaagaactaggtactttgattcccaagtcaaatgatccagacatgcgctggaacaagggaaccatcttaaaagcatccgtggactatatccgaaagttgcaacgagaacagcaacgcgcaaaagaacttgaaaaccgacagaagaaactggagcacgccaaccggcatttgttgctcagaatacaggaacttgaaatgcaggctcgagctcatggactttcccttattccatccacgggtctctgctctccagatttggtgaatcggatcatcaagcaagaacccgttcttgagaactgcagccaagacctccttcagcatcatgcagacctaacctgtacaacaactctcgatctcacggatggcaccatcaccttcaacaacaacctcggaactgggactgaggccaaccaagcctatagtgtccccacaaaaatgggatccaaactggaagacatcctgatggacgacaccctttctcccgtcggtgtcactgatccactcctttcctcagtgtcccccggagcttccaaaacaagcagccggaggagcagtatgagcatggaagagacggagcacacttgttagcgaatcctccctgcactgcattcgcacaaactgcttcctttcttgattcgtagatttaataacttacctgaaggggttttcttgataattttcctttaatatgaaattttttttcatgctttatcaatagcccaggatatattttatttttagaattttgtgaaacagacttgtatattctattttacaactacaaatgcctccaaagtattgtacaaataagtgtgcagtatctgtgaactgaattcaccacagactttagctttctgagcaagaggattttgcgtcagagaaatgtctgtccatttttattcaggggaaacttgatttgagatttttatgcctgtgacttccttggaaatcaaatgtaaagtttaattgaaagaatgtaaagcaaccaaaaagaaaaaaaaaaagaaagaaagaggaaaagaaatccatactaacccttttccattttataaatgtattgattcattggtactgccttaaagatacagtacccctctagctttgtttagtctttatactgcaaactatttaaagaaatatgtattctgtaaaagaaaaaaaaaatgcggccttttcatgaggatcgtctggttagaaaacataactgataccaaccgaaactgaagggagttagaccaaggctctgaaatataaagtctaatcttgctctcttttattctgtgctgttacagttttcttcatcaatgagtgtgatccagtttttcataagatattttattttgaaatggaaattaatgtcctctcaaagtaaaatattgaggagcactgaaagtatgttttactttttttttattttatttttgcttttgataagaaaaccgaactgggcatatttctaattggctttactatttttatttttaaattatgttttactgttcatttgatttgtacagattctttattatcattgttcttttcaatatatttgtattaatttgtaagaatatgcatcttaaaatggcaagttttccatatttttacaactcactggtggttttccgcattctttgtacacccatgaaagaaaacttttatgcaaggtcttgcatttaaaagacagctttgcgaatattttgtaaattacagtctcactcagaactgtttttggacacatttaaggtgtagtattaataggttaaaaccaggctttctagaaagaataaacttacatatttatttttaggacatgaaaatagcaatattcttggagattgataaccatagcattaatacgcccattatggtcatttaaattggggtttatttcagcaaacttgttgaatttatttttaagaaagaaatactgtattgggaagttactgttacttgataacaatgttttaacaagaagcaatgttataaagttagtttcagtgcattatctacttgtgtagtcctatgcaataacagtagtgttacatgtatcaagcctagatgttttatacagatgccatatagtgttatgagccaggctgttgaatggaatttctcagtagcagcctacaactgaatagcaagtggcataaagcatatccattcagaatgaagtgccttaaatatagcagtagtcttttttggactagcactgactgaactgtaatgtaggggaaagtttcatgatggtatctatagtcaagacgaacatgtagcatggtgcctatgtagacaatataagagcttccaattttccttcagatatttttaatattaaatatattttagtgacagagtgccaacttctttcatcaggaaaccttattcaggagggtttttaaaaagtgtttaaatgtcaaatgtgaattggtgatgggtgatggagggttcagagaggagtgatcgtcagatgtgtgaatggacggtttaggtgaaaataatcaactgcatagttcccatgcacgctgggcaatgagaatccttggaaacattggtgatgctatcagttttatagctttatttcttaagggggtagggaaaattagttcccattctttcaacccccttaactgtatagctcttttcctagaatagtgacgcaaatctgcatgaacagctaattgtaccatagtgttcattgatacaatcatagcattgtctatttttctcttcatatttatatgggggggagggcgctggatgcaaaagttgaagatcgtgatgctatgatgttagttttccttagctgattttgagggtttttaaaaataaagcaaggttgactaacctacggccacgggaacaggaccatggttaagcaaccatatagaaagctttgttgaaagaaagtatggcatcttgtaccactgccctgactgtcacaactcctaaccttgccattgcctgcctccccctccccttctccttaagagacaatttctgcaggtggcaggtgagcaagcccaggagaatgctgcaatcttgggggtggttttatttatttcttttttgccaaatagagtgtggattcatttcaggggctagctaagccaagaggcagtggtttgggcttgttgtttgtaacaagaaaatgatccacaccactcccccgattcccgggtgcagaattgtaactcggggttgggcctctatatggagtgaccaaaatgccaaaattgtccatctgcctctgagtagggcaatggaaataccaaaccttctgactttgccaaaaagcatacaagcaacctggtcatacataggatgacaaaattctttctggttgtttttaaacaataaagcaataagaacaaatacaatacataggaagttaaaagcacaaaggaatgaacttattaatatttttgaaaaatgcactgggaaaaagttgatgtcaataacagtataaaacagccctatttcttgataaaaaatgacaaatgactgtctcttgcggatgcttggtactgtaatgttaataatagtcacctgctgttggatgcagcaataatttctgtatggtccatagcactgtatattatggatcgatattaatgtatccaatgaaataatcgacttgttcttgatagcctcattaaagcatttggtttttcacatag

SEQ ID NO: 167363 - DNA, 382 bp, Artificial Sequence
  derived and/or modified sequence
cagacctattccgctccatctctgaagtcaaatgggacaccttgaaaatacttcagtggttttcccacgagctattttctctctctgtgaaaaggaaaccaggaaattgactctgtgcctgttttcaagaagcagttccgccgagcatcctggggcctccaagcctccgataagctcctccagtatgacatcacgcatcttgctacgccagcaactcatgcgtgagcagatgcaggagcaggagcgcagggagcagcagcagaagctgcaggcggcccagttcatgcaacagagagtgcccgtgagtcagacaccagccataaacgtcagtgtgcccaccacccttccctctgccacgcaggtgccgatggaagtccttaag

SEQ ID NO: 167364 - protein, 1558 aa, Artificial Sequence
  derived and/or modified sequence
MREAAAALVPPPAFAVTPAAAMEEPPPPPPPPPPPPEPETESEPECCLAARQEGTLGDSACKSPESDLEDFSDETNTENLYGTSPPSTPRQMKRMSTKHQRNNVGRPASRSNLKEKMNAPNQPPHKDTGKTVENVEEYSYKQEKKIRAALRTTERDRKKNVQCSFMLDSVGGSLPKKSIPDVDLNKPYLSLGCSNAKLPVSVPMPIARPARQTSRTDCPADRLKFFETLRLLLKLTSVSKKKDREQRGQENTSGFWLNRSNELIWLELQAWHAGRTINDQDFFLYTARQAIPDIINEILTFKVDYGSFAFVRDRAGFNGTSVEGQCKATPGTKIVGYSTHHEHLQRQRVSFEQVKRIMELLEYIEALYPSLQALQKDYEKYAAKDFQDRVQALCLWLNITKDLNQKLRIMGTVLGIKNLSDIGWPVFEIPSPRPSKGNEPEYEGDDTEGELKELESSTDESEEEQISDPRVPEIRQPIDNSFDIQSRDCISKKLERLESEDDSLGWGAPDWSTEAGFSRHCLTSIYRPFVDKALKQMGLRKLILRLHKLMDGSLQRARIALVKNDRPVEFSEFPDPMWGSDYVQLSRTPPSSEEKCSAVSWEELKAMDLPSFEPAFLVLCRVLLNVIHECLKLRLEQRPAGEPSLLSIKQLVRECKEVLKGGLLMKQYYQFMLQEVLEDLEKPDCNIDAFEEDLHKMLMVYFDYMRSWIQMLQQLPQASHSLKNLLEEEWNFTKEITHYIRGGEAQAGKLFCDIAGMLLKSTGSFLEFGLQESCAEFWTSADDSSASDEIRRSVIEISRALKELFHEARERASKALGFAKMLRKDLEIAAEFRLSAPVRDLLDVLKSKQYVKVQIPGLENLQMFVPDTLAEEKSIILQLLNAAAGKDCSKDSDDVLIDAYLLLTKHGDRARDSEDSWGTWEAQPVKVVPQVETVDTLRSMQVDNLLLVVMQSAHLTIQRKAFQQSIEGLMTLCQEQTSSQPVIAKALQQLKNDALELCNRISNAIDRVDHMFTSEFDAEVDESESVTLQQYYREAMIQGYNFGFEYHKEVVRLMSGEFRQKIGDKYISFARKWMNYVLTKCESGRGTRPRWATQGFDFLQAIEPAFISALPEDDFLSLQALMNECIGHVIGKPHSPVTGLYLAIHRNSPRPMKVPRCHSDPPNPHLIIPTPEGFRGSSVPENDRLASIAAELQFRSLSRHSSPTEERDEPAYPRGDSSGSTRRSWELRTLISQSKDTASKLGPIEAIQKSVRLFEEKRYREMRRKNIIGQVCDTPKSYDNVMHVGLRKVTFKWQRGNKIGEGQYGKVYTCISVDTGELMAMKEIRFQPNDHKTIKETADELKIFEGIKHPNLVRYFGVELHREEMYIFMEYCDEGTLEEVSRLGLQEHVIRLYSKQITIAINVLHEHGIVHRDIKGANIFLTSSGLIKLGDFGCSVKLKNNAQTMPGEVNSTLGTAAYMAPEVITRAKGEGHGRAADIWSLGCVVIEMVTGKRPWHEYEHNFQIMYKVGMGHKPPIPERLSPEGKDFLSHCLESDPKMRWTASQLLDHSFVKVCTDEE

SEQ ID NO: 167365 - protein, 1498 aa, Artificial Sequence
  derived and/or modified sequence
MREAAAALVPPPAFAVTPAAAMEEPPPPPPPPPPPPEPETESEPECCLAARQEGTLGDSACKSPESDLEDFSDETNTENLYGTSPPSTPRQMKRMSTKHQRNNVGRPASRSNLKEKMNAPNQPPHKDTGKTVENVEEYSYKQEKKIRAALRTTERDRKKNVQCSFMLDSVGGSLPKKSIPDVDLNKPYLSLGCSNAKLPVSVPMPIARPARQTSRTDCPADRLKFFETLRLLLKLTSVSKKKDREQRGQENTSGFWLNRSNELIWLELQAWHAGRTINDQDFFLYTARQAIPDIINEILTFKVDYGSFAFVRDRAGFNGTSVEGQCKATPGTKIVGYSTHHEHLQRQRVSFEQVKRIMELLEYIEALYPSLQALQKDYEKYAAKDFQDRVQALCLWLNITKDLNQKLRIMGTVLGIKNLSDIGWPVFEIPSPRPSKGNEPEYEGDDTEGELKELESSTDESEEEQISDPRVPEIRQPIDNSFDIQSRDCISKKLERLESEDDSLGWGAPDWSTEAGFSRHCLTSIYRPFVDKALKQMGLRKLILRLHKLMDGSLQRARIALVKNDRPVEFSEFPDPMWGSDYVQLSRTPPSSEEKCSAVSWEELKAMDLPSFEPAFLVLCRVLLNVIHECLKLRLEQRPAGEPSLLSIKQLVRECKEVLKGGLLMKQYYQFMLQEVLEDLEKPDCNIDAFEEDLHKMLMVYFDYMRSWIQMLQQLPQASHSLKNLLEEEWNFTKEITHYIRGGEAQAGKLFCDIAGMLLKSTGSFLEFGLQESCAEFWTSADDSSASDEIRRSVIEISRALKELFHEARERASKALGFAKMLRKDLEIAAEFRLSAPVRDLLDVLKSKQYVKVQIPGLENLQMFVPDTLAEEKSIILQLLNAAAGKDCSKDSDDVLIDAYLLLTKHGDRARDSEDSWGTWEAQPVKVVPQVETVDTLRSMQVDNLLLVVMQSAHLTIQRKAFQQSIEGLMTLCQEQTSSQPVIAKALQQLKNDALELCNRISNAIDRVDHMFTSEFDAEVDESESVTLQQYYREAMIQGYNFGFEYHKEVVRLMSGEFRQKIGDKYISFARKWMNYVLTKCESGRGTRPRWATQGFDFLQAIEPAFISALPEDDFLSLQALMNECIGHVIGKPHSPVTGLYLAIHRNSPRPMKVPRCHSDPPNPHLIIPTPEGFRGSSVPENDRLASIAAELQFRSLSRHSSPTEERDEPAYPRGDSSGSTRRSWELRTLISQSKDTASKLGPIEAIQKSVRLFEEKRYREMRRKNIIGQVCDTPKSYDNVMHVGLRKVTFKWQRGNKIGEGQYGKVYTCISVDTGELMAMKEIRFQPNDHKTIKETADELKIFEGIKHPNLVRYFGVELHREEMYIFMEYCDEGTLEEVSRLGLQEHVIRLYSKQITIAINVLHEHGIVHRDIKGANIFLTSSGLIKLGDFGCSVKLKNNAQTMPGEVNSTLGTAAYMAPEVITRAKGEGHGRAADIWSLGCVVIEMVTGKICKDTE

SEQ ID NO: 167366 - DNA, 4677 bp, Artificial Sequence
  derived and/or modified sequence
atgagagaggcagctgccgccttggtgcccccacccgccttcgctgtcaccccagctgccgctatggaggagccccccccacctccccccccccccccccctcctcccgagccagaaaccgagtccgagccggaatgttgcctcgctgcgcgccaagagggcacgctgggggattctgcttgcaagtcacctgaaagcgatctggaggacttctccgacgaaactaatacagagaatctttacggaacttccccaccttcaacccccaggcagatgaagcggatgagcactaagcatcagcggaacaacgtcgggcggccagcttcaaggagtaatctgaaggagaagatgaatgctccaaatcagcctccgcacaaagacacagggaagaccgtagaaaacgtggaggagtacagctataagcaagagaaaaagatccgagctgccctgagaactaccgagcgtgatagaaagaaaaatgtgcagtgctctttcatgttggattccgtgggagggtctctcccaaagaaatcaatacctgatgtggatctgaacaagccgtatttatcgctgggctgctccaatgccaagctccccgtcagcgttcccatgccaatcgcacggcccgctaggcagacaagccggacagactgccccgcagaccgcctcaaattcttcgagactctgcggctacttctgaagctaacttctgtgagcaaaaagaaggacagagagcagagaggtcaggaaaacactagtggattttggcttaacaggtcaaatgagttgatatggctcgaactgcaagcttggcacgcaggccgaactatcaatgatcaggacttttttttatacacagccagacaagccatccctgacattatcaacgaaatcctcaccttcaaggtagactacggatcttttgcctttgtccgagatagggcaggctttaacggcactagcgtagagggccagtgtaaagccactcccgggactaaaatcgtgggttacagcacacaccacgagcacttgcagcgacagagggtgagctttgagcaggtgaaacggattatggagctgcttgagtacattgaggcgctgtacccttcactgcaggcccttcagaaggactatgagaagtacgcagctaaggactttcaggatcgcgtccaggccctgtgtctgtggctgaatattacaaaggatttgaatcagaaactccgcatcatggggacggtgctgggtattaagaacctgagtgacatcgggtggcccgtcttcgaaatcccttcacccagacccagcaaagggaatgagccagaatacgagggtgacgacacagagggggagctcaaggagctggaaagtagcacggatgaatccgaagaagagcagatcagcgatccccgcgtgcctgagatccgccagccgatcgataactccttcgacatccagagccgggactgtatctccaagaagttagaaagacttgagtccgaagacgacagcttgggatggggtgctcctgactggagtaccgaggcaggattttctcggcactgtttgacaagtatctaccggccattcgttgacaaagccctgaagcaaatggggcttaggaaactcattctgaggctgcacaaacttatggacggctcactgcagagagctcgcatcgctcttgtgaagaacgataggccagtggagttttctgagtttccggaccctatgtggggtagcgattacgttcagctgtctcgcacccctccatcctccgaggagaagtgcagcgcagtgtcctgggaagagctgaaagctatggacttgcctagctttgaaccggcttttctcgtgctgtgtcgggtgctcttaaacgtgatccacgagtgcctgaaactgcgtctggagcagcgccctgctggtgagccatctttgcttagtatcaagcaactggtgcgggagtgcaaagaagtcttgaaaggcggcctgcttatgaagcagtactatcaattcatgctacaagaagtgctggaggacctcgagaagccagattgtaatatcgatgccttcgaggaagatcttcacaagatgcttatggtatacttcgactacatgcgttcctggattcagatgcttcagcagttaccccaggcctcccacagcctgaaaaacctacttgaggaggaatggaatttcacgaaagagatcacacattatatccggggcggcgaggctcaggctgggaagctgttttgcgacattgcaggaatgctactgaaatccacagggtctttcctggaattcggtctccaggagtcatgtgccgagttctggactagcgctgatgattcatctgcctctgatgagattcggcgctcagtgattgagatttcacgtgctctgaaggagctttttcacgaggcaagagaaagagcatctaaagcactgggctttgctaaaatgttaagaaaggacctagagattgctgcggaattcaggctctctgctcctgtaagggatctgctagatgtgctcaagtcaaaacagtacgttaaggtccagatcccggggctcgagaatcttcagatgttcgtgcccgacacactggccgaggaaaaatcgatcatcctccagctattgaacgccgcagcaggaaaggattgttctaaagacagcgatgatgtgttgatagatgcctatctcctcctgacgaaacatggagaccgagcccgagatagcgaggatagctgggggacttgggaggcccagcctgtcaaggtcgtgcctcaggtggaaacagtagacactctcagatcaatgcaagtggataacctactgctggttgtgatgcagtctgcccacttgacaatccagcggaaagcgttccagcagtctattgaaggccttatgactttgtgccaggagcagacttcctcacaacccgtcattgccaaggccttgcaacagctgaagaacgatgcactagaactgtgcaacaggattagcaacgccattgatcgtgtcgatcatatgtttactagcgagttcgatgcagaggtggatgagtcagagtccgtcaccctacagcagtactacagggaagccatgatacaaggctataactttggcttcgaatatcataaagaagtcgtgaggctaatgagtggcgagttcagacagaaaattggagataagtacatctcattcgcccggaagtggatgaactacgttttgaccaagtgtgagagcgggcgggggaccaggccccgatgggcaacccaaggcttcgatttcctacaggccatcgagccggcgtttatctcagccctacctgaagacgactttctgtctctgcaggccttgatgaacgagtgcatcggccacgtaattggaaagccacactctcctgtgacaggactttacctcgcaattcacagaaattcccctagaccaatgaaagtccctagatgtcattctgatccccccaatcctcatctgatcatccccacccctgagggattcagaggatcatccgtgccagaaaatgaccgactggcctcaatcgccgccgagctccagtttaggtcactgtcaagacactcctcacctaccgaggagagagacgagccggcctacccccgcggcgactcctccgggtctacgagaagatcttgggagctcagaactctcattagtcagagcaaagacactgctagtaaactcggtcctatcgaagccattcagaagagtgtgaggctcttcgaggagaaacgctaccgcgagatgcgccgtaaaaatatcattgggcaggtttgcgataccccaaagagctatgacaacgtgatgcatgttggccttaggaaggtgaccttcaaatggcaacgcggcaacaaaatcggtgagggacagtatgggaaggtgtacacgtgtatctcggttgacaccggggaactgatggcaatgaaggagatcaggtttcagcctaatgaccacaagactatcaaggagaccgcagacgaactcaaaattttcgagggcatcaagcacccgaatttagtgaggtattttggtgtggagctccatcgggaggaaatgtacattttcatggagtattgcgatgaaggaacgctggaggaggtgtcccggctgggactgcaagaacacgtgatcaggctctacagtaagcagattacaattgccataaacgttttacacgaacatggcatcgttcaccgagacattaaaggggccaacatatttctcactagctccggcctgatcaaattgggagatttcggttgttcggttaagctgaaaaacaacgcccagactatgccaggcgaagtcaactctactcttggaaccgcagcatatatggctccggaagtaatcactagggccaagggcgagggacacggtagagctgcagacatctggtctctgggctgcgtggtaatcgagatggtgaccggtaagcggccctggcacgaatatgaacataatttccagatcatgtacaaagtgggcatgggacacaagccacctataccagagaggttgagcccagaaggaaaagattttctgagtcactgcctcgagagcgatccaaagatgaggtggactgcctctcagttactggatcacagttttgtcaaggtctgcacagacgaggaatag

SEQ ID NO: 167367 - DNA, 4497 bp, Artificial Sequence
  derived and/or modified sequence
atgcgtgaggctgctgcagccctggtgccacctccagcttttgctgtgacccctgctgctgccatggaggaaccccctccccctcctcctccacccccacctccccctgagccagaaaccgaatccgagcccgagtgctgtctggcagcccgccaggagggaactttgggggattcagcttgcaaatcgccggaatcggacctggaggattttagtgatgagactaacaccgaaaatctttacgggacctcccctccctctacacctcgccagatgaagcgcatgtccactaaacatcagcggaacaatgtgggtcggcccgccagcaggagcaacttgaaggagaaaatgaatgcacccaaccagcctccacacaaggataccggaaaaactgttgaaaatgtggaagagtattcttacaaacaggagaagaaaatccgcgccgcccttagaacaacagaaagggataggaaaaaaaacgtccagtgctcgtttatgctggattccgtcggaggttcactgcccaagaagtctattcccgatgtcgacttaaacaagccatacctgtcattaggatgttcaaacgccaagttacctgtcagcgtcccaatgcctattgcgagacccgcacgtcagacttctagaacggactgtccagcagacaggttaaagttctttgagaccctacgtctcctactaaaactgaccagcgtctctaaaaaaaaggaccgagagcagcggggtcaggaaaacacctccggcttttggctgaataggtccaacgaattgatctggctcgagctgcaagcatggcacgctggacgcactatcaacgaccaggactttttcctgtacaccgcaagacaggctatcccagacatcataaatgagatactgacgtttaaggtggactacgggagttttgccttcgtgcgagatcgggctggatttaatggaacaagcgtagagggacagtgcaaggctacacccggcacaaaaattgtaggatactccacacatcacgagcatctgcagcggcagcgggtgagcttcgagcaggttaaaaggatcatggagctgctagagtacatagaagcgctctacccgtctctgcaggcactgcagaaagattatgagaagtacgccgccaaagatttccaggatagggtacaggcactgtgtttatggctaaacattacaaaggacctgaaccagaagctgcggataatgggaacggtgctgggcataaaaaacctgagtgatattgggtggccggtgttcgaaataccctctcctcggcccagcaaggggaatgagcctgagtacgagggggacgacaccgagggagagctgaaggaactggagtctagcactgacgaaagcgaagaagaacagatctccgatcctcgcgtgcccgaaataaggcagcccatcgacaacagcttcgatattcagagtcgcgattgtatttccaagaagcttgagaggctggagagtgaagatgactccctgggttggggggcacctgactggagcacagaggctggcttttctagacactgcctaacatccatctacaggcctttcgttgataaggccctgaagcagatgggactgcgcaaactgatcctccgtctgcacaagctgatggacggcagcctccaaagagcccgcattgctctcgtgaaaaatgatagacccgttgaattctccgagttcccggacccaatgtggggatctgactatgtccagctatctaggactccacccagcagtgaggaaaaatgttcagccgtttcctgggaggagctaaaggctatggaccttcctagcttcgagccggccttcctcgtgctctgccgcgtgctgctgaacgttattcacgagtgcctaaaattgcgcctggagcagagacctgctggcgaacccagcctactgagcatcaaacagctggtgcgggagtgcaaagaagtgctgaagggcggccttcttatgaaacagtactatcagtttatgctgcaggaggtgttggaggacctcgaaaagccagactgcaacatagacgcgttcgaagaagacctgcacaagatgctgatggtttacttcgattatatgcgctcctggatccagatgctacagcagctgccacaggcaagtcactcactaaaaaacttgcttgaagaagagtggaatttcaccaaagagattacacattacattagagggggcgaagcacaagccggaaagcttttttgtgacatcgccggcatgcttctaaagtccacaggaagtttcctcgaatttggccttcaggaaagctgtgcagaattttggacatccgcagacgactctagtgcatcggatgagattagacggtccgtgatagaaatttcccgtgccctgaaagagttatttcatgaggcaagggagcgggctagtaaagccctggggttcgctaagatgcttaggaaggacctcgagatcgccgcggagtttagactctcagctccagttcgagatctgctcgacgtgctgaaaagtaaacagtatgtgaaagtgcagatcccaggattggaaaatttacagatgttcgtgcctgatactctggcagaggaaaaaagcatcatactgcagctgttaaacgccgctgcggggaaggactgctccaaggactcagacgatgttctaattgacgcttatctgctgttaaccaagcacggcgaccgggccagggacagcgaggactcctggggcacatgggaggctcaacctgtgaaagtcgtacctcaggtggaaacagtggacacgctccgaagcatgcaggtcgacaatctattgcttgtggtgatgcagtccgcccacctgactattcagcggaaggcatttcagcagtctattgaggggctcatgacgctgtgtcaagagcaaacatcttcccagcctgtcattgctaaagccctgcaacagctgaagaatgatgcccttgagctgtgtaaccggattagcaacgccattgaccgcgtggatcatatgttcacctccgaattcgatgcagaagtcgatgagagtgaaagtgtcactctgcagcagtattaccgggaggctatgatccagggttacaatttcgggtttgaataccacaaggaggtcgttcggcttatgagtggcgagttccggcagaagataggcgataagtatatctcctttgcccgcaagtggatgaattacgtcctgaccaagtgtgagtctggacgcggcacgcgacctcgctgggctactcagggttttgattttctacaggctatagaacctgcctttatatcagccttgcctgaggacgacttcctgtctctgcaggcactcatgaatgagtgcatcggacacgttatcggcaagccacacagccccgttacaggcttatatctggcaatacatagaaactcaccacgaccaatgaaagtccctcgatgtcattccgatcctccaaacccgcacttaatcattcccactcctgagggtttccgcggaagctccgtccccgaaaatgacagacttgcctctatcgctgcggagctgcagtttcgcagcctaagccggcactcttctccgactgaagagcgggacgagcctgcttacccacgcggcgatagtagtggatccacacggaggagctgggagctgcgcactttgatcagccagtcaaaggataccgcttcaaagctgggccctatcgaagcgatccagaagagtgtccggttattcgaggaaaaaagatacagagaaatgagacgcaagaatattataggacaggtgtgcgataccccaaagtcttacgataacgtcatgcacgtaggattaagaaaggtgacctttaaatggcagaggggtaataaaatcggagaaggacagtacggaaaagtctacacttgcatttctgtggataccggggaactgatggccatgaaagagataagatttcaacccaatgatcataaaaccattaaagagacagccgatgagctgaagatctttgaggggataaaacaccccaacctggttcgatattttggtgtcgagcttcacagagaagagatgtacatcttcatggaatactgtgatgagggtactctggaggaagtgagtaggctgggtttacaggaacacgtgatccggctttacagtaagcagatcaccatcgctatcaatgtactccacgagcatgggatagtgcacagggacatcaagggtgccaacatttttcttaccagcagcggcctgatcaagctgggtgactttgggtgtagcgttaagttgaaaaacaacgcccagacaatgcccggcgaggttaactccaccctggggactgctgcctacatggcccctgaagtgataactcgcgcaaagggagagggacatggccgagccgccgacatctggtccctgggatgcgtcgtgattgagatggttacaggaaaaatctgcaaggacaccgaatag

SEQ ID NO: 167368 - DNA, 4677 bp, Artificial Sequence
  derived and/or modified sequence
atgagggaggccgccgccgccctggtgcccccaccagcctttgctgtgaccccagctgctgccatggaggagcccccacctcctcctcctcctcctcctcctcctcctgagcctgagacagagagcgagcctgagtgctgcctggccgcccggcaggagggcaccctgggggacagcgcctgcaagagccctgagagtgacctggaggacttcagtgatgagaccaacacagagaacctgtatggcaccagcccccccagcaccccccggcagatgaagaggatgagcaccaagcaccagagaaataatgtgggccgcccagccagccgcagcaacctgaaggagaagatgaatgcccccaaccagcccccccacaaggacaccgggaagacagtggagaatgtggaggagtacagctacaagcaggagaagaagatccgggccgccctgcggaccacagagcgggacaggaagaagaatgtgcagtgcagcttcatgctggacagcgtgggcggcagcctgcccaagaagagcatcccagatgtggacctgaacaagccctacctgagcctgggctgcagcaatgccaagctgcctgtgtctgtgcccatgcccatcgcccggcctgcccggcagaccagcaggacagactgcccagctgaccggctgaagttctttgagaccctgcggctgctgctgaagctgacctctgtgtccaagaagaaggaccgggagcagaggggccaggagaacaccagcggcttctggctgaacagaagcaatgaactcatctggctggagctgcaggcctggcatgctggccgcaccatcaatgaccaggacttcttcctgtacacagcccggcaggccatcccagacatcatcaatgagatcctgaccttcaaggtggactatggcagctttgcctttgtgcgggacagagctggcttcaacggcacctctgtggagggccagtgcaaggccaccccaggcaccaagatcgtgggctacagcacccaccacgagcacctgcagaggcagagggtgtcctttgagcaggtgaagaggatcatggagctgctggagtacatcgaggccctgtaccccagcctgcaggccctgcagaaggactatgagaagtatgctgccaaggacttccaggacagagtgcaggccctgtgcctgtggctgaacatcaccaaggacctgaaccagaagctgcgcatcatgggcaccgtgctgggcatcaagaacctgagtgacatcggctggcctgtgtttgagatccccagcccccggcccagcaaaggaaatgaaccagaatatgaaggagatgacacagaaggagagctgaaggagctggagagcagcacagatgaaagtgaggaggagcagatcagtgacccccgggtgcctgagatccggcagcccatcgacaacagctttgacatccagagccgggactgcatcagcaagaagctggagcggctggagagtgaagatgacagcctgggctggggcgccccagactggagcacagaagctggcttcagccgccactgcctgaccagcatctaccggccctttgtggacaaggccctgaagcagatgggcctgaggaagctgatcctgcggctgcacaagctgatggatggcagcctgcagagggccagaattgccctggtgaagaatgacaggcctgtggagttcagcgagttcccagaccccatgtggggcagtgactatgtgcagctgagcaggaccccacccagcagcgaggagaagtgcagcgctgtgtcctgggaggagctgaaggccatggacctgcccagctttgagcccgccttcctggtgctgtgccgggtgctgctgaatgtcatccatgaatgtctgaagctgcggctggagcagaggcctgctggggagcccagcctgctgagcatcaagcagctggtgcgggagtgcaaggaggtgctgaagggcggcctgctgatgaagcagtactaccagttcatgctgcaggaggtgctggaggacctggagaagccagactgcaacattgatgcctttgaggaggacctgcacaagatgctgatggtgtactttgactacatgaggtcctggatccagatgctgcagcagctgccccaggccagccacagcctgaagaacctgctggaggaggagtggaacttcaccaaggagatcacccactacatccggggcggggaggcccaggccggcaagctgttctgtgacattgctggcatgctgctgaagagcacaggcagcttcctggagtttggcctgcaggagagctgtgccgagttctggaccagcgcagatgacagcagcgccagtgatgagatcagaagatctgtgattgagatcagccgggccctgaaggagctgttccacgaggcccgggagcgggccagcaaggccctgggctttgccaagatgctgaggaaggacctggagattgctgctgagttccggctgagcgcccctgtgcgggacctgctggatgtgctgaagagcaagcagtatgtgaaggtgcagatccctggcctggagaacctgcagatgtttgtgcctgacaccctggccgaggagaagagcatcatcctgcagctgctgaatgctgctgctgggaaggactgcagcaaggacagtgatgatgtgctgattgatgcctacctgctgctgaccaagcacggggaccgggcccgggacagcgaggacagctggggcacctgggaggcccagcctgtgaaggtggtgccccaggtggagaccgtggacaccctgcgctccatgcaggtggacaacctgctgctggtggtgatgcagagcgcccacctgaccatccagaggaaggccttccagcagagcattgagggcctgatgaccctgtgccaggagcagaccagcagccagcctgtgattgccaaggccctgcagcagctgaagaatgatgccctggagctgtgcaaccgcatcagcaatgccatcgacagagtggaccacatgttcaccagcgagtttgatgctgaggtggatgaaagtgaatctgtgaccctgcagcagtactaccgggaggccatgatccagggctacaactttggatttgagtaccacaaggaggtggtgcggctgatgtctggagagttccggcagaagatcggggacaagtacatcagctttgccaggaagtggatgaactacgtgctgaccaagtgtgagagcggccggggcacccggccccgctgggccacccagggctttgacttcctgcaggccatcgagcccgccttcatcagcgccctgcctgaagatgacttcctgagcctgcaggccctgatgaatgaatgcatcggccacgtgattggcaagccccacagccctgtgacaggcctgtacctggccatccacaggaacagcccccggcccatgaaggtgccccgctgccacagcgacccccccaacccccacctgatcatccccaccccagagggcttccggggcagctctgtgcctgaaaatgaccggctggccagcattgctgctgagctgcagttccgcagcctgagccgccacagcagccccacagaggagagagatgagcccgcctaccccaggggggacagcagcggcagcacccggcgctcctgggagctgcggaccctcatcagccagagcaaggacacagccagcaagctgggccccatcgaggccatccagaagtctgtgcggctgtttgaggagaagcgctaccgggagatgaggaggaagaacatcatcggccaggtgtgtgacacccccaagagctatgacaacgtgatgcacgtgggcctgaggaaggtgaccttcaagtggcagaggggcaacaagattggagagggccagtatggcaaggtgtacacctgcatctctgtggacacaggagagctgatggccatgaaggagatccgcttccagcccaatgaccacaagaccatcaaggagacagcagatgagctgaagatctttgagggcatcaagcaccccaacctggtgcgctactttggagtggagctgcaccgggaggagatgtacatcttcatggagtactgtgatgagggcaccctggaggaggtgtcccggctgggcctgcaggagcacgtgatccggctgtacagcaagcagatcaccatcgccatcaacgtgctgcatgaacatggaattgtgcaccgggacatcaagggggccaacatcttcctgaccagcagcggcctcatcaagctgggggactttggctgcagcgtgaagctgaagaacaatgcccagaccatgcctggagaggtgaacagcaccctgggcacagctgcctacatggcccctgaggtgatcacccgggccaagggggagggccacggccgggctgctgacatctggagcctgggctgtgtggtgattgagatggtgacaggcaagaggccctggcatgaatatgagcacaacttccagatcatgtacaaggtgggcatgggccacaagccacccatccctgagcggctgagccctgagggcaaggacttcctgagccactgcctggagagtgaccccaagatgcgctggacagccagccagctgctggaccacagctttgtgaaggtgtgcacagatgaggagtag

SEQ ID NO: 167369 - DNA, 4497 bp, Artificial Sequence
  derived and/or modified sequence
atgagggaggccgccgccgccctggtgcccccaccagcctttgctgtgaccccagctgctgccatggaggagcccccacctcctcctcctcctcctcctcctcctcctgagcctgagacagagagcgagcctgagtgctgcctggccgcccggcaggagggcaccctgggggacagcgcctgcaagagccctgagagtgacctggaggacttcagtgatgagaccaacacagagaacctgtatggcaccagcccccccagcaccccccggcagatgaagaggatgagcaccaagcaccagagaaataatgtgggccgcccagccagccgcagcaacctgaaggagaagatgaatgcccccaaccagcccccccacaaggacaccgggaagacagtggagaatgtggaggagtacagctacaagcaggagaagaagatccgggccgccctgcggaccacagagcgggacaggaagaagaatgtgcagtgcagcttcatgctggacagcgtgggcggcagcctgcccaagaagagcatcccagatgtggacctgaacaagccctacctgagcctgggctgcagcaatgccaagctgcctgtgtctgtgcccatgcccatcgcccggcctgcccggcagaccagcaggacagactgcccagctgaccggctgaagttctttgagaccctgcggctgctgctgaagctgacctctgtgtccaagaagaaggaccgggagcagaggggccaggagaacaccagcggcttctggctgaacagaagcaatgaactcatctggctggagctgcaggcctggcatgctggccgcaccatcaatgaccaggacttcttcctgtacacagcccggcaggccatcccagacatcatcaatgagatcctgaccttcaaggtggactatggcagctttgcctttgtgcgggacagagctggcttcaacggcacctctgtggagggccagtgcaaggccaccccaggcaccaagatcgtgggctacagcacccaccacgagcacctgcagaggcagagggtgtcctttgagcaggtgaagaggatcatggagctgctggagtacatcgaggccctgtaccccagcctgcaggccctgcagaaggactatgagaagtatgctgccaaggacttccaggacagagtgcaggccctgtgcctgtggctgaacatcaccaaggacctgaaccagaagctgcgcatcatgggcaccgtgctgggcatcaagaacctgagtgacatcggctggcctgtgtttgagatccccagcccccggcccagcaaaggaaatgaaccagaatatgaaggagatgacacagaaggagagctgaaggagctggagagcagcacagatgaaagtgaggaggagcagatcagtgacccccgggtgcctgagatccggcagcccatcgacaacagctttgacatccagagccgggactgcatcagcaagaagctggagcggctggagagtgaagatgacagcctgggctggggcgccccagactggagcacagaagctggcttcagccgccactgcctgaccagcatctaccggccctttgtggacaaggccctgaagcagatgggcctgaggaagctgatcctgcggctgcacaagctgatggatggcagcctgcagagggccagaattgccctggtgaagaatgacaggcctgtggagttcagcgagttcccagaccccatgtggggcagtgactatgtgcagctgagcaggaccccacccagcagcgaggagaagtgcagcgctgtgtcctgggaggagctgaaggccatggacctgcccagctttgagcccgccttcctggtgctgtgccgggtgctgctgaatgtcatccatgaatgtctgaagctgcggctggagcagaggcctgctggggagcccagcctgctgagcatcaagcagctggtgcgggagtgcaaggaggtgctgaagggcggcctgctgatgaagcagtactaccagttcatgctgcaggaggtgctggaggacctggagaagccagactgcaacattgatgcctttgaggaggacctgcacaagatgctgatggtgtactttgactacatgaggtcctggatccagatgctgcagcagctgccccaggccagccacagcctgaagaacctgctggaggaggagtggaacttcaccaaggagatcacccactacatccggggcggggaggcccaggccggcaagctgttctgtgacattgctggcatgctgctgaagagcacaggcagcttcctggagtttggcctgcaggagagctgtgccgagttctggaccagcgcagatgacagcagcgccagtgatgagatcagaagatctgtgattgagatcagccgggccctgaaggagctgttccacgaggcccgggagcgggccagcaaggccctgggctttgccaagatgctgaggaaggacctggagattgctgctgagttccggctgagcgcccctgtgcgggacctgctggatgtgctgaagagcaagcagtatgtgaaggtgcagatccctggcctggagaacctgcagatgtttgtgcctgacaccctggccgaggagaagagcatcatcctgcagctgctgaatgctgctgctgggaaggactgcagcaaggacagtgatgatgtgctgattgatgcctacctgctgctgaccaagcacggggaccgggcccgggacagcgaggacagctggggcacctgggaggcccagcctgtgaaggtggtgccccaggtggagaccgtggacaccctgcgctccatgcaggtggacaacctgctgctggtggtgatgcagagcgcccacctgaccatccagaggaaggccttccagcagagcattgagggcctgatgaccctgtgccaggagcagaccagcagccagcctgtgattgccaaggccctgcagcagctgaagaatgatgccctggagctgtgcaaccgcatcagcaatgccatcgacagagtggaccacatgttcaccagcgagtttgatgctgaggtggatgaaagtgaatctgtgaccctgcagcagtactaccgggaggccatgatccagggctacaactttggatttgagtaccacaaggaggtggtgcggctgatgtctggagagttccggcagaagatcggggacaagtacatcagctttgccaggaagtggatgaactacgtgctgaccaagtgtgagagcggccggggcacccggccccgctgggccacccagggctttgacttcctgcaggccatcgagcccgccttcatcagcgccctgcctgaagatgacttcctgagcctgcaggccctgatgaatgaatgcatcggccacgtgattggcaagccccacagccctgtgacaggcctgtacctggccatccacaggaacagcccccggcccatgaaggtgccccgctgccacagcgacccccccaacccccacctgatcatccccaccccagagggcttccggggcagctctgtgcctgaaaatgaccggctggccagcattgctgctgagctgcagttccgcagcctgagccgccacagcagccccacagaggagagagatgagcccgcctaccccaggggggacagcagcggcagcacccggcgctcctgggagctgcggaccctcatcagccagagcaaggacacagccagcaagctgggccccatcgaggccatccagaagtctgtgcggctgtttgaggagaagcgctaccgggagatgaggaggaagaacatcatcggccaggtgtgtgacacccccaagagctatgacaacgtgatgcacgtgggcctgaggaaggtgaccttcaagtggcagaggggcaacaagattggagagggccagtatggcaaggtgtacacctgcatctctgtggacacaggagagctgatggccatgaaggagatccgcttccagcccaatgaccacaagaccatcaaggagacagcagatgagctgaagatctttgagggcatcaagcaccccaacctggtgcgctactttggagtggagctgcaccgggaggagatgtacatcttcatggagtactgtgatgagggcaccctggaggaggtgtcccggctgggcctgcaggagcacgtgatccggctgtacagcaagcagatcaccatcgccatcaacgtgctgcatgaacatggaattgtgcaccgggacatcaagggggccaacatcttcctgaccagcagcggcctcatcaagctgggggactttggctgcagcgtgaagctgaagaacaatgcccagaccatgcctggagaggtgaacagcaccctgggcacagctgcctacatggcccctgaggtgatcacccgggccaagggggagggccacggccgggctgctgacatctggagcctgggctgtgtggtgattgagatggtgacaggcaagatctgcaaggacacagaatag

SEQ ID NO: 167370 - DNA, 5397 bp, Artificial Sequence
  derived and/or modified sequence
gatctgggaggcttgtccctcgccgcccaccgtagccccggcgctcggccggtcgccgtttccaagatggccgcggcgcgcacggctcctgcggcggggtagaggcggaggcggagtcgagtcactcccgcacttcggggctccggtgccccgcgccaggctgcagcttactgcccgccgcggccatgcggggctccgtgcacggatgagagaagccgctgccgcgctggtccctcctcccgcctttgccgtcacgcctgccgccgccatggaggagccgccgccaccgccgccgccgccaccaccgccaccggaacccgagaccgagtcagaacccgagtgctgcttggcggcgaggcaagagggcacattgggagattcagcttgcaagagtcctgaatctgatctagaagacttctccgatgaaacaaatacagagaatctttatggtacctctccccccagcacacctcgacagatgaaacgcatgtcaaccaaacatcagaggaataatgtggggaggccagccagtcggtctaatttgaaagaaaaaatgaatgcaccaaatcagcctccacataaagacactggaaaaacagtggagaatgtggaagaatacagctataagcaggagaaaaagatccgagcagctcttagaacaacagagcgtgatcgtaaaaaaaatgtacagtgctcattcatgttagactcagtgggtggatctttgccaaaaaaatcaattccagatgtggatctcaataagccttacctcagccttggctgtagcaatgctaagcttccagtatctgtgcccatgcctatagccagacctgcacgccagacttctaggactgactgtccagcagatcgtttaaagttttttgaaactttacgacttttgctaaagcttacctcagtctcaaagaaaaaagacagggagcaaagaggacaagaaaatacgtctggtttctggcttaaccgatctaacgaactgatctggttagagctacaagcctggcatgcaggacggacaattaacgaccaggacttctttttatatacagcccgtcaagccatcccagatattattaatgaaatccttactttcaaagtcgactatgggagcttcgcctttgttagagatagagctggttttaatggtacttcagtagaagggcagtgcaaagccactcctggaacaaagattgtaggttactcaacacatcatgagcatctccaacgccagagggtctcatttgagcaggtaaaacggataatggagctgctagagtacatagaagcactttatccatcattgcaggctcttcagaaggactatgaaaaatatgctgcaaaagacttccaggacagggtgcaggcactctgtttgtggttaaacatcacaaaagacttaaatcagaaattaaggattatgggcactgttttgggcatcaagaatttatcagacattggctggccagtgtttgaaatcccttcccctcgaccatccaaaggtaatgagccggagtatgagggtgatgacacagaaggagaattaaaggagttggaaagtagtacggatgagagtgaagaagaacaaatctctgatcctagggtaccggaaatcagacagcccatagataacagcttcgacatccagtcgcgggactgcatatccaagaagcttgagaggctcgaatctgaggatgattctcttggctggggagcaccagactggagcacagaagcaggctttagtagacattgtctgacttctatttatagaccatttgtagacaaagcactgaagcagatggggttaagaaagttaattttaagacttcacaagctaatggatggttccttgcaaagggcacgtatagcattggtaaagaacgatcgtccagtggagttttctgaatttccagatcccatgtggggttcagattatgtgcagttgtcaaggacaccaccttcatctgaggagaaatgcagtgctgtgtcgtgggaggagctgaaggccatggatttaccttcattcgaacctgccttcctagttctctgccgagtccttctgaatgtcatacatgagtgtctgaagttaagattggagcagagacctgctggagaaccatctctcttgagtattaagcagctggtgagagagtgtaaggaggtcctgaagggcggcctgctgatgaagcagtactaccagttcatgctgcaggaggttctggaggacttggagaagcccgactgcaacattgacgcttttgaagaggatctacataaaatgcttatggtgtattttgattacatgagaagctggatccaaatgctacagcaattacctcaagcatcgcatagtttaaaaaatctgttagaagaagaatggaatttcaccaaagaaataactcattacatacggggaggagaagcacaggccgggaagcttttctgtgacattgcaggaatgctgctgaaatctacaggaagttttttagaatttggcttacaggagagctgtgctgaattttggactagtgcggatgacagcagtgcttccgacgaaatcaggaggtctgttatagagatcagtcgagccctgaaggagctcttccatgaagccagagaaagggcttccaaagcacttggatttgctaaaatgttgagaaaggacctggaaatagcagcagaattcaggctttcagccccagttagagacctcctggatgttctgaaatcaaaacagtatgtcaaggtgcaaattcctgggttagaaaacttgcaaatgtttgttccagacactcttgctgaggagaagagtattattttgcagttactcaatgcagctgcaggaaaggactgttcaaaagattcagatgacgtactcatcgatgcctatctgcttctgaccaagcacggtgatcgagcccgtgattcagaggacagctggggcacctgggaggcacagcctgtcaaagtcgtgcctcaggtggagactgttgacaccctgagaagcatgcaggtggataatcttttactagttgtcatgcagtctgcgcatctcacaattcagagaaaagctttccagcagtccattgagggacttatgactctgtgccaggagcagacatccagtcagccggtcatcgccaaagctttgcagcagctgaagaatgatgcattggagctatgcaacaggataagcaatgccattgaccgcgtggaccacatgttcacatcagaatttgatgctgaggttgatgaatctgaatctgtcaccttgcaacagtactaccgagaagcaatgattcaggggtacaattttggatttgagtatcataaagaagttgttcgtttgatgtctggggagtttagacagaagataggagacaaatatataagctttgcccggaagtggatgaattatgtcctgactaaatgtgagagtggtagaggtacaagacccaggtgggcgactcaaggatttgattttctacaagcaattgaacctgcctttatttcagctttaccagaagatgacttcttgagtttacaagccttgatgaatgaatgcattggccatgtcataggaaaaccacacagtcctgttacaggtttgtaccttgccattcatcggaacagcccccgtcctatgaaggtacctcgatgccatagtgaccctcctaacccacacctcattatccccactccagagggattcaggggttccagcgttcctgaaaatgatcgattggcttccatagctgctgaattgcagtttaggtccctgagtcgtcactcaagccccacggaggagcgagatgaaccagcatatccaagaggagattcaagtgggtccacaagaagaagttgggaacttcggacactaatcagccagagtaaagatactgcttctaaactaggacccatagaagctatccagaagtcagtccgattgtttgaagaaaagaggtaccgagaaatgaggagaaagaatatcattggtcaagtttgtgatacgcctaagtcctatgataatgttatgcacgttggcttgaggaaggtgaccttcaaatggcaaagaggaaacaaaattggagaaggccagtatgggaaggtgtacacctgcatcagcgtcgacaccggggagctgatggccatgaaagagattcgatttcaacctaatgaccataagactatcaaggaaactgcagacgaattgaaaatattcgaaggcatcaaacaccccaatctggttcggtattttggtgtggagctccatagagaagaaatgtacatcttcatggagtactgcgatgaggggactttagaagaggtgtcaaggctgggacttcaggaacatgtgattaggctgtattcaaagcagatcaccattgcgatcaacgtcctccatgagcatggcatagtccaccgtgacattaaaggtgccaatatcttccttacctcatctggattaatcaaactgggagattttggatgttcagtaaagctcaaaaacaatgcccagaccatgcctggtgaagtgaacagcaccctggggacagcagcatacatggcacctgaagtcatcactcgtgccaaaggagagggccatgggcgtgcggccgacatctggagtctggggtgtgttgtcatagagatggtgactggcaagaggccttggcatgagtatgagcacaactttcaaattatgtataaagtggggatgggacataagccaccaatccctgaaagattaagccctgaaggaaaggacttcctttctcactgccttgagagtgacccaaagatgagatggaccgccagccagctcctcgaccattcgtttgtcaaggtttgcacagatgaagaatgaagcctagtagaatatggacttggaaaattctcttaatcactactgtatgtaatatttacataaagactgtgctgagaagcagtataagcctttttaaccttccaagactgaagactgcacaggtgacaagcgtcacttctcctgctgctcctgtttgtctgatgtggcaaaaggccctctggagggctggtggccacgaggttaaagaagctgcatgttaagtgccattactactgtacacggaccatcgcctctgtctcctccgtgtctcgcgcgactgagaaccgtgacatcagcgtagtgttttgacctttctaggttcaaaagaagttgtagtgttatcaggcgtcccataccttgtttttaatctcctgtttgttgagtgcactgactgtgaaacctttaccttttttgttgttgttggcaagctgcaggtttgtaatgcaaaaggctgattactgaaatttaagaaaaaggttcttttttcaataaatggtttattttaggaaagctca

SEQ ID NO: 167371 - DNA, 4636 bp, Artificial Sequence
  derived and/or modified sequence
aagatggccgcggcgcgcacggctcctgcggcggggtagaggcggaggcggagtcgagtcactcccgcacttcggggctccggtgccccgcgccaggctgcagcttactgcccgccgcggccatgcggggctccgtgcacggatgagagaagccgctgccgcgctggtccctcctcccgcctttgccgtcacgcctgccgccgccatggaggagccgccgccaccgccgccgccgccaccaccgccaccggaacccgagaccgagtcagaacccgagtgctgcttggcggcgaggcaagagggcacattgggagattcagcttgcaagagtcctgaatctgatctagaagacttctccgatgaaacaaatacagagaatctttatggtacctctccccccagcacacctcgacagatgaaacgcatgtcaaccaaacatcagaggaataatgtggggaggccagccagtcggtctaatttgaaagaaaaaatgaatgcaccaaatcagcctccacataaagacactggaaaaacagtggagaatgtggaagaatacagctataagcaggagaaaaagatccgagcagctcttagaacaacagagcgtgatcgtaaaaaaaatgtacagtgctcattcatgttagactcagtgggtggatctttgccaaaaaaatcaattccagatgtggatctcaataagccttacctcagccttggctgtagcaatgctaagcttccagtatctgtgcccatgcctatagccagacctgcacgccagacttctaggactgactgtccagcagatcgtttaaagttttttgaaactttacgacttttgctaaagcttacctcagtctcaaagaaaaaagacagggagcaaagaggacaagaaaatacgtctggtttctggcttaaccgatctaacgaactgatctggttagagctacaagcctggcatgcaggacggacaattaacgaccaggacttctttttatatacagcccgtcaagccatcccagatattattaatgaaatccttactttcaaagtcgactatgggagcttcgcctttgttagagatagagctggttttaatggtacttcagtagaagggcagtgcaaagccactcctggaacaaagattgtaggttactcaacacatcatgagcatctccaacgccagagggtctcatttgagcaggtaaaacggataatggagctgctagagtacatagaagcactttatccatcattgcaggctcttcagaaggactatgaaaaatatgctgcaaaagacttccaggacagggtgcaggcactctgtttgtggttaaacatcacaaaagacttaaatcagaaattaaggattatgggcactgttttgggcatcaagaatttatcagacattggctggccagtgtttgaaatcccttcccctcgaccatccaaaggtaatgagccggagtatgagggtgatgacacagaaggagaattaaaggagttggaaagtagtacggatgagagtgaagaagaacaaatctctgatcctagggtaccggaaatcagacagcccatagataacagcttcgacatccagtcgcgggactgcatatccaagaagcttgagaggctcgaatctgaggatgattctcttggctggggagcaccagactggagcacagaagcaggctttagtagacattgtctgacttctatttatagaccatttgtagacaaagcactgaagcagatggggttaagaaagttaattttaagacttcacaagctaatggatggttccttgcaaagggcacgtatagcattggtaaagaacgatcgtccagtggagttttctgaatttccagatcccatgtggggttcagattatgtgcagttgtcaaggacaccaccttcatctgaggagaaatgcagtgctgtgtcgtgggaggagctgaaggccatggatttaccttcattcgaacctgccttcctagttctctgccgagtccttctgaatgtcatacatgagtgtctgaagttaagattggagcagagacctgctggagaaccatctctcttgagtattaagcagctggtgagagagtgtaaggaggtcctgaagggcggcctgctgatgaagcagtactaccagttcatgctgcaggaggttctggaggacttggagaagcccgactgcaacattgacgcttttgaagaggatctacataaaatgcttatggtgtattttgattacatgagaagctggatccaaatgctacagcaattacctcaagcatcgcatagtttaaaaaatctgttagaagaagaatggaatttcaccaaagaaataactcattacatacggggaggagaagcacaggccgggaagcttttctgtgacattgcaggaatgctgctgaaatctacaggaagttttttagaatttggcttacaggagagctgtgctgaattttggactagtgcggatgacagcagtgcttccgacgaaatcaggaggtctgttatagagatcagtcgagccctgaaggagctcttccatgaagccagagaaagggcttccaaagcacttggatttgctaaaatgttgagaaaggacctggaaatagcagcagaattcaggctttcagccccagttagagacctcctggatgttctgaaatcaaaacagtatgtcaaggtgcaaattcctgggttagaaaacttgcaaatgtttgttccagacactcttgctgaggagaagagtattattttgcagttactcaatgcagctgcaggaaaggactgttcaaaagattcagatgacgtactcatcgatgcctatctgcttctgaccaagcacggtgatcgagcccgtgattcagaggacagctggggcacctgggaggcacagcctgtcaaagtcgtgcctcaggtggagactgttgacaccctgagaagcatgcaggtggataatcttttactagttgtcatgcagtctgcgcatctcacaattcagagaaaagctttccagcagtccattgagggacttatgactctgtgccaggagcagacatccagtcagccggtcatcgccaaagctttgcagcagctgaagaatgatgcattggagctatgcaacaggataagcaatgccattgaccgcgtggaccacatgttcacatcagaatttgatgctgaggttgatgaatctgaatctgtcaccttgcaacagtactaccgagaagcaatgattcaggggtacaattttggatttgagtatcataaagaagttgttcgtttgatgtctggggagtttagacagaagataggagacaaatatataagctttgcccggaagtggatgaattatgtcctgactaaatgtgagagtggtagaggtacaagacccaggtgggcgactcaaggatttgattttctacaagcaattgaacctgcctttatttcagctttaccagaagatgacttcttgagtttacaagccttgatgaatgaatgcattggccatgtcataggaaaaccacacagtcctgttacaggtttgtaccttgccattcatcggaacagcccccgtcctatgaaggtacctcgatgccatagtgaccctcctaacccacacctcattatccccactccagagggattcaggggttccagcgttcctgaaaatgatcgattggcttccatagctgctgaattgcagtttaggtccctgagtcgtcactcaagccccacggaggagcgagatgaaccagcatatccaagaggagattcaagtgggtccacaagaagaagttgggaacttcggacactaatcagccagagtaaagatactgcttctaaactaggacccatagaagctatccagaagtcagtccgattgtttgaagaaaagaggtaccgagaaatgaggagaaagaatatcattggtcaagtttgtgatacgcctaagtcctatgataatgttatgcacgttggcttgaggaaggtgaccttcaaatggcaaagaggaaacaaaattggagaaggccagtatgggaaggtgtacacctgcatcagcgtcgacaccggggagctgatggccatgaaagagattcgatttcaacctaatgaccataagactatcaaggaaactgcagacgaattgaaaatattcgaaggcatcaaacaccccaatctggttcggtattttggtgtggagctccatagagaagaaatgtacatcttcatggagtactgcgatgaggggactttagaagaggtgtcaaggctgggacttcaggaacatgtgattaggctgtattcaaagcagatcaccattgcgatcaacgtcctccatgagcatggcatagtccaccgtgacattaaaggtgccaatatcttccttacctcatctggattaatcaaactgggagattttggatgttcagtaaagctcaaaaacaatgcccagaccatgcctggtgaagtgaacagcaccctggggacagcagcatacatggcacctgaagtcatcactcgtgccaaaggagagggccatgggcgtgcggccgacatctggagtctggggtgtgttgtcatagagatggtgactggcaagatctgcaaagatacagag

SEQ ID NO: 167372 - DNA, 4677 bp, Artificial Sequence
  derived and/or modified sequence
atgcgggaggccgccgccgccctggtgcccccccccgccttcgccgtaacaccagccgccgccatggaggagcctccacccccccctccccctccaccccctccgcctgaaccagagaccgaatcagagcccgagtgctgcttagctgccagacaggaggggaccctgggcgacagcgcatgcaaatcacccgagtctgacctggaagattttagtgacgaaactaatactgaaaatctgtatggtacatctcccccatccactccccgccagatgaagaggatgagtaccaagcaccaaaggaataatgtgggcaggcctgcttcacgttccaatctgaaagagaagatgaacgccccaaaccagccaccccacaaagataccggaaagaccgtggagaacgtggaagagtacagttacaagcaagaaaaaaaaatccgggctgccctccgcaccacagagcgcgatcgcaagaagaacgtccagtgcagctttatgctcgactcagtgggcggaagcctgccaaaaaaatcaataccagatgtggatttgaataagccctacctgagccttggatgctctaatgctaagttgcctgtaagtgtgcccatgccaattgcgagacccgcaagacaaacaagtagaacagactgtcccgctgaccgcttgaaattcttcgagacgctgagattgttgctgaaattgacgtctgtgtccaaaaaaaaggatagagaacaaagggggcaggaaaatactagcggtttttggctgaatagatctaacgagttgatctggctggaactccaggcttggcatgccgggcgtaccatcaacgaccaggacttctttctctataccgcaagacaagccatccctgatattatcaacgagatcctgacatttaaggtcgattacggtagctttgccttcgttagggacagggctggcttcaacggcacctccgttgagggccagtgcaaagctacccctggtaccaagatagtgggatactctacccaccatgaacacctccagcggcagcgtgtgtcctttgagcaggtgaaacggatcatggaactactcgaatatattgaagcactctacccgagtcttcaagccctgcagaaggactacgagaagtatgcagcaaaagattttcaggaccgggtgcaggccctctgcctttggctcaatatcacaaaggacctgaatcaaaagctgcgcatcatgggtactgtgcttggcattaagaacttatcagatattggctggccagtgtttgaaatcccatccccaaggccaagtaaggggaacgaacccgagtatgagggggatgacactgagggtgagcttaaggaactcgaatccagcaccgacgagtcagaggaggagcagatcagtgatcctcgagtgcccgagattcggcagccaattgacaacagttttgatatacagagccgggactgtattagtaaaaagcttgaaaggctggagagcgaggacgatagtctggggtggggcgctcctgactggagtacagaagcaggattcagtcgccattgcttaacatctatatatagaccattcgtggacaaggccttgaagcaaatggggctgcggaaactcatacttaggctacataagttgatggacggaagtctccagagagctcggatcgccttggttaagaacgatcgccccgtggaatttagtgagtttccggaccctatgtgggggagcgattacgtgcagctgtcccgtaccccaccatcatctgaagaaaagtgctcggccgtgtcttgggaggagttgaaagccatggatctcccaagttttgaacccgctttcctggtgctctgcagagtattgctgaacgtgatacacgagtgtctcaaactcagactcgaacaaagacccgccggagagccctcactcctgagcataaaacagctggtgagggaatgcaaggaggtgttgaagggtgggctcctaatgaaacagtattaccagttcatgttgcaagaggtactagaggacctggagaaacccgattgtaacattgacgccttcgaagaagatctacataagatgttgatggtgtattttgactacatgaggtcctggatccagatgctccaacagctccctcaagcctcacacagcctaaaaaatttgctcgaggaggagtggaactttaccaaagagatcactcactacattagaggaggagaggcgcaggccggaaaactgttctgcgatattgcgggcatgcttctgaaatctaccggctctttcctcgaatttggactgcaggaatcttgcgccgagttttggacatccgccgatgactcatctgcctccgatgaaatcagaagaagcgtaattgaaatctccagggcacttaaagagctttttcatgaagctcgcgagcgggcaagcaaagctctcgggtttgctaaaatgctgcggaaggatctcgaaatcgctgccgaatttagactttcagcccctgtgagggaccttctggacgtcctgaaatctaagcagtacgtgaaggtccagattcccggtcttgagaacctgcagatgtttgtacccgacacactcgccgaggaaaaaagtatcatcctccagttgctgaatgcggccgctggtaaggattgctccaaagattccgatgatgtattgattgacgcctacctcctgctgacaaagcacggagatagggcacgcgatagcgaggactcctgggggacctgggaggctcagcctgtaaaagtggtcccacaagtggaaacagttgacactttgagatcaatgcaggtggacaaccttctccttgtggttatgcagtcggcccatctgaccattcagagaaaggcattccagcagtcaatcgaaggtctgatgaccctgtgccaggaacagactagttcgcaacccgtgattgccaaggcccttcaacagctgaagaatgatgccctggagctctgtaacaggatctctaacgccattgatcgggtggaccatatgttcacgagcgaattcgacgccgaagtggacgaatcagaatcggttaccttgcagcaatattacagggaggcgatgatccagggctacaatttcggatttgagtatcataaagaagtggtacgtctgatgtctggtgagtttaggcagaagatcggtgacaagtacatctcctttgcacgcaagtggatgaactatgtgctgactaaatgtgagtctgggagaggaactaggccacggtgggccacacagggtttcgattttctccaagccatcgaacctgcattcatcagcgcactcccagaagatgatttcctatcactgcaggcccttatgaacgaatgcataggccacgttattgggaagcctcattcccccgtgacaggcttgtatctagccattcacagaaattcaccaaggcccatgaaagtgccccggtgtcactctgatcctccaaatcctcatcttatcattccgacgccagagggcttcagggggagttccgtgccagagaacgaccgcttggcatccatcgccgccgagctgcagtttcgctctctgtctaggcattcttctcccacagaagaacgggatgagccagcttaccctcgcggagattctagcggtagcacacggagatcctgggagctgcgcacacttataagtcagtccaaagacaccgcttccaagctgggccctatagaagctatacagaagtctgtccggctgttcgaagagaaacgctatcgggagatgaggcggaaaaacattattggacaagtgtgtgatacgcctaagagttacgataatgtcatgcacgtcggccttcgcaaggtaacatttaaatggcagcgggggaataagatcggggagggtcaatacggaaaggtgtatacctgcatcagtgtggacacaggcgagctgatggccatgaaagagattcgattccagccaaatgaccacaagactatcaaggagactgcggatgagctcaaaatcttcgagggcatcaaacaccctaaccttgtgcgctacttcggcgtagaactgcacagagaggagatgtacatctttatggagtactgcgatgagggtacactggaggaagtgagtcgcctggggctccaggaacatgtgataagactctattcgaagcaaattacgatcgcaattaacgtcctccacgaacatgggatcgtgcacagagacatcaaaggagctaacatctttctcacctctagtggactgataaaactaggcgacttcgggtgctcagtcaagctgaagaacaacgctcaaacaatgcctggggaggtgaacagtacgctcggcaccgccgcttatatggcaccagaagtcatcacccgggcaaaaggagagggccatggtcgcgcagctgacatctggagtctgggatgtgtggtcatcgaaatggtcacggggaaacggccttggcacgaatacgagcacaattttcaaattatgtataaagttggtatgggccacaaaccaccaatccccgaaagattaagtcccgaggggaaggattttcttagccattgtttagaatcagatcctaagatgcgctggaccgctagtcagcttctggatcactcctttgtcaaagtgtgcacagacgaggaatag

SEQ ID NO: 167373 - DNA, 4497 bp, Artificial Sequence
  derived and/or modified sequence
atgcgggaggccgccgccgccctggtgcccccccccgccttcgccgtgacgcccgccgcggctatggaggagccccccccgcctcctccaccgcctcctcctccccctgagccagagacagagtctgaacctgaatgttgcctggcagcacgacaggaaggaaccttaggagactctgcttgcaaatctccagaaagcgacctggaggatttttcagacgagacaaacacagagaatctgtacggcaccagccctccatcaactccacgacagatgaaacgaatgtcaacgaaacatcagagaaacaacgtgggccgccccgctagtcggagcaatctcaaggaaaaaatgaacgccccaaatcagccaccgcacaaggacactggaaaaactgtagaaaacgtagaagaatattcctacaagcaggaaaagaagatcagagctgcgctcagaacgaccgagagggataggaaaaaaaatgtccaatgctcctttatgttagactcagtgggaggcagtctcccaaaaaaaagcattcccgacgtggatctcaataagccttatttgtcccttggatgcagcaatgccaagctccccgtgtccgtccccatgccgatcgctaggccagcccggcagacttctcgcaccgactgtccggcagacaggcttaagtttttcgaaaccctgcgcttgctgttgaaactcaccagcgtgtcgaagaaaaaggatcgggagcaaagagggcaggaaaacactagcggcttctggcttaacagatctaatgaattgatttggttagaactgcaggcctggcacgccggccgtactattaatgaccaagacttctttttatataccgcacggcaggcaattcctgacattattaacgaaatcctcacctttaaggtcgactacggcagcttcgcattcgtgcgggaccgcgcgggattcaacggcacctccgttgaaggtcagtgtaaggccactcctgggacaaagattgtgggctacagcactcatcacgagcacctgcagcgccaacgggtctccttcgagcaagttaagcgcatcatggaattattggagtatattgaggctttgtaccccagcttgcaggccctacagaaagactatgaaaagtatgctgccaaggattttcaagatcgtgtgcaggccttgtgcctgtggttaaacatcacaaaggatctaaatcagaagttacgcatcatggggacggtgctaggcatcaaaaacctttcggacattgggtggcctgtgttcgaaataccaagcccaagaccatcaaaaggcaacgaacctgagtatgaaggcgacgacaccgagggcgagctgaaagagctggagagctcaactgacgagagcgaggaggaacaaataagcgacccaagagtgcccgagatccggcagccaatcgataattcgttcgatatccagtctagggactgcatttcaaaaaagctggagcgactggaatccgaggatgattctttgggatggggcgcgcctgactggtccaccgaagcaggattctctagacactgtctgacgagcatctatcgccccttcgtggacaaggcactcaagcagatgggactgaggaagcttattctcagactgcataagctgatggacggatctctccaacgggctaggatcgcactcgtgaagaatgaccgccccgtggagttctctgaattccccgatcccatgtgggggtcagactatgtgcagcttagcagaaccccccccagcagtgaggaaaagtgctcagcagttagttgggaagagttgaaggctatggatctgccaagcttcgagccagcatttctcgtcctctgccgagttctcctgaacgtgattcacgaatgtttaaaacttcgtctggagcagagaccagccggagaacctagtctgctgtctattaaacagctggtgagagagtgcaaggaagtgctcaagggtggcctgctcatgaaacagtattatcagttcatgctccaggaggttctggaggacctcgagaagccggattgtaacatcgatgccttcgaggaagatctgcacaaaatgctcatggtgtatttcgactatatgcggagttggatccaaatgcttcagcaattgcctcaggcaagtcactctctgaagaatctgctcgaggaggagtggaactttaccaaggagataacgcactacatcagaggtggcgaggcccaggccggcaagctgttctgtgacatcgctgggatgctcctgaaaagcacaggatcctttctggaattcggattgcaggaatcttgcgctgagttctggacaagcgcagatgactcatccgcatctgatgagatccgccgttcagtcatcgagatatccagggcgttaaaggagttgttccacgaggcacgcgagagagcttccaaagcactgggcttcgcaaaaatgttgcgcaaagacctggagatagcagcagagtttcgactctcggccccagtaagggatttgctcgacgtgctcaaatcgaaacagtacgtgaaagtccagatacctggcttagagaatcttcagatgttcgttcctgacacattagcagaagagaaatccatcattttgcagctgttaaatgccgccgccggcaaggactgttccaaagatagcgatgacgtcctgattgatgcctatctgctcctgaccaaacacggtgaccgggcgcgcgactccgaagatagttggggaacgtgggaagcccagcctgtgaaggttgtgccacaggtagagaccgttgacactctgcgaagtatgcaggtggataacctcctgctggtggtgatgcagagcgctcatcttacgatacaaagaaaggctttccagcagagtattgaagggctaatgacgctgtgccaggaacagacttcctctcaacctgtgatagcaaaggctttgcagcaattgaaaaacgacgcattagagctctgcaaccgcatctccaacgccattgatagagtagatcatatgtttacctcagagtttgatgcagaggtcgacgagtcagagagcgtcaccctccagcagtattatagggaggctatgatccaaggatacaatttcggcttcgagtatcacaaagaggtggtccggcttatgagcggcgagtttcgtcagaagatcggggataagtatatttcctttgcaagaaagtggatgaactatgtgctgaccaagtgtgagtcgggaaggggaacgcgcccaaggtgggctactcagggcttcgatttcctccaagcaattgaacccgctttcatttccgccctccccgaggatgatttcctgagtttacaggccctgatgaacgaatgcatcggccacgttattggaaagccccatagtccggtcacaggcctctatctggcgatccatagaaactctccccgccccatgaaagtacctcgctgccactcagatccacccaaccctcatttaatcatcccaactcctgagggttttagaggaagttctgtgcctgaaaacgatcgactggctagcatcgccgccgagctccagtttaggagtctgtcccggcacagcagccctaccgaggagcgggacgagcccgcttatcccagaggagatagctccggcagcacccgacgttcctgggaactgagaaccctaatcagccagtccaaggacacagcctctaaactgggtcctatcgaggcaattcagaaatcagtacggctgttcgaagagaagaggtaccgcgagatgcgcaggaaaaatattatcggacaagtatgcgatactccaaagtcatatgacaacgttatgcacgtcggactgaggaaagttacctttaagtggcaacgaggcaacaaaattggggagggacagtatggcaaggtgtatacatgcattagtgtcgataccggggagctgatggctatgaaagagatccggtttcagcccaacgaccacaagactattaaagagacggccgatgaacttaaaatattcgagggaataaaacaccccaacctggtgcgatacttcggagtcgagctgcatagggaagagatgtatatattcatggagtactgcgatgaaggaacgctggaggaagtgtcacggcttggtttacaggagcatgtaatccggttgtattctaaacagataaccatcgcgatcaacgtgctccatgaacacgggattgtgcatagagatatcaaaggtgcaaacatctttttaacctccagcggactgattaagctcggcgactttgggtgctcagtgaaattgaagaataacgcacagaccatgcccggtgaagtgaactctacgctgggtactgccgcttacatggccccggaggtcatcacaagggctaagggcgagggacacggaagggcagcagatatttggtctcttggctgtgtggtaattgagatggttacggggaaaatctgcaaggacactgaatag

SEQ ID NO: 167374 - DNA, 4677 bp, Artificial Sequence
  derived and/or modified sequence
atgagagaagcagcggctgctctcgtcccccctcctgctttcgctgtaacccctgccgcagcaatggaggagcctcctcctccaccccctccccctcctccgcctccggaacctgaaactgaatcagaacccgaatgctgtctcgcagcgagacaggagggcacacttggtgactcagcgtgtaagtcccctgagtcagacctggaagatttcagtgatgaaaccaataccgaaaacctctatggcacgtcccctccttcaacaccacgccagatgaagaggatgtcaacaaagcaccagcgtaataatgtgggccgtccggcatccaggtccaatcttaaagagaaaatgaatgcacccaaccagccgccacataaggacactgggaaaactgtcgagaatgtggaagaatacagctacaagcaggaaaagaaaatccgcgcagcgctgagaactaccgagagggataggaagaaaaacgtgcagtgcagctttatgctcgatagtgtgggcggtagccttccaaaaaaatctattccggacgtcgacctgaacaaaccctacttgagcctgggatgcagcaatgcaaagttgcccgtgtccgtacctatgcccatcgcccgacccgctcgacaaacctccaggacagactgtcccgcagacaggctgaagtttttcgaaacacttcggctacttctgaagttaacctctgtgtcgaaaaagaaagatcgtgaacagagggggcaggaaaacacatccgggttctggttgaataggagtaacgagctgatttggttagaactgcaggcttggcacgccggaaggacaatcaatgatcaagattttttcttatatacagccagacaggcaatccccgacattataaatgaaattcttacattcaaagtcgattacggtagtttcgcttttgtgagggatcgggcaggctttaatggtacatcggtcgaaggtcagtgcaaggcaacccccggtaccaagattgtcggctactcgacacatcacgaacatctccagagacagcgtgtgtcctttgagcaggtgaaaaggatcatggaactgctggagtatattgaggccctgtatccgagtttacaggccctgcagaaggattacgagaaatacgctgcaaaagacttccaggaccgggttcaggccctttgtttatggttaaatatcactaaagacctgaaccaaaaattgcgtattatgggtacagtccttgggatcaagaacttgtccgatatcggatggcctgtgttcgagattccctcccctaggcccagcaagggaaatgaacccgagtacgagggagacgacaccgagggagaactcaaggagctggagtcttctactgacgagtccgaagaagagcagatctcagaccctcgggtgccagagataagacagcccattgacaactctttcgacattcaatccagggattgtatctccaagaagcttgaacgcctggaatccgaagacgactctcttggttggggcgctcctgattggagtacggaggccggtttctccagacactgcctgacctctatttatagacctttcgtagacaaagccctgaaacagatggggctgcggaagctgattctcagactgcataaactcatggacggatccctgcagcgggctagaatagccctcgtgaaaaatgatcgtcccgtagagttctcagaatttcctgaccctatgtggggcagcgattatgtgcaactcagccgcacccctccttctagcgaagagaaatgttcagccgtgtcctgggaggaactcaaagcaatggacttgccaagctttgagcctgcgttcctcgtgctatgtagagttctgctaaacgtgatccacgaatgtctgaaattgcggctggagcagaggcccgctggtgagcccagcctcctgagcatcaaacagcttgtccgcgaatgcaaagaggtgcttaaaggcggactgcttatgaagcagtattatcaattcatgctccaagaagtgctggaagatctggagaagcctgactgcaatatagatgcctttgaggaggatttgcataaaatgcttatggtatacttcgactacatgaggtcgtggattcagatgttgcagcagctgccgcaggccagtcacagcctgaagaatctgctggaggaggagtggaattttactaaggaaatcacgcattatatccggggaggcgaggctcaggccggtaaactattttgcgatatagctggcatgttgctgaaatcaaccggatccttcctggaattcgggctgcaggaatcttgcgccgaattttggactagtgccgatgacagctcagctagtgatgaaatcagaaggagtgtgattgagatttccagggcactcaaggaactgttccatgaggccagagagcgtgcatccaaggccttgggttttgccaagatgctgagaaaagaccttgagatagcagccgagtttcggctgagcgctcctgtgagggacttattagacgtgctgaaaagcaagcaatacgttaaagttcagattcctgggctggagaacctgcagatgttcgtgcctgacacactggctgaggaaaaatcgattatactgcagctcttgaacgctgctgccggaaaggattgttctaaagattcggatgatgttttgatcgatgcatatctcctcctgaccaagcatggcgaccgggctagggactcagaggactcatggggaacctgggaagcccagcctgtgaaggtggtgccgcaagtggagacagtggacaccctcaggtccatgcaggtggataatctacttttggttgtaatgcagtctgcacaccttacgatacaaagaaaagcctttcagcagagcattgaggggctgatgacactgtgtcaggagcagacatcatcccagcccgtcatcgctaaggccctgcaacagctgaagaatgacgcactcgaactttgtaatagaatctccaatgctatcgatcgtgtcgaccacatgttcacctccgagtttgatgctgaagttgacgagtcagagtccgtaacgcttcaacaatactacagagaagccatgatacaaggctataactttggattcgaatatcataaagaggtcgtcaggctcatgagtggcgagttcaggcaaaaaattggagacaaatatatcagctttgccagaaagtggatgaattacgtcttaacaaagtgtgagtcaggcagaggcacccgaccaagatgggcaacccaggggttcgacttcctgcaggctatcgaaccagcctttatctccgctctacctgaggatgacttcctctcccttcaggctctcatgaatgagtgtattggccatgtgatcggcaagcctcattcccctgtcactggcctttacctggccatccatcggaacagtcccagacccatgaaagtacctcgctgtcatagtgacccacccaacccccatctcatcattcctactccagaaggttttagggggtcctcagtcccagaaaacgacagactcgcctcgatcgctgctgaactgcaatttagaagcctgtccaggcattcctcgcctacagaagaacgcgacgaacctgcctacccgagaggtgatagctccggatcaaccaggagaagctgggagctgagaaccttgatcagtcagtctaaagacaccgccagtaaacttggtcctattgaggccattcaaaaatctgtgcggctttttgaagaaaaaagatatagggagatgcgtcggaagaacataattggccaggtttgcgataccccaaagtcctatgacaatgttatgcatgtcggtctgcgaaaagtgactttcaaatggcagcgagggaacaaaattggtgaaggacaatatggaaaggtgtacacttgtattagcgtggacaccggcgaactgatggctatgaaagaaatcagatttcaaccaaatgaccacaagaccattaaagagactgccgacgaattgaaaatcttcgagggaatcaaacatcctaatttggtccgctacttcggagtggaactgcaccgtgaagagatgtacatctttatggagtattgtgatgagggaactctcgaagaagtttcgaggcttggactgcaggaacacgtcatccgactttattctaaacagatcaccattgctataaatgttctccatgaacacggaattgttcacagggacatcaagggagcgaatatctttttgacatcgagtgggctgataaagctaggggacttcggttgcagcgtcaaacttaagaacaacgcccagaccatgcctggtgaggtcaattcaacacttgggacagctgcctatatggccccagaggttatcacccgcgctaaaggagaagggcatggcagggcagctgacatttggagccttggctgcgtggtgattgagatggtgactggcaagagaccgtggcatgagtatgaacacaacttccagattatgtataaggtaggcatgggacataaacctcccattccagagcggctgagccccgaaggcaaagactttctgtcacattgcctagaaagtgaccctaaaatgaggtggacagcctcccagcttcttgaccacagtttcgtgaaagtttgtaccgacgaagagtag

SEQ ID NO: 167375 - DNA, 4497 bp, Artificial Sequence
  derived and/or modified sequence
atgagagaagctgcggctgcacttgtgcctccaccggcatttgctgtaacgcccgctgccgctatggaggaaccccctccccctcctccaccaccgccacctcctccagaaccggagaccgaaagtgaacccgagtgctgtctggctgccaggcaggagggcacactcggggactcagcctgtaagtctcccgagtccgatctcgaagattttagcgacgagacaaatacagaaaatctttatggcacatcccctcctagcacaccacgccagatgaagcggatgagtactaaacaccaacggaacaatgttgggcgacccgcttcgcgaagtaatctcaaggaaaagatgaatgctccaaaccagccccctcacaaagacaccggaaagacagtggagaacgtcgaagaatatagttacaagcaggaaaaaaagattcgcgctgctttgcggactacggagcgcgatagaaaaaaaaatgtccagtgttcctttatgctcgactcagtcggagggtctttacctaaaaagtctattcctgacgtggatctcaacaaaccctatttgtcacttggctgcagcaatgcgaagttacctgtgagtgtcccaatgcccattgccagaccagccagacagaccagcagaacggattgccccgcagatcgtttgaagttttttgagaccctccgtcttctgctgaaactcacaagcgttagtaaaaagaaagacagagagcaaagagggcaagaaaacacatcggggttctggctaaataggagcaatgagctcatttggctcgagctacaggcatggcacgcaggtaggaccatcaacgatcaggacttcttcctgtacaccgctcggcaggctatacctgacattataaatgagattctgacgtttaaggtggattatgggagtttcgccttcgttcgagaccgtgccggatttaatggcacgagtgtggagggccagtgcaaagcgacccctgggacaaaaatagtaggctacagcacgcaccacgagcacctgcagagacagcgggtgagtttcgaacaggtaaagcgcattatggagctattagagtacattgaggcactttatccctccctccaagctctccagaaggactacgagaaatacgccgctaaggacttccaggatcgcgttcaggcactgtgcctgtggctcaatataactaaggatcttaaccagaagctcaggatcatggggacagtcctggggatcaagaacctgtctgacatcggatggcccgtcttcgaaatcccaagcccacggccttctaagggcaacgagcctgagtacgagggcgacgacactgagggtgagctaaaggagctggaatcttcaacggacgagtccgaggaggaacagataagcgatccacgagtgcccgagatccggcagcccatcgataactctttcgacatacaatctcgcgactgtatttctaaaaaactggaaagacttgaaagcgaagacgattcattaggatggggagccccagattggtcaaccgaggcaggtttttcccggcattgcttgacgtctatctaccggccatttgtcgataaagccctgaaacaaatgggtttgaggaagctgattttgcgtcttcacaagctcatggacggaagtttgcaaagagcaagaattgccttggtgaaaaatgatcggccagtggagttttcagaattcccggaccctatgtggggctcggattatgtccagctgagcaggactccgccatcatcagaagagaagtgcagcgcggtcagctgggaagagcttaaagctatggatctcccctcattcgaacctgcttttctggtgctttgccgcgtgctgctcaatgtcatccatgagtgtctcaaactgcgtctggaacagcgtccggctggtgagccatccctcctgtccatcaaacagctcgtgcgcgaatgcaaggaggtgcttaaaggaggattgttgatgaaacagtactaccagttcatgttgcaagaagtgctggaggacctggaaaaacctgactgcaatattgatgcttttgaggaagacctgcacaaaatgctaatggtgtactttgattacatgcggtcatggatccagatgcttcagcagttacctcaggcctctcactcactgaagaacttgctggaggaagaatggaactttaccaaggagatcacgcactacatccgcggtggcgaggcccaggccggaaagctattttgtgatattgctggcatgctactcaagtcgacaggaagttttcttgagttcgggctgcaggagagctgtgctgagttttggactagtgcggacgattcatcggcatccgacgagattcgacgctccgtgattgagatcagccgcgcattgaaggagttatttcatgaggctcgtgagcgtgcttctaaagccctgggcttcgctaagatgctgagaaaagatcttgaaattgctgccgagttcaggctctccgcccctgtgcgcgacctgcttgatgtactgaaatcaaagcagtacgtgaaggtgcagatccctgggctcgaaaatttgcagatgtttgtgcccgacaccctcgccgaggaaaaatccattatcctccagctgctcaacgccgctgcagggaaagactgttccaaagattctgatgacgtcttgattgacgcttaccttctactgaccaaacacggcgaccgcgctcgcgactctgaggactcatggggcacttgggaggctcagcccgtgaaggtagtgcctcaggtggagactgtcgatacccttaggtccatgcaggtcgataatcttctcctggtggtgatgcagagcgcacacctgaccattcagaggaaagccttccagcagtcgatcgaaggccttatgacgctttgtcaggagcaaacctcatctcagcccgtaatagccaaagctttgcagcagttgaaaaatgacgctttagagttgtgcaataggatttcgaacgccattgatcgcgtggatcatatgttcacttcggaattcgatgccgaggtcgatgagagcgagtctgttaccctgcagcagtattaccgcgaggcgatgatccagggatacaacttcggatttgaatatcataaagaggtcgtacgtcttatgtctggagaattcagacagaagattggcgacaagtatatttctttcgccagaaagtggatgaactacgtcttgaccaaatgtgaaagcggcagaggcacacgacctaggtgggctacacaggggttcgactttcttcaagcaattgagccggcatttatcagcgctttgccggaagatgatttcctcagccttcaagccttgatgaacgagtgtatcgggcacgttatcggcaaaccacacagccctgttacaggattatatctggccatccatcggaatagccctcgacccatgaaagtgccaagatgccactctgacccaccaaaccctcatctgatcattccgacacccgaggggtttcgcggatcctcagtgccggaaaacgatcggctggcgtctattgctgccgagcttcaatttcgctcactgtccagacacagcagcccgacagaggaaagggacgagcctgcctatccccgaggggactccagcgggagtaccagaagaagctgggagcttaggacacttatctcacagtccaaggataccgctagtaagttggggcctatcgaggctattcagaagagcgtgcgtctattcgaggagaaaagatacagagaaatgcgtcgaaagaacatcatcggccaggtctgcgacacccctaagagttatgacaacgttatgcacgtgggcctgaggaaagtgactttcaaatggcaaaggggcaataaaatcggcgaaggccagtacggaaaggtatacacatgcatctcggtggacaccggcgagctgatggctatgaaggagatccgttttcagcctaatgaccataagactattaaagaaacagcagacgaactgaagatcttcgaggggatcaaacatcccaatctggtcagatatttcggtgtcgagctccatagggaggagatgtatatctttatggagtattgcgatgaggggacactggaggaggtgagcagacttggcctccaggaacacgtgattcgtctctattcaaagcagatcaccattgccataaatgtacttcatgagcacggaatagtacacagagacatcaagggtgccaatatttttctaactagcagcggactgattaaactgggggactttggttgtagcgtcaagttgaaaaataatgcccagaccatgcccggtgaggtcaactccacactggggactgccgcttacatggccccagaagtgattacgagggctaagggagaagggcacggacgcgcagccgacatttggagcctgggctgtgtcgtgatcgaaatggtcacaggaaagatttgtaaggacacggagtag

SEQ ID NO: 167376 - DNA, 4677 bp, Artificial Sequence
  derived and/or modified sequence
atgagagaggccgccgccgccctggtgcccccccccgccttcgccgtgacccccgccgccgccatggaggagccccccccccccccccccccccccccccccccccccgagcccgagaccgagagcgagcccgagtgctgcctggccgccagacaggagggcaccctgggcgacagcgcctgcaagagccccgagagcgacctggaggacttcagcgacgagaccaacaccgagaacctgtacggcaccagcccccccagcacccccagacagatgaagagaatgagcaccaagcaccagagaaacaacgtgggcagacccgccagcagaagcaacctgaaggagaagatgaacgcccccaaccagcccccccacaaggacaccggcaagaccgtggagaacgtggaggagtacagctacaagcaggagaagaagatcagagccgccctgagaaccaccgagagagacagaaagaagaacgtgcagtgcagcttcatgctggacagcgtgggcggcagcctgcccaagaagagcatccccgacgtggacctgaacaagccctacctgagcctgggctgcagcaacgccaagctgcccgtgagcgtgcccatgcccatcgccagacccgccagacagaccagcagaaccgactgccccgccgacagactgaagttcttcgagaccctgagactgctgctgaagctgaccagcgtgagcaagaagaaggacagagagcagagaggccaggagaacaccagcggcttctggctgaacagaagcaacgagctgatctggctggagctgcaggcctggcacgccggcagaaccatcaacgaccaggacttcttcctgtacaccgccagacaggccatccccgacatcatcaacgagatcctgaccttcaaggtggactacggcagcttcgccttcgtgagagacagagccggcttcaacggcaccagcgtggagggccagtgcaaggccacccccggcaccaagatcgtgggctacagcacccaccacgagcacctgcagagacagagagtgagcttcgagcaggtgaagagaatcatggagctgctggagtacatcgaggccctgtaccccagcctgcaggccctgcagaaggactacgagaagtacgccgccaaggacttccaggacagagtgcaggccctgtgcctgtggctgaacatcaccaaggacctgaaccagaagctgagaatcatgggcaccgtgctgggcatcaagaacctgagcgacatcggctggcccgtgttcgagatccccagccccagacccagcaagggcaacgagcccgagtacgagggcgacgacaccgagggcgagctgaaggagctggagagcagcaccgacgagagcgaggaggagcagatcagcgaccccagagtgcccgagatcagacagcccatcgacaacagcttcgacatccagagcagagactgcatcagcaagaagctggagagactggagagcgaggacgacagcctgggctggggcgcccccgactggagcaccgaggccggcttcagcagacactgcctgaccagcatctacagacccttcgtggacaaggccctgaagcagatgggcctgagaaagctgatcctgagactgcacaagctgatggacggcagcctgcagagagccagaatcgccctggtgaagaacgacagacccgtggagttcagcgagttccccgaccccatgtggggcagcgactacgtgcagctgagcagaaccccccccagcagcgaggagaagtgcagcgccgtgagctgggaggagctgaaggccatggacctgcccagcttcgagcccgccttcctggtgctgtgcagagtgctgctgaacgtgatccacgagtgcctgaagctgagactggagcagagacccgccggcgagcccagcctgctgagcatcaagcagctggtgagagagtgcaaggaggtgctgaagggcggcctgctgatgaagcagtactaccagttcatgctgcaggaggtgctggaggacctggagaagcccgactgcaacatcgacgccttcgaggaggacctgcacaagatgctgatggtgtacttcgactacatgagaagctggatccagatgctgcagcagctgccccaggccagccacagcctgaagaacctgctggaggaggagtggaacttcaccaaggagatcacccactacatcagaggcggcgaggcccaggccggcaagctgttctgcgacatcgccggcatgctgctgaagagcaccggcagcttcctggagttcggcctgcaggagagctgcgccgagttctggaccagcgccgacgacagcagcgccagcgacgagatcagaagaagcgtgatcgagatcagcagagccctgaaggagctgttccacgaggccagagagagagccagcaaggccctgggcttcgccaagatgctgagaaaggacctggagatcgccgccgagttcagactgagcgcccccgtgagagacctgctggacgtgctgaagagcaagcagtacgtgaaggtgcagatccccggcctggagaacctgcagatgttcgtgcccgacaccctggccgaggagaagagcatcatcctgcagctgctgaacgccgccgccggcaaggactgcagcaaggacagcgacgacgtgctgatcgacgcctacctgctgctgaccaagcacggcgacagagccagagacagcgaggacagctggggcacctgggaggcccagcccgtgaaggtggtgccccaggtggagaccgtggacaccctgagaagcatgcaggtggacaacctgctgctggtggtgatgcagagcgcccacctgaccatccagagaaaggccttccagcagagcatcgagggcctgatgaccctgtgccaggagcagaccagcagccagcccgtgatcgccaaggccctgcagcagctgaagaacgacgccctggagctgtgcaacagaatcagcaacgccatcgacagagtggaccacatgttcaccagcgagttcgacgccgaggtggacgagagcgagagcgtgaccctgcagcagtactacagagaggccatgatccagggctacaacttcggcttcgagtaccacaaggaggtggtgagactgatgagcggcgagttcagacagaagatcggcgacaagtacatcagcttcgccagaaagtggatgaactacgtgctgaccaagtgcgagagcggcagaggcaccagacccagatgggccacccagggcttcgacttcctgcaggccatcgagcccgccttcatcagcgccctgcccgaggacgacttcctgagcctgcaggccctgatgaacgagtgcatcggccacgtgatcggcaagccccacagccccgtgaccggcctgtacctggccatccacagaaacagccccagacccatgaaggtgcccagatgccacagcgacccccccaacccccacctgatcatccccacccccgagggcttcagaggcagcagcgtgcccgagaacgacagactggccagcatcgccgccgagctgcagttcagaagcctgagcagacacagcagccccaccgaggagagagacgagcccgcctaccccagaggcgacagcagcggcagcaccagaagaagctgggagctgagaaccctgatcagccagagcaaggacaccgccagcaagctgggccccatcgaggccatccagaagagcgtgagactgttcgaggagaagagatacagagagatgagaagaaagaacatcatcggccaggtgtgcgacacccccaagagctacgacaacgtgatgcacgtgggcctgagaaaggtgaccttcaagtggcagagaggcaacaagatcggcgagggccagtacggcaaggtgtacacctgcatcagcgtggacaccggcgagctgatggccatgaaggagatcagattccagcccaacgaccacaagaccatcaaggagaccgccgacgagctgaagatcttcgagggcatcaagcaccccaacctggtgagatacttcggcgtggagctgcacagagaggagatgtacatcttcatggagtactgcgacgagggcaccctggaggaggtgagcagactgggcctgcaggagcacgtgatcagactgtacagcaagcagatcaccatcgccatcaacgtgctgcacgagcacggcatcgtgcacagagacatcaagggcgccaacatcttcctgaccagcagcggcctgatcaagctgggcgacttcggctgcagcgtgaagctgaagaacaacgcccagaccatgcccggcgaggtgaacagcaccctgggcaccgccgcctacatggcccccgaggtgatcaccagagccaagggcgagggccacggcagagccgccgacatctggagcctgggctgcgtggtgatcgagatggtgaccggcaagagaccctggcacgagtacgagcacaacttccagatcatgtacaaggtgggcatgggccacaagccccccatccccgagagactgagccccgagggcaaggacttcctgagccactgcctggagagcgaccccaagatgagatggaccgccagccagctgctggaccacagcttcgtgaaggtgtgcaccgacgaggagtag

SEQ ID NO: 167377 - DNA, 4497 bp, Artificial Sequence
  derived and/or modified sequence
atgagagaggccgccgccgccctggtgcccccccccgccttcgccgtgacccccgccgccgccatggaggagccccccccccccccccccccccccccccccccccccgagcccgagaccgagagcgagcccgagtgctgcctggccgccagacaggagggcaccctgggcgacagcgcctgcaagagccccgagagcgacctggaggacttcagcgacgagaccaacaccgagaacctgtacggcaccagcccccccagcacccccagacagatgaagagaatgagcaccaagcaccagagaaacaacgtgggcagacccgccagcagaagcaacctgaaggagaagatgaacgcccccaaccagcccccccacaaggacaccggcaagaccgtggagaacgtggaggagtacagctacaagcaggagaagaagatcagagccgccctgagaaccaccgagagagacagaaagaagaacgtgcagtgcagcttcatgctggacagcgtgggcggcagcctgcccaagaagagcatccccgacgtggacctgaacaagccctacctgagcctgggctgcagcaacgccaagctgcccgtgagcgtgcccatgcccatcgccagacccgccagacagaccagcagaaccgactgccccgccgacagactgaagttcttcgagaccctgagactgctgctgaagctgaccagcgtgagcaagaagaaggacagagagcagagaggccaggagaacaccagcggcttctggctgaacagaagcaacgagctgatctggctggagctgcaggcctggcacgccggcagaaccatcaacgaccaggacttcttcctgtacaccgccagacaggccatccccgacatcatcaacgagatcctgaccttcaaggtggactacggcagcttcgccttcgtgagagacagagccggcttcaacggcaccagcgtggagggccagtgcaaggccacccccggcaccaagatcgtgggctacagcacccaccacgagcacctgcagagacagagagtgagcttcgagcaggtgaagagaatcatggagctgctggagtacatcgaggccctgtaccccagcctgcaggccctgcagaaggactacgagaagtacgccgccaaggacttccaggacagagtgcaggccctgtgcctgtggctgaacatcaccaaggacctgaaccagaagctgagaatcatgggcaccgtgctgggcatcaagaacctgagcgacatcggctggcccgtgttcgagatccccagccccagacccagcaagggcaacgagcccgagtacgagggcgacgacaccgagggcgagctgaaggagctggagagcagcaccgacgagagcgaggaggagcagatcagcgaccccagagtgcccgagatcagacagcccatcgacaacagcttcgacatccagagcagagactgcatcagcaagaagctggagagactggagagcgaggacgacagcctgggctggggcgcccccgactggagcaccgaggccggcttcagcagacactgcctgaccagcatctacagacccttcgtggacaaggccctgaagcagatgggcctgagaaagctgatcctgagactgcacaagctgatggacggcagcctgcagagagccagaatcgccctggtgaagaacgacagacccgtggagttcagcgagttccccgaccccatgtggggcagcgactacgtgcagctgagcagaaccccccccagcagcgaggagaagtgcagcgccgtgagctgggaggagctgaaggccatggacctgcccagcttcgagcccgccttcctggtgctgtgcagagtgctgctgaacgtgatccacgagtgcctgaagctgagactggagcagagacccgccggcgagcccagcctgctgagcatcaagcagctggtgagagagtgcaaggaggtgctgaagggcggcctgctgatgaagcagtactaccagttcatgctgcaggaggtgctggaggacctggagaagcccgactgcaacatcgacgccttcgaggaggacctgcacaagatgctgatggtgtacttcgactacatgagaagctggatccagatgctgcagcagctgccccaggccagccacagcctgaagaacctgctggaggaggagtggaacttcaccaaggagatcacccactacatcagaggcggcgaggcccaggccggcaagctgttctgcgacatcgccggcatgctgctgaagagcaccggcagcttcctggagttcggcctgcaggagagctgcgccgagttctggaccagcgccgacgacagcagcgccagcgacgagatcagaagaagcgtgatcgagatcagcagagccctgaaggagctgttccacgaggccagagagagagccagcaaggccctgggcttcgccaagatgctgagaaaggacctggagatcgccgccgagttcagactgagcgcccccgtgagagacctgctggacgtgctgaagagcaagcagtacgtgaaggtgcagatccccggcctggagaacctgcagatgttcgtgcccgacaccctggccgaggagaagagcatcatcctgcagctgctgaacgccgccgccggcaaggactgcagcaaggacagcgacgacgtgctgatcgacgcctacctgctgctgaccaagcacggcgacagagccagagacagcgaggacagctggggcacctgggaggcccagcccgtgaaggtggtgccccaggtggagaccgtggacaccctgagaagcatgcaggtggacaacctgctgctggtggtgatgcagagcgcccacctgaccatccagagaaaggccttccagcagagcatcgagggcctgatgaccctgtgccaggagcagaccagcagccagcccgtgatcgccaaggccctgcagcagctgaagaacgacgccctggagctgtgcaacagaatcagcaacgccatcgacagagtggaccacatgttcaccagcgagttcgacgccgaggtggacgagagcgagagcgtgaccctgcagcagtactacagagaggccatgatccagggctacaacttcggcttcgagtaccacaaggaggtggtgagactgatgagcggcgagttcagacagaagatcggcgacaagtacatcagcttcgccagaaagtggatgaactacgtgctgaccaagtgcgagagcggcagaggcaccagacccagatgggccacccagggcttcgacttcctgcaggccatcgagcccgccttcatcagcgccctgcccgaggacgacttcctgagcctgcaggccctgatgaacgagtgcatcggccacgtgatcggcaagccccacagccccgtgaccggcctgtacctggccatccacagaaacagccccagacccatgaaggtgcccagatgccacagcgacccccccaacccccacctgatcatccccacccccgagggcttcagaggcagcagcgtgcccgagaacgacagactggccagcatcgccgccgagctgcagttcagaagcctgagcagacacagcagccccaccgaggagagagacgagcccgcctaccccagaggcgacagcagcggcagcaccagaagaagctgggagctgagaaccctgatcagccagagcaaggacaccgccagcaagctgggccccatcgaggccatccagaagagcgtgagactgttcgaggagaagagatacagagagatgagaagaaagaacatcatcggccaggtgtgcgacacccccaagagctacgacaacgtgatgcacgtgggcctgagaaaggtgaccttcaagtggcagagaggcaacaagatcggcgagggccagtacggcaaggtgtacacctgcatcagcgtggacaccggcgagctgatggccatgaaggagatcagattccagcccaacgaccacaagaccatcaaggagaccgccgacgagctgaagatcttcgagggcatcaagcaccccaacctggtgagatacttcggcgtggagctgcacagagaggagatgtacatcttcatggagtactgcgacgagggcaccctggaggaggtgagcagactgggcctgcaggagcacgtgatcagactgtacagcaagcagatcaccatcgccatcaacgtgctgcacgagcacggcatcgtgcacagagacatcaagggcgccaacatcttcctgaccagcagcggcctgatcaagctgggcgacttcggctgcagcgtgaagctgaagaacaacgcccagaccatgcccggcgaggtgaacagcaccctgggcaccgccgcctacatggcccccgaggtgatcaccagagccaagggcgagggccacggcagagccgccgacatctggagcctgggctgcgtggtgatcgagatggtgaccggcaagatctgcaaggacaccgagtag

SEQ ID NO: 167378 - protein, 668 aa, Artificial Sequence
  derived and/or modified sequence
MWLFFGITGLLTAALSGHPSPAPPDQLNTSSAESELWEPGERLPVRLTNGSSSCSGTVEVRLEASWEPACGALWDSRAAEAVCRALGCGGAEAASQLAPPTPELPPPPAAGNTSVAANATLAGAPALLCSGAEWRLCEVVEHACRSDGRRARVTCAENRALRLVDGGGACAGRVEMLEHGEWGSVCDDTWDLEDAHVVCRQLGCGWAVQALPGLHFTPGRGPIHRDQVNCSGAEAYLWDCPGLPGQHYCGHKEDAGAVCSEHQSWRLTGGADRCEGQVEVHFRGVWNTVCDSEWYPSEAKVLCQSLGCGTAVERPKGLPHSLSGRMYYSCNGEELTLSNCSWRFNNSNLCSQSLAARVLCSASRSLHNLSTPEVPASVQTVTIESSVTVKIENKESRELMLLIPSIVLGILLLGSLIFIAFILLRIKGKYALPVMVNHQHLPTTIPAGSNSYQPVPITIPKEVFMLPIQVQAPPPEDSDSGSDSDYEHYDFSAQPPVALTTFYNSQRHRVTDEEVQQSRFQMPPLEEGLEELHASHIPTANPGHCITDPPSLGPQYHPRSNSESSTSSGEDYCNSPKSKLPPWNPQVFSSERSSFLEQPPNLELAGTQPAFSAGPPADDSSSTSSGEWYQNFQPPPQPPSEEQFGCPGSPSPQPDSTDNDDYDDISAA

SEQ ID NO: 167379 - DNA, 2007 bp, Artificial Sequence
  derived and/or modified sequence
atgtggctgttctttggtattactggcctactcactgccgctctatccggccatccttcacccgctcctcccgaccagctcaacacatcctcagcagaatcagagctctgggagcccggcgagcgcttgcctgtcaggctgacgaacggctcttcctcttgtagtggaactgtggaagttaggttggaagcatcttgggagccggcctgcggagccctgtgggatagccgtgctgccgaagccgtgtgtagagctcttggctgcggaggagccgaggctgcgagccagttggccccccccacccccgaactgcccccaccacccgccgcagggaatacgtctgtggccgcaaacgccacgttggccggcgctccagcgctgctttgctctggggccgagtggcggctatgtgaggtcgtggaacatgcctgcaggtcagacggccgccgggcaagagtgacttgcgctgaaaatagagccctgcgtctagtggatgggggaggggcttgcgccggacgagtggaaatgttggagcatggcgaatggggctcggtttgcgatgatacatgggatttagaggacgctcacgttgtttgtcgacagctgggatgtggctgggccgtgcaggcattgccgggccttcatttcactcccggaagagggccaatccatagagaccaggtcaactgtagcggagctgaggcgtacctctgggactgccctggtctgcctggacagcactactgtggtcataaagaagacgcaggcgctgtgtgttctgaacaccagagttggcgccttaccggaggcgctgaccgctgcgaaggacaagtcgaggtacattttagaggagtgtggaataccgtctgtgacagtgaatggtatccttccgaggccaaagtactgtgtcaatcccttgggtgtggcacagccgttgaacgaccaaaggggctgcctcactccctgagtggacggatgtattattcctgtaatggtgaagagctgaccctcagcaattgtagctggaggttcaacaatagtaacctgtgtagtcaatcgctggctgcaagagtactgtgctctgcaagccgatcgctgcataacttgagtacaccagaagtgccggcatccgtgcagacggttacaatcgagagtagcgttacggtcaagatcgagaataaggagagcagggaactgatgctactgattccaagcattgtcttgggaattcttctcctgggttccctgatattcatagcattcatccttctccgaatcaaaggaaaatacgccctccccgtgatggtcaaccaccagcacctccctacgaccatcccagctgggagtaatagttaccaaccggttccgattacgatccccaaggaagtgttcatgctccccatccaggtgcaagcacctccccctgaggatagcgactcaggatccgactccgattatgagcattatgacttctccgcgcagccccccgttgctctgacaacgttttataattctcagaggcaccgggtgactgacgaagaggtgcagcagtcccgattccagatgcctcccctggaggaaggcttagaggaactacatgcttctcacatccctactgctaatcccggacactgcattaccgaccctccgtccctgggcccacaatatcacccgcgatcaaactcagagagcagcacttctagtggggaagattattgtaactcacccaagtctaaactgccaccctggaatcctcaagtatttagcagcgagagaagctctttcttggagcaaccccccaatttggagttggctggaactcagccggctttctccgctggaccacccgcagatgacagttcctcgaccagctccggtgagtggtatcaaaatttccaacctcctcctcaaccgccttccgaggaacagtttggctgtcctgggtctccttccccgcagcccgactctacagacaacgatgactacgatgacatctccgccgcctag

SEQ ID NO: 167380 - DNA, 2007 bp, Artificial Sequence
  derived and/or modified sequence
atgtggctgttcttcggcatcaccggcctgctgacagctgccctgagcggccaccccagccctgcccccccagaccagctgaacaccagcagcgctgagagcgagctgtgggagcctggagagcggctgcctgtgcggctgaccaacggcagcagcagctgcagcggcaccgtggaggtgcggctggaggcctcctgggagcccgcctgtggggccctgtgggacagcagagctgctgaggccgtgtgccgggccctgggctgcggcggcgctgaggccgccagccagctggccccacccaccccagagctgcccccacctcctgctgctggcaacacctctgtggccgccaatgccaccctggccggggccccagccctgctgtgcagcggggctgagtggaggctgtgtgaggtggtggagcacgcctgccgcagtgatggaagaagagcccgggtgacctgtgctgaaaatagagccctgcggctggtggatggcggcggggcctgtgccggccgggtggagatgctggagcacggggagtggggctctgtgtgtgatgacacctgggacctggaggatgcccacgtggtgtgccggcagctgggctgcggctgggccgtgcaggccctgcccggcctgcacttcaccccaggccggggccccatccaccgggaccaggtgaactgcagcggggctgaggcctacctgtgggactgccccggcctgcccggccagcactactgcggccacaaggaggatgctggagctgtgtgcagcgagcaccagagctggaggctgaccggcggcgctgacagatgtgagggccaggtggaggtgcacttccggggcgtgtggaacacagtgtgtgacagcgagtggtaccccagcgaggccaaggtgctgtgccagagcctgggctgcggcacagctgtggagcggcccaagggcctgccccacagcctgagcggccgcatgtactacagctgcaatggagaggagctgaccctgagcaactgctcctggaggttcaacaacagcaacctgtgcagccagagcctggccgcccgggtgctgtgcagcgccagccgcagcctgcacaacctgagcaccccagaggtgcctgcctctgtgcagacagtgaccatcgagagctctgtgacagtgaagattgagaacaaggagagccgggagctgatgctgctgatccccagcatcgtgctgggcatcctgctgctgggcagcctcatcttcatcgccttcatcctgctgcgcatcaagggcaagtatgccctgcctgtgatggtgaaccaccagcacctgcccaccaccatcccagctggcagcaacagctaccagcctgtgcccatcaccatccccaaggaggtgttcatgctgcccatccaggtgcaggcccctcctcctgaggacagcgacagcggcagtgacagcgactatgagcactatgacttcagcgcccagccccctgtggccctgaccaccttctacaacagccagaggcaccgggtgacagatgaggaggtgcagcagagccgcttccagatgccacccctggaggagggcctggaggagctgcacgccagccacatccccacagccaaccctggccactgcatcacagatcctcccagcctgggcccccagtaccaccccaggagcaacagcgagagcagcaccagcagcggggaggactactgcaacagccccaagagcaagctgcccccctggaacccccaggtgttcagcagcgagaggagcagcttcctggagcagccccccaacctggagctggccggcacccagcctgccttctctgctggccccccagcagatgacagcagcagcaccagcagtggagagtggtaccagaacttccagcccccaccccagccccccagcgaggagcagtttggctgccccggcagccccagcccccagcctgacagcacagacaatgatgattatgatgacatctctgctgcctag

SEQ ID NO: 167381 - DNA, 2007 bp, Artificial Sequence
  derived and/or modified sequence
atgtggctgttcttcggcatcaccggcctgctgaccgccgccctgtctggacatccctccccagctccaccagaccagctgaacaccagttccgctgaatctgagctttgggagcccggcgagaggctccccgtaaggctcacaaatggttcttcatcctgtagcggcactgtggaggttcgattagaggcatcatgggagccagcttgcggagcattatgggatagtcgagcagccgaggcagtatgtcgggccctggggtgcggtggcgccgaagctgcaagccagctggcacctcccactccagagttgcctcccccaccagccgcaggtaacacgtcggtcgcagcgaacgctaccttggcaggagcaccggccctcctttgttccggcgcagagtggaggctctgtgaagtagtggagcatgcatgtcgatcggacggccgaagggcacgcgtgacctgcgcagagaaccgtgcgctgcggttggtggacggcgggggggcatgcgccggacgggtagaaatgctcgagcacggagaatggggctcagtctgcgatgacacctgggatctcgaggacgctcacgtggtttgccggcagctgggctgtggttgggcggtacaggccctgccaggactccattttactcccgggagaggccccatacaccgagatcaggtgaattgtagtggcgcagaagcgtatttgtgggactgccctggtctgcccggtcagcattattgcggccacaaagaagatgctggggcagtttgtagcgaacatcagtcatggcggctgactggaggtgcagaccgttgtgagggccaggttgaggtgcatttccggggggtgtggaacaccgtctgcgactctgaatggtatcccagtgaggctaaagtgctttgccaatctctcggttgcggtacggctgtcgagcggcccaaaggacttccgcatagcctcagtggccgtatgtactacagttgtaatggagaggagcttaccttatcaaactgctcatggaggttcaataattctaacctgtgctctcagtccttagccgctcgcgtgctctgcagcgcctccaggtcactacataacctctcaactcctgaggtacccgcctcggtccaaacagtaaccatcgagtccagcgtaacagttaagatagagaacaaggaaagtcgcgagctgatgctgctgattccaagcatcgtgctggggattcttctgttgggtagtcttattttcattgctttcattctactgcggattaaagggaaatacgccctgcctgtcatggtgaatcaccaacacctgcccactaccatacccgccggctcaaattcttaccaaccggtccccataactatcccgaaggaagtgtttatgcttcccatccaggtgcaggctcctccacccgaggattccgactctggatctgactctgattacgaacactatgacttctcggctcagccccccgtcgctcttactactttctataacagccaaagacacagggtgacggatgaggaggtgcagcaatcgcgattccagatgcctccacttgaggaaggacttgaagagctacacgcatcacacattcccactgccaaccccggccactgtattacggacccgccgtccctcgggcctcagtaccaccccaggagtaactcagagtcatctacttcatcaggagaggactactgcaattcacccaagtcaaagttgccaccctggaatccccaggtgttctctagtgaacgctcttcttttctggaacaaccgcccaatctggagcttgctggaacgcaacctgccttctctgctgggcctcctgcagacgactcttcctctacgtctagtggcgagtggtatcaaaattttcagcctcctccacagcctccgtcggaggagcaatttggttgtcctggtagtccttcacctcagccggatagtactgacaatgacgattatgatgatatcagtgcagcatag

SEQ ID NO: 167382 - DNA, 2007 bp, Artificial Sequence
  derived and/or modified sequence
atgtggcttttcttcggtattaccgggttgctgactgccgctctctcagggcacccgtcacccgctccacctgaccagctcaatacaagtagcgccgagagcgaattatgggagccaggtgagaggttaccagttagactcacaaacggcagtagctcctgtagtggcacagtggaggttaggctcgaagcctcatgggagcctgcctgcggggcactatgggattcaagagcggctgaagcagtttgtagggccctgggctgtgggggtgcagaggctgccagtcagttggcacctcccactccggaactgccccctcctcctgccgcaggcaacacctcagtcgccgctaatgctacgctggcgggtgccccagccctgctgtgtagtggagctgaatggcgactgtgcgaggtggtggagcacgcttgcaggtctgacggcagacgcgctagggtgacctgtgccgagaatcgagccctgcgactggtagacgggggaggggcatgcgccggaagggttgagatgcttgaacacggcgagtggggctcagtttgtgatgacacatgggaccttgaagacgcacacgtcgtctgtaggcagcttgggtgtggatgggctgtccaggcactgccaggacttcactttacaccaggccgagggccaatccacagagatcaggtaaactgcagcggggctgaagcctacttgtgggattgtccagggctgcctggccaacactattgcgggcacaaagaggacgccggagcagtgtgctctgaacatcagtcctggcggctgacaggcggagcagatcggtgtgaaggacaggtagaggtgcacttcaggggagtatggaataccgtgtgtgactccgagtggtatccatccgaagccaaggtgctatgccagtcacttggctgcggaacagccgtggaacgacctaaaggcctccctcacagcctctcaggcagaatgtattacagctgcaatggagaagaattgaccctgtccaattgcagctggaggtttaacaattctaacctctgttcccagtccctggccgcacgggttctttgctcagcatctcgcagtctccacaacctgagcacgccggaagtgcctgcctccgttcagaccgtaactatcgaatcatccgtgacagtgaagatcgagaacaaggaaagtagagagctgatgttactcattccaagtatcgtccttggcatcttgttactcggaagtctcatctttattgcttttatcctcctgcgaatcaagggaaaatacgcactccccgtaatggtaaaccaccagcacctgccgactactatcccagcgggttccaatagctaccaacccgttcccattaccattccgaaagaggttttcatgctgccgatccaggtccaagcccctcctcctgaagactcggattcaggcagtgatagtgattacgagcattacgacttcagcgcccagccacctgtcgccttgaccacattttacaatagccaaagacacagggtgaccgatgaggaagtgcagcagagtcggttccagatgcccccactggaagagggcctcgaggagctccatgcaagtcatataccaacagctaaccctgggcattgtatcaccgatccaccaagcttgggccctcagtatcaccctcggtcaaacagcgagagtagcactagctctggagaagactattgcaattcacccaagtccaaattgcccccttggaatcctcaggtgttcagcagcgagagaagttccttcctggaacagccacccaatctagaacttgccggaacgcaacctgccttctccgccggaccaccagctgacgactcttctagcaccagctccggtgaatggtatcagaacttccagcctccaccacagccaccaagcgaagagcaattcgggtgtcctggaagccctagccctcagcccgatagtacagacaacgacgattacgatgatatctctgctgcgtag

SEQ ID NO: 167383 - DNA, 3252 bp, Artificial Sequence
  derived and/or modified sequence
actcacaggttgggtttgatcgcatgcgtgtcggagaggagagagcagagagagacacaggaacaagaacagcaaagggtagagcagacctgcgccaggggcgcacaacggccgtgtccacctcccggccccaagatggtgcttcccacaggcagccacgcgtagcagccagagacagctccagacatgtggctcttcttcgggatcactggattgctgacggcagccctctcaggtcatccatctccagccccacctgaccagctcaacaccagcagtgcagagagtgagctctgggagccaggggagcggcttccggtccgtctgacaaacgggagcagcagctgcagcgggacggtggaggtgcggctcgaggcgtcctgggagcccgcgtgcggggcgctctgggacagccgcgccgccgaggccgtgtgccgagcactgggctgcggcggggcggaggccgcctctcagctcgccccgccgacccctgagctgccgcccccgcctgcagccgggaacaccagcgtagcagctaatgccactctggccggggcgcccgccctcctgtgcagcggcgccgagtggcggctctgcgaggtggtggagcacgcgtgccgcagcgacgggaggcgggcccgtgtcacctgtgcagagaaccgcgcgctgcgcctggtggacggtggcggcgcctgcgccggccgcgtggagatgctggagcatggcgagtggggatcagtgtgcgatgacacttgggacctggaggacgcccacgtggtgtgcaggcaactgggctgcggctgggcagtccaggccctgcccggcttgcacttcacgcccggccgcgggcctatccaccgggaccaggtgaactgctcgggggccgaagcttacctgtgggactgcccggggctgccaggacagcactactgcggccacaaagaggacgcgggcgcggtgtgctcagagcaccagtcctggcgcctgacagggggcgctgaccgctgcgaggggcaggtggaggtacacttccgaggggtctggaacacagtgtgtgacagtgagtggtacccatcggaggccaaggtgctctgccagtccttgggctgtggaactgcggttgagaggcccaaggggctgccccactccttgtccggcaggatgtactactcatgcaatggggaggagctcaccctctccaactgctcctggcggttcaacaactccaacctctgcagccagtcgctggcagccagggtcctctgctcagcttcccggagtttgcacaatctgtccactcccgaagtccctgcaagtgttcagacagtcactatagaatcttctgtgacagtgaaaatagagaacaaggaatctcgggagctaatgctcctcatcccctccatcgttctgggaattctcctccttggctccctcatcttcatagccttcatcctcttgagaattaaaggaaaatatgccctccccgtaatggtgaaccaccagcacctacccaccaccatcccggcagggagcaatagctatcaaccggtccccatcaccatccccaaagaagttttcatgctgcccatccaggtccaggccccgccccctgaggactcagactctggctcggactcagactatgagcactatgacttcagcgcccagcctcctgtggccctgaccaccttctacaattcccagcggcatcgggtcacagatgaggaggtccagcaaagcaggttccagatgccacccttggaggaaggacttgaagagttgcatgcctcccacatcccaactgccaaccctggacactgcattacagacccgccatccctgggccctcagtatcacccgaggagcaacagtgagtcgagcacctcttcaggggaggattactgcaatagtcccaaaagcaagctgcctccatggaacccccaggtgttttcttcagagaggagttccttcctggagcagcccccaaacttggagctggccggcacccagccagccttttcagcagggcccccggctgatgacagctccagcacctcatccggggagtggtaccagaacttccagccaccaccccagcccccttcggaggagcagtttggctgtccagggtcccccagccctcagcctgactccaccgacaacgatgactacgatgacatcagcgcagcctaggccggggccagccgaggctcctggggtggctctgaccctctggcctcctgctctacctactccctttcccctttcccaccctcccagctcacctccccatggagctgagaggcctcccttggagagatggaaggaaacgttataccttgtacccctcggtctccatccatcaagccaaacctgctgccacagccctcccccggccccagatagcagccccagggaggatgctgcctccaagaggtgtgagccctctgtctcggggatgaacaagcagagtctgggctacctcttgacagctggtggaggggagttggggagctggactggatgactctggaggccccttccaaacctcaagtgtccggcgctttgattgcctgagtttctgacacttcagggcccagaggtcctgcgaggggcagaactggacccccatgccagtgctgctgcaggagggcccatatactagggtctgctgagctgttgtcactgatcggtgggcgctgggggggtagggtagcacaccagctgtcccaggctttgctccgggcggtaactgcacttgggcagggaatatagccttcctgggcacaactagctgacaatgacaggttgactgtgtacccccaaccaaggagctggggcccaaggccagtcctgccccagagacactccaagtccgccaggggcacagaccagttctgcagtgactgtccctggacaatgggtctttattctgagtttcctatggtttacaaagagggccccagcccagccccaccacagatcccagagataggggcccagtctccatgggggcaaggagcatagagatgttttccaggaaggggctcagaagctgcactaggccccgagtccccatgtgtctccttgaattgatgaggatgctcctgggagggatgcgtgactatgtggtgttgcacccggggctgcaaacgtctccgtgcagcccccagagagaggcccatgggctcagaccaggctttgttgtcctgctctgagtatcctgagattaaactgaattgctgaatgaaa

SEQ ID NO: 167384 - DNA, 2007 bp, Artificial Sequence
  derived and/or modified sequence
atgtggctgttcttcggcatcaccggcctgctgaccgccgccctgagcggccaccccagccccgccccccccgaccagctgaacaccagcagcgccgagagcgagctgtgggagcccggcgagagactgcccgtgagactgaccaacggcagcagcagctgcagcggcaccgtggaggtgagactggaggccagctgggagcccgcctgcggcgccctgtgggacagcagagccgccgaggccgtgtgcagagccctgggctgcggcggcgccgaggccgccagccagctggccccccccacccccgagctgccccccccccccgccgccggcaacaccagcgtggccgccaacgccaccctggccggcgcccccgccctgctgtgcagcggcgccgagtggagactgtgcgaggtggtggagcacgcctgcagaagcgacggcagaagagccagagtgacctgcgccgagaacagagccctgagactggtggacggcggcggcgcctgcgccggcagagtggagatgctggagcacggcgagtggggcagcgtgtgcgacgacacctgggacctggaggacgcccacgtggtgtgcagacagctgggctgcggctgggccgtgcaggccctgcccggcctgcacttcacccccggcagaggccccatccacagagaccaggtgaactgcagcggcgccgaggcctacctgtgggactgccccggcctgcccggccagcactactgcggccacaaggaggacgccggcgccgtgtgcagcgagcaccagagctggagactgaccggcggcgccgacagatgcgagggccaggtggaggtgcacttcagaggcgtgtggaacaccgtgtgcgacagcgagtggtaccccagcgaggccaaggtgctgtgccagagcctgggctgcggcaccgccgtggagagacccaagggcctgccccacagcctgagcggcagaatgtactacagctgcaacggcgaggagctgaccctgagcaactgcagctggagattcaacaacagcaacctgtgcagccagagcctggccgccagagtgctgtgcagcgccagcagaagcctgcacaacctgagcacccccgaggtgcccgccagcgtgcagaccgtgaccatcgagagcagcgtgaccgtgaagatcgagaacaaggagagcagagagctgatgctgctgatccccagcatcgtgctgggcatcctgctgctgggcagcctgatcttcatcgccttcatcctgctgagaatcaagggcaagtacgccctgcccgtgatggtgaaccaccagcacctgcccaccaccatccccgccggcagcaacagctaccagcccgtgcccatcaccatccccaaggaggtgttcatgctgcccatccaggtgcaggcccccccccccgaggacagcgacagcggcagcgacagcgactacgagcactacgacttcagcgcccagccccccgtggccctgaccaccttctacaacagccagagacacagagtgaccgacgaggaggtgcagcagagcagattccagatgccccccctggaggagggcctggaggagctgcacgccagccacatccccaccgccaaccccggccactgcatcaccgacccccccagcctgggcccccagtaccaccccagaagcaacagcgagagcagcaccagcagcggcgaggactactgcaacagccccaagagcaagctgcccccctggaacccccaggtgttcagcagcgagagaagcagcttcctggagcagccccccaacctggagctggccggcacccagcccgccttcagcgccggcccccccgccgacgacagcagcagcaccagcagcggcgagtggtaccagaacttccagccccccccccagccccccagcgaggagcagttcggctgccccggcagccccagcccccagcccgacagcaccgacaacgacgactacgacgacatcagcgccgcctag

SEQ ID NO: 167385 - protein, 2863 aa, Artificial Sequence
  derived and/or modified sequence
MASEDNRVPSPPPTGDDGGGGGREETPTEGGALSLKPGLPIRGIRMKFAVLTGLVEVGEVSNRDIVETVFNLLVGGQFDLEMNFIIQEGESINCMVDLLEKCDITCQAEVWSMFTAILKKSIRNLQVCTEVGLVEKVLGKIEKVDNMIADLLVDMLGVLASYNLTVRELKLFFSKLQGDKGRWPPHAGKLLSVLKHMPQKYGPDAFFNFPGKSAAAIALPPIAKWPYQNGFTFHTWLRMDPVNNINVDKDKPYLYCFRTSKGLGYSAHFVGGCLIVTSIKSKGKGFQHCVKFDFKPQKWYMVTIVHIYNRWKNSELRCYVNGELASYGEITWFVNTSDTFDKCFLGSSETADANRVFCGQMTAVYLFSEALNAAQIFAIYQLGLGYKGTFKFKAESDLFLAEHHKLLLYDGKLSSAIAFTYNPRATDAQLCLESSPKDNPSIFVHSPHALMLQDVKAVLTHSIQSAMHSIGGVQVLFPLFAQLDYRQYLSDEIDLTICSTLLAFIMELLKNSIAMQEQMLACKGFLVIGYSLEKSSKSHVSRAVLELCLAFSKYLSNLQNGMPLLKQLCDHVLLNPAIWIHTPAKVQLMLYTYLSTEFIGTVNIYNTIRRVGTVLLIMHTLKYYYWAVNPQDRSGITPKGLDGPRPNQKEMLSLRAFLLMFIKQLVMKDSGVKEDELQAILNYLLTMHEDDNLMDVLQLLVALMSEHPNSMIPAFDQRNGLRVIYKLLASKSEGIRVQALKAMGYFLKHLAPKRKAEVMLGHGLFSLLAERLMLQTNLITMTTYNVLFEILIEQIGTQVIHKQHPDPDSSVKIQNPQILKVIATLLRNSPQCPESMEVRRAFLSDMIKLFNNSRENRRSLLQCSVWQEWMLSLCYFNPKNSDEQKITEMVYAIFRILLYHAVKYEWGGWRVWVDTLSITHSKVTFEIHKENLANIFREQQGKVDEEIGLCSSTSVQAASGIRRDINVSVGSQQPDTKDSPVCPHFTTNGNENSSIEKTSSLESASNIELQTTNTSYEEMKAEQENQELPDEGTLEETLTNETRNADDLEVSSDIIEAVAISSNSFITTGKDSMTVSEVTASISSPSEEDASEMPEFLDKSIVEEEEDDDYVELKVEGSPTEEANLPTELQDNSLSPAASEAGEKLDMFGNDDKLIFQEGKPVTEKQTDTETQDSKDSGIQTMTASGSSAMSPETTVSQIAVESDLGQMLEEGKKATNLTRETKLINDCHGSVSEASSEQKIAKLDVSNVATDTERLELKASPNVEAPQPHRHVLEISRQHEQPGQGIAPDAVNGQRRDSRSTVFRIPEFNWSQMHQRLLTDLLFSIETDIQMWRSHSTKTVMDFVNSSDNVIFVHNTIHLISQVMDNMVMACGGILPLLSAATSATHELENIEPTQGLSIEASVTFLQRLISLVDVLIFASSLGFTEIEAEKSMSSGGILRQCLRLVCAVAVRNCLECQQHSQLKTRGDKALKPMHSLIPLGKSAAKSPVDIVTGGISPVRDLDRLLQDMDINRLRAVVFRDIEDSKQAQFLALAVVYFISVLMVSKYRDILEPQNERHSQSCTETGSENENVSLSEITPAAFSTLTTASVEESESTSSARRRDSGIGEETATGLGSHVEVTPHTAPPGVSAGPDAISEVLSTLSLEVNKSPETKNDRGNDLDTKATPSVSVSKNVNVKDILRSLVNIPADGVTVDPALLPPACLGALGDLSVEQPVQFRSFDRSVIVAAKKSAVSPSTFNTSIPTNAVSVVSSVDSAQASDMGGESPGSRSSNAKLPSVPTVDSVSQDPVSNMSITERLEHALEKAAPLLREIFVDFAPFLSRTLLGSHGQELLIEGTSLVCMKSSSSVVELVMLLCSQEWQNSIQKNAGLAFIELVNEGRLLSQTMKDHLVRVANEAEFILSRQRAEDIHRHAEFESLCAQYSADKREDEKMCDHLIRAAKYRDHVTATQLIQKIINILTDKHGAWGNSAVSRPLEFWRLDYWEDDLRRRRRFVRNPLGSTHPEATLKTAVEHVCIFKLRENSKATDEDILAKGKQSIRSQALGNQNSENEILLEGDDDTLSSVDEKDLENLAGPVSLSTPAQLVAPSVVVKGTLSVTSSELYFEVDEEDPNFKKIDPKILAYTEGLHGKWLFTEIRSIFSRRYLLQNTALEIFMANRVAVMFNFPDPATVKKVVNYLPRVGVGTSFGLPQTRRISLASPRQLFKASNMTQRWQHREISNFEYLMFLNTIAGRSYNDLNQYPVFPWVITNYESEELDLTLPTNFRDLSKPIGALNPKRAAFFAERYESWEDDQVPKFHYGTHYSTASFVLAWLLRIEPFTTYFLNLQGGKFDHADRTFSSISRAWRNSQRDTSDIKELIPEFYYLPEMFVNFNNYNLGVMDDGTVVSDVELPPWAKTSEEFVHINRLALESEFVSCQLHQWIDLIFGYKQQGPEAVRALNVFYYLTYEGAVNLNSITDPVLREAVEAQIRSFGQTPSQLLIEPHPPRGSAMQVSPLMFTDKAQQDVIMVLKFPSNSPVTHVAANTQPGLATPAVITVTANRLFAVNKWHNLPAHQGAVQDQPYQLPVEIDPLIASNTGMHRRQITDLLDQSIQVHSQCFVITSDNRYILVCGFWDKSFRVYSTDTGRLIQVVFGHWDVVTCLARSESYIGGNCYILSGSRDATLLLWYWNGKCSGIGDNPGSETAAPRAILTGHDYEVTCAAVCAELGLVLSGSQEGPCLIHSMNGDLLRTLEGPENCLKPKLIQASREGHCVIFYENGLFCTFSVNGKLQATMETDDNIRAIQLSRDGQYLLTGGDRGVVVVRQVSDLKQLFAYPGCDAGIRAMALSYDQRCIISGMASGSIVLFYNDFNRWHHEYQTRY

SEQ ID NO: 167386 - DNA, 8592 bp, Artificial Sequence
  derived and/or modified sequence
atggccagcgaggacaacagagtgcccagccccccccccaccggcgacgacggcggcggcggcggcagagaggagacccccaccgagggcggcgccctgagcctgaagcccggcctgcccatcagaggcatcagaatgaagttcgccgtgctgaccggcctggtggaggtgggcgaggtgagcaacagagacatcgtggagaccgtgttcaacctgctggtgggcggccagttcgacctggagatgaacttcatcatccaggagggcgagagcatcaactgcatggtggacctgctggagaagtgcgacatcacctgccaggccgaggtgtggagcatgttcaccgccatcctgaagaagagcatcagaaacctgcaggtgtgcaccgaggtgggcctggtggagaaggtgctgggcaagatcgagaaggtggacaacatgatcgccgacctgctggtggacatgctgggcgtgctggccagctacaacctgaccgtgagagagctgaagctgttcttcagcaagctgcagggcgacaagggcagatggcccccccacgccggcaagctgctgagcgtgctgaagcacatgccccagaagtacggccccgacgccttcttcaacttccccggcaagagcgccgccgccatcgccctgccccccatcgccaagtggccctaccagaacggcttcaccttccacacctggctgagaatggaccccgtgaacaacatcaacgtggacaaggacaagccctacctgtactgcttcagaaccagcaagggcctgggctacagcgcccacttcgtgggcggctgcctgatcgtgaccagcatcaagagcaagggcaagggcttccagcactgcgtgaagttcgacttcaagccccagaagtggtacatggtgaccatcgtgcacatctacaacagatggaagaacagcgagctgagatgctacgtgaacggcgagctggccagctacggcgagatcacctggttcgtgaacaccagcgacaccttcgacaagtgcttcctgggcagcagcgagaccgccgacgccaacagagtgttctgcggccagatgaccgccgtgtacctgttcagcgaggccctgaacgccgcccagatcttcgccatctaccagctgggcctgggctacaagggcaccttcaagttcaaggccgagagcgacctgttcctggccgagcaccacaagctgctgctgtacgacggcaagctgagcagcgccatcgccttcacctacaaccccagagccaccgacgcccagctgtgcctggagagcagccccaaggacaaccccagcatcttcgtgcacagcccccacgccctgatgctgcaggacgtgaaggccgtgctgacccacagcatccagagcgccatgcacagcatcggcggcgtgcaggtgctgttccccctgttcgcccagctggactacagacagtacctgagcgacgagatcgacctgaccatctgcagcaccctgctggccttcatcatggagctgctgaagaacagcatcgccatgcaggagcagatgctggcctgcaagggcttcctggtgatcggctacagcctggagaagagcagcaagagccacgtgagcagagccgtgctggagctgtgcctggccttcagcaagtacctgagcaacctgcagaacggcatgcccctgctgaagcagctgtgcgaccacgtgctgctgaaccccgccatctggatccacacccccgccaaggtgcagctgatgctgtacacctacctgagcaccgagttcatcggcaccgtgaacatctacaacaccatcagaagagtgggcaccgtgctgctgatcatgcacaccctgaagtactactactgggccgtgaacccccaggacagaagcggcatcacccccaagggcctggacggccccagacccaaccagaaggagatgctgagcctgagagccttcctgctgatgttcatcaagcagctggtgatgaaggacagcggcgtgaaggaggacgagctgcaggccatcctgaactacctgctgaccatgcacgaggacgacaacctgatggacgtgctgcagctgctggtggccctgatgagcgagcaccccaacagcatgatccccgccttcgaccagagaaacggcctgagagtgatctacaagctgctggccagcaagagcgagggcatcagagtgcaggccctgaaggccatgggctacttcctgaagcacctggcccccaagagaaaggccgaggtgatgctgggccacggcctgttcagcctgctggccgagagactgatgctgcagaccaacctgatcaccatgaccacctacaacgtgctgttcgagatcctgatcgagcagatcggcacccaggtgatccacaagcagcaccccgaccccgacagcagcgtgaagatccagaacccccagatcctgaaggtgatcgccaccctgctgagaaacagcccccagtgccccgagagcatggaggtgagaagagccttcctgagcgacatgatcaagctgttcaacaacagcagagagaacagaagaagcctgctgcagtgcagcgtgtggcaggagtggatgctgagcctgtgctacttcaaccccaagaacagcgacgagcagaagatcaccgagatggtgtacgccatcttcagaatcctgctgtaccacgccgtgaagtacgagtggggcggctggagagtgtgggtggacaccctgagcatcacccacagcaaggtgaccttcgagatccacaaggagaacctggccaacatcttcagagagcagcagggcaaggtggacgaggagatcggcctgtgcagcagcaccagcgtgcaggccgccagcggcatcagaagagacatcaacgtgagcgtgggcagccagcagcccgacaccaaggacagccccgtgtgcccccacttcaccaccaacggcaacgagaacagcagcatcgagaagaccagcagcctggagagcgccagcaacatcgagctgcagaccaccaacaccagctacgaggagatgaaggccgagcaggagaaccaggagctgcccgacgagggcaccctggaggagaccctgaccaacgagaccagaaacgccgacgacctggaggtgagcagcgacatcatcgaggccgtggccatcagcagcaacagcttcatcaccaccggcaaggacagcatgaccgtgagcgaggtgaccgccagcatcagcagccccagcgaggaggacgccagcgagatgcccgagttcctggacaagagcatcgtggaggaggaggaggacgacgactacgtggagctgaaggtggagggcagccccaccgaggaggccaacctgcccaccgagctgcaggacaacagcctgagccccgccgccagcgaggccggcgagaagctggacatgttcggcaacgacgacaagctgatcttccaggagggcaagcccgtgaccgagaagcagaccgacaccgagacccaggacagcaaggacagcggcatccagaccatgaccgccagcggcagcagcgccatgagccccgagaccaccgtgagccagatcgccgtggagagcgacctgggccagatgctggaggagggcaagaaggccaccaacctgaccagagagaccaagctgatcaacgactgccacggcagcgtgagcgaggccagcagcgagcagaagatcgccaagctggacgtgagcaacgtggccaccgacaccgagagactggagctgaaggccagccccaacgtggaggccccccagccccacagacacgtgctggagatcagcagacagcacgagcagcccggccagggcatcgcccccgacgccgtgaacggccagagaagagacagcagaagcaccgtgttcagaatccccgagttcaactggagccagatgcaccagagactgctgaccgacctgctgttcagcatcgagaccgacatccagatgtggagaagccacagcaccaagaccgtgatggacttcgtgaacagcagcgacaacgtgatcttcgtgcacaacaccatccacctgatcagccaggtgatggacaacatggtgatggcctgcggcggcatcctgcccctgctgagcgccgccaccagcgccacccacgagctggagaacatcgagcccacccagggcctgagcatcgaggccagcgtgaccttcctgcagagactgatcagcctggtggacgtgctgatcttcgccagcagcctgggcttcaccgagatcgaggccgagaagagcatgagcagcggcggcatcctgagacagtgcctgagactggtgtgcgccgtggccgtgagaaactgcctggagtgccagcagcacagccagctgaagaccagaggcgacaaggccctgaagcccatgcacagcctgatccccctgggcaagagcgccgccaagagccccgtggacatcgtgaccggcggcatcagccccgtgagagacctggacagactgctgcaggacatggacatcaacagactgagagccgtggtgttcagagacatcgaggacagcaagcaggcccagttcctggccctggccgtggtgtacttcatcagcgtgctgatggtgagcaagtacagagacatcctggagccccagaacgagagacacagccagagctgcaccgagaccggcagcgagaacgagaacgtgagcctgagcgagatcacccccgccgccttcagcaccctgaccaccgccagcgtggaggagagcgagagcaccagcagcgccagaagaagagacagcggcatcggcgaggagaccgccaccggcctgggcagccacgtggaggtgaccccccacaccgccccccccggcgtgagcgccggccccgacgccatcagcgaggtgctgagcaccctgagcctggaggtgaacaagagccccgagaccaagaacgacagaggcaacgacctggacaccaaggccacccccagcgtgagcgtgagcaagaacgtgaacgtgaaggacatcctgagaagcctggtgaacatccccgccgacggcgtgaccgtggaccccgccctgctgccccccgcctgcctgggcgccctgggcgacctgagcgtggagcagcccgtgcagttcagaagcttcgacagaagcgtgatcgtggccgccaagaagagcgccgtgagccccagcaccttcaacaccagcatccccaccaacgccgtgagcgtggtgagcagcgtggacagcgcccaggccagcgacatgggcggcgagagccccggcagcagaagcagcaacgccaagctgcccagcgtgcccaccgtggacagcgtgagccaggaccccgtgagcaacatgagcatcaccgagagactggagcacgccctggagaaggccgcccccctgctgagagagatcttcgtggacttcgcccccttcctgagcagaaccctgctgggcagccacggccaggagctgctgatcgagggcaccagcctggtgtgcatgaagagcagcagcagcgtggtggagctggtgatgctgctgtgcagccaggagtggcagaacagcatccagaagaacgccggcctggccttcatcgagctggtgaacgagggcagactgctgagccagaccatgaaggaccacctggtgagagtggccaacgaggccgagttcatcctgagcagacagagagccgaggacatccacagacacgccgagttcgagagcctgtgcgcccagtacagcgccgacaagagagaggacgagaagatgtgcgaccacctgatcagagccgccaagtacagagaccacgtgaccgccacccagctgatccagaagatcatcaacatcctgaccgacaagcacggcgcctggggcaacagcgccgtgagcagacccctggagttctggagactggactactgggaggacgacctgagaagaagaagaagattcgtgagaaaccccctgggcagcacccaccccgaggccaccctgaagaccgccgtggagcacgtgtgcatcttcaagctgagagagaacagcaaggccaccgacgaggacatcctggccaagggcaagcagagcatcagaagccaggccctgggcaaccagaacagcgagaacgagatcctgctggagggcgacgacgacaccctgagcagcgtggacgagaaggacctggagaacctggccggccccgtgagcctgagcacccccgcccagctggtggcccccagcgtggtggtgaagggcaccctgagcgtgaccagcagcgagctgtacttcgaggtggacgaggaggaccccaacttcaagaagatcgaccccaagatcctggcctacaccgagggcctgcacggcaagtggctgttcaccgagatcagaagcatcttcagcagaagatacctgctgcagaacaccgccctggagatcttcatggccaacagagtggccgtgatgttcaacttccccgaccccgccaccgtgaagaaggtggtgaactacctgcccagagtgggcgtgggcaccagcttcggcctgccccagaccagaagaatcagcctggccagccccagacagctgttcaaggccagcaacatgacccagagatggcagcacagagagatcagcaacttcgagtacctgatgttcctgaacaccatcgccggcagaagctacaacgacctgaaccagtaccccgtgttcccctgggtgatcaccaactacgagagcgaggagctggacctgaccctgcccaccaacttcagagacctgagcaagcccatcggcgccctgaaccccaagagagccgccttcttcgccgagagatacgagagctgggaggacgaccaggtgcccaagttccactacggcacccactacagcaccgccagcttcgtgctggcctggctgctgagaatcgagcccttcaccacctacttcctgaacctgcagggcggcaagttcgaccacgccgacagaaccttcagcagcatcagcagagcctggagaaacagccagagagacaccagcgacatcaaggagctgatccccgagttctactacctgcccgagatgttcgtgaacttcaacaactacaacctgggcgtgatggacgacggcaccgtggtgagcgacgtggagctgcccccctgggccaagaccagcgaggagttcgtgcacatcaacagactggccctggagagcgagttcgtgagctgccagctgcaccagtggatcgacctgatcttcggctacaagcagcagggccccgaggccgtgagagccctgaacgtgttctactacctgacctacgagggcgccgtgaacctgaacagcatcaccgaccccgtgctgagagaggccgtggaggcccagatcagaagcttcggccagacccccagccagctgctgatcgagccccacccccccagaggcagcgccatgcaggtgagccccctgatgttcaccgacaaggcccagcaggacgtgatcatggtgctgaagttccccagcaacagccccgtgacccacgtggccgccaacacccagcccggcctggccacccccgccgtgatcaccgtgaccgccaacagactgttcgccgtgaacaagtggcacaacctgcccgcccaccagggcgccgtgcaggaccagccctaccagctgcccgtggagatcgaccccctgatcgccagcaacaccggcatgcacagaagacagatcaccgacctgctggaccagagcatccaggtgcacagccagtgcttcgtgatcaccagcgacaacagatacatcctggtgtgcggcttctgggacaagagcttcagagtgtacagcaccgacaccggcagactgatccaggtggtgttcggccactgggacgtggtgacctgcctggccagaagcgagagctacatcggcggcaactgctacatcctgagcggcagcagagacgccaccctgctgctgtggtactggaacggcaagtgcagcggcatcggcgacaaccccggcagcgagaccgccgcccccagagccatcctgaccggccacgactacgaggtgacctgcgccgccgtgtgcgccgagctgggcctggtgctgagcggcagccaggagggcccctgcctgatccacagcatgaacggcgacctgctgagaaccctggagggccccgagaactgcctgaagcccaagctgatccaggccagcagagagggccactgcgtgatcttctacgagaacggcctgttctgcaccttcagcgtgaacggcaagctgcaggccaccatggagaccgacgacaacatcagagccatccagctgagcagagacggccagtacctgctgaccggcggcgacagaggcgtggtggtggtgagacaggtgagcgacctgaagcagctgttcgcctaccccggctgcgacgccggcatcagagccatggccctgagctacgaccagagatgcatcatcagcggcatggccagcggcagcatcgtgctgttctacaacgacttcaacagatggcaccacgagtaccagaccagatactag

SEQ ID NO: 167387 - DNA, 8592 bp, Artificial Sequence
  derived and/or modified sequence
atggcttctgaagacaatcgggtcccgtctccaccgcctactggggacgacggcggcggcgggggacgggaagagacgcctactgagggcggggctttgagcctgaagcctgggctaccaatccggggcatccgaatgaaattcgcagttttgaccggcctagtggaggtaggcgaggtctctaatcgcgatatcgtggagactgtgttcaacctcttagtcgggggacagtttgatctcgaaatgaattttattatccaagaaggcgaatcaattaattgtatggttgatttgctagagaagtgcgatattacttgccaggccgaagtctggtcaatgtttacggccattcttaaaaagagtatacgcaatctgcaagtgtgcactgaagtgggactggtcgagaaagttcttgggaagattgaaaaagttgataatatgatcgccgatctcctggtagacatgctgggtgtgctcgcctcatacaatctgaccgtgagagagttgaagctttttttcagcaaattacagggcgacaagggacggtggcccccacacgccggaaagcttctgtccgtgctgaaacatatgcctcaaaaatacggcccagatgcttttttcaacttcccagggaagtcagcagcagcaatagccctgcctcccatagctaaatggccttatcagaatgggtttacttttcacacatggctgcggatggaccccgttaacaacattaatgtcgacaaggataaaccctacctgtattgcttccgaacgtcaaaagggttgggttatagcgcacatttcgttggtggatgcctcatcgtaacctccatcaaaagtaaagggaaaggtttccagcattgcgtgaagttcgactttaaaccccaaaagtggtatatggttacgatcgtacacatttataacaggtggaaaaattccgagctcagatgttacgtgaatggagagttagcaagctacggtgagattacctggttcgtcaacacatccgatacgtttgacaaatgcttccttggcagcagtgagactgcagacgcaaaccgcgtgttttgcggacagatgacagcagtctatttgttttccgaagcgctcaacgctgcacaaatcttcgctatctaccagctgggtttagggtataagggtacgttcaaattcaaagcggaaagtgatctctttctggcggaacaccacaagctactgctctatgacggcaagctgtcttccgctatagccttcacatacaacccccgggcaaccgatgcccaactttgtctggagtcaagtccgaaggacaatcctagcatcttcgtgcactcaccacacgcgctgatgctccaagatgtaaaggcggttttgactcacagcatccagtcagctatgcacagtatcgggggagtacaggtcctcttccccctgttcgctcagcttgactacaggcagtatttgtctgacgagatcgacctcaccatctgcagcaccttgttggcctttatcatggaactgttgaaaaattccatcgccatgcaggagcagatgttggcctgtaaagggttcctggtcatcggttacagcctggaaaaatcatccaaatcccacgtctcccgcgccgtactcgagctttgtcttgcgtttagtaaatacctgagtaatctgcaaaacggaatgccactgctcaaacagctctgcgatcacgttctactgaaccccgccatatggattcacacaccagcaaaagtgcaattgatgctgtacacctacttgtctactgagttcatcggcacagtgaacatttacaacacaattcggcgggtgggtaccgttctgctgatcatgcacacactcaaatactattattgggccgtgaaccctcaggatcggagtggaatcacgccaaagggcctggatggcccaaggcctaaccagaaggagatgctatccctgcgagcctttctcctcatgttcatcaaacagctggtgatgaaagacagcggcgtgaaagaggacgaactgcaggcaatactgaactacttgctgacaatgcacgaggatgacaatcttatggacgtccttcagttgcttgtcgcgctgatgagcgagcacccgaacagtatgatcccggccttcgatcaaagaaatgggctcagagtaatttacaaactcttggcctcaaagagcgagggtattagagtgcaggctctaaaggcaatgggatactttcttaaacacctcgcacccaagaggaaagctgaggtaatgctgggtcatggcttgttttccctgctagcagaacgcctgatgctccagaccaacctgattactatgacaacttataatgtgctgttcgaaatactcatcgagcaaatcggaacccaggttattcataaacagcaccccgatcctgactcatcggtgaagattcagaacccacagatcctcaaggtcatcgctacattgcttcgaaatagtccacaatgccctgagagtatggaggtccggagagcattcttgagtgacatgattaaactgttcaacaactccagagaaaatcgtaggtcactgctgcagtgtagcgtgtggcaagaatggatgctgtccctgtgctatttcaaccctaagaattccgacgaacagaaaattactgaaatggtatacgctatcttccgtatcctgctttatcatgcagtgaaatatgagtggggcggctggagagtttgggtagacaccctcagcatcacacactccaaagttacattcgaaatacacaaggagaatctggcaaacatttttagagagcagcagggaaaggtggacgaggagataggactctgttcaagcacatctgtgcaggccgcctctggcatccggagggacattaatgtgagtgttggttcccagcagccagacaccaaggattcacccgtctgccctcacttcaccactaatggcaacgagaactcctccatagagaagacaagttccctggagtctgcttctaatatagagctccaaaccaccaacacatcatatgaagaaatgaaggctgaacaggagaaccaggagttgcctgacgagggaacacttgaggagaccctgaccaatgaaactcgcaatgcagacgacctggaagtctcttctgacatcatagaggccgtggcaatctccagtaatagcttcattaccactggaaaggactcaatgacggtgagcgaggttacagctagtatttccagtccaagcgaagaggatgccagcgaaatgcccgaatttctggataaatccatcgtcgaggaagaggaagacgatgattatgtagagctgaaagtcgaggggtcacccaccgaagaggccaatctgccaaccgaactgcaagataactccctgtcccctgccgccagcgaagctggggaaaaactggacatgttcggcaatgatgacaagcttatcttccaagaaggcaagcccgtgaccgaaaagcagacggacacggaaactcaagacagtaaggactctggcattcagacaatgacagcctctggttccagcgccatgagcccagagaccacggtgtcacagattgcggtggaaagcgatctaggccagatgttagaagaggggaaaaaggctactaatctgacacgtgagacaaaattgattaacgattgccatggctcagttagcgaggccagttccgagcagaaaatcgcaaaactggatgtttcaaatgtcgccaccgataccgagagattggagctgaaggctagtcccaatgtggaggcccctcagccccatcggcacgtcctggaaattagccggcaacacgagcagcctggccaagggatcgcccccgacgccgtaaatggccagcgcagagacagtcgttctacggttttcagaataccggagttcaactggtctcagatgcatcagcgtctgcttacagatctcctgttctcaattgaaacagatattcagatgtggcgatcccactcgaccaagacagtcatggattttgtgaattcatctgacaatgtcatttttgtccacaataccatccacctcatttctcaagtgatggataatatggttatggcatgcggaggcatactccccctgctctccgctgcgacgtctgccacacacgaattggaaaacattgaaccaactcagggactgtctatcgaggcttctgtgacctttctccagcggctgatcagtcttgtcgacgtactgatttttgcttcttcattaggctttaccgaaatcgaggcagagaagtccatgagttccgggggcatccttaggcagtgcctgagactggtgtgcgcagttgcagtgagaaattgtctcgagtgccagcagcacagccaactgaagactagaggcgacaaggccctgaagccaatgcatagtcttatccctctcggtaaatccgcggcaaaatcccctgtcgatatcgtgactggtggaatttcccccgtgcgggacctcgacaggctgctgcaggatatggacattaacaggctgagggccgtagtgtttcgcgacattgaagatagtaagcaggcacagttcctggccctggctgtagtgtactttatttctgtgctgatggtctctaaataccgggatatcctggaacctcagaacgaaagacatagccagagctgtactgaaacgggctcagagaatgagaatgtctctctgagcgaaatcacaccggctgcgtttagcaccctgaccacagctagtgtggaggagtcagagtctacctcctccgctcgccgaagggacagcggcattggcgaagaaacagcaactggcctaggctctcatgtggaggtgacgccccatacggccccacctggtgtgagcgcagggcctgatgcgatcagcgaggtgttgtctacactttccctcgaggtaaataagtcacccgaaacaaaaaacgaccgtggtaatgatcttgacaccaaggctacacctagcgtcagcgtctccaaaaatgtgaatgttaaagatattctacggagtcttgtcaacataccagcagatggagtgactgtggaccctgcgctgctgccccccgcctgcttgggcgcattgggtgatctgtccgtggagcaaccagtgcagttccgaagcttcgataggtccgtcatcgtggccgcaaagaaatctgctgtctctccttctacttttaacacaagtatccctaccaacgctgtgtccgttgtctcctccgtggactccgctcaggctagcgacatgggaggggaatctcccggttcacgcagcagcaacgcgaagctcccctcagtgcctaccgttgacagcgtatctcaagaccccgtgtcaaatatgtcaataaccgagcgtttggaacacgcccttgaaaaggcggcacctctacttagagaaatttttgtggatttcgctccgttcctcagccggacgcttctcggatcccatggacaggagttgctgattgagggaacaagtctggtatgcatgaaaagtagctccagtgtcgtcgaacttgtgatgctgctgtgttcccaggaatggcagaactctatccagaaaaatgcaggcctggcttttattgagctcgtgaatgaaggcaggctgctgtctcagactatgaaggatcacctggtaagggtggccaacgaagcagaatttatactgtcccgccagagggctgaagacatacaccgacatgccgagtttgagtccctttgcgcccagtactctgcagacaagagggaggatgagaagatgtgtgatcacctgatacgcgcggccaaataccgggaccacgtaactgctacgcaacttatccagaaaatcattaatatcttaaccgataagcacggggcatggggtaactcagctgtgagcaggccgctcgaattttggcgactcgattactgggaagatgacctaagaaggcggaggaggttcgtcagaaatccactgggctcaacccatcccgaagccacccttaaaacggccgttgaacacgtctgtatctttaaactgagggagaactctaaggccacagacgaagatattttggccaaggggaaacagagcatcaggtctcaagccctcgggaatcaaaactcggaaaacgagattctgcttgaaggcgatgatgacacactgagcagcgtcgatgagaaggatttggagaacttggccgggcccgtttccttgagcactcctgcccaacttgtggctccttccgtggtcgtcaagggaactctttccgttacctcatccgaactttattttgaggtagacgaagaggaccccaatttcaagaaaatagatcccaaaatcctggcctatactgaaggattgcatggtaagtggctgtttaccgagatacggagcattttttctcggagatatcttctgcagaataccgctctggaaatctttatggcgaatcgcgttgctgtgatgtttaatttccccgaccccgcaacagttaaaaaggtggttaactatcttccccgagttggagtgggcacatctttcggccttccacagaccagacgtatcagcctagcctcccctcgccagctttttaaagcttctaacatgactcagcggtggcaacacagggagattagtaacttcgaatatctgatgttcctaaataccatcgccggacgcagttataacgacctgaatcagtaccccgtattcccttgggttatcacaaattacgaatccgaagagctggatcttaccctgcccactaactttagagacctgtcaaagcccattggggcactaaatcctaaaagggccgcattcttcgcggagagatacgagtcttgggaagatgatcaagtgccgaaattccattatggcacgcattactccaccgcatcattcgtgctcgcctggctgctgagaatcgagcccttcacaacctactttttgaacctccagggtggtaagttcgaccacgcagatcgaacattctcctcaatctctagagcatggcggaatagtcagcgggacacctcggacataaaggaactcatacccgagttttactacctgcctgagatgtttgtaaacttcaacaactataacctgggcgtgatggacgacggtaccgtcgtttcggatgtggagctgcctccttgggctaagactagcgaggaatttgtgcacatcaatcgcctggcactagagtccgagttcgtgagctgccagctacatcaatggatagatctgatttttgggtataagcagcagggcccagaggctgtgcgagccctcaatgtattttattacctgacctacgagggggcagttaatctcaattccatcacggatcccgtccttagagaggctgtggaagcacagattagatccttcggccagaccccctcgcagctgcttatcgaaccccaccccccccgaggcagcgccatgcaggtgtctccattaatgttcaccgataaggcccaacaggacgtgattatggtgctcaagttcccctctaacagtccagtgacgcatgtcgccgcaaacacccagccgggccttgcgacacctgcggttattaccgtgacagctaatagactcttcgctgtgaataaatggcataatctcccagcccaccagggcgccgtacaggaccaaccctatcagctccccgtcgaaattgatcctctgattgcttccaatactggaatgcacaggcgccaaatcacagacctgttggaccaaagtattcaagttcatagccagtgcttcgtgatcactagcgacaaccgctacattctggtctgcgggttttgggataaatcgttccgtgtgtattccacggatacgggcaggctaatccaagtggtgttcggccattgggacgtggtgacttgtttagccagaagcgagtcctacatcggcggcaattgctatattctatcaggttcgagggacgccaccctgttactgtggtactggaatggcaagtgctcggggatcggcgacaaccccggatctgagactgctgccccaagagccatcttgacagggcacgattatgaggtgacgtgcgccgccgtttgcgcagaactgggacttgtgctgtcaggctctcaggaaggcccgtgcctcatacattcaatgaacggcgacctcctacgaaccctcgagggccctgagaactgtctcaagcccaaattgatccaagccagccgcgagggccattgcgtgatcttttacgaaaatgggctgttttgtacattctccgtgaatgggaaattacaggccaccatggaaaccgatgataatattagagctatccaactgtccagagacggccagtacctgctaactggaggcgaccggggcgtggtggtggtccggcaggtatccgacttaaaacagctgtttgcttaccctggatgcgatgctgggatcagggcgatggcgctgtcatatgaccaacgctgtattatttccggaatggcatctggtagtatcgtgctgttttataacgatttcaacaggtggcaccacgaataccagaccagatactag

SEQ ID NO: 167388 - DNA, 9899 bp, Artificial Sequence
  derived and/or modified sequence
agggaaacttggaggctgcgaccagggtttggcgttgttgtcagcctcggggagagagattggacaaatattctccaagaggaggagggcgacgccaaggactttccacatcaactgctttggggtatctccacaagttggaagagggaccctttcgttttgcattgcgtgtgttgtgctcattaccagtgcagcgactgccgtcccagggtgactctgagttgtcctttatcgtgagctagcaatggctagcgaagacaatcgtgtcccttccccgccaccaacaggtgatgacgggggaggtggagggagagaagaaacccctactgaagggggtgcattgtctctgaaaccagggctccccatcaggggcatcagaatgaaatttgccgtgttgaccggtttggttgaagttggagaagtatccaatagggatattgtagaaactgtctttaacctgttggtaggaggacagtttgatctggaaatgaatttcattatccaagaaggtgagagtattaactgcatggtggacctactggaaaaatgtgacattacgtgccaagcagaagtctggagcatgtttacagccattctgaagaaaagcatacggaatcttcaagtctgcactgaagtaggccttgttgaaaaagtgcttgggaaaattgaaaaagttgacaatatgatagcagatcttttggttgacatgttgggagtgctggctagctataatttgacagttcgcgagctaaagcttttcttcagtaaacttcaaggagataaaggacgatggcctccacatgctgggaagttgctgtctgtgttaaagcatatgcctcagaagtatggtcctgatgccttttttaactttccaggaaagagtgctgcagctattgcattacctcctatagccaaatggccataccagaatggttttacatttcatacatggcttagaatggatcctgtaaataacatcaatgtagataaggataaaccatatttgtattgtttcagaaccagcaaaggtcttggctattctgctcattttgttggaggctgtttgattgtaacatcaataaagtcaaaaggaaaaggctttcaacactgtgtgaaatttgatttcaagccacaaaagtggtatatggttaccatagtacacatctataaccgatggaagaatagtgaacttcgatgttatgtgaatggtgagctggcttcctatggagagataacatggtttgtcaacactagcgatacctttgacaaatgtttcctgggctcatcagaaacagcagatgctaatagagtattctgtggtcagatgactgcagtttaccttttcagtgaagctctaaatgcagctcagatatttgctatttatcagttgggcctgggatacaagggtacatttaaattcaaagcagaaagcgaccttttccttgctgagcatcacaaacttttattgtacgatgggaaactctctagtgccattgcattcacgtacaatccacgggctacagatgcccagctttgtcttgaatcatctcctaaggacaacccttcaatttttgttcattcaccacatgcactcatgctccaggatgtaaaggcagttttaacacattccatccaaagtgcaatgcattcaattggaggagtacaagtactatttccactttttgcacagttggattacaggcaatatttgtctgatgagattgatttgactatatgttcaaccttgctggcctttatcatggaattgttgaagaactcaattgctatgcaggaacagatgcttgcctgtaagggcttcttggtaataggatatagccttgaaaagtcttccaaatctcatgttagcagagcagtacttgaactttgccttgcattttcaaaatatctgagtaatctgcagaatgggatgcccctgctcaagcaattgtgtgatcacgttcttcttaatcctgccatatggattcataccccagccaaggttcaactgatgctctatacttatctgtccacggaattcattggtacagtcaacatatataacaccattcggagagttggaacagtgcttctcatcatgcacacgctgaagtactactactgggcagtgaatcctcaggatcgaagtggtatcaccccaaaaggattagatggaccgcgacctaatcaaaaagaaatgctttctctacgagcattcttgttgatgttcattaagcaattagtgatgaaggattctggagtaaaggaagatgaattacaggccattcttaattacctactgactatgcatgaggatgacaatctaatggatgtcctacagctgcttgttgcattaatgtcagaacaccctaactctatgattcctgcttttgaccaaaggaatgggttacgtgttatctacaaacttctggcatcgaaaagtgaaggaatcagggtacaagctcttaaggcaatgggttattttttaaaacatctggccccaaagaggaaagcagaagtcatgcttggacatggattgttttcattgctagctgaaaggctcatgcttcagacaaatttaatcacaatgaccacatataatgtgctgtttgagattcttatagaacagattggtactcaggtgatacataaacagcatccagatcctgattcttcagtgaagatacaaaaccctcagatactaaaagtaattgcgaccctacttcgaaattctccccagtgcccagagagcatggaggttcgcagagcctttctttctgacatgattaaactttttaataacagtagagaaaacaggaggagcttgctacaatgctctgtgtggcaagaatggatgctttctctctgctattttaatcctaagaattcagatgagcaaaagataacagaaatggtatacgccatattcagaatcctgctttaccatgcagtcaaatatgagtggggtggctggcgtgtatgggtagacactttatcaatcactcattcaaaggtcacttttgaaatacacaaagaaaaccttgccaatatatttagggaacagcaaggaaaagttgatgaagaaatagggctgtgttcttcaacttcagttcaagcagcctctggcattagaagggatattaatgtttcagtaggatcccagcaaccagatacgaaggattctcctgtctgtcctcatttcaccacaaatggtaatgaaaattcaagtatagagaagacaagttcactagaatctgcatctaatattgaactgcaaactactaatacatcttatgaagaaatgaaagctgagcaagaaaatcaggagttaccagatgaaggcactttggaagaaacactgacaaatgagacaaggaatgcagatgatttagaagtatcttctgacataatagaagctgtggctatttcctctaattcttttataacaactggcaaagattcaatgactgtcagtgaagtaactgcttctataagttctccttcagaagaggatgcctcagagatgccagaattcttggataaatctatagtagaggaagaggaagatgatgattatgtggaactgaaagtagaaggcagtcctactgaggaagctaatctacccacagagctccaagataacagtttgtctccagctgcatctgaagccggtgaaaaactggacatgtttggtaatgatgacaaattaatatttcaagaaggaaaacctgttactgaaaagcaaactgatactgaaactcaagattctaaagattctggaattcagactatgacagcatcagggtcttcagctatgtcaccagaaactactgtttcccaaatagctgtagaatcagaccttggtcagatgctggaggaagggaagaaagcaactaacctcactagagaaaccaaattaattaatgattgtcatggtagtgtctctgaggcttcttctgagcaaaagattgcgaagttggatgtttccaatgttgctacagatactgagaggctggagttgaaggccagtcccaacgtggaagcacctcaacctcatcgacatgtgcttgagatatcaaggcaacatgagcagccagggcaaggaatagcaccagatgcagttaatggacaaaggagggattccagatctactgtgtttcgtattcctgagttcaactggtctcagatgcatcaacgtttgctcactgatctattattttcaatagaaacagatatacagatgtggagaagccattcaacaaagacagttatggacttcgtgaatagcagtgataatgtcatctttgtacacaacacaattcatctcatctctcaagtgatggacaatatggtcatggcttgtgggggtatactgccattgctttcagctgctacatcggctacacatgaactggaaaatattgaacctactcaaggcctttcaatagaagcctctgtgacatttttgcagaggctaattagccttgtggatgtgcttatatttgcaagttctcttggctttactgaaattgaagctgaaaaaagtatgtcatctggaggaattttgcggcagtgtctccgactagtttgtgcagtcgcagtaaggaattgcttggagtgtcaacagcattcacaactgaaaactaggggagataaagccttgaaaccaatgcatagccttattcctttagggaaatctgcagcgaagagcccagtggacattgtgactggcggtatatctccagtaagagatcttgacaggcttctacaggacatggatattaatcggcttagggcagttgttttcagagacatagaggatagcaaacaagctcaatttttagccttggcagtagtatactttatctctgttcttatggtctccaagtacagagacattttggaaccccaaaatgaaaggcatagccagtcatgtacagaaactggcagtgaaaatgagaatgtatcactctctgaaatcacaccagcagcattcagcactttaactacggcatcagtggaagaatctgaaagcacatcatctgctcgaaggagggactcaggcattggggaagaaacagccactggtttaggaagccatgtggaagtaactcctcacacagcacctcctggtgtcagtgcaggcccagatgcaatcagcgaggtgctatctactctttctttagaagtcaataagtctccggaaaccaaaaatgatagaggaaatgacttggacactaaggctacaccgtcagtttcagtttcaaaaaacgtcaatgtgaaagacattctccgaagcttggttaacataccagcagatggagtcacagtggatcctgcccttctgccaccagcctgccttggagcccttggtgatctatctgtggaacaacccgtgcagttcagatcttttgacagaagtgtcattgttgcagcaaaaaagtcagcagtctcaccttccacctttaatacaagcatacctaccaatgctgtcagtgtggtttcctcagtagattcagcccaagcctcagatatgggaggagaatcaccaggcagtagatcatctaatgcaaaattgccctcagttccaacagttgattcagtttcacaagatccggtttcaaatatgagtattacagagaggcttgaacacgctttggaaaaggcagctcctctccttcgtgagatttttgtggattttgcaccttttctttctcggacacttttgggtagccatggacaagaactgcttatagaaggaacaagtctggtttgcatgaagtcgagtagttcagttgtggaattggttatgctactgtgttctcaggagtggcaaaattctattcagaagaatgcaggccttgcttttatcgaacttgtcaatgaaggaaggttgcttagccagacaatgaaggatcatctagtaagagtagcaaatgaagctgaatttatcctgagcaggcagagagcagaagatattcacagacatgcggaatttgagtcactgtgtgcccagtattctgcagacaaacgagaagatgagaagatgtgtgatcatttgataagagcagcaaaatatcgtgaccacgtgacagcaactcaactaatccagaaaattatcaacattctcacagacaagcatggagcctggggaaattctgcagtgagtcgtcctcttgagttctggcgccttgactactgggaagatgacttgcggcgccggcgacgatttgtgcgtaaccctctaggatcgacacatcctgaagcgacactaaaaacagccgtggaacatgtgtgcatttttaaattgagagagaacagcaaagccacagatgaagatatccttgctaaaggaaaacagtccatcaggagtcaggctttaggaaatcagaactcagaaaacgagatcctcctggaaggcgatgatgatactctgtcatccgtggatgagaaagatttagagaatcttgccggtcctgttagcctgagcacaccagctcagcttgtggccccctctgttgtagtaaagggcactctttctgtcacctcctccgaactctattttgaggtggatgaagaggatcctaacttcaaaaaaatcgaccccaagatcttggcatatacagaagggctgcatggaaaatggctgttcacagagatacgatcaatcttttctcgtcgttatcttttgcaaaatacagccctggagatctttatggcaaacagagttgctgtgatgttcaacttcccagaccctgcaacagtaaagaaagtggttaactatctacctcgtgttggcgttggaacaagttttggattgcctcaaaccagacgtatttcattagctagtccacgtcagctttttaaggcttctaatatgacccagcgatggcaacacagagagatatctaattttgagtacttgatgtttctcaacacgatagcaggacggagttataatgacttaaatcagtatccagtgtttccttgggtcatcactaattatgaatcagaagaactggatcttaccttgcccaccaacttcagagatttgtccaagccaataggagctctgaacccaaaaagagcagcattcttcgctgagcgttatgaatcatgggaagatgatcaagttccaaagtttcactatggtactcattactcaactgcaagttttgttcttgcatggctgctaagaatagaaccctttacaacttatttcctaaatttgcaaggaggcaaatttgatcatgcagatcgaactttttcatcaatttccagagcttggcgaaacagtcagcgtgatacctctgatattaaggagttgatccctgaattttattatctccctgagatgtttgtcaacttcaataattataatcttggagtgatggatgatgggacagtagtgtctgatgtcgaacttcctccttgggccaaaacctcagaagaatttgttcacataaacagattggccctggagagtgaatttgtttcctgccagcttcaccaatggattgatctcatttttggctataaacagcaaggaccagaagctgtccgagccctcaatgtgttctattacttgacctatgaaggagctgtcaatctgaattcaataactgatcctgtgttgagagaggctgttgaagctcaaatccgaagttttggacagactccttctcaactactcatagagccccatcctcccagaggttctgccatgcaagtgagtccattgatgttcacagacaaagcccagcaggatgttatcatggtcctcaagtttccctccaactcccctgttactcacgtggcagccaacacccagcctggtttggcaactcccgctgtgatcacagtcactgctaacaggttatttgcggtgaacaaatggcacaaccttcctgctcatcaaggtgctgtacaagaccagccataccagctgccagtggaaatcgatcctctcatagccagcaatacaggaatgcacaggaggcaaatcactgaccttttagaccaaagtattcaagtgcattcccagtgctttgtcatcacttcagacaaccgctatattctcgtctgtggcttctgggataaaagtttcagagtctattctacagacacaggaagattgatccaagtggtgtttggccattgggatgtcgtcacttgccttgctcgttctgagtcatatattgggggaaattgctacattctctcagggtcacgtgatgcaactcttttgctgtggtattggaatggaaaatgcagtgggattggagataacccaggcagtgagactgctgctcctcgggccattttgaccggccatgactatgaggtcacatgtgctgcggtgtgtgcggagctaggcctggtgttgagtggttcacaagaaggaccatgtctcatacattccatgaatggagacttgttgaggaccttggagggtcctgaaaactgcctgaaaccaaaactcattcaggcttcaagagagggtcattgtgtcatattctatgaaaacggcctcttctgtacattcagtgtgaatggaaaactccaggccacgatggaaacagatgataacataagagccatccagctgagccgagatgggcagtacctgctcacaggaggagacagaggagtggtcgtggtccggcaggtgtcggacctcaagcagctctttgcctatccaggatgtgacgctggaatccgggccatggcgctgtcttacgaccagaggtgcatcatttctggcatggcttcaggaagcattgtgctattttacaacgactttaaccggtggcatcatgaataccaaacccgctactgatggtgacagctgtacatcaactctgcccctaggatgagcagaagtacctggagcatcattctcttctaccacatctgaatgtaacttaaatttgctcaaagaagcaaaatattttttaaagttattaataattgctatttttgtagtctttgcttgacttttttgggggggattagcaaagcagaaaactggctgctgggttctgtagttttaaaaaatctatatttttagtcataatgagaagtctattttcaccaattatggaaacatacagtggagcaagtaaaccacttattccagctataatattatgaagaacatttcccatgcatctacaagcttgagaaataggattttcacagtggggaagtgggttacaatattggaataggaaaatttgatgctgtaatttgggtcctgtatttttccaaacaactgtgcttcttcagcactaatatttctgggatttaaatagtaatgtttaaattatggtaaatgtaatttaaaacatctcaattaagtctgtctatcaatattgttcttcaagcatgttttagacctagaaaagtatggtttgggggaggctattttattgtgtggttagcacaaggaatctaatttatagcaagtgtgaaatagttaccattttttcctgatctgtcatcttcatagcacaacaaaacgaaatgatggaaatgctcttgagctcacaacatttgtttttcttttaaagtaaatgcaagtaccaaagctcactactgcggtttgcctgtgcctggacaatgaggcggagccactgttgttttgttggggcacccccttccctccccgggtttgcaaatagaggctaccgggtgctgtattcagcaacacctgttttactatttgttattaaactatcatctccaccttccttttgattagcaatttgtactaagaaacgaaacaatgttatttggtggtgtataattctacttttctagtagattactgtgtggaattctgtgaaaaatatttgagaaaaggcctgtattgcataaataaattctttgtatgttgtgaa

SEQ ID NO: 167389 - DNA, 8592 bp, Artificial Sequence
  derived and/or modified sequence
atggccagcgaggacaacagagtgcccagccccccacccactggagatgatggcggcggcggcggccgggaggagacccccacagagggcggggccctgagcctgaagccaggcctgcccatccggggcatccgcatgaagtttgctgtgctgaccggcctggtggaggtgggggaggtgagcaacagagacatcgtggagaccgtcttcaacctgctggtgggcggccagtttgacctggagatgaacttcatcatccaggagggggagagcatcaactgcatggtggacctgctggagaagtgtgacatcacctgccaggccgaggtgtggagcatgttcaccgccatcctgaagaagagcatccggaacctgcaggtgtgcacagaggtgggcctggtggagaaggtgctgggcaagattgagaaggtggacaacatgattgctgacctgctggtggacatgctgggcgtgctggccagctacaacctgactgtgcgggagctgaagctgttcttcagcaagctgcagggcgacaagggccgctggccccctcatgctgggaagctgctgtctgtgctgaagcacatgccccagaagtatggcccagatgccttcttcaacttccctgggaagtctgctgctgccatcgccctgccccccatcgccaagtggccctaccagaatggcttcaccttccacacctggctgaggatggaccctgtgaacaacatcaacgtggacaaggacaagccctacctgtactgcttccgcaccagcaagggcctgggctacagcgcccactttgtgggcggctgcctgattgtgaccagcatcaagagcaagggcaagggcttccagcactgtgtgaagtttgacttcaagccccagaagtggtacatggtgaccatcgtgcacatctacaaccgctggaagaacagcgagctgcgctgctacgtgaatggagagctggccagctatggagagatcacctggtttgtgaacaccagtgacacctttgacaagtgcttcctgggcagcagcgagacagcagatgccaacagagtcttctgtggccagatgacagctgtgtacctgttcagcgaggccctgaatgctgcccagatctttgccatctaccagctgggcctgggctacaagggcaccttcaagttcaaggccgagagtgacctcttcctggccgagcaccacaagctgctgctgtatgatggcaagctgagcagcgccatcgccttcacctacaacccccgggccacagatgcccagctgtgcctggagagcagccccaaggacaaccccagcatctttgtgcacagcccccacgccctgatgctgcaggatgtgaaggctgtgctgacccacagcatccagagcgccatgcacagcatcggcggcgtgcaggtgctcttccccctgtttgcccagctggactaccggcagtacctgagtgatgaaattgacctgaccatctgcagcaccctgctggccttcatcatggagctgctgaagaacagcatcgccatgcaggagcagatgctggcctgcaagggcttcctggtgattggctacagcctggagaagagcagcaagagccacgtgtccagagctgtgctggagctgtgcctggccttcagcaagtacctgagcaacctgcagaatggcatgcccctgctgaagcagctgtgtgaccacgtgctgctgaacccagccatctggatccacaccccagccaaggtgcagctgatgctgtacacctacctgagcacagagttcatcggcaccgtgaacatctacaacaccatcagaagagtgggcaccgtgctgctgatcatgcacaccctgaagtactactactgggccgtgaacccccaggacaggagcggcatcacccccaagggcctggatggcccccggcccaaccagaaggagatgctgagcctgcgggccttcctgctgatgttcatcaagcagctggtgatgaaggacagcggcgtgaaggaggatgagctgcaggccatcctgaactacctgctgaccatgcatgaagatgacaacctgatggatgtgctgcagctgctggtggccctgatgtctgagcaccccaacagcatgatcccagcctttgaccagagaaatggcctgcgggtcatctacaagctgctggccagcaagtctgagggcatccgggtgcaggccctgaaggccatgggctacttcctgaagcacctggcccccaagaggaaggccgaggtgatgctgggccacggcctcttcagcctgctggccgagcggctgatgctgcagaccaacctgatcaccatgaccacctacaacgtgctgtttgagatcctgattgagcagatcggcacccaggtgatccacaagcagcacccagaccctgacagctctgtgaagatccagaacccccagatcctgaaggtgattgccaccctgctgaggaacagcccccagtgcccagagagcatggaggtgagaagagccttcctgagtgacatgatcaagctgttcaacaacagcagagaaaatagaagaagcctgctgcagtgcagcgtgtggcaggagtggatgctgagcctgtgctacttcaaccccaagaacagtgatgagcagaagatcacagagatggtgtatgccatcttccgcatcctgctgtaccacgctgtgaagtatgagtggggcggctggagggtgtgggtggacaccctgagcatcacccacagcaaggtgacctttgagatccacaaggagaacctggccaacatcttccgggagcagcagggcaaggtggatgaggagatcggcctgtgcagcagcacctctgtgcaggccgccagcggcatccggcgggacatcaacgtgtctgtgggcagccagcagcctgacaccaaggacagccctgtgtgcccccacttcaccaccaatggaaatgaaaacagcagcattgagaagaccagcagcctggagagcgccagcaacatcgagctgcagaccaccaacaccagctatgaggagatgaaggccgagcaggagaaccaggagctgcctgatgagggcaccctggaggagaccctgaccaatgagaccagaaatgctgatgacctggaggtgtccagtgacatcattgaagctgtggccatcagcagcaacagcttcatcaccaccgggaaggacagcatgacagtgtctgaggtgacagccagcatcagcagccccagcgaggaggatgccagcgagatgcctgagttcctggacaagagcatcgtggaggaggaggaggatgatgattatgtggagctgaaggtggagggcagccccacagaggaggccaacctgcccacagagctgcaggacaacagcctgagccctgctgccagcgaggccggggagaagctggacatgtttggaaatgatgacaagctgatcttccaggagggcaagcctgtgacagagaagcagacagacacagagacccaggacagcaaggacagcggcatccagaccatgacagccagcggcagcagcgccatgagccctgagaccaccgtgtcccagattgctgtggagagtgacctgggccagatgctggaggagggcaagaaggccaccaacctgacccgggagaccaagctgatcaatgactgccacggctctgtgtctgaggccagcagcgagcagaagatcgccaagctggatgtgtccaatgtggccacagacacagagcggctggagctgaaggccagccccaacgtggaggccccccagccccaccgccacgtgctggagatcagccggcagcacgagcagcccggccagggcatcgccccagatgctgtgaatggccagaggcgggacagccgcagcaccgtcttccgcatccctgagttcaactggagccagatgcaccagaggctgctgacagacctgctcttcagcattgaaacagacatccagatgtggaggagccacagcaccaagacagtgatggactttgtgaacagcagtgacaacgtcatctttgtgcacaacaccatccacctgatcagccaggtgatggacaacatggtgatggcctgtggcggcatcctgcccctgctgtctgctgccaccagcgccacccatgagctggagaacatcgagcccacccagggcctgagcattgaggcctctgtgaccttcctgcagaggctcatcagcctggtggatgtgctgatctttgccagcagcctgggcttcacagaaattgaggccgagaagtccatgagcagcggcggcatcctgcggcagtgcctgcggctggtgtgtgctgtggccgtgaggaactgcctggagtgccagcagcacagccagctgaagaccaggggggacaaggccctgaagcccatgcacagcctcatccccctgggcaagtctgctgccaagagccctgtggacatcgtgactggaggcatcagccctgtgcgggacctggaccggctgctgcaggacatggacatcaaccggctgcgggctgtggtgttccgggacatcgaggacagcaagcaggcccagttcctggccctggccgtggtgtacttcatctctgtgctgatggtgtccaagtacagagacatcctggagccccagaatgaaagacacagccagagctgcacagagaccggctctgaaaatgaaaatgtgtccctgtctgagatcaccccagctgccttcagcaccctgaccacagcctctgtggaggagagcgagagcaccagcagcgcccggcggcgggacagcggcattggagaggagacagccaccggcctgggcagccacgtggaggtgaccccccacacagcccctcctggggtgtctgctggcccagatgccatcagcgaggtgctgagcaccctgagcctggaggtgaacaagagccctgagaccaagaatgacagaggaaatgacctggacaccaaggccaccccatctgtgtctgtgtccaagaatgtgaatgtgaaggacatcctgcggagcctggtgaacatcccagcagatggagtgacagtggaccctgccctgctgcccccagcctgcctgggcgccctgggggacctgtctgtggagcagcctgtgcagttccgcagctttgacagatctgtgattgtggccgccaagaagtctgctgtgagccccagcaccttcaacaccagcatccccaccaatgctgtgtctgtggtgtcctctgtggacagcgcccaggccagtgacatgggcggggagagccctggcagccgcagcagcaatgccaagctgcccagcgtgcccaccgtggacagcgtgtcccaggaccctgtgagcaacatgagcatcacagagcggctggagcacgccctggagaaggccgcccccctgctgcgggagatctttgtggactttgcccccttcctgagcaggaccctgctgggcagccacggccaggagctgctgattgagggcaccagcctggtgtgcatgaagagcagcagctctgtggtggagctggtgatgctgctgtgcagccaggagtggcagaacagcatccagaagaatgccggcctggccttcatcgagctggtgaatgaaggccgcctgctgagccagaccatgaaggaccacctggtgcgggtggccaatgaagctgagttcatcctgagccggcagagagctgaggacatccacagacatgctgagtttgagagcctgtgtgcccagtacagcgctgacaagcgggaggatgagaagatgtgtgaccacctgatccgggccgccaagtacagagaccacgtgacagccacccagctgatccagaagatcatcaacatcctgacagacaagcatggagcctggggcaacagcgctgtgtcccggcccctggagttctggaggctggactactgggaggatgacctgcggaggagaagaagatttgtgaggaaccccctgggcagcacccaccctgaggccaccctgaagacagctgtggagcacgtgtgcatcttcaagctgcgggagaacagcaaggccacagatgaggacatcctggccaagggcaagcagagcatccgcagccaggccctgggcaaccagaacagtgaaaatgagatcctgctggagggagatgatgacaccctgagctctgtggatgagaaggacctggagaacctggccggccctgtgtccctgagcaccccagcccagctggtggcccccagcgtggtggtgaagggcaccctgtctgtgaccagcagcgagctgtactttgaggtggatgaggaggaccccaacttcaagaagattgaccccaagatcctggcctacacagagggcctgcacggcaagtggctgttcacagagatccgcagcatcttcagccgccgctacctgctgcagaacacagccctggagatcttcatggccaacagagtggccgtgatgttcaacttcccagaccctgccaccgtgaagaaggtggtgaactacctgccccgggtgggcgtgggcaccagctttggcctgccccagacccggcgcatcagcctggccagcccccggcagctgttcaaggccagcaacatgacccagcgctggcagcaccgggagatcagcaactttgagtacctgatgttcctgaacaccatcgccggccgcagctacaatgacctgaaccagtaccctgtgttcccctgggtgatcaccaactatgaaagtgaggagctggacctgaccctgcccaccaacttccgggacctgagcaagcccatcggggccctgaaccccaagagagctgccttctttgctgagagatatgagagctgggaggatgaccaggtgcccaagttccactacggcacccactacagcacagccagctttgtgctggcctggctgctgcgcatcgagcccttcaccacctacttcctgaacctgcagggcggcaagtttgaccacgccgacaggaccttcagcagcatcagccgggcctggaggaacagccagagggacaccagtgacatcaaggagctgatccctgagttctactacctgcctgagatgtttgtgaacttcaacaactacaacctgggcgtgatggatgatggcaccgtggtgtctgatgtggagctgcccccctgggccaagaccagcgaggagtttgtgcacatcaaccggctggccctggagagcgagtttgtgtcctgccagctgcaccagtggattgacctgatcttcggctacaagcagcagggccctgaggccgtgcgggccctgaatgtgttctactacctgacctatgaaggagctgtgaacctgaacagcatcacagatcctgtgctgcgggaggccgtggaggcccagatccgcagctttggccagacccccagccagctgctgattgagccccaccccccccggggcagcgccatgcaggtgagccccctgatgttcacagacaaggcccagcaggatgtgatcatggtgctgaagttccccagcaacagccctgtgacccacgtggccgccaacacccagcccggcctggccaccccagctgtgatcaccgtgacagccaaccggctgtttgctgtgaacaagtggcacaacctgcctgcccaccagggcgctgtgcaggaccagccctaccagctgcctgtggagattgaccccctgattgccagcaacacaggcatgcaccggcggcagatcacagacctgctggaccagagcatccaggtgcacagccagtgctttgtgatcaccagtgacaaccgctacatcctggtgtgtggcttctgggacaagagcttccgggtgtacagcacagacaccggccgcctcatccaggtggtgtttggccactgggatgtggtgacctgcctggcccggtctgagagctacatcggcggcaactgctacatcctgagcggcagcagagatgccaccctgctgctgtggtactggaatggcaagtgcagcggcatcggggacaaccctggcagcgagacagctgccccccgggccatcctgaccggccatgactatgaggtgacctgtgccgctgtgtgtgccgagctgggcctggtgctgagcggcagccaggagggcccctgcctgatccacagcatgaatggagacctgctgcggaccctggagggccctgagaactgcctgaagcccaagctgatccaggccagccgggagggccactgcgtcatcttctatgaaaatggcctcttctgcaccttctctgtgaatggcaagctgcaggccaccatggagacagatgacaacatccgggccatccagctgagcagagatggccagtacctgctgaccggcggggacagaggagtggtggtggtgcggcaggtgtctgacctgaagcagctgtttgcctacccaggctgtgatgctggcatccgggccatggccctgtcctatgaccagcgctgcatcatcagcggcatggccagcggcagcatcgtgctcttctacaatgacttcaaccgctggcaccacgagtaccagacccgctactag

SEQ ID NO: 167390 - DNA, 8592 bp, Artificial Sequence
  derived and/or modified sequence
atggccagcgaggacaaccgggtgcccagccccccccccaccggcgacgacggaggcggcgggggtagggaggagacaccaacagaagggggggcgctgtctctgaagccaggtttgcctatcagaggaatccggatgaaatttgctgtgttaacaggactcgtggaggttggagaggtctccaacagggacatcgttgagaccgtttttaacttactcgtgggaggccagtttgatctggagatgaactttattatccaggagggagagagtataaactgcatggtggatttactcgagaaatgcgacataacttgccaggccgaagtgtggtcgatgtttactgcaattctcaaaaaaagcattcgcaatctgcaagtctgcaccgaggttggcctggtcgagaaggtgctgggcaaaattgaaaaggtcgataacatgattgccgacctcttagtggacatgctgggagtcctggccagttacaatcttacagtgagagaattgaaactgtttttctctaagttacagggtgacaaagggaggtggccaccacacgccggcaaactgttaagcgtgctgaagcacatgccacaaaagtacggccctgacgcctttttcaacttcccaggtaagagtgctgccgctatcgctctgcccccaattgcaaagtggccttaccagaacgggtttaccttccacacctggctccggatggaccccgtgaacaacatcaatgtcgataaggataaaccctacctgtattgctttagaacatccaaaggcctggggtattctgcacatttcgttggcggatgtcttatcgtgactagcataaaatcaaagggaaagggcttccagcactgcgtcaaatttgatttcaaaccccagaagtggtatatggttaccatcgtacacatttataacaggtggaagaactccgagctccgatgctatgtaaacggcgaactagcgtcatatggtgagatcacatggtttgtgaacacctccgataccttcgataaatgcttccttggcagctctgagacagccgacgcaaaccgggtcttctgtggacagatgacggccgtctacctgttttccgaggccctcaatgccgcccagattttcgccatataccagttggggctagggtataaaggaacctttaaattcaaagctgagtccgatttatttttggctgaacatcacaagctgctgctttacgacggcaagttgtcctccgctattgcatttacatataatccacgagctactgatgcacagctctgtttggagtcctctccaaaggacaatccatccatctttgtccattcaccccatgcgctgatgttacaggatgtcaaggcggtgctcacacactctattcagtcggcaatgcactctattgggggtgtgcaggtgttgttcccactgttcgcccagctcgattatcgccaatacctgtccgacgagatcgacctcactatctgctcaacattgctggcttttattatggaactgctgaagaattccatagctatgcaggagcagatgctggcctgtaaagggttcctggttattggttacagtctggagaagagctcaaagagtcatgttagcagggccgtactggagctgtgccttgccttcagcaaatatctgagcaacctccaaaacgggatgcccttgttgaaacagctgtgcgatcacgtcctcctcaatcccgctatctggattcatacaccggccaaagtacagcttatgttgtatacctacttgtcaaccgagtttatcggcactgtgaacatctacaataccataaggcgggtgggcacagtactgctgatcatgcacactctcaaatattattactgggcagtcaacccccaagaccgctcaggcatcacgcctaaaggactcgacggccctcggcccaaccaaaaggagatgctgtcgctgcgggcattcttactgatgttcattaaacagctcgtgatgaaggactccggtgtgaaggaagatgagctgcaggccatactgaattatcttttgacgatgcatgaggacgataatctgatggatgtacttcagctgttggtcgctcttatgtccgaacaccccaacagtatgatccccgctttcgatcagcgtaatggcttaagagttatatacaagttattagcttctaagagtgaagggatacgggttcaggcgctgaaggcaatggggtatttccttaaacacctggctcctaagcgcaaggctgaggtcatgctgggccatggcctgttctccctgctcgcagaacgcctgatgctgcaaacaaacctaatcacgatgactacgtacaacgtcctatttgagatcttgatcgagcagattgggactcaggttatccacaagcaacacccagacccagatagttctgtgaaaattcagaacccacaaatcttaaaggttattgctacccttcttcggaactcacctcagtgtcctgagtcaatggaggtgagacgcgccttcctgagcgacatgattaagttatttaataactcaagagaaaacaggcgcagtctgcttcagtgttctgtgtggcaggaatggatgctgagtctgtgctacttcaacccaaagaactctgacgaacagaagattacagagatggtgtacgctattttcaggattctgttataccacgctgttaagtacgaatgggggggttggagagtctgggtggacactttatccattacccatagtaaggtcaccttcgagattcacaaagagaatttagccaatatctttcgtgagcagcagggaaaagtggacgaggagataggcttgtgttccagcacatcggtccaagctgcttcagggattagacgtgacatcaacgtaagcgtgggatcccagcaacccgataccaaggactcaccggtctgtcctcacttcaccacaaacggcaacgagaattcctctatcgagaagaccagtagtctcgagtccgcaagcaacatagagctgcaaaccacaaatacttcatatgaggagatgaaggcagaacaggagaatcaggagctaccagatgaaggcacgttagaagagacactgaccaatgaaactaggaacgcagacgatctggaagtttcaagcgatattattgaagccgtggccataagcagcaactccttcataacaacaggcaaggacagtatgaccgtgagtgaagtaaccgctagcatctcctcgcccagcgaggaagacgcctctgaaatgcctgagttcctggataagtccattgtggaagaagaagaagatgatgactatgtggagctaaaggtggaagggtcccccaccgaggaggccaacctacccacggagctgcaagacaacagtttaagcccggctgcctccgaggccggggagaaactagatatgtttgggaacgacgacaagctcatattccaggaaggaaaacccgttactgagaagcagaccgacaccgagactcaggactcaaaagactccggcatccagacaatgacagcatctggcagttccgctatgtcccctgaaacaacagtgtctcaaatcgctgtagagagcgacttaggtcagatgctcgaggaggggaagaaagctaccaatctgaccagggaaaccaagcttattaatgattgccatggatctgtgagcgaggccagttccgaacagaaaattgcaaaattggatgtgtcgaacgtggccactgatactgagcggctcgaacttaaagcttcaccaaacgtcgaggctccgcagccacacaggcacgtactggagatttcgaggcaacacgagcagcccgggcagggaatcgccccagacgccgttaacggccagaggcgcgacagccggtccacagtgttccgcataccagagttcaattggtcccagatgcatcagagactgcttaccgatctcctttttagcatcgaaacagacattcagatgtggaggagccactccaccaagaccgtaatggattttgtgaactcctccgacaatgtgatttttgtccacaatacaattcacctgatttcccaggtcatggataatatggtcatggcatgtggaggtattttgcccctactgagtgctgccacatccgcgacccacgaactcgagaacatagagccaacacaagggctgtccattgaggctagcgtcacttttctgcagagactcatcagccttgtagacgtcctgatatttgcctctagccttgggtttaccgaaattgaagccgagaagagcatgtccagcggcggcattctgcgacagtgtttaaggctggtgtgtgccgtggctgtccggaactgtctagagtgccaacagcattcgcagttaaagacccgaggtgacaaagccttaaagccaatgcacagtctgatccctctgggcaaatccgcagctaagagtcccgtagacatcgtgactggcggtatttcacccgtccgggaccttgatagactgctgcaggacatggacatcaatagattgcgagcagttgtgtttagggacatcgaggacagcaagcaagcccaatttctagctctggcagtagtgtattttatcagcgtgctaatggtgtctaaatacagagatatcctggagccacagaacgagcgacactctcagagttgcactgagaccggatcagagaacgaaaatgtctcgctgtcagagattaccccagccgcttttagcactctgaccacggctagcgtggaggagagcgaaagcacatctagtgctcgacgccgggattctggcatcggtgaggagaccgccaccggcttgggatcacacgtagaagtcacacctcatacagcacctcccggcgtctctgcaggaccggacgctatttccgaagttctgtccaccttgtctctggaggtcaataaatcgccggagaccaagaacgacagagggaacgatcttgacacgaaagcaacccccagcgtgagcgtgagtaaaaatgtgaatgtaaaagatatcctgcgtagcttagttaacatccctgctgacggagtgaccgtagatcccgccctcctgcccccagcctgccttggcgcattgggagatttgtccgtggaacagccagtccagtttcgcagctttgatcgatccgtcatcgtagctgccaagaaatccgctgtgtctccatcaaccttcaacacttcaattcctaccaatgcggtgtcagttgtgtcctccgttgactcagcccaggcctctgacatgggcggagagtcccctggatctcgaagttctaatgccaagctgccgtccgtccccactgttgacagtgtttctcaggatcccgtaagtaacatgagcatcaccgaaagactcgaacatgctctcgagaaagccgcacccttactgagagagatttttgtagattttgcgccattcctcagtagaaccctccttgggagtcatgggcaggagctgctgattgaaggcacatcacttgtgtgtatgaaaagtagttcaagcgtggtggagcttgttatgcttctgtgctcccaggagtggcagaactccatccagaaaaacgcgggactcgccttcatagagctggtaaatgagggaaggctgttgagccagactatgaaggatcaccttgtaagagttgcgaacgaggccgagttcattctgtcccggcaacgggctgaagatattcatagacacgccgaatttgagagcctgtgcgcgcagtactccgctgacaaacgcgaggatgaaaagatgtgcgatcacctcatacgggcagcaaagtacagagaccatgtcacagctactcaactgatccagaagatcattaatatcctgactgataagcacggcgcctggggtaattcagctgtgagtcgaccccttgagttctggaggcttgactactgggaggatgacctgcgccggaggaggagattcgtgcgcaatcccctcggatccacgcacccagaggccaccctaaaaacagcagttgaacatgtctgtatttttaaactccgcgaaaatagcaaagccacagatgaggacatcctggccaagggaaagcagagcattcgaagccaggccctgggcaaccagaattccgaaaacgaaattttgctcgaaggcgacgatgatacactgtcgagcgtagatgagaaagacctagaaaacctcgccggccccgtgtctctgtctactcctgcccagctagtggccccttccgtggtggtcaagggcacactttccgtgacgagttcggaactgtattttgaagttgatgaagaggatcctaactttaagaagatcgatccaaaaattctcgcgtacaccgagggtttgcacggcaagtggctctttactgagatcagatccatttttagcagacgttacctgctacagaatacagcccttgaaatctttatggccaatagggtggctgtgatgtttaatttcccagatcccgccaccgtgaagaaagtcgtcaattatctgccgcgggtgggcgtaggcacgagtttcggacttccccagactcggcgtatatctctagcctccccacggcagcttttcaaggctagcaatatgactcaaagatggcagcatcgcgagatctccaacttcgaatatcttatgtttttaaacaccatcgcaggccgctcttataacgatctgaatcagtaccccgtgttcccttgggtgatcacaaactatgagtccgaggagttagacctgactctgcctacgaatttccgggatctgtccaagccaattggggcattgaaccccaaaagagccgctttctttgcggagcggtacgaatcatgggaagatgaccaggtgcccaaatttcattatggtacccactattccacagcttcctttgtgctcgcgtggctgctgcgcattgagccttttacaacttacttccttaacctgcagggcgggaaatttgaccacgcagacaggacgttttcatctatttcacgagcatggcgcaattctcaaagagacacttctgatatcaaagaacttatcccagaattctattacctgccagaaatgtttgtgaattttaataattataatctgggcgtgatggacgatggcaccgtcgtgagcgatgtggagctccctccttgggcaaagacgagcgaagaattcgtgcatattaaccgcctagcgctagagtctgagtttgtgagctgtcaactgcaccagtggatcgatctcatcttcgggtataagcaacagggacccgaggcagtgagagcgctaaacgtgttctactatctcacctacgagggcgctgtcaatcttaattctatcaccgatccggtgcttcgcgaggctgtggaggcacagatcaggtctttcggccaaacaccctcgcagctgcttatagagccccacccaccgcgggggtctgccatgcaggtgagcccgcttatgtttactgacaaagcccagcaggacgtaatcatggtactaaagttccctagcaatagccccgtgacacacgtggccgcaaatactcaacctgggctagccactcccgctgtgattaccgtgacagctaataggctgtttgctgtgaataagtggcataacctgccagcccaccagggagccgtccaggaccagccctaccagctgcctgttgagatcgaccctttaattgcctccaacacaggaatgcatcgtaggcagattacggacctcctagatcaatctatccaggtgcattcccaatgctttgttattacttctgataatcgttacattctggtgtgcggcttttgggacaagtctttcagagtatacagtactgatacaggtcgactaatccaggtcgtttttgggcactgggacgttgttacctgcttggcaagatcggagtcatatattggcggcaactgttatatcctttctggctccagagatgctacccttctcctttggtactggaatggaaagtgtagcggcataggtgataatcccggatccgagactgcagcgcctcgagctattctgaccggccacgattacgaagtcacttgtgccgcagtgtgtgccgaacttggactagtgctcagcgggagccaggagggtccctgtcttattcattcaatgaatggagacctcctgaggaccctagagggccccgagaattgtcttaagccaaaactgatacaagcaagcagggaaggtcactgtgtgatcttctacgaaaacggactgttctgtacattctctgtgaatggaaagctgcaggcaacgatggaaactgatgataatattagggcaatccaactcagccgggacggacaatacctgctgactggcggcgatagaggggtcgtagtagtgaggcaggtaagtgacctcaaacagctgtttgcttaccctggttgcgacgctggcattagagccatggcgctgtcatatgaccagagatgtatcatcagcgggatggcatctgggtctattgttctattttacaacgacttcaacaggtggcaccacgagtatcaaacacggtattag

SEQ ID NO: 167391 - DNA, 8591 bp, Artificial Sequence
  derived and/or modified sequence
atggccagtgaagataatagggttccctcaccaccaccaactggcgatgatggcggaggaggaggcagggaagaaacacccaccgagggtggggctctctctctcaagcccggtttacctatccgcggtatacgtatgaaattcgctgtcttaactggactcgtagaagtgggagaagtgtctaatcgggacatcgtggagaccgtgttcaacctcctggtcggcggacaattcgatcttgagatgaacttcataatccaggagggcgagagtatcaattgcatggtggacctgctcgagaagtgtgatattacctgtcaggccgaggtttggtccatgttcacagctatcctgaaaaaatccatccgtaatttgcaagtttgcaccgaagtcggactcgtggaaaaggtgctgggaaagatcgagaaagtggacaatatgatcgcagatttgttggtggacatgctgggcgtattggcatcatataacctgacggttagagaactcaaattgttcttcagcaagctgcagggagataaggggaggtggccacctcacgccggaaagttgctttcggtcctcaaacacatgccacagaaatacggcccagacgcctttttcaacttccccggaaagagtgcagctgcaatagcactgccaccaattgctaaatggccttaccagaatgggtttacatttcacacttggctccgcatggacccagtgaacaacataaacgtggataaagataagccatatctgtactgtttccgaacaagtaagggcttgggatacagtgcccattttgtgggtggatgtttgattgtaacatccatcaagtccaagggaaagggattccagcattgcgttaagttcgacttcaagccgcagaagtggtatatggtcacaatagtgcacatatacaaccgctggaaaaactcagaactgcggtgttatgtaaatggcgaacttgccagttacggagaaatcacatggtttgtgaacacctccgatacctttgataagtgcttccttggttcaagcgaaacagccgacgccaaccgggtattctgtggacaaatgacagcagtgtacttgttctcagaggcacttaatgccgcacagatattcgcaatctatcagctgggtctcggctacaaagggacttttaaattcaaggcagaatccgacctattcctggcagaacatcataagttgctgctctacgatgggaagttgagctccgctatagcattcacttacaacccacgcgctacagacgctcagttgtgcctcgaaagcagtcccaaggacaacccatccatctttgtgcactcaccacatgctctgatgctgcaagacgtgaaggccgtactgacacacagtattcagagtgccatgcactctatcggtggagtgcaggtgctattccctctgttcgcacaattggactatcgacagtacctctctgatgagattgatctgactatatgttctactctgctggcattcatcatggagttgctcaagaatagtatcgccatgcaagagcagatgctggcttgcaagggatttctcgtgatcgggtacagcctagagaaaagctccaaatcacacgtatctcgcgctgtgctggaactttgcttggcttttagtaagtatctgtctaacctgcagaacggcatgccgctgctgaaacaactgtgcgatcacgtactgcttaaccctgcaatatggatccacacaccagccaaagtgcagctgatgttgtatacctacctttctacagagttcatcggcaccgtgaatatttataacaccatcagacgagttgggacagtgctgcttatcatgcataccttaaaatactactactgggccgtgaacccacaagatagatccggcatcacccccaagggccttgacggcccaagacccaaccaaaaggagatgctgagcctaagagctttcctgctcatgttcattaagcagctcgtgatgaaagatagcggcgtgaaagaggacgagctgcaggctatcctgaattacctgttgactatgcacgaggacgacaacttaatggacgtcctgcaattgctggtggccttgatgagcgaacaccccaacagcatgatcccagcctttgatcagcggaacggccttcgggtcatatataaactgttagctagtaaaagtgaagggatcagggtccaagccctgaaggccatggggtatttcctgaagcacctcgcacctaagagaaaagccgaggtgatgcttggtcacggactcttctccctgcttgcagaaaggctgatgctccagaccaatctaatcacaatgactacatataatgtgttgtttgaaatactgattgaacagatcggcacgcaggtaattcacaaacagcaccctgacccagatagtagtgttaagatccagaacccccagatcctcaaggttatcgccactctccttagaaactctcctcagtgcccggagtcaatggaggtccgcagagcatttctgtcagacatgattaagctttttaacaactcccgggagaaccggagatccctcctccaatgttcggtgtggcaagagtggatgctgagcctctgctattttaatcccaagaattccgacgaacagaagattacagaaatggtgtacgcaatattcagaattctgctgtatcatgcagtcaaatatgaatggggaggttggcgtgtatgggtggataccctgagtatcacacactctaaggttacttttgaaatacataaagaaaatctggcaaatattttccgcgagcagcaaggcaaagttgacgaagaaattggtctgtgttctagcaccagtgtccaggcagctagcggaattcggcgagatattaacgtgtcagtcggatcccagcagcccgatactaaagactccccggtgtgcccacattttaccaccaacggtaatgagaatagctcaatcgagaagactagctctcttgaaagcgcctccaacatagaactccagaccaccaatactagttacgaggagatgaaggccgaacaagagaatcaggagttgcccgacgaaggcacactcgaggagactctcaccaatgagacccgaaatgcagacgatctggaggtgtcctctgatataattgaggctgtagcaatctccagcaactcttttatcaccactggtaaggattccatgacagtgtcggaagtcacggcctctatctcttccccctccgaagaggacgcatccgagatgcccgagttccttgataagagcatcgtcgaagaggaagaagacgatgattacgtagaactgaaagtggagggaagtccaaccgaggaggctaacctcccaactgagctgcaggataactccctctcccctgcggcatctgaagccggagaaaagctggatatgttcggaaacgacgataagcttatctttcaagagggaaagcctgtcacagagaagcagactgataccgaaacacaggacagcaaagacagcggaattcagacgatgaccgcctccggtagctctgcaatgtctccagaaactacagtctcccaaatagcagtggaatccgatttaggtcagatgctggaggaggggaaaaaggctaccaacctcacacgggaaacgaagctgattaatgactgtcacggctcagtcagcgaagcatcctccgaacagaagatagccaagttagacgtgtccaacgtcgcgacagatacagagcggcttgagctgaaagcatcccctaatgtggaggctcctcaaccacataggcatgttctcgagatttctaggcagcacgaacagccgggacaagggattgcccctgacgcagtgaacgggcaaagacgggacagtagatccaccgtctttagaatccctgagttcaactggtcacagatgcatcagcggctgctgactgacctgctgttctccattgaaacagatattcagatgtggcggtcacattccaccaaaacagtgatggactttgtcaacagctcagacaatgttatcttcgtccacaacaccatccatctgataagccaggtgatggacaatatggtgatggcctgcgggggtattctgccactgttgtctgccgctacatcggccacacacgaattggaaaatattgagccaacacaagggctgagtatcgaagcctccgtcacattcctacagcggcttatttcgttggttgatgtcctcatctttgctagctctctcggattcacggagattgaggctgaaaaaagcatgagttcaggaggcattttgcggcagtgtctccgcttagtgtgcgctgtcgccgtacgcaattgtttagaatgtcagcagcactctcagctgaaaacccggggagacaaggccctgaagcctatgcattccctgatacctttgggcaagtccgcagccaagtctccagttgacatcgtcaccggcggtattagccctgtgcgagatctggatagacttctccaagacatggatatcaataggctgcgagcggtcgttttccgcgacattgaggactcaaagcaggcacagttcctcgccctggcagtcgtgtacttcattagcgttttgatggtatctaaatacagggacatcttagagccacagaacgagcggcatagtcagtcttgcacagagacaggcagcgaaaatgaaaatgtctccctctcggagatcacaccggcagccttctctacactgaccactgcctcagtggaggagtcagaatccacttcttcagctcgacggcgtgactccggaattggcgaggagactgccacaggactggggagccacgtggaggtgacgccccatacagcaccacctggcgtgtcagctgggccagatgctatatctgaagttttatccacactgagcctggaagtgaacaaaagcccggaaactaaaaacgatcgagggaatgatctagacaccaaggctactccttccgtgtcagtgtccaaaaatgtcaacgtcaaagatatattgcgatcattggttaacattccagctgacggggtgaccgtcgatcccgcactgctgccgccagcctgtctgggggctcttggcgacctttctgttgagcagcctgtgcagttccgtagcttcgaccgctccgtgattgtggccgcaaaaaaatcagcagtgtccccatcaacattcaacacaagcattccaacaaatgcagtttcagtggtctcgtccgttgactctgcccaggcctcagatatgggaggagagtcacctggctccaggtcctccaacgccaaacttccatctgttcccactgttgattccgtgtctcaagatccggtaagcaacatgtctatcaccgagcgccttgaacatgccctggagaaggctgccccactgcttcgcgaaattttcgtggatttcgccccatttttgtctagaacattactgggttcccacggtcaggagctgcttatcgagggtacctccctggtttgcatgaaatccagttcttccgtcgtggagctcgtcatgctcctatgctcacaggaatggcagaacagtatacagaaaaatgcagggttagccttcatagagctggtgaacgaaggcagactactcagtcagactatgaaagaccaccttgtgcgagtggccaatgaagccgagttcattctctctaggcagcgtgctgaggacatacaccgccacgccgagttcgagtccctatgtgcccagtattctgcagacaagagagaagatgagaagatgtgcgatcatttgattcgcgctgccaagtaccgcgatcatgtgacagcaacccagctcatccagaagatcatcaacatactgacggacaaacatggcgcatgggggaattctgcggtgtcccgcccactggagttctggcgcctggattactgggaggacgatctgcgacggagacggaggtttgtcagaaatcctctgggttcgacacaccccgaagccacgctgaagaccgccgtggagcacgtgtgtatcttcaaactcagggaaaattccaaggctaccgatgaggacatcctcgcaaaaggcaagcagtctattaggagtcaggctcttggaaaccagaacagcgaaaatgagatcttgcttgagggggacgacgacaccctgtcctctgtggacgagaaggatctggagaacctggcaggtccagtgagcctgtcgaccccagcccagctcgtggccccttctgtagtggtaaaggggacactctccgttacttcatctgaactatatttcgaggtggacgaggaagaccccaattttaagaaaattgaccccaagatactcgcttacacggaaggtcttcacggaaagtggctcttcactgagatcaggtctattttctcaagacggtacctcctgcaaaatactgccctggagatcttcatggcaaacagagtggctgtaatgttcaacttccctgatcccgctaccgtgaaaaaggttgtgaactacctgccgagggtgggcgtcggtacttcgttcgggctgccgcagacaaggcgcatcagtctggccagtcccaggcagctcttcaaggcatcaaacatgactcagcggtggcaacaccgggaaatcagtaacttcgagtatttaatgttccttaacacgatcgcaggtcggtcctacaacgatcttaaccaatacccagtattcccatgggtcattacgaactacgaatccgaagagctggacttgacattgccaactaacttcagggacctgtcaaaaccaatcggtgccttaaaccccaagcgagcggcattcttcgccgagagatatgagtcatgggaagatgaccaggtacccaagttccattacggaacgcactactctactgcttcattcgtattggcatggcttctccgaatcgagcccttcaccacctatttcctcaacctgcagggcggaaagtttgatcacgcagataggaccttctcctccatcagccgcgcttggagaaattcccagcgcgatacaagcgatattaaagaactaattcctgagttctactatctccctgagatgttcgtgaacttcaataactacaacctcggcgttatggacgatggtaccgtggtgtccgacgtcgaactgcccccttgggccaagacatccgaagaattcgttcatattaacagactggcgctcgaaagcgaattcgtgagttgccagctgcatcagtggatcgacttgatctttggatacaagcaacaaggaccagaagccgtacgagctttgaacgtcttttattatttgacatacgaaggagccgtgaatctcaactcaattacagatcctgtgttacgtgaagctgtggaagctcagatacggtctttcggccagactcctagccaactcttaatcgagccccaccctccgagaggctcagcaatgcaagtgtcaccactaatgtttaccgataaagcccagcaggacgtgataatggtgttgaaattcccttccaacagcccagttacgcatgtcgccgcaaacacgcagcctggactggcgacccccgcagttattactgtgaccgccaatcggctttttgcggtgaacaaatggcacaatttaccagcccaccaaggtgccgttcaggaccagccgtaccaactaccagtggagattgatcctcttattgcttctaacaccggcatgcaccggaggcaaattaccgacttgctcgaccaatccattcaggtgcactcgcaatgcttcgtcatcacatccgacaatagatatatcctggtgtgcggcttttgggataaatcctttagggtctacagtacagatactgggaggctcattcaggtcgtattcgggcactgggacgtggtgacttgcctcgctcgctctgaatcctacataggcggaaactgctacattctcagcggcagtagggatgctaccctgttgttgtggtactggaacggcaagtgctctggaatcggcgacaatcctggtagcgaaacggccgctccaagagctatcttgactggtcatgactatgaagtaacatgcgccgcagtatgcgcggagctcggactagtcctgtctggcagtcaggagggtccctgcctaatccacagcatgaatggtgatcttctgaggactctcgaaggtcctgagaattgtctgaagccaaaactgatccaagcaagtcgcgaaggtcactgcgtgatattctatgagaacggtttattctgcacattctcggtcaacgggaaactacaggccacgatggagacagacgataatatcagggccattcagttatccagggatgggcagtaccttctgactgggggagatcgaggcgtggtagtggttagacaagtttccgaccttaagcagctctttgcttaccccggttgcgacgctggcattcgcgctatggccctgagctacgatcagaggtgtattatcagtggtatggcaagcggctccattgtgctgttctacaacgacttcaacagatggcaccacgagtatcagaccaggtacta

SEQ ID NO: 167392 - protein, 788 aa, Artificial Sequence
  derived and/or modified sequence
MTIHQFLLLFLFWVCLPHFCSPEIMFRRTPVPQQRILSSRVPRSDGKILHRQKRGWMWNQFFLLEEYTGSDYQYVGKLHSDQDKGDGSLKYILSGDGAGTLFIIDEKTGDIHATRRIDREEKAFYTLRAQAINRRTLRPVEPESEFVIKIHDINDNEPTFPEEIYTASVPEMSVVGTSVVQVTATDADDPSYGNSARVIYSILQGQPYFSVEPETGIIRTALPNMNRENREQYQVVIQAKDMGGQMGGLSGTTTVNITLTDVNDNPPRFPQNTIHLRVLESSPVGTAIGSVKATDADTGKNAEVEYRIIDGDGTDMFDIVTEKDTQEGIITVKKPLDYESRRLYTLKVEAENTHVDPRFYYLGPFKDTTIVKISIEDVDEPPVFSRSSYLFEVHEDIEVGTIIGTVMARDPDSISSPIRFSLDRHTDLDRIFNIHSGNGSLYTSKPLDRELSQWHNLTVIAAEINNPKETTRVAVFVRILDVNDNAPQFAVFYDTFVCENARPGQLIQTISAVDKDDPLGGQKFFFSLAAVNPNFTVQDNEDNTARILTRKNGFNRHEISTYLLPVVISDNDYPIQSSTGTLTIRVCACDSQGNMQSCSAEALLLPAGLSTGALIAILLCIIILLVIVVLFAALKRQRKKEPLILSKEDIRDNIVSYNDEGGGEEDTQAFDIGTLRNPAAIEEKKLRRDIIPETLFIPRRTPTAPDNTDVRDFINERLKEHDLDPTAPPYDSLATYAYEGNDSIAESLSSLESGTTEGDQNYDYLREWGPRFNKLAEMYGGGESDKDS

SEQ ID NO: 167393 - DNA, 2367 bp, Artificial Sequence
  derived and/or modified sequence
atgactatccaccaatttcttctgctctttttgttttgggtgtgtttgccccacttttgtagcccggaaatcatgtttcgacgcaccccagtgccccaacagcggatcctcagtagtcgcgtccctaggagtgacggaaagatcctacatcggcagaagcgcggatggatgtggaaccagttctttctgttggaagaatataccggttctgactatcagtacgttggaaagttacactcggatcaagataagggcgacggatccctgaagtatatcctctcgggagatggtgccgggaccttgttcattatcgacgaaaaaacaggagacatccacgccacgcggagaatcgatagagaggagaaggccttttatactctgagagctcaggctataaaccgtcgaacgcttagaccagtggagccagaatctgaatttgtaatcaaaattcacgacatcaacgacaatgaaccaaccttccctgaagagatctacaccgcctctgttcccgaaatgtccgtggtcggcaccagcgttgtgcaggtgacagcaacagacgctgatgaccctagctatgggaacagcgctagggtgatctactcaatcctacagggtcagccctactttagcgtggaaccagagacaggtatcataagaaccgcactgcccaatatgaatcgagaaaatcgggagcaatatcaggttgtgatccaggcaaaggacatgggcggacagatgggcggcctcagcgggacaactacggtcaatatcacactaacggatgtaaacgacaaccccccccgattcccacaaaacaccatccatctgcgcgttctggagtctagtcccgtggggaccgctatcgggtcagtgaaagctaccgacgccgataccgggaagaatgctgaggtggagtacagaataattgatggcgatgggaccgacatgttcgatattgtgaccgaaaaagacacacaggagggaatcataacggtcaaaaagcctctggactacgaatcaaggagactgtacacattaaaggtggaggccgaaaacacacatgtagaccccagattctattatctcggaccatttaaggacaccacgattgtgaaaatttccatcgaggacgtggatgagcctcctgtattctctagatccagttatctctttgaggtgcatgaggatatagaagtggggacaattatcggaactgtcatggcgagggatccagatagtatttcctcccccatcagattctcactcgatcggcacaccgacttggacaggatttttaatattcacagcgggaatggttccctgtacacttccaagccactggacagagagctgtcacagtggcacaatctcaccgtcatcgccgccgagatcaataaccccaaggagacgacgcgggtggccgtcttcgtccgcatactggacgtgaatgataacgcgccccagttcgcagtattctatgatacatttgtttgtgagaatgcaaggccggggcagctgatacagactatatcggctgtagataaagatgatcccttaggcgggcagaagttcttcttctcactggcggctgtgaaccctaatttcactgtccaggacaatgaggacaatacggccaggatactgacgagaaagaatggcttcaaccggcacgagataagcacatatctcctgcctgtcgtgatatccgataacgactaccccattcagtcttctaccggcaccttaacaataagagtatgtgcctgtgactcccagggtaatatgcagagctgttcagccgaggctctactgcttcccgctggactgtcaactggagctttgattgccatactgctgtgcataattatccttcttgtcatagttgtgctcttcgccgctctgaaaagacagcgcaaaaaagaacctttgatcctgagcaaggaagacataagagacaacatcgtcagctacaacgatgagggcgggggcgaggaagatacgcaagctttcgacatcgggactttacgcaacccagccgcaatagaggaaaagaagctgcgacgggatatcatccctgaaaccctcttcatcccccgccgaacacccactgcaccagacaatactgacgtcagggacttcatcaatgagcggttaaaagagcatgacttagaccctaccgctcctccatacgattctttggcgacctatgcttacgaagggaacgatagcatagctgaaagcctctctagtctcgaatctggaactacagagggcgatcaaaattacgactatctgagagaatggggcccccgtttcaacaagctggccgagatgtatggaggaggtgagtcagataaggatagctag

SEQ ID NO: 167394 - DNA, 2367 bp, Artificial Sequence
  derived and/or modified sequence
atgaccatccaccagttcctgctgctcttcctgttctgggtgtgcctgccccacttctgcagccctgagatcatgttccggaggacccctgtgccccagcagaggatcctgagcagccgggtgcccaggagtgatggcaagatcctgcaccggcagaagaggggctggatgtggaaccagttcttcctgctggaggagtacacaggcagtgactaccagtatgtgggcaagctgcacagcgaccaggacaagggagatggcagcctgaagtacatcctgtctggagatggagctggcaccctcttcatcattgatgagaagacaggagacatccacgccaccaggagaattgaccgggaggagaaggccttctacaccctgcgggcccaggccatcaacagaaggaccctgcggcctgtggagcctgagagcgagtttgtgatcaagatccatgacatcaatgacaatgagcccaccttccctgaggagatctacacagcctctgtgcctgagatgtctgtggtgggcacctctgtggtgcaggtgacagccacagatgctgatgaccccagctatggcaacagcgcccgggtcatctacagcatcctgcagggccagccctacttctctgtggagcctgagaccggcatcatcagaacagccctgcccaacatgaaccgggagaaccgggagcagtaccaggtggtgatccaggccaaggacatgggcggccagatgggcggcctgagcggcaccaccaccgtgaacatcaccctgacagatgtgaatgacaaccccccacgcttcccccagaacaccatccacctgcgggtgctggagagcagccctgtgggcacagccatcggctctgtgaaggccacagatgctgacaccgggaagaatgctgaggtggagtaccgcatcattgatggagatggaacagacatgtttgatattgtgacagagaaggacacccaggagggcatcatcaccgtgaagaagcccctggactatgagagcagaagactctacaccctgaaggtggaggccgagaacacccacgtggacccccgcttctactacctgggccccttcaaggacaccaccatcgtgaagatcagcattgaagatgtggatgagccccctgtgttcagccgcagcagctacctgtttgaggtgcatgaagatattgaggtgggcaccatcattggaacagtgatggcccgggaccctgacagcatcagcagccccatccgcttcagcctggacagacacacagacctggaccgcatcttcaacatccacagcggaaatggcagcctgtacaccagcaagcccctggaccgggagctgagccagtggcacaacctgactgtgattgctgctgagatcaacaaccccaaggagaccaccagggtggccgtgtttgtgcgcatcctggatgtgaatgacaatgccccccagtttgctgtgttctatgacacctttgtgtgtgaaaatgcccggcccggccagctgatccagaccatctctgctgtggacaaggatgaccccctgggcggccagaagttcttcttcagcctggccgctgtgaaccccaacttcaccgtgcaggacaatgaagacaacacagcccgcatcctgaccaggaagaatggcttcaacagacatgagatcagcacctacctgctgcctgtggtgatcagtgacaatgactaccccatccagagcagcacaggcaccctgaccatccgggtgtgtgcctgtgacagccagggcaacatgcagagctgcagcgctgaggccctgctgctgcctgctggcctgagcactggagccctgattgccatcctgctgtgcatcatcatcctgctggtgattgtggtgctgtttgctgccctgaagaggcagaggaagaaggagcccctcatcctgagcaaggaggacatccgggacaacatcgtgtcctacaatgatgaaggaggaggagaggaggacacccaggcctttgacatcggcaccctgaggaacccagctgccatcgaggagaagaagctgcggcgggacatcatccctgagaccctcttcatccccaggaggacccccacagccccagacaacacagatgtgcgggacttcatcaatgaaaggctgaaggagcatgacctggaccccacagccccaccctatgacagcctggccacctacgcctatgagggcaatgacagcattgctgagagcctgagcagcctggagagcggcaccacagaaggagaccagaactatgactacctgcgggagtggggcccccgcttcaacaagctggccgagatgtatggaggaggagagagtgacaaggacagctag

SEQ ID NO: 167395 - DNA, 2367 bp, Artificial Sequence
  derived and/or modified sequence
atgaccatccaccagttcctgctgctgttcctgttctgggtgtgcctgccccatttctgtagtcctgaaatcatgtttagaagaacaccagtgccccaacagagaattctgagcagtcgggtgccacgtagcgacggtaaaatactgcacaggcaaaagaggggatggatgtggaaccagttttttttgctggaagaatataccgggagcgattaccaatatgttggcaaactccattctgatcaggataaaggtgatgggagcctgaagtatatcctctccggggatggggctggaacgctgttcatcatagacgaaaagacgggcgacattcatgcgactcggcgcatagacagggaagagaaagctttctacacattaagagcccaggccataaataggaggaccctcaggcccgtagagcctgagtccgagttcgtgatcaagattcacgacatcaacgacaacgagcctacctttcccgaagagatttacactgccagcgtgccagagatgagcgtggtagggaccagcgttgtgcaagtgactgctactgatgctgatgatccgtcctacggaaacagtgcccgcgtgatttacagcatccttcagggccagccttacttttctgttgagcctgagacggggatcattcgtactgctctccctaacatgaatcgagagaaccgggagcaataccaggttgtgatccaggccaaggatatggggggacagatgggtgggctgtcaggaacgaccacggttaatattacgctcaccgatgtgaatgataatcccccccgcttccctcagaacacaatccaccttcgggtgctcgaaagcagccctgtgggcaccgctatcggctccgtgaaggctactgatgcagatacaggaaaaaatgcagaagtggaatatcggattatcgacggtgatggtactgacatgttcgacattgtgacagagaaggatacacaggagggaataataacagtgaagaagcctctcgattacgagtcaaggcgcctgtacaccctgaaggtggaggccgagaacacccacgtcgaccctagattttactacctgggtccattcaaagacactacgattgttaagatctcgatcgaagacgtggatgagccaccggttttcagccgcagcagctatttgttcgaggtgcacgaggatattgaggtgggtacaattatcggcacggtgatggccagggaccctgatagcattagcagcccaatacggttcagcctggaccgacataccgatctggatagaatttttaatatacactcgggcaatggcagcttatacaccagcaagcccctggatcgcgaattaagccagtggcataacctaactgtcatcgcggcagaaattaataatccgaaagagactactagagtagcagtcttcgtgcgcatcttagacgtcaacgacaacgccccacagtttgctgtattctatgacacctttgtctgtgaaaacgctcgacctgggcaactcatccagacgatctcagccgtggacaaagatgatcctttaggagggcagaagtttttcttcagtctcgctgccgtgaatccgaattttactgtgcaggataatgaagacaacacggcgaggattcttactcgcaaaaatgggtttaatagacacgaaataagcacttacctgttgcctgtagtaatctcggataatgactaccctatccagagttcgacaggtaccctgaccatacgcgtgtgtgcttgtgacagtcagggcaatatgcaatcctgctccgcagaggccctcctgctgcctgctgggttaagtacaggtgcactgatcgcaattttgctgtgtataataatactgctggttattgttgtgctgttcgctgcgctgaaaagacaaaggaaaaaagaaccattaattcttagcaaggaggacatccgagataatatagtgtcttacaatgacgagggggggggagaggaagatacacaggcattcgatattggaacactccgcaacccggccgccatcgaggaaaaaaaactaagacgcgacatcatccctgaaaccctgtttattccccgacggacccctaccgccccagacaatacagatgtgcgcgacttcatcaacgaaagactcaaggaacatgacctcgatccaaccgctcctccttatgattccctggcaacatacgcctatgagggaaacgactccattgctgagtctctgagctcattggaatcaggaactacagaaggcgaccagaattatgattacctccgcgaatggggccctcgatttaataaactcgccgaaatgtacggaggaggcgagtccgataaggactcatag

SEQ ID NO: 167396 - DNA, 2367 bp, Artificial Sequence
  derived and/or modified sequence
atgactattcaccagttcttgttgctgttcctgttctgggtttgcctacctcacttttgttcccctgagatcatgtttcgccgtactcccgtgcctcagcaacggatcctgagctccagggtccctagaagtgacggaaaaatactgcatagacagaagcggggttggatgtggaaccagttttttctgttagaggagtacacagggtctgactaccaatatgtgggcaagctccactcggaccaggataagggagatgggtcgctaaagtatatactgagcggcgatggcgctggaaccctcttcattatcgatgagaaaacaggcgatattcacgccacgagacgcattgaccgcgaagaaaaagccttttacaccctgcgcgctcaagcaatcaaccggaggactctccggccagtggagccagaatccgaattcgtgatcaagattcacgacatcaatgacaatgagccaacatttcccgaggaaatttacactgcctcagtccccgaaatgagcgtggtgggcacttcagtagtgcaggtgacagctactgatgccgacgatccatcatacggcaatagcgccagggttatatattccatcctgcagggccagccgtactttagcgtcgaacctgaaaccgggatcatcaggactgcgttacccaacatgaaccgggaaaaccgagagcagtatcaggtcgtgatccaagcgaaggatatggggggacagatgggaggtcttagtgggactaccaccgtaaacattaccctcacggacgtcaacgataatcctcctcgttttccacagaatactattcacctgcgcgtgctagaatcaagcccagtgggaacagccattggatctgtgaaagcaaccgatgcggatacgggcaaaaacgctgaggtggaatacaggatcatcgatggcgacggaaccgacatgtttgacatcgtaactgaaaaagatacgcaggagggcatcataacagtgaaaaaacctcttgactatgagtcaagaaggctgtatacgttgaaggttgaggccgagaacactcacgtggacccacggttttattatttggggccatttaaggataccaccatcgttaagataagcatcgaggacgtggacgaaccacctgtgttcagtaggtctagctacctattcgaggtgcacgaggacatcgaagtgggaactatcatcgggacagtgatggccagggacccagacagcatttcatctcccatccggttttcacttgacaggcatacagatctggatcggatctttaacatccacagtggcaacgggtccctatacacctctaaaccgctggaccgtgagctgtcacagtggcataacctgaccgtgatcgctgcggagattaacaatccgaaagagaccacgagggtagctgtgtttgtgcggatactcgatgtaaacgacaacgcacctcagttcgccgttttttatgacaccttcgtatgcgaaaatgcgcgaccaggacaactgatccagacaatcagtgccgtggacaaagatgaccctctgggcggtcagaagtttttcttctctttggcagccgtaaatccaaacttcaccgtccaggacaatgaggacaatacggcgcgtatcttgacaagaaagaacggattcaataggcatgaaatcagcacctacctcctgcctgtggtcatctctgataatgattaccctattcagtcttccacagggacactaactattcgagtgtgcgcttgtgacagtcagggaaatatgcagtcatgttcagcagaagcattgctgctcccagctggcctttccacgggtgcactgattgcaatcctattgtgcatcataatcctgctggtgatcgtggtgctcttcgctgccctcaagaggcaacgaaaaaaggagccgctcatactgagcaaggaagatatcagagacaacattgtaagttataacgatgagggaggtggagaagaggacacccaagcattcgacatcgggaccctacggaatcccgcagccatcgaagagaagaaactgcgcagggacatcattcccgaaacgttatttattcccagacgcacccctacagctccagacaacacagatgtacgcgacttcattaacgagcgcctgaaggagcacgacctggatcccaccgctccgccatacgattcgctggccacctatgcatacgaggggaatgactctatcgctgaatctctctctagtctcgagagtggaactacagaaggcgatcagaattacgactatcttagagagtggggtcctcgctttaacaaactcgctgaaatgtacggcggaggcgagtccgataaagacagctag

SEQ ID NO: 167397 - DNA, 3438 bp, Artificial Sequence
  derived and/or modified sequence
acttgcaaatcgctgtgtgctcgcagaagccagcacttccacagtctctaaccttcccatggcgagtgctgcagctctatcagcagaacctttctctccgtgtgaggaagagcttttttcccccctttccttttttttttttttcctttccccttaatcagaagcactgaatgaaagccaatcagagagagctcgcccccgttttcttcggttccctgctgtccagagttaaaagtgatgctgagaaagagcttgagttagattgaagtagaatcagtgatagaaaataacagccgaaaacaaacaaaaaggggacatagtgacaatttctcctgggttattttggctggaaccaacttccattatccagaagctgataaaaaagctttgggaaacatgaacaaaacattgatgaaatgttggaaaccagttgaaacacagtaaaaccaactgggtaaaataggaccacttctcttcatctacactgggatttgtcaagaagtgaactatgacaatacatcaatttttgctactgtttctattctgggtatgcctgccacatttctgctctccagaaataatgttcagaaggacgcctgtgccacagcaaagaattttaagttcacgtgtaccaaggagtgatggcaaaattctccatcgtcaaaaacgtggttggatgtggaatcaatttttcttacttgaagaatatacaggatctgattatcagtacgtaggcaagctacattcagaccaagataaaggagatggatcactcaaatatatcttatctggagatggagctggtactctttttattattgatgaaaaaacaggtgatattcatgccacaaggcgaattgatagggaggaaaaggccttttatactctacgcgcacaagctattaacagaagaactctgaggccagtagagccagagtcagagtttgtgatcaaaattcatgatatcaatgacaatgagccaacgttcccagaagaaatctatacagctagtgttcccgaaatgtctgttgtaggtacttctgtggtgcaagtcacagctacagatgccgatgacccttcatatgggaacagcgccagagtcatttacagcatacttcaagggcagccctatttctctgtggagcctgaaacaggtatcatcaggactgctttaccgaacatgaacagagaaaacagagagcaataccaagtggtcatccaggccaaagacatgggcggccagatgggaggcttatcggggacaaccactgtgaacatcacgctgacagatgtcaatgacaacccaccacgtttcccccagaacactattcatcttcgagttcttgaatcctccccagttggcacagccattggaagtgtcaaagcaactgatgctgacactgggaaaaatgctgaagtagaataccgaattattgatggtgacggtactgatatgtttgacatcgtgactgagaaggacacacaggaaggcatcatcactgtgaaaaagccactcgactatgagagccgaagactttatactctgaaagtcgaagcagaaaacacccatgtagatccccgtttttattacctaggaccatttaaagatactaccatagtgaaaatctctatagaagatgtggatgaacctcctgtttttagtaggtcctcctatctgtttgaagttcatgaagatattgaagtgggcacaatcattggtactgtaatggcaagggacccagattctatttccagccccattagattttccttggatcgccatactgaccttgacagaatctttaacattcattcaggaaatggatctctttatacatcaaaacctcttgaccgtgaactatctcagtggcataatcttactgttattgctgctgaaatcaacaatcccaaagagacaacacgcgtggctgtttttgtgagaattttggatgttaatgacaatgccccacagtttgctgtgttctatgacacttttgtatgtgaaaatgccagaccagggcagctaatacagactataagtgcagtagacaaagatgaccctttaggtggacagaaattttttttcagtttagctgctgtcaatccaaacttcacagtacaggataatgaagataatactgccagaatcttaaccagaaaaaatggattcaatagacatgaaatcagtacctatctcttgcctgtggtgatatcagacaatgattacccaattcagagcagcacaggcacactgaccattcgagtgtgtgcttgtgacagccaaggcaacatgcaatcctgcagtgctgaagccctgctcctccctgccggcctcagcactggggccttgatcgccatcctcctctgcatcatcattctactggttatagtagtactgtttgcagctctgaaaagacagcgaaaaaaagagcctctgatcttgtcaaaagaagatatcagagacaacattgtgagctataacgatgagggtggtggagaggaggacacccaggcctttgatatcggcaccctgaggaatcctgcagccattgaggaaaaaaagctccggcgagatattattccagaaacgttatttattcctcggaggactcctacagctccagataacacggacgtccgggatttcattaatgaaaggctaaaagagcatgatcttgaccccaccgcacccccctacgactcacttgcaacctatgcctatgaaggaaatgattccattgctgaatctctgagttcattagaatcaggtactactgaaggagaccaaaactacgattacctccgagaatggggccctcggtttaataagctagcagaaatgtatggtggtggggaaagtgacaaagactcttaacgtaggatatatgttctgttcaaacaagagaaagtaactctacccatgctgtctccacttcacaatatttgatattcaggagcattttcctgccagtcagcacaattttttttctcatttacttcttaatttgttcattaattacattaattctttcctgtaggatgtctcatggaatatatatgacattttatttaatcacttccaagagccaaagctatggaaatacagtgttgtccatcttagtaaataaaagataatttcagaaacatgaacaggatagttctcccttaagcaacctcacaaacaagccgcttctgttaggtacatgtcctgcccttgcaaatgaagcttttaaaaaggtgaagaaaaattttacagtatatcctgttctgtacattaaattaaaaaaacaaaaatgtacatgtgatgttagtaggtgtgatatgcaacctggtatacagacatttgtgcaatttcatttcatcaaattctatctgctaatgttttatatttatatttttgtatttatttttaaaaaaataaaccagtttttacaacta

SEQ ID NO: 167398 - DNA, 2367 bp, Artificial Sequence
  derived and/or modified sequence
atgaccatccaccagttcctgctgctgttcctgttctgggtgtgcctgccccacttctgcagccccgagatcatgttcagaagaacccccgtgccccagcagagaatcctgagcagcagagtgcccagaagcgacggcaagatcctgcacagacagaagagaggctggatgtggaaccagttcttcctgctggaggagtacaccggcagcgactaccagtacgtgggcaagctgcacagcgaccaggacaagggcgacggcagcctgaagtacatcctgagcggcgacggcgccggcaccctgttcatcatcgacgagaagaccggcgacatccacgccaccagaagaatcgacagagaggagaaggccttctacaccctgagagcccaggccatcaacagaagaaccctgagacccgtggagcccgagagcgagttcgtgatcaagatccacgacatcaacgacaacgagcccaccttccccgaggagatctacaccgccagcgtgcccgagatgagcgtggtgggcaccagcgtggtgcaggtgaccgccaccgacgccgacgaccccagctacggcaacagcgccagagtgatctacagcatcctgcagggccagccctacttcagcgtggagcccgagaccggcatcatcagaaccgccctgcccaacatgaacagagagaacagagagcagtaccaggtggtgatccaggccaaggacatgggcggccagatgggcggcctgagcggcaccaccaccgtgaacatcaccctgaccgacgtgaacgacaacccccccagattcccccagaacaccatccacctgagagtgctggagagcagccccgtgggcaccgccatcggcagcgtgaaggccaccgacgccgacaccggcaagaacgccgaggtggagtacagaatcatcgacggcgacggcaccgacatgttcgacatcgtgaccgagaaggacacccaggagggcatcatcaccgtgaagaagcccctggactacgagagcagaagactgtacaccctgaaggtggaggccgagaacacccacgtggaccccagattctactacctgggccccttcaaggacaccaccatcgtgaagatcagcatcgaggacgtggacgagccccccgtgttcagcagaagcagctacctgttcgaggtgcacgaggacatcgaggtgggcaccatcatcggcaccgtgatggccagagaccccgacagcatcagcagccccatcagattcagcctggacagacacaccgacctggacagaatcttcaacatccacagcggcaacggcagcctgtacaccagcaagcccctggacagagagctgagccagtggcacaacctgaccgtgatcgccgccgagatcaacaaccccaaggagaccaccagagtggccgtgttcgtgagaatcctggacgtgaacgacaacgccccccagttcgccgtgttctacgacaccttcgtgtgcgagaacgccagacccggccagctgatccagaccatcagcgccgtggacaaggacgaccccctgggcggccagaagttcttcttcagcctggccgccgtgaaccccaacttcaccgtgcaggacaacgaggacaacaccgccagaatcctgaccagaaagaacggcttcaacagacacgagatcagcacctacctgctgcccgtggtgatcagcgacaacgactaccccatccagagcagcaccggcaccctgaccatcagagtgtgcgcctgcgacagccagggcaacatgcagagctgcagcgccgaggccctgctgctgcccgccggcctgagcaccggcgccctgatcgccatcctgctgtgcatcatcatcctgctggtgatcgtggtgctgttcgccgccctgaagagacagagaaagaaggagcccctgatcctgagcaaggaggacatcagagacaacatcgtgagctacaacgacgagggcggcggcgaggaggacacccaggccttcgacatcggcaccctgagaaaccccgccgccatcgaggagaagaagctgagaagagacatcatccccgagaccctgttcatccccagaagaacccccaccgcccccgacaacaccgacgtgagagacttcatcaacgagagactgaaggagcacgacctggaccccaccgcccccccctacgacagcctggccacctacgcctacgagggcaacgacagcatcgccgagagcctgagcagcctggagagcggcaccaccgagggcgaccagaactacgactacctgagagagtggggccccagattcaacaagctggccgagatgtacggcggcggcgagagcgacaaggacagctag

SEQ ID NO: 167399 - protein, 1101 aa, Artificial Sequence
  derived and/or modified sequence
MEQPGAAASGAGGGSEEPGGGRSNKRSAGNRAANEEETKNKPKLNIQIKTLADDVRDRITSFRKSTVKKEKPLIQHPIDSQVAMSEFPAAQPLYDERSLNLSEKEVLDLFEKMMEDMNLNEEKKAPLRNKDFTTKREMVVQYISATAKSGGLKNSKHECTLSSQEYVHELRSGISDEKLLNCLESLRVSLTSNPVSWVNNFGHEGLGLLLDELEKLLDKKQQENIDKKNQYKLIQCLKAFMNNKFGLQRILGDERSLLLLARAIDPKQPNMMTEIVKILSAICIVGEENILDKLLGAITTAAERNNRERFSPIVEGLENQEALQLQVACMQFINALVTSPYELDFRIHLRNEFLRSGLKTMLPDLKEKENDELDIQLKVFDENKEDDLTELSHRLNDIRAEMDDMNEVYHLLYNMLKDTAAENYFLSILQHFLLIRNDYYIRPQYYKIIEECVSQIVLHCSGMDPDFKYRQRLDIDLTHLIDSCVNKAKVEESEQKAAEFSKKFDEEFTARQEAQAELQKRDEKIKELEAEIQQLRTQAQVLSSSSGIPGPPAAPPLPGVGPPPPPPAPPLPGGAPLPPPPPPLPGMMGIPPPPPPPLLFGGPPPPPPLGGVPPPPGISLNLPYGMKQKKMYKPEVSMKRINWSKIEPTELSENCFWLRVKEDKFENPDLFAKLALNFATQIKVQKNAEALEEKKTGPTKKKVKELRILDPKTAQNLSIFLGSYRMPYEDIRNVILEVNEDMLSEALIQNLVKHLPEQKILNELAELKNEYDDLCEPEQFGVVMSSVKMLQPRLSSILFKLTFEEHINNIKPSIIAVTLACEELKKSESFNRLLELVLLVGNYMNSGSRNAQSLGFKINFLCKIRDTKSADQKTTLLHFIADICEEKYRDILKFPEELEHVESASKVSAQILKSNLASMEQQIVHLERDIKKFPQAENQHDKFVEKMTSFTKTAREQYEKLSTMHNNMMKLYENLGEYFIFDSKTVSIEEFFGDLNNFRTLFLEAVRENNKRREMEEKTRRAKLAKEKAEQEKLERQKKKKQLIDINKEGDETGVMDNLLEALQSGAAFRDRRKRIPRNPDNRRVPLERSRSRHNGAISSK

SEQ ID NO: 167400 - protein, 1101 aa, Artificial Sequence [sequence omitted]

SEQ ID NO: 167401 - DNA, 3306 bp, Artificial Sequence
  derived and/or modified sequence
atggaacaacctggcgctgcagcgtcgggagctggtggtggtagtgaagagccaggaggcgggcggagtaacaaacggtccgctggcaatagagctgctaacgaagaggagactaagaacaaaccgaaattgaatattcagataaaaaccctggcggatgatgtacgagacaggatcacttcttttcgcaaatcaacagtgaaaaaggagaaacccttgatccaacatccgattgactcccaggttgctatgagtgagttcccagctgcccaaccactttacgacgaaagatcactgaatctgtcggaaaaagaggttctggatttattcgagaaaatgatggaagatatgaatcttaacgaagagaagaaggccccacttaggaacaaggatttcacaaccaaaagggaaatggtggtccaatatatcagtgcgaccgccaaaagcgggggcctgaaaaattctaagcacgagtgcacgctatcttcacaggagtatgtgcacgaactcaggtccggtatctccgacgaaaagttgctgaattgtcttgagtccctgcgggtgtctctaacatcaaatccggtcagttgggtgaacaattttggccacgaaggcttaggcttacttctcgatgaactggagaaactgctggacaaaaagcaacaagaaaatattgacaagaagaaccagtacaaattgattcaatgtctgaaggcgtttatgaacaataagtttgggctgcagagaattctcggcgacgagcggtccctgcttctgctcgctcgcgcaattgatccgaaacagcctaacatgatgacggagatcgtcaaaattttgtccgccatatgcatagtaggggaggaaaatatcctggataaactgttaggtgcgattactaccgcagccgagcgcaacaacagggagaggttctccccaatcgtcgaagggctcgagaatcaggaggctttgcaactacaggtagcctgtatgcaatttataaacgctctggtgacaagcccttatgaactggacttcagaattcatttgcgaaatgaatttctccggagtggtctgaagacaatgctgcccgacctgaaagaaaaagaaaacgatgaattagacattcagctgaaagtcttcgacgagaacaaagaagatgatctaaccgaactgtcgcatcgattaaacgacattagagccgaaatggacgatatgaacgaggtttaccacctgctgtacaacatgctcaaagatactgcggccgagaattactttctttcaatcctccagcacttcctcttaatcaggaatgattactacatccgcccccaatactacaaaataatcgaggagtgcgtgtcacagatcgtgcttcactgctccggcatggatcccgatttcaagtaccgccagagactggatattgatctgactcaccttattgatagctgcgtgaacaaggcaaaagttgaggagtctgaacagaaagccgccgaattcagtaaaaagtttgacgaagagtttactgctcggcaggaggctcaagccgagttgcagaaacgtgacgagaagatcaaggagctagaggccgagatacaacagctgcggactcaggctcaggttttgtcctccagcagtgggatccctggccctccagctgctcccccgctgcccggggtggggcccccccccccaccacctgctccacctcttcccggcggggcacctttaccaccccctccccctcctctgcctgggatgatggggattcctcccccaccacccccccctctgcttttcggcggaccccctccaccaccaccactgggaggagtgccacctcccccaggtatctcactgaatctcccctatggtatgaagcagaaaaaaatgtacaagcctgaggtgagtatgaagaggataaattggtctaaaattgaacctaccgagctgagcgaaaattgtttctggctgcgcgttaaagaggataaatttgaaaatcccgacctattcgcgaaactggcactgaatttcgcaacgcagatcaaggttcagaagaacgcagaggctctggaagaaaaaaagacagggcccacaaaaaagaaagtgaaggagcttaggatcctggatccaaagacagctcagaacctgagcatcttcctgggcagctatcgtatgccatacgaagatattcgaaatgttatcctggaagtaaacgaggatatgctatccgaagccctcattcagaacctcgttaagcacctgccggaacagaaaattctgaatgagctggccgagctcaagaacgaatatgacgatctgtgcgagcctgagcaattcggcgtggttatgtcctctgtcaagatgcttcagccaaggctgtccagtatcctgttcaagctgactttcgaggagcatataaacaacataaagccctctatcatcgctgtaacactagcctgcgaagaactgaaaaaatctgagtcctttaatcgacttttagagctggtgctactagttggcaactatatgaattccggaagccgtaatgcccaatctctgggattcaaaataaacttcctatgcaaaatacgcgacaccaagtctgcagaccagaaaacgactctgctgcattttatagccgatatctgcgaagagaagtatagggacatcctaaagtttcccgaagagttggagcacgttgaaagcgcaagcaaagtttcagcgcagatcctgaaaagcaatctggcaagtatggagcagcagattgtgcaccttgagagggacataaaaaagttcccacaagcagaaaatcagcatgacaagtttgtggagaagatgacctcttttacgaagacagcccgcgaacagtacgaaaaactaagtaccatgcataacaacatgatgaagctctacgaaaacctaggcgagtatttcatcttcgatagcaagacagtgtctatagaagagttttttggggacctgaataattttcgcacactgttcttagaggcggtcagggagaacaacaaaaggagagagatggaggaaaagacaagacgggctaaacttgcaaaggagaaggccgagcaggagaaactggagagacagaagaagaaaaagcaactgatagacatcaataaggagggagacgaaactggcgtgatggataacttgcttgaagcactgcagagcggcgctgcttttagagacagaaggaagaggatccctcgcaatcctgataaccgcagagtgcctctggaacgtagcaggtcgcgtcacaatggagccatctcaagcaaatag

SEQ ID NO: 167402 - DNA, 3291 bp, Artificial Sequence
  derived and/or modified sequence
atggagcagcctggcgcagcagccagcggagccggcggcggaagcgaggagcccggtggcggaagaagtaacaaacgaagtgcagggaatagggcagccaacgaggaagagaccaagaacaaacctaaactaaatattcagatcaaaacactcgccgatgatgttcgggatagaatcaccagctttaggaaaagtactgtcaaaaaagaaaaacccttgatccagcatccaatcgatagccaggtggcgatgtccgagttcccagccgcccagccactttacgacgaaaggtcactaaatctcagcgagaaggaggtgctggacctgttcgagaagatgatggaagacatgaacctgaatgaggagaagaaagccccattaaggaacaaggacttcactacgaagcgggagatggtcgtgcagtatatctccgcaacagccaagtctggaggcctgaaaaactccaagcatgaatgcacattaagttcccaggagtacgtccacgaattgcgatcaggaatatctgatgaaaaactcttaaattgcttggagtccctgcgggtatctctcacttcaaatcccgtcagctgggttaataatttcggacatgagggattgggactgctgctagacgagctcgagaaattgctagacaagaaacaacaagagaacatcgacaagaaaaatcaatacaagctgatccagtgcctgaaggcgttcatgaataacaagtttggactccagagaatcctgggagacgaacgcagcttgctgcttttggcccgcgctatcgaccctaagcagcccaacatgatgacagagatcgtcaagattctgagcgccatttgtatagtgggagaggaaaacattttagacaaactgctcggtgccattactaccgcggcggagcgaaacaatagggagaggttttcccctatagtggaaggcttagagaatcaagaggctcttcaactacaggtggcttgcatgcagtttatcaacgccctggttacttccccttacgaactggacttcagaatccatcttaggaatgagtttctcagaagcggcctgaaaacaatgctgcctgaccttaaggagaaggaaaatgatgagctcgatatacagctcaaggtttttgacgagaacaaggaggatgatctcaccgagctgagccaccgcttgaatgacattcgggccgaaatggacgacatgaacgaggtttaccacctgttatataacatgcttaaagacaccgccgccgagaactattttctgtcaatcctgcagcacttcctgctgattcggaatgattactatatacgtccccagtactataaaataatcgaggagtgcgtctctcaaatcgtgctccactgtagtgggatggaccccgacttcaaatacaggcagagactggatattgatctcacacatttgattgattcctgcgttaacaaagcgaaggttgaagagagtgagcagaaggcagccgaattctccaagaaattcgacgaggaattcacagctagacaagaagcacaggcggagcttcagaaaagagatgagaagattaaggagctggaggcagaaattcagcaactgcggacgcaagcccaggtgctcagctctagctctgggatccctggccctcctgccgcaccaccactccccggtgtgggccccccaccacctccaccggcccctcccctgccggggggcgcccctcttccacctcccccgcctcctctgcccggtatgatgggaatccctcctccgcctccaccacctctgctgtttgggggcccacctcctcctcccccactcggtggcgtgcctccaccacctggaatatcactcaacctgccctacgggatgaaacaaaaaaagatgtacaaaccagaagtgtctatgaagagaattaattggtcgaaaatcgaacctacagaattgagtgagaattgcttctggctccgagttaaagaagacaagttcgaaaaccccgacctgttcgctaaactcgctctgaactttgcaacacaaattaaggtgcagaagaatgccgaggccctggaggagaagaagacaggcccaacaaagaagaaagtcaaggaactgcggatcctggatccaaagacagcccagaatctatccatctttctggggagttaccgcatgccatacgaggacatacgtaacgtgatcctggaagtcaatgaggacatgctctccgaggccctcatacagaatctcgtgaagcacctgcccgagcagaagatattgaatgaactcgccgagcttaaaaatgaatacgatgatctatgtgaaccagagcagtttggcgtggtgatgtcatcggttaagatgctccagccgcgcttaagcagtatcctctttaaactcaccttcgaagagcatattaacaatattaagcctagcattatcgcagttacactggcttgcgaggagttgaagaagagtgagtcatttaatcgcctgctggagcttgtgctcctcgttggcaactatatgaacagtggaagccgaaatgcacaatctcttgggttcaagattaactttctgtgtaagatacgggacacaaagagcgcagatcagaaaacaacccttttgcattttattgccgatatatgcgaggagaaatatagggatatccttaaatttccagaggagcttgagcatgttgaatcagcttcaaaagtgagtgcgcagattctcaagtctaacctggccagtatggagcaacagatcgttcatctggaaagagacatcaagaaatttcctcaggccgaaaatcagcatgacaaattcgttgagaaaatgacgatctttaccaagacagcgagggaacagtacgagaagctgagtaccatgcataacaacatgatgaaattgtatgaaaacctcggcgagtactttatttttgattctaagacagtgagcattgaagagttctttggcgacctgaacaactttcgaaccctgttcctggaagcggtacgggaaaataacaagcggagagagatggaagaaaaaacacgccgcgcaaagctggctaaggaaaaagcagagcaagagaaactggaacggcaaaaaaagaaaaaacagcttatcgacatcaataaggaaggagatgaaacaggagtcatggataatctgctagaggccctacagtcaggggctgcgtttagggaccgacgcaagaggattccaaggaacccagtcgtgaaccatccctgcgccacccgggccaatcctcgctctgctacttag

SEQ ID NO: 167403 - DNA, 3291 bp, Artificial Sequence
  derived and/or modified sequence
atggaacagcccggggccgcagctagcggcgcaggcggaggaagtgaggagcccggaggtgggagaagtaacaagcggtcagccgggaatagagctgctaatgaagaagagacgaagaacaaacccaaacttaacatccagatcaaaaccctcgccgacgacgtgagagatagaattacatcttttcgcaaatctactgtgaagaaagagaaacccctgattcagcaccctatcgatagccaggtggcaatgagtgagttccccgccgctcagcccctgtacgacgagagaagtcttaacctgtccgagaaagaggttctggatttgtttgaaaaaatgatggaagacatgaacctaaatgaggaaaagaaggcccccctgcgaaataaagatttcacgaccaagcgggaaatggttgttcagtatatttccgccacagctaaatccggcgggctgaagaatagtaagcatgagtgtaccctaagctctcaggaatacgtccacgaactccgttctgggatctctgatgaaaagcttctgaactgtcttgaatcactgcgcgtcagcctaacgtcgaatcctgtgagctgggtaaacaactttggccatgaaggcttggggctgttgctcgacgaactggaaaaactgctcgacaaaaaacagcaggaaaatatagataaaaagaatcaatataagttgattcagtgtctgaaggcattcatgaataataagtttggccttcaaaggatcttaggtgacgagcgctctctgctgttactcgctagggcaattgatccaaagcagcccaatatgatgacagaaatcgtgaaaatcctgtcagccatttgtattgtgggggaggagaacattttggacaaattgcttggagcaataactaccgcagctgagaggaataacagggagagattttctccaatagtggaggggctcgagaaccaagaggccctgcaactgcaggtggcatgtatgcagtttattaacgctctggtcaccagtccctacgagcttgattttcgaatccatctccgaaacgagtttctgaggagtggcctgaagacaatgcttcccgacctgaaagagaaggagaatgatgaactggatattcagcttaaggtgtttgacgagaataaagaggacgacctcactgagctcagccatcggctgaacgatattcgagctgagatggacgatatgaacgaagtctatcacctactctacaatatgctcaaagataccgctgccgaaaattatttcctctccatcttgcaacacttcttgttgataaggaacgattactacattcgaccacagtactacaaaattatcgaagagtgcgtttctcagatcgtcttgcattgttccggcatggacccagacttcaaatacagacagcgcctcgatatagatctcacacatctcatcgactcttgcgtcaacaaggcgaaagtggaggaaagtgagcagaaagctgctgagttttccaagaaattcgacgaggaattcactgctaggcaagaggcccaggctgagctacagaagagagacgagaaaattaaagagctcgaggccgaaattcagcagctgcgaacacaggcgcaggtactgagctcatcctcgggcattccaggtccgccggccgcaccccccctgccaggtgtgggcccacctccaccaccacccgcaccccccctgcctggcggcgcccctctgccgccaccacctcccccccttcccggcatgatggggatccctccaccacctccaccaccactgctgtttggtggtcctcccccacctccccccctgggcggggtgcccccaccacccggcatctccttgaacttaccttatggaatgaagcagaaaaagatgtataagcccgaggtgtccatgaaaagaatcaattggtctaagatcgagcctaccgagctatccgagaactgcttctggcttagagttaaggaggataaattcgagaacccggatttgtttgcgaagcttgctctcaattttgccactcagatcaaggtacagaagaatgccgaagctctggaggaaaagaaaacagggcccactaaaaagaaggtcaaagaattgcgtatccttgaccctaagaccgcccagaacctgagtatcttccttgggtcttaccgtatgccttatgaggatatccgcaacgtcatcttggaggttaacgaggacatgctctccgaagcgctgatccagaatctcgtaaagcacctgccggaacagaagattttgaatgaattggccgaacttaaaaatgaatatgatgacctgtgcgagcctgagcaatttggagtggtgatgtcaagcgtgaagatgcttcagcctcgactttcttcaattctgtttaagctgacattcgaagagcacatcaacaatattaaaccaagcataattgccgtcacactggcatgcgaagaactgaaaaagtcagagtcctttaatagactcctggagctcgtgctgctcgtggggaactatatgaattctggaagccgaaacgcccagagtttaggcttcaagataaattttctgtgcaaaattcgcgataccaagtctgccgatcagaaaacaactctcctgcatttcatcgccgacatctgtgaagaaaagtaccgcgatatactgaaattcccagaggagcttgagcacgttgaaagcgcctccaaggtgtctgcccagattctgaagagtaatctcgcatcaatggagcagcagatcgtgcaccttgagagggatattaagaagtttccccaggctgagaaccagcacgacaagtttgtagagaagatgaccagctttacgaaaaccgctcgagaacagtacgaaaagctttccaccatgcacaacaatatgatgaaactttacgaaaatctgggcgagtattttatttttgactccaaaacggtcagtatcgaagaatttttcggagacttgaacaattttcgcaccctcttcctggaagctgttagggaaaacaacaaaagacgcgaaatggaagagaagactaggagggccaaactggccaaggagaaagcggagcaggaaaaattagagcggcaaaaaaagaagaagcagctgattgacatcaacaaagagggagatgagactggcgtaatggataatttactagaagcgctgcaaagtggcgccgcctttagagatcggcgcaaacggatccctaggaaccctgtggttaaccacccctgtgcaacccgggcaaatcctaggtccgcgacatag

SEQ ID NO: 167404 - DNA, 3294 bp, Artificial Sequence
  derived and/or modified sequence
atggaacagccgggtgcagcagccagcggcgcaggcggcgggtcggaggagcctggcggggggcggtctaataagcgatcagctggtaaccgggccgcaaacgaggaagaaacaaagaataaacccaagctgagggaccgaatcacctcttttagaaaatccaccgttaaaaaggagaaaccgctgatccagcaccccatcgattcccaagttgccatgagcgaattccccgctgcacagccgctctacgacgaacgcagcctgaacctgagcgagaaggaggtcctagatctgttcgaaaaaatgatggaggatatgaatctgaacgaggaaaagaaggcaccactgcgcaacaaagatttcactactaagcgggagatggtcgtccaatatatcagtgccacggctaagtcagtgattagtagccacatcaaggggggtctgaagaacagcaagcacgaatgtaccctgtcatcgcaagagtatgtccatgaacttcgctctgggatttccgacgagaaactgctgaactgcctggaatctttaagagtgtcactcacttctaaccctgtgagttgggtcaacaatttcgggcacgaaggcctcgggctcctccttgacgagctggaaaagctattggacaaaaagcagcaagaaaacatcgataaaaagaatcagtacaagctgattcagtgcctgaaagcgttcatgaataacaagtttggcttacaacgtattctgggggacgagcgcagccttctgctgctggcgcgggccatagaccccaaacaacctaatatgatgacagagatcgtaaaaattctgtccgcgatctgcatcgttggggaggaaaacatcttagataagttactcggtgccattactactgcagccgagaggaacaatcgggaacgctttagccccattgtagagggacttgaaaaccaggaggctctgcagctccaggtcgcctgcatgcaatttatcaatgcactggtgacatcaccatacgaactcgacttccgtattcaccttcggaatgaattcctccgaagtggccttaaaactatgttacccgatctgaaggagaaggaaaatgacgaactcgatatccagctcaaggtctttgatgaaaacaaagaggatgacctgacggaactgagccatcgtttaaacgacatacgcgctgagatggacgatatgaacgaggtgtaccatttgctttataatatgctaaaggacaccgccgctgagaattacttcctgtctatcctccagcattttcttctaattcggaatgattattacatccggccacagtattacaagattatagaagaatgcgtttcccagatcgtgctgcactgttcggggatggaccccgacttcaagtatcggcaaagacttgacatcgacctcacacacttgattgacagctgcgtgaataaagccaaagtcgaggagtccgagcagaaggctgctgaattttcaaaaaaatttgacgaggagttcaccgcgagacaggaagcgcaagccgagctccagaagcgggatgagaaaatcaaggagttggaagccgagatacagcaattgcggacccaggcccaggttttatcgagctcatccggaattccagggccgccagcagccccccctttgcctggcgtgggtcctccacccccccccccagcccctccactgccaggaggggcacctctgcctccccctcctccacccttgccaggcatgatgggcattcctccacctcccccaccccctctcctgttcggcggaccaccccccccgcctccattaggaggtgtcccccccccccctggtatctctctcaatcttccatacggaatgaaacagaaaaaaatgtataaaccagaggtgtcaatgaagagaatcaattggtctaagattgaacccaccgaactaagcgaaaactgtttttggctgagagtgaaggaagataaatttgaaaacccagacttgttcgccaaactggctttaaactttgcgacccagatcaaggtgcagaaaaatgccgaggctctcgaagaaaaaaaaaccggccctacaaagaagaaagtgaaagagctgcgcatcctcgatccaaagaccgcccagaaccttagcatatttctgggcagctaccgaatgccatacgaggacataagaaatgtaatcctggaggtcaacgaagacatgctcagcgaggcccttatccagaacttggttaaacacctgccagaacagaagattttaaatgaacttgccgagctgaaaaacgagtatgatgatctttgtgaaccagagcaattcggggtggtgatgagcagcgtgaaaatgttgcagcccagactatcgtccatactgttcaaacttactttcgaagagcatatcaacaatatcaagcctagtatcattgctgtgactctggcctgtgaagagcttaagaaatctgaatctttcaaccgcctgcttgagttggttctgctggtgggcaactatatgaactctggatctaggaacgcgcaatctcttggtttcaagatcaacttcctgtgtaagatcagagatacgaagagcgccgatcagaagacaacactgctgcactttatcgcagacatctgcgaagagaaatacagggatatcctgaagttcccagaagaactcgaacatgtggagagtgcaagcaaagttagtgcccagattttgaagtccaaccttgccagtatggaacagcagatcgtacacctggagcgggatatcaaaaaatttcctcaggctgagaaccagcatgacaaattcgtggagaaaatgaccatcttcactaagaccgccagggaacagtatgaaaaattatctacaatgcataataacatgatgaaactgtatgaaaatctgggggagtattttatctttgactctaagacagtctctatcgaggagttcttcggggatctgaataacttcaggacgctgtttctagaagccgtgagggaaaataacaagaggcgagagatggaggaaaaaaccagaagggccaaactggcgaaagaaaaggccgagcaggagaaactggaacggcagaagaagaagaagcagctcattgatatcaacaaggaaggtgacgagaccggcgtaatggataacttattggaagccctgcaaagtggcgccgccttcagagaccgtagaaaacgaattccccggaatcccgacaatcggcgggtgccgctggaacggtctaggagccgtcataatggggccattagttccaagtag

SEQ ID NO: 167405 - DNA, 3306 bp, Artificial Sequence
  derived and/or modified sequence
atggagcagccgggcgctgccgcatctggggctgggggcggaagcgaggaacctggggggggccgttcaaacaagcgttctgctggaaatcgcgcagctaacgaagaggaaaccaaaaacaaaccaaaactgaacattcaaataaagacattggccgacgatgtgcgcgatcgtattacgagtttcagaaagagcaccgtcaagaaggagaagcccctcattcaacatccaattgattcccaagtagccatgagcgagtttccagccgctcagccactctacgacgaacgtagccttaacctcagtgagaaagaggtgcttgacctcttcgaaaagatgatggaagatatgaatcttaatgaggagaagaaggccccactgcggaataaagactttactacgaagcgtgaaatggtcgtccagtacattagcgcaacggccaaaagcggcggcctgaaaaattcaaagcacgaatgcaccctgtctagccaggagtacgtgcacgaactgagatctggcatctcagacgaaaagcttttgaattgcctcgagtctctgagggtgtctcttacctctaaccccgtctcgtgggtaaacaacttcggacatgaggggttgggacttctgctcgacgaattggagaaactgctggacaagaagcagcaggagaacatcgacaagaagaatcagtacaagctgattcagtgtctcaaggcgtttatgaataacaaattcggcttgcagcggatactgggagacgaacgcagcctgctcctgcttgcccgcgccattgaccctaagcagccgaatatgatgaccgaaatagtgaagattctatccgcgatctgcatcgtcggtgaggaaaatattctcgacaagctcctaggagctattactactgcagccgagcgtaataacagggaacgattttcaccaattgtcgaaggtctagagaatcaggaagcccttcagctgcaggttgcgtgtatgcagtttattaacgctctggtaacatcgccttatgaattagacttccggatccacctgcgaaatgagttcctgagatccggcctcaagaccatgttgccagatctgaaagagaaggagaacgatgaactagacatacagctcaaggtcttcgacgaaaataaggaggacgatctgacagaactttcccacagactaaacgacattagggcagagatggatgacatgaacgaggtctaccacctattatataacatgctgaaggatacggccgccgagaactactttctgagtatcctgcagcatttcctgctcatcaggaatgactactacatacgtccacagtactacaaaattattgaggagtgcgtgagtcaaatcgtgctgcattgcagtggaatggatccggattttaagtatagacaacggctcgacatcgatctcactcacttaattgattcttgcgtcaacaaggcaaaggtggaagaatccgagcagaaagccgcggagttcagtaagaaatttgatgaggaatttaccgctcgccaggaggctcaggctgagctgcaaaagcgggatgagaaaatcaaggaactcgaagccgagatacagcagttacgtactcaagcccaagtcctttcttcgagctcaggcatccccggtccccctgcagcgcctccgctacctggagtgggcccacctcctcctccgcccgctccgcccctgcccggtggagctcctctccccccaccacccccgcccctgcctggaatgatgggtatcccccccccccctccaccaccccttctcttcggcggcccccctcctccccccccactaggcggcgtcccccccccacctgggatatcgctgaacctgccctatggtatgaagcagaagaaaatgtataaacccgaagtctcgatgaaaaggatcaattggtcgaagattgaacctacagaactgagtgaaaactgcttttggcttagagtgaaagaagacaaattcgaaaatcccgacttattcgccaagttggctttaaatttcgccacacagattaaggttcagaaaaatgccgaggccctcgaagagaagaaaaccggccctacaaaaaagaaagtgaaggaacttcgaattctggacccaaaaaccgcccaaaatctgagtatctttcttggcagttataggatgccttacgaagatattaggaacgtgatactggaggtgaatgaggacatgctgtctgaggcgctgattcagaacttagtaaaacacctgcctgagcaaaagatcctcaacgagctcgcagaactgaagaacgagtatgacgatctgtgtgagcccgaacagtttggagtagttatgagcagtgtcaagatgttgcagccccgcctaagttctatcctctttaagctcacatttgaggaacatattaataacattaaaccatctatcatcgcagtgactctggcatgcgaagagctcaaaaaatctgagtcattcaatagactcttagagttggtcctgttggtgggcaactacatgaatagcggctctaggaacgcacagtcgctgggattcaaaatcaactttctttgtaagatcagggacaccaaaagcgcggatcagaagacgacacttctgcacttcattgctgacatttgtgaggagaaatacagggacatcttgaagtttccagaggaactcgaacacgttgaaagcgcatctaaggtttctgctcagattctgaaatcaaatttggcatcgatggaacagcagattgtacatctcgagagagacatcaaaaaatttcctcaagccgagaatcagcatgataaatttgtggagaaaatgaccatctttaccaagacggctcgcgaacagtatgaaaaactgtccactatgcataacaatatgatgaaactgtatgagaacctcggcgagtatttcatattcgattccaagacagtgagtatcgaggaatttttcggggatcttaataattttagaaccctgttcctggaggccgtgcgggaaaacaacaaacgacgcgagatggaagaaaagacccggcgggctaaactcgcgaaggagaaagcggaacaggaaaagttggaaaggcagaagaagaagaaacagctgattgatatcaacaaagaaggcgatgagaccggcgtaatggacaacctattagaagctctgcagtccggagccgcattcagagatagacgcaagcgcattccgcggaatcccgataaccggcgcgtgcctctggaaaggtcgagatctcgtcacaacggagctatctcctcaaagtag

SEQ ID NO: 167406 - DNA, 3312 bp, Artificial Sequence
  derived and/or modified sequence
atggagcaacctggagccgccgcttccggcgctggcggcggcagcgaggagcccggaggaggccgatccaataaacggtcagctggaaatagggctgccaatgaagaagaaactaaaaacaaaccgaagcttaatattcagatcaagaccctggccgacgacgtgcgcgatagaattacttccttccggaagagtaccgtgaagaaagaaaaacccctgattcagcaccccatagactcccaagtggccatgtccgaattcccagctgcccagcctctgtatgacgaacgatcactcaatttgagtgaaaaggaagtccttgacctgttcgagaagatgatggaagatatgaacctgaatgaagagaaaaaagcacccctgcggaataaggactttaccactaaaagagagatggtggtgcagtatatcagcgctaccgccaaatccatcgtgggcagtaaggtcacaggcgggctgaaaaactctaagcatgaatgcaccctgtcaagtcaagagtacgtgcacgagttgagatctgggattagcgacgaaaaactattaaactgcctggagagtctccgggtctctctgacgagcaatcccgtgtcatgggtcaacaacttcgggcatgagggtctaggcttgctgcttgatgagctagaaaagctgctcgacaagaagcagcaggaaaatatcgataaaaagaatcagtataagctcattcagtgtctcaaggcctttatgaacaacaagtttggtctccaacgcattctgggtgacgaacgtagcctgctgctgttagccagagcaatcgaccccaagcagcctaatatgatgactgagatcgtgaaaatactgagcgccatctgcatcgtaggcgaggagaacatacttgataagttgctcggcgctattaccacagccgctgagcgaaacaatcgtgaacggttctcaccgatcgttgaaggtctcgagaatcaggaggcacttcagttgcaagtggcctgcatgcaattcatcaacgccttggttacaagcccatacgagttggattttcggatccatttgcggaacgagtttctcagaagcggtttgaagacgatgcttccagacctgaaggaaaaggagaatgatgaactcgatatccaactgaaggtattcgatgagaataaagaggatgacctgaccgagctttcccacagactcaatgatatccgagcggagatggacgacatgaatgaggtctaccacctgttgtataatatgctgaaagatactgcggctgagaattatttcctcagcatactgcagcactttctgctgattcgaaatgattactatatcagacctcagtattacaaaataattgaggagtgcgtgtctcagatcgtcttgcattgtagcggtatggacccagattttaaatatcgacagcggctggatatcgatctgactcatctcatcgactcctgtgtaaacaaggcgaaggtggaagaatccgagcagaaagctgccgaatttagcaagaagttcgatgaggaattcaccgcccgacaggaggcccaggccgaattacaaaagcgtgatgagaagattaaagaactcgaagccgagatccagcagctgcgtacccaggcccaagtcctgtccagtagttccgggatccccggacctcctgcagcacctcccctgcctggggttggtccaccaccacctccacctgccccacccctgcctggcggggccccactgcctccgcctccccccccactaccaggaatgatgggcattccaccacctcctcccccccctttgctgtttggtggtcctcctccaccccctccgctcggaggagtcccccccccacccggcatatcactgaacctcccatacggtatgaaacagaaaaagatgtacaaacccgaggtgagcatgaagaggatcaactggtctaagattgaaccaaccgaactgtcagagaactgcttttggctgcgcgtgaaagaagacaagttcgagaaccccgaccttttcgccaagcttgctcttaattttgctactcagataaaggtccagaagaatgctgaagcactagaggagaagaagaccgggccaacgaagaagaaggttaaagaactacgaatcttagaccctaagacagcacagaatttgtctatctttctggggagctataggatgccctacgaggatattaggaatgtgatcttggaggtgaacgaggacatgctgagtgaagctctgatccagaatctcgtgaaacaccttccagaacagaagatcctgaatgaattagccgagctgaagaacgaatatgacgatctttgtgagccagagcagtttggagttgtcatgtcctccgtcaaaatgctgcagccccgcctgtcatcgatactgttcaaactcacgtttgaagaacacattaacaacattaaaccttcgataatcgctgtaactcttgcctgtgaagaactgaagaaatccgaaagcttcaatagattgctggaactggtgctgctggtagggaattacatgaactctgggagccgcaacgctcagagtctggggttcaaaatcaatttcctgtgtaaaattagggacaccaagtcagccgaccagaagacaacactgctccatttcattgccgatatttgcgaagagaagtatcgcgacatactaaaatttcctgaagaactggaacatgtggagagtgcatccaaggttagcgcccagatattgaaatcaaacttggctagcatggagcagcagattgtgcacttagagagggatattaagaaattccctcaggccgagaatcaacacgataaattcgtggaaaagatgacaatcttcactaagacagcccgagaacaatatgaaaagctgtctacgatgcacaataacatgatgaaactatacgaaaatctgggggaatatttcatattcgactccaagacagtgagcatcgaggaattttttggtgacctcaacaactttcggaccctcttccttgaggccgtgcgtgaaaataacaaacgacgcgagatggaagagaaaactcgaagagcaaaactggctaaagagaaggccgaacaagagaaactggagcgccagaagaagaaaaagcagctgattgacattaacaaggaaggggacgaaaccggagtcatggacaaccttctggaagctctacagtctggagcagccttccgggaccgccgaaaaaggatcccacggaaccctgtcgtcaatcacccgtgtgcaacccgcgccaacccaaggagcgccacctag

SEQ ID NO: 167407 - DNA, 3306 bp, Artificial Sequence
  derived and/or modified sequence
atggagcagcccggggctgctgccagcggggccggcggcggcagcgaggagcccggcggcggccgcagcaacaagaggtctgctggcaacagagctgccaatgaggaggagaccaagaacaagcccaagctgaacatccagatcaagaccctggctgatgatgtgcgggaccgcatcaccagcttcaggaagagcacagtgaagaaggagaagcccctcatccagcaccccatcgacagccaggtggccatgtctgagttccctgctgcccagcccctgtatgatgagaggagcctgaacctgtctgagaaggaggtgctggacctgtttgagaagatgatggaggacatgaacctgaatgaggagaagaaggcccccctgaggaacaaggacttcaccaccaagcgggagatggtggtgcagtacatcagcgccacagccaagagcggcggcctgaagaacagcaagcatgagtgcaccctgagcagccaggagtatgtgcatgagctgcggagcggcatcagtgatgagaagctgctgaactgcctggagagcctgcgggtgtccctgaccagcaaccctgtgtcctgggtgaacaactttggacatgagggcctgggcctgctgctggatgagctggagaagctgctggacaagaagcagcaggagaacatcgacaagaagaaccagtacaagctgatccagtgcctgaaggccttcatgaacaacaagtttggcctgcagaggatcctgggagatgagaggagcctgctgctgctggcccgggccatcgaccccaagcagcccaacatgatgacagaaattgtgaagatcctgagcgccatctgcatcgtgggggaggagaacatcctggacaagctgctgggcgccatcaccacagctgctgagaggaacaaccgggagcgcttcagccccatcgtggagggcctggagaaccaggaggccctgcagctgcaggtggcctgcatgcagttcatcaatgccctggtgaccagcccctatgagctggacttccgcatccacctgagaaatgagttcctgcggagcggcctgaagaccatgctgcctgacctgaaggagaaggaaaatgatgagctggacatccagctgaaggtgtttgatgagaacaaggaggatgacctgacagagctgagccaccggctgaatgacatccgggcagagatggatgacatgaatgaggtgtaccacctgctgtacaacatgctgaaggacacagctgctgagaactacttcctgagcatcctgcagcacttcctgctgatcagaaatgactactacatccggccccagtactacaagatcattgaagaatgtgtgtcccagatcgtgctgcactgcagcggcatggaccctgacttcaagtaccggcagaggctggacatcgacctgacccacctgattgacagctgtgtgaacaaggccaaggtggaggagagcgagcagaaggctgctgagttcagcaagaagtttgatgaggagttcaccgcccggcaggaggcccaggccgagctgcagaagagagatgagaagatcaaggagctggaggccgagatccagcagctgcggacccaggcccaggtgctgagcagcagcagcggcatccctggccccccagctgccccacccctgcccggggtgggccccccacctcctcctccagccccacccctgcccggcggggcccccctgcccccacctcctccacccctgcccggcatgatgggcatccccccacctcctcctccacccctgctgtttggaggccccccacctcctccacccctgggcggcgtgcccccacctcctggcatcagcctgaacctgccctacggcatgaagcagaagaagatgtacaagccagaggtgtccatgaagaggatcaactggagcaagattgagcccacagagctgtctgagaactgcttctggctgcgggtgaaggaggacaagtttgagaacccagacctgtttgccaagctggccctgaactttgccacccagatcaaggtgcagaagaatgctgaggccctggaggagaagaagacaggccccaccaagaagaaggtgaaggagctgcgcatcctggaccccaagacagcccagaacctgagcatcttcctgggcagctacaggatgccctatgaggacatcagaaatgtcatcctggaggtgaatgaagacatgctgtctgaggccctgatccagaacctggtgaagcacctgcctgagcagaagatcctgaatgagctggccgagctgaagaatgaatatgatgacctgtgtgagcctgagcagtttggagtggtgatgagctctgtgaagatgctgcagccccggctgagcagcatcctcttcaagctgacctttgaggagcacatcaacaacatcaagcccagcatcatcgctgtgaccctggcctgtgaggagctgaagaagtctgagagcttcaaccggctgctggagctggtgctgctggtgggcaactacatgaacagcggcagcagaaatgcccagagcctgggcttcaagatcaacttcctgtgcaagatccgggacaccaagtctgctgaccagaagaccaccctgctgcacttcatcgctgacatctgtgaggagaagtacagagacatcctgaagtttcctgaggagctggagcacgtggagagcgccagcaaggtgtctgcccagatcctgaagagcaacctggcctccatggagcagcagatcgtgcacctggagcgggacatcaagaagttcccccaggccgagaaccagcacgacaagtttgtggagaagatgaccagcttcaccaagacagcccgggagcagtatgagaagctgagcaccatgcacaacaacatgatgaagctgtatgagaacctgggggagtacttcatctttgacagcaagacagtgtccattgaggagttcttcggggacctgaacaacttccgcaccctcttcctggaggccgtgcgggagaacaacaagaggcgggagatggaggagaagacccggcgggccaagctggccaaggagaaggccgagcaggagaagctggagcggcagaagaagaagaagcagctgattgacatcaacaaggagggagatgaaacaggagtgatggacaacctgctggaggccctgcagagcggggccgccttccgggacaggaggaagaggatccccaggaacccagacaacagaagagtgcccctggagaggagccgcagccgccacaatggagccatcagcagcaagtag

SEQ ID NO: 167408 - DNA, 3291 bp, Artificial Sequence
  derived and/or modified sequence
atggagcagcccggggctgctgccagcggggccggcggcggcagcgaggagcccggcggcggccgcagcaacaagaggtctgctggcaacagagctgccaatgaggaggagaccaagaacaagcccaagctgaacatccagatcaagaccctggctgatgatgtgcgggaccgcatcaccagcttcaggaagagcacagtgaagaaggagaagcccctcatccagcaccccatcgacagccaggtggccatgtctgagttccctgctgcccagcccctgtatgatgagaggagcctgaacctgtctgagaaggaggtgctggacctgtttgagaagatgatggaggacatgaacctgaatgaggagaagaaggcccccctgaggaacaaggacttcaccaccaagcgggagatggtggtgcagtacatcagcgccacagccaagagcggcggcctgaagaacagcaagcatgagtgcaccctgagcagccaggagtatgtgcatgagctgcggagcggcatcagtgatgagaagctgctgaactgcctggagagcctgcgggtgtccctgaccagcaaccctgtgtcctgggtgaacaactttggacatgagggcctgggcctgctgctggatgagctggagaagctgctggacaagaagcagcaggagaacatcgacaagaagaaccagtacaagctgatccagtgcctgaaggccttcatgaacaacaagtttggcctgcagaggatcctgggagatgagaggagcctgctgctgctggcccgggccatcgaccccaagcagcccaacatgatgacagaaattgtgaagatcctgagcgccatctgcatcgtgggggaggagaacatcctggacaagctgctgggcgccatcaccacagctgctgagaggaacaaccgggagcgcttcagccccatcgtggagggcctggagaaccaggaggccctgcagctgcaggtggcctgcatgcagttcatcaatgccctggtgaccagcccctatgagctggacttccgcatccacctgagaaatgagttcctgcggagcggcctgaagaccatgctgcctgacctgaaggagaaggaaaatgatgagctggacatccagctgaaggtgtttgatgagaacaaggaggatgacctgacagagctgagccaccggctgaatgacatccgggcagagatggatgacatgaatgaggtgtaccacctgctgtacaacatgctgaaggacacagctgctgagaactacttcctgagcatcctgcagcacttcctgctgatcagaaatgactactacatccggccccagtactacaagatcattgaagaatgtgtgtcccagatcgtgctgcactgcagcggcatggaccctgacttcaagtaccggcagaggctggacatcgacctgacccacctgattgacagctgtgtgaacaaggccaaggtggaggagagcgagcagaaggctgctgagttcagcaagaagtttgatgaggagttcaccgcccggcaggaggcccaggccgagctgcagaagagagatgagaagatcaaggagctggaggccgagatccagcagctgcggacccaggcccaggtgctgagcagcagcagcggcatccctggccccccagctgccccacccctgcccggggtgggccccccacctcctcctccagccccacccctgcccggcggggcccccctgcccccacctcctccacccctgcccggcatgatgggcatccccccacctcctcctccacccctgctgtttggaggccccccacctcctccacccctgggcggcgtgcccccacctcctggcatcagcctgaacctgccctacggcatgaagcagaagaagatgtacaagccagaggtgtccatgaagaggatcaactggagcaagattgagcccacagagctgtctgagaactgcttctggctgcgggtgaaggaggacaagtttgagaacccagacctgtttgccaagctggccctgaactttgccacccagatcaaggtgcagaagaatgctgaggccctggaggagaagaagacaggccccaccaagaagaaggtgaaggagctgcgcatcctggaccccaagacagcccagaacctgagcatcttcctgggcagctacaggatgccctatgaggacatcagaaatgtcatcctggaggtgaatgaagacatgctgtctgaggccctgatccagaacctggtgaagcacctgcctgagcagaagatcctgaatgagctggccgagctgaagaatgaatatgatgacctgtgtgagcctgagcagtttggagtggtgatgagctctgtgaagatgctgcagccccggctgagcagcatcctcttcaagctgacctttgaggagcacatcaacaacatcaagcccagcatcatcgctgtgaccctggcctgtgaggagctgaagaagtctgagagcttcaaccggctgctggagctggtgctgctggtgggcaactacatgaacagcggcagcagaaatgcccagagcctgggcttcaagatcaacttcctgtgcaagatccgggacaccaagtctgctgaccagaagaccaccctgctgcacttcatcgctgacatctgtgaggagaagtacagagacatcctgaagtttcctgaggagctggagcacgtggagagcgccagcaaggtgtctgcccagatcctgaagagcaacctggcctccatggagcagcagatcgtgcacctggagcgggacatcaagaagttcccccaggccgagaaccagcacgacaagtttgtggagaagatgaccatcttcaccaagacagcccgggagcagtatgagaagctgagcaccatgcacaacaacatgatgaagctgtatgagaacctgggggagtacttcatctttgacagcaagacagtgtccattgaggagttcttcggggacctgaacaacttccgcaccctcttcctggaggccgtgcgggagaacaacaagaggcgggagatggaggagaagacccggcgggccaagctggccaaggagaaggccgagcaggagaagctggagcggcagaagaagaagaagcagctgattgacatcaacaaggagggagatgaaacaggagtgatggacaacctgctggaggccctgcagagcggggccgccttccgggacaggaggaagaggatccccaggaaccctgtggtgaaccacccctgtgccacccgggccaaccccaggtctgccacctag

SEQ ID NO: 167409 - DNA, 3291 bp, Artificial Sequence
  derived and/or modified sequence
atggagcagcccggggctgctgccagcggggccggcggcggcagcgaggagcccggcggcggccgcagcaacaagaggtctgctggcaacagagctgccaatgaggaggagaccaagaacaagcccaagctgaacatccagatcaagaccctggctgatgatgtgcgggaccgcatcaccagcttcaggaagagcacagtgaagaaggagaagcccctcatccagcaccccatcgacagccaggtggccatgtctgagttccctgctgcccagcccctgtatgatgagaggagcctgaacctgtctgagaaggaggtgctggacctgtttgagaagatgatggaggacatgaacctgaatgaggagaagaaggcccccctgaggaacaaggacttcaccaccaagcgggagatggtggtgcagtacatcagcgccacagccaagagcggcggcctgaagaacagcaagcatgagtgcaccctgagcagccaggagtatgtgcatgagctgcggagcggcatcagtgatgagaagctgctgaactgcctggagagcctgcgggtgtccctgaccagcaaccctgtgtcctgggtgaacaactttggacatgagggcctgggcctgctgctggatgagctggagaagctgctggacaagaagcagcaggagaacatcgacaagaagaaccagtacaagctgatccagtgcctgaaggccttcatgaacaacaagtttggcctgcagaggatcctgggagatgagaggagcctgctgctgctggcccgggccatcgaccccaagcagcccaacatgatgacagaaattgtgaagatcctgagcgccatctgcatcgtgggggaggagaacatcctggacaagctgctgggcgccatcaccacagctgctgagaggaacaaccgggagcgcttcagccccatcgtggagggcctggagaaccaggaggccctgcagctgcaggtggcctgcatgcagttcatcaatgccctggtgaccagcccctatgagctggacttccgcatccacctgagaaatgagttcctgcggagcggcctgaagaccatgctgcctgacctgaaggagaaggaaaatgatgagctggacatccagctgaaggtgtttgatgagaacaaggaggatgacctgacagagctgagccaccggctgaatgacatccgggcagagatggatgacatgaatgaggtgtaccacctgctgtacaacatgctgaaggacacagctgctgagaactacttcctgagcatcctgcagcacttcctgctgatcagaaatgactactacatccggccccagtactacaagatcattgaagaatgtgtgtcccagatcgtgctgcactgcagcggcatggaccctgacttcaagtaccggcagaggctggacatcgacctgacccacctgattgacagctgtgtgaacaaggccaaggtggaggagagcgagcagaaggctgctgagttcagcaagaagtttgatgaggagttcaccgcccggcaggaggcccaggccgagctgcagaagagagatgagaagatcaaggagctggaggccgagatccagcagctgcggacccaggcccaggtgctgagcagcagcagcggcatccctggccccccagctgccccacccctgcccggggtgggccccccacctcctcctccagccccacccctgcccggcggggcccccctgcccccacctcctccacccctgcccggcatgatgggcatccccccacctcctcctccacccctgctgtttggaggccccccacctcctccacccctgggcggcgtgcccccacctcctggcatcagcctgaacctgccctacggcatgaagcagaagaagatgtacaagccagaggtgtccatgaagaggatcaactggagcaagattgagcccacagagctgtctgagaactgcttctggctgcgggtgaaggaggacaagtttgagaacccagacctgtttgccaagctggccctgaactttgccacccagatcaaggtgcagaagaatgctgaggccctggaggagaagaagacaggccccaccaagaagaaggtgaaggagctgcgcatcctggaccccaagacagcccagaacctgagcatcttcctgggcagctacaggatgccctatgaggacatcagaaatgtcatcctggaggtgaatgaagacatgctgtctgaggccctgatccagaacctggtgaagcacctgcctgagcagaagatcctgaatgagctggccgagctgaagaatgaatatgatgacctgtgtgagcctgagcagtttggagtggtgatgagctctgtgaagatgctgcagccccggctgagcagcatcctcttcaagctgacctttgaggagcacatcaacaacatcaagcccagcatcatcgctgtgaccctggcctgtgaggagctgaagaagtctgagagcttcaaccggctgctggagctggtgctgctggtgggcaactacatgaacagcggcagcagaaatgcccagagcctgggcttcaagatcaacttcctgtgcaagatccgggacaccaagtctgctgaccagaagaccaccctgctgcacttcatcgctgacatctgtgaggagaagtacagagacatcctgaagtttcctgaggagctggagcacgtggagagcgccagcaaggtgtctgcccagatcctgaagagcaacctggcctccatggagcagcagatcgtgcacctggagcgggacatcaagaagttcccccaggccgagaaccagcacgacaagtttgtggagaagatgaccagcttcaccaagacagcccgggagcagtatgagaagctgagcaccatgcacaacaacatgatgaagctgtatgagaacctgggggagtacttcatctttgacagcaagacagtgtccattgaggagttcttcggggacctgaacaacttccgcaccctcttcctggaggccgtgcgggagaacaacaagaggcgggagatggaggagaagacccggcgggccaagctggccaaggagaaggccgagcaggagaagctggagcggcagaagaagaagaagcagctgattgacatcaacaaggagggagatgaaacaggagtgatggacaacctgctggaggccctgcagagcggggccgccttccgggacaggaggaagaggatccccaggaaccctgtggtgaaccacccctgtgccacccgggccaaccccaggtctgccacctag

SEQ ID NO: 167410 - DNA, 3294 bp, Artificial Sequence
  derived and/or modified sequence
atggagcagcccggggctgctgccagcggggccggcggcggcagcgaggagcccggcggcggccgcagcaacaagaggtctgctggcaacagagctgccaatgaggaggagaccaagaacaagcccaagctgcgggaccgcatcaccagcttcaggaagagcacagtgaagaaggagaagcccctcatccagcaccccatcgacagccaggtggccatgtctgagttccctgctgcccagcccctgtatgatgagaggagcctgaacctgtctgagaaggaggtgctggacctgtttgagaagatgatggaggacatgaacctgaatgaggagaagaaggcccccctgaggaacaaggacttcaccaccaagcgggagatggtggtgcagtacatcagcgccacagccaagagcgtcatcagcagccacatcaagggcggcctgaagaacagcaagcatgagtgcaccctgagcagccaggagtatgtgcatgagctgcggagcggcatcagtgatgagaagctgctgaactgcctggagagcctgcgggtgtccctgaccagcaaccctgtgtcctgggtgaacaactttggacatgagggcctgggcctgctgctggatgagctggagaagctgctggacaagaagcagcaggagaacatcgacaagaagaaccagtacaagctgatccagtgcctgaaggccttcatgaacaacaagtttggcctgcagaggatcctgggagatgagaggagcctgctgctgctggcccgggccatcgaccccaagcagcccaacatgatgacagaaattgtgaagatcctgagcgccatctgcatcgtgggggaggagaacatcctggacaagctgctgggcgccatcaccacagctgctgagaggaacaaccgggagcgcttcagccccatcgtggagggcctggagaaccaggaggccctgcagctgcaggtggcctgcatgcagttcatcaatgccctggtgaccagcccctatgagctggacttccgcatccacctgagaaatgagttcctgcggagcggcctgaagaccatgctgcctgacctgaaggagaaggaaaatgatgagctggacatccagctgaaggtgtttgatgagaacaaggaggatgacctgacagagctgagccaccggctgaatgacatccgggcagagatggatgacatgaatgaggtgtaccacctgctgtacaacatgctgaaggacacagctgctgagaactacttcctgagcatcctgcagcacttcctgctgatcagaaatgactactacatccggccccagtactacaagatcattgaagaatgtgtgtcccagatcgtgctgcactgcagcggcatggaccctgacttcaagtaccggcagaggctggacatcgacctgacccacctgattgacagctgtgtgaacaaggccaaggtggaggagagcgagcagaaggctgctgagttcagcaagaagtttgatgaggagttcaccgcccggcaggaggcccaggccgagctgcagaagagagatgagaagatcaaggagctggaggccgagatccagcagctgcggacccaggcccaggtgctgagcagcagcagcggcatccctggccccccagctgccccacccctgcccggggtgggccccccacctcctcctccagccccacccctgcccggcggggcccccctgcccccacctcctccacccctgcccggcatgatgggcatccccccacctcctcctccacccctgctgtttggaggccccccacctcctccacccctgggcggcgtgcccccacctcctggcatcagcctgaacctgccctacggcatgaagcagaagaagatgtacaagccagaggtgtccatgaagaggatcaactggagcaagattgagcccacagagctgtctgagaactgcttctggctgcgggtgaaggaggacaagtttgagaacccagacctgtttgccaagctggccctgaactttgccacccagatcaaggtgcagaagaatgctgaggccctggaggagaagaagacaggccccaccaagaagaaggtgaaggagctgcgcatcctggaccccaagacagcccagaacctgagcatcttcctgggcagctacaggatgccctatgaggacatcagaaatgtcatcctggaggtgaatgaagacatgctgtctgaggccctgatccagaacctggtgaagcacctgcctgagcagaagatcctgaatgagctggccgagctgaagaatgaatatgatgacctgtgtgagcctgagcagtttggagtggtgatgagctctgtgaagatgctgcagccccggctgagcagcatcctcttcaagctgacctttgaggagcacatcaacaacatcaagcccagcatcatcgctgtgaccctggcctgtgaggagctgaagaagtctgagagcttcaaccggctgctggagctggtgctgctggtgggcaactacatgaacagcggcagcagaaatgcccagagcctgggcttcaagatcaacttcctgtgcaagatccgggacaccaagtctgctgaccagaagaccaccctgctgcacttcatcgctgacatctgtgaggagaagtacagagacatcctgaagtttcctgaggagctggagcacgtggagagcgccagcaaggtgtctgcccagatcctgaagagcaacctggcctccatggagcagcagatcgtgcacctggagcgggacatcaagaagttcccccaggccgagaaccagcacgacaagtttgtggagaagatgaccatcttcaccaagacagcccgggagcagtatgagaagctgagcaccatgcacaacaacatgatgaagctgtatgagaacctgggggagtacttcatctttgacagcaagacagtgtccattgaggagttcttcggggacctgaacaacttccgcaccctcttcctggaggccgtgcgggagaacaacaagaggcgggagatggaggagaagacccggcgggccaagctggccaaggagaaggccgagcaggagaagctggagcggcagaagaagaagaagcagctgattgacatcaacaaggagggagatgaaacaggagtgatggacaacctgctggaggccctgcagagcggggccgccttccgggacaggaggaagaggatccccaggaacccagacaacagaagagtgcccctggagaggagccgcagccgccacaatggagccatcagcagcaagtag

SEQ ID NO: 167411 - DNA, 3306 bp, Artificial Sequence
  derived and/or modified sequence
atggagcagcccggggctgctgccagcggggccggcggcggcagcgaggagcccggcggcggccgcagcaacaagaggtctgctggcaacagagctgccaatgaggaggagaccaagaacaagcccaagctgaacatccagatcaagaccctggctgatgatgtgcgggaccgcatcaccagcttcaggaagagcacagtgaagaaggagaagcccctcatccagcaccccatcgacagccaggtggccatgtctgagttccctgctgcccagcccctgtatgatgagaggagcctgaacctgtctgagaaggaggtgctggacctgtttgagaagatgatggaggacatgaacctgaatgaggagaagaaggcccccctgaggaacaaggacttcaccaccaagcgggagatggtggtgcagtacatcagcgccacagccaagagcggcggcctgaagaacagcaagcatgagtgcaccctgagcagccaggagtatgtgcatgagctgcggagcggcatcagtgatgagaagctgctgaactgcctggagagcctgcgggtgtccctgaccagcaaccctgtgtcctgggtgaacaactttggacatgagggcctgggcctgctgctggatgagctggagaagctgctggacaagaagcagcaggagaacatcgacaagaagaaccagtacaagctgatccagtgcctgaaggccttcatgaacaacaagtttggcctgcagaggatcctgggagatgagaggagcctgctgctgctggcccgggccatcgaccccaagcagcccaacatgatgacagaaattgtgaagatcctgagcgccatctgcatcgtgggggaggagaacatcctggacaagctgctgggcgccatcaccacagctgctgagaggaacaaccgggagcgcttcagccccatcgtggagggcctggagaaccaggaggccctgcagctgcaggtggcctgcatgcagttcatcaatgccctggtgaccagcccctatgagctggacttccgcatccacctgagaaatgagttcctgcggagcggcctgaagaccatgctgcctgacctgaaggagaaggaaaatgatgagctggacatccagctgaaggtgtttgatgagaacaaggaggatgacctgacagagctgagccaccggctgaatgacatccgggcagagatggatgacatgaatgaggtgtaccacctgctgtacaacatgctgaaggacacagctgctgagaactacttcctgagcatcctgcagcacttcctgctgatcagaaatgactactacatccggccccagtactacaagatcattgaagaatgtgtgtcccagatcgtgctgcactgcagcggcatggaccctgacttcaagtaccggcagaggctggacatcgacctgacccacctgattgacagctgtgtgaacaaggccaaggtggaggagagcgagcagaaggctgctgagttcagcaagaagtttgatgaggagttcaccgcccggcaggaggcccaggccgagctgcagaagagagatgagaagatcaaggagctggaggccgagatccagcagctgcggacccaggcccaggtgctgagcagcagcagcggcatccctggccccccagctgccccacccctgcccggggtgggccccccacctcctcctccagccccacccctgcccggcggggcccccctgcccccacctcctccacccctgcccggcatgatgggcatccccccacctcctcctccacccctgctgtttggaggccccccacctcctccacccctgggcggcgtgcccccacctcctggcatcagcctgaacctgccctacggcatgaagcagaagaagatgtacaagccagaggtgtccatgaagaggatcaactggagcaagattgagcccacagagctgtctgagaactgcttctggctgcgggtgaaggaggacaagtttgagaacccagacctgtttgccaagctggccctgaactttgccacccagatcaaggtgcagaagaatgctgaggccctggaggagaagaagacaggccccaccaagaagaaggtgaaggagctgcgcatcctggaccccaagacagcccagaacctgagcatcttcctgggcagctacaggatgccctatgaggacatcagaaatgtcatcctggaggtgaatgaagacatgctgtctgaggccctgatccagaacctggtgaagcacctgcctgagcagaagatcctgaatgagctggccgagctgaagaatgaatatgatgacctgtgtgagcctgagcagtttggagtggtgatgagctctgtgaagatgctgcagccccggctgagcagcatcctcttcaagctgacctttgaggagcacatcaacaacatcaagcccagcatcatcgctgtgaccctggcctgtgaggagctgaagaagtctgagagcttcaaccggctgctggagctggtgctgctggtgggcaactacatgaacagcggcagcagaaatgcccagagcctgggcttcaagatcaacttcctgtgcaagatccgggacaccaagtctgctgaccagaagaccaccctgctgcacttcatcgctgacatctgtgaggagaagtacagagacatcctgaagtttcctgaggagctggagcacgtggagagcgccagcaaggtgtctgcccagatcctgaagagcaacctggcctccatggagcagcagatcgtgcacctggagcgggacatcaagaagttcccccaggccgagaaccagcacgacaagtttgtggagaagatgaccatcttcaccaagacagcccgggagcagtatgagaagctgagcaccatgcacaacaacatgatgaagctgtatgagaacctgggggagtacttcatctttgacagcaagacagtgtccattgaggagttcttcggggacctgaacaacttccgcaccctcttcctggaggccgtgcgggagaacaacaagaggcgggagatggaggagaagacccggcgggccaagctggccaaggagaaggccgagcaggagaagctggagcggcagaagaagaagaagcagctgattgacatcaacaaggagggagatgaaacaggagtgatggacaacctgctggaggccctgcagagcggggccgccttccgggacaggaggaagaggatccccaggaacccagacaacagaagagtgcccctggagaggagccgcagccgccacaatggagccatcagcagcaagtag

SEQ ID NO: 167412 - DNA, 3312 bp, Artificial Sequence
  derived and/or modified sequence
atggagcagcccggggctgctgccagcggggccggcggcggcagcgaggagcccggcggcggccgcagcaacaagaggtctgctggcaacagagctgccaatgaggaggagaccaagaacaagcccaagctgaacatccagatcaagaccctggctgatgatgtgcgggaccgcatcaccagcttcaggaagagcacagtgaagaaggagaagcccctcatccagcaccccatcgacagccaggtggccatgtctgagttccctgctgcccagcccctgtatgatgagaggagcctgaacctgtctgagaaggaggtgctggacctgtttgagaagatgatggaggacatgaacctgaatgaggagaagaaggcccccctgaggaacaaggacttcaccaccaagcgggagatggtggtgcagtacatcagcgccacagccaagagcatcgtgggcagcaaggtgactggaggcctgaagaacagcaagcatgaatgtaccctgagcagccaggagtatgtgcatgagctgcggagcggcatcagtgatgagaagctgctgaactgcctggagagcctgcgggtgtccctgaccagcaaccctgtgtcctgggtgaacaactttggccacgagggcctgggcctgctgctggatgagctggagaagctgctggacaagaagcagcaggagaacatcgacaagaagaaccagtacaagctgatccagtgcctgaaggccttcatgaacaacaagtttggcctgcagaggatcctgggagatgagaggagcctgctgctgctggcccgggccatcgaccccaagcagcccaacatgatgacagagatcgtgaagatcctgagcgccatctgcatcgtgggggaggagaacatcctggacaagctgctgggcgccatcaccacagctgctgagaggaacaaccgggagcgcttcagccccatcgtggagggcctggagaaccaggaggccctgcagctgcaggtggcctgcatgcagttcatcaatgccctggtgaccagcccctatgagctggacttccgcatccacctgagaaatgagttcctgcggagcggcctgaagaccatgctgcctgacctgaaggagaaggaaaatgatgagctggacatccagctgaaggtgtttgatgagaacaaggaggatgacctgacagagctgagccaccggctgaatgacatccgggcagagatggatgacatgaatgaggtgtaccacctgctgtacaacatgctgaaggacacagctgctgagaactacttcctgagcatcctgcagcacttcctgctgatcagaaatgactactacatccggccccagtactacaagatcatcgaggagtgtgtgtcccagatcgtgctgcactgcagcggcatggaccctgacttcaagtaccggcagaggctggacatcgacctgacccacctgattgacagctgtgtgaacaaggccaaggtggaggagagcgagcagaaggctgctgagttcagcaagaagtttgatgaggagttcaccgcccggcaggaggcccaggccgagctgcagaagagagatgagaagatcaaggagctggaggccgagatccagcagctgcggacccaggcccaggtgctgagcagcagcagcggcatccctggccccccagctgccccacccctgcccggggtgggccccccacctcctcctccagccccacccctgcctggaggagcccccctgcccccacctcctccacccctgcccggcatgatgggcatccccccacctcctcctccacccctgctgtttggaggccccccacctcctccacccctgggcggcgtgcccccacctcctggcatcagcctgaacctgccctacggcatgaagcagaagaagatgtacaagccagaggtgtccatgaagaggatcaactggagcaagattgagcccacagagctgtctgagaactgcttctggctgcgggtgaaggaggacaagtttgaaaatccagacctgtttgccaagctggccctgaactttgccacccagatcaaggtgcagaagaatgctgaggccctggaggagaagaagacaggccccaccaagaagaaggtgaaggagctgcgcatcctggaccccaagacagcccagaacctgagcatcttcctgggcagctacaggatgccctatgaggacatcagaaatgtcatcctggaggtgaatgaagacatgctgtctgaggccctgatccagaacctggtgaagcacctgcctgagcagaagatcctgaatgagctggccgagctgaagaatgaatatgatgacctgtgtgagcctgagcagtttggagtggtgatgagctctgtgaagatgctgcagccccggctgagcagcatcctcttcaagctgacctttgaggagcacatcaacaacatcaagcccagcatcatcgctgtgaccctggcctgtgaggagctgaagaagtctgagagcttcaaccggctgctggagctggtgctgctggtgggcaactacatgaacagcggcagcagaaatgcccagagcctgggcttcaagatcaacttcctgtgcaagatccgggacaccaagtctgctgaccagaagaccaccctgctgcacttcatcgctgacatctgtgaggagaagtacagagacatcctgaagtttcctgaggagctggagcacgtggagagcgccagcaaggtgtctgcccagatcctgaagagcaacctggcctccatggagcagcagatcgtgcacctggagcgggacatcaagaagttcccccaggccgagaaccagcacgacaagtttgtggagaagatgaccatcttcaccaagacagcccgggagcagtatgagaagctgagcaccatgcacaacaacatgatgaagctgtatgagaacctgggggagtacttcatctttgacagcaagacagtgtccattgaggagttctttggagacctgaacaacttccgcaccctcttcctggaggccgtgcgggagaacaacaagagaagagagatggaggagaagacccggcgggccaagctggccaaggagaaggccgagcaggagaagctggagcggcagaagaagaagaagcagctgattgacatcaacaaggagggagatgagaccggggtgatggacaacctgctggaggccctgcagagcggggccgccttccgggacaggaggaagaggatccccagaaatcctgtggtgaaccacccctgtgccacccgggccaaccccaggtctgccacctag

SEQ ID NO: 167413 - DNA, 3306 bp, Artificial Sequence
  derived and/or modified sequence
atggagcagcccggcgccgccgccagcggcgccggcggcggcagcgaagagccaggcggcggccgctccaataagcgctcagctggcaacagggcagccaacgaggaggagactaagaacaaaccaaagcttaacatacagattaagactttggccgatgacgttcgagaccggatcactagtttccgcaagtctacagtgaaaaaagaaaagccacttattcagcacccaattgacagtcaggtggctatgtctgaatttcctgccgcacagcctttgtatgatgaaaggtccctcaacctttccgaaaaagaggtactggacctgtttgagaagatgatggaggatatgaatctgaacgaggaaaagaaggcaccattgcgcaacaaggacttcaccacgaaacgcgaaatggtcgtccaatatatcagcgccactgcgaagagtggtggacttaagaacagcaaacacgagtgtaccctttcgtctcaggagtacgtgcatgaattgaggagcgggatcagtgatgaaaagcttctcaattgtttggagagtttgagagtgagtctgacctctaatcctgtcagttgggtcaacaattttggccacgaaggcttgggcttacttctggatgagctggagaaactgctggacaaaaagcagcaggagaatattgataagaaaaaccagtataaactaattcagtgtttaaaggccttcatgaacaacaagtttggactgcagcggatactgggtgatgaacgctcgctgctgcttctggctagagccatcgaccccaaacagcctaatatgatgaccgagattgtgaaaattctgtccgctatttgtattgtaggagaggagaacattctcgataagctgttgggtgctataacgacggctgcagagcgtaacaatcgggagaggtttagccccatcgtggagggcctggagaaccaggaggccctccaactccaagtcgcttgtatgcaattcattaatgctttggttacatctccatacgaattagactttcggatacatctgcgcaacgaattcctcaggtccggcctcaagacgatgttgcctgatctgaaggagaaggaaaatgatgaacttgacatacagttgaaggttttcgatgagaataaagaagacgacttgaccgagctatcgcacagattgaatgacataagagccgagatggacgacatgaatgaggtgtatcacctcctgtacaacatgctcaaagatacagctgcggagaattacttcctgtccatattgcaacactttctcctgatccgcaatgattattacatcagaccccagtattacaagatcatcgaagagtgcgtgagccaaatcgtgctgcattgctctgggatggatcctgactttaagtaccgtcagcggttagatattgaccttacccatttaattgactcctgtgtgaataaggccaaagttgaagagagcgagcaaaaggccgcagaattcagcaagaagttcgatgaggagttcactgcacgccaagaggcccaagccgagttgcaaaaacgcgacgagaagatcaaggaactcgaggccgaaattcagcagttgagaacccaagcgcaagtgcttagcagctcatcaggcattccgggacccccagccgctcccccactgccgggagtggggccgcctcctcctccccctgcgccacctctgcccggaggagcccctctgccaccgccccctccaccactgcccgggatgatggggataccgcctccccccccccctcccctgctgttcggaggtccgcctccaccaccacctctgggcggcgtgcccccaccgcccggaatctcactcaacctgccttacggcatgaaacagaaaaagatgtacaaacctgaagtaagcatgaagagaatcaattggtctaaaatcgaacccacggagttgagcgaaaactgcttttggctgcgcgtcaaagaagataaattcgaaaaccccgacctttttgccaaactggctcttaacttcgcaacccagatcaaagtacagaaaaacgccgaggcgcttgaagaaaaaaagacaggtcctactaagaagaaagtgaaagagctgcgcatcctggatcccaagacggctcaaaatctgtcaatcttcttgggctcctaccgcatgccatacgaagatatccggaacgtgattcttgaggtgaacgaagatatgctatccgaagcacttatacagaacctggtgaagcatcttcccgagcaaaaaatactgaacgaactggcagaactgaagaatgagtacgatgacctgtgtgaacccgagcaattcggagtcgtgatgagctcagtgaaaatgctgcagcctcgtcttagctccatattattcaagctgacgtttgaggaacacatcaacaacatcaagccatccattatcgctgtcacccttgcatgcgaggagctgaaaaaatccgagtcctttaaccgtctcttggagttagtgctactggtgggaaactatatgaatagtgggtcgcgtaatgcacagagcctggggtttaagatcaatttcctttgtaagattagggacactaaaagcgcagatcagaaaaccacacttttgcactttattgccgatatctgtgaagagaaatatagggacatcttaaagtttccagaggagctggaacacgttgagtcagcaagtaaggtgagcgctcagatactcaaaagcaacctggcatccatggagcagcaaatcgtgcacctagagcgcgacattaagaaattcccacaggcagagaatcaacacgataaatttgtggaaaaaatgactagcttcaccaaaacagctagggagcagtacgaaaagctgagcactatgcataataacatgatgaaactatacgaaaacctcggtgaatacttcattttcgattccaagacggtaagcattgaagagttctttggagatctgaacaattttcgcacattatttctggaggccgtgagggagaacaataaacgccgggagatggaggagaaaactcggcgggctaagttggcgaaagaaaaggccgaacaggaaaaactggagcggcaaaaaaagaagaaacagctcattgatatcaataaggaaggggatgagaccggggttatggacaatctgcttgaagccttacaatcaggagctgcatttcgggaccggagaaagaggatccctcgcaatcccgacaaccgccgggttccccttgaaaggagccgaagtcgccataatggagccatctcatcgaagtag

SEQ ID NO: 167414 - DNA, 3291 bp, Artificial Sequence
  derived and/or modified sequence
atggagcagcccggcgccgccgccagcggcgccggcggcggcagcgaagaacctgggggtggacggtcaaacaagagaagcgccggcaatcgcgcagcaaacgaggaggagactaaaaataagcccaagttgaacatacagattaagactctcgctgatgatgtccgcgacagaatcaccagtttcagaaaaagcaccgtcaagaaggagaagccattaatacagcatcctatcgattcccaggttgccatgtccgagtttcccgctgctcagcctctgtacgacgagcggtcactgaacctaagcgagaaagaggtgttggacctctttgagaaaatgatggaggacatgaacttgaatgaggaaaagaaagctccactaagaaacaaggactttacaaccaagcgcgagatggttgtacagtacattagtgcaacagccaaaagcggagggttgaaaaattctaagcacgaatgtactctgagttctcaggagtatgttcacgagctacgtagcggcatatcagatgagaagttgttaaattgtctcgaatccttgagggtgtcgctcaccagcaaccccgtcagttgggtgaacaactttggacatgaaggcctggggttgcttctggacgagctcgaaaagctgctggacaagaagcagcaggagaatattgataagaagaaccagtataagctcatccaatgtctgaaagccttcatgaataacaaattcggactgcaacgtattttgggagatgagaggagcctgcttctattggctcgcgccatcgaccccaagcagcccaatatgatgaccgaaatcgtcaaaattctcagtgcaatatgtattgtcggggaggaaaacatcctcgacaagttgctgggagcgatcaccacggctgccgaaaggaataatagagagcgcttttcccccattgtagagggtcttgagaatcaagaagccctccagctgcaggtggcttgcatgcagttcattaacgctctggtaacttccccctatgagctagacttcaggattcacctcaggaatgagttccttcgtagcgggctgaagacaatgctgcctgatctgaaggaaaaggagaacgacgagttagatattcagctgaaggtatttgacgagaataaggaagacgatttgaccgaattgtctcaccgtctgaacgatatcagggccgaaatggacgatatgaacgaagtgtatcaccttctctacaatatgctgaaggacacagctgctgagaattacttcctgtctatcctgcagcatttcctgctaatccgcaatgattactacatcagaccccaatattataagatcattgaggaatgtgtctcccaaatcgttctgcactgctcaggcatggatccagacttcaaatatcggcagcgcctggacatcgatctcacccaccttatcgactcatgcgttaataaagcaaaggtggaggagtccgagcagaaggctgcggaattctcaaagaagtttgatgaagaattcaccgccagacaagaggcccaggccgagctgcagaagagggatgagaaaataaaagaactcgaggcagagattcaacagttacggacccaggcccaggtacttagtagcagcagtggcatccctggcccacccgcagccccccctctgcccggtgttggtcccccccctcctcctcccgctcctccactaccagggggcgcacctctacctcctcccccaccaccattaccgggtatgatgggcattcccccccctccaccaccaccccttctgtttggagggcctcctccgcccccacccctcgggggcgttccaccacctccaggtattagcctaaacctgccttacggaatgaagcagaaaaaaatgtacaagccagaggttagtatgaaacgtatcaattggtccaaaattgagcctacagagcttagtgagaactgcttctggcttcgggttaaagaggataaatttgaaaaccccgatctatttgcgaaactggctttaaactttgcaacccagatcaaagtccaaaaaaatgccgaggctctcgaggagaagaagacaggtcccaccaagaagaaggtaaaggagctcagaatccttgatccaaaaactgcgcagaatctgagcatctttctcggctcctatcgaatgccgtatgaagacatcagaaacgtgatactggaagtaaatgaagatatgttgtcagaggccttgatccaaaacctggtgaagcacctaccggaacagaagatcttaaatgaattagctgagctcaagaatgagtatgacgatctgtgtgagccagagcagttcggagtcgtgatgtcttccgttaagatgttgcaaccccggctgagttctatcttatttaaactgacgttcgaggaacatatcaacaacattaagcccagcatcatcgcggtgaccctggcatgcgaagaactcaagaagtccgagtcattcaatcggctccttgagctcgttctcctcgtcggaaactacatgaacagcggctcaaggaacgctcaaagtctaggatttaagatcaacttcctttgtaaaatcagggacacgaaaagtgccgatcagaagaccactctgttgcactttatcgccgacatctgcgaggagaaataccgggacatcctcaagttccctgaggagctggaacatgtagagagcgcttccaaggtgtcggctcagatattgaagtccaacctggcctctatggagcagcaaatagtgcacctagagcgagacatcaagaagttccctcaagcagagaaccagcacgataaattcgtggagaaaatgaccatcttcactaaaacagccagagagcagtatgagaagctcagcaccatgcataacaacatgatgaaactatacgagaatctaggtgagtatttcatctttgactctaaaaccgtctcaatcgaggaattcttcggcgacctgaataactttagaacgttgttcctggaggccgtgagggaaaataacaagcgcagagagatggaagagaaaacaagaagagctaaactagcaaaggaaaaggcagagcaggaaaagctggagcgacagaagaaaaagaagcagctcatcgatattaacaaggaaggggacgagacgggggtgatggataatttattggaggcgctacagtcaggggctgcctttcgggacagaagaaagcggatcccccgaaaccccgtggttaaccacccatgtgccactcgggctaaccccagaagcgccacatag

SEQ ID NO: 167415 - DNA, 3291 bp, Artificial Sequence
  derived and/or modified sequence
atggagcagcccggcgccgccgccagcggcgccggcggcggcagcgaggaaccaggcggcggccgatccaataaaagaagcgcgggcaatcgcgcggccaacgaggaagagaccaaaaacaaacccaaactgaacatacagatcaagaccctggccgatgacgtgagggatcgcatcacgagtttcaggaagagcaccgtgaaaaaagagaaaccgctgatacagcatcccatcgattcacaagtagcaatgtccgagttccccgcagcccagccattatatgacgaacggtctttgaacctgtctgaaaaagaggtcctcgatttgtttgaaaagatgatggaagatatgaatctgaatgaggagaagaaggctcccctgcgaaacaaagacttcacgacgaaaagggagatggtggtgcagtatatttcagcaacagctaagagcggcgggctcaagaactcaaagcatgagtgcactttatcctctcaggaatacgtgcacgagctgcggagtgggatctccgatgaaaagcttctgaactgtctagagtcccttcgcgtgtccctaacttctaaccccgtgtcctgggtcaataactttgggcatgaggggttgggcctcctgctggatgagctggagaaactcctcgacaagaaacagcaggagaacattgacaagaagaaccaatacaaacttatccagtgcctgaaggccttcatgaacaacaaatttggcttgcagcgcatactaggcgacgaacggagtctgctcctcctagcaagggccatcgacccaaaacagccaaacatgatgaccgaaatcgttaaaatcctgtctgcaatctgtattgtgggcgaagaaaacatactagataaactgctgggggcaatcacaaccgcagccgagcggaataatcgggagcggttctcccccatagtcgaggggctggagaatcaggaggcattacagctgcaagtcgcatgcatgcaattcatcaatgctttggtgacatccccatacgagctagacttccgcatccatctgcgcaacgagtttctgcgttcaggactgaaaactatgctgcctgatctcaaagagaaggaaaacgacgagctggatatccaacttaaggtctttgatgagaacaaagaggatgacctgacagagctgagtcatcgcctgaacgacatcagggcggagatggatgatatgaacgaagtgtaccacttgctgtataacatgcttaaggacaccgccgcagagaattacttcttatcaatcctgcagcacttcttgctgattcgcaacgactactatattagaccacagtactacaagattatcgaggaatgcgtgtcccagatagtcctgcattgtagtggcatggaccctgattttaagtaccgacagaggcttgatatcgatctgacacatctgattgatagctgcgtgaacaaagccaaggttgaggagagtgagcagaaagcagcagaattctcaaaaaagtttgacgaggaattcacagccagacaggaggcacaggctgaactccagaagcgcgatgaaaaaatcaaagagctcgaagcggaaattcaacaacttagaacccaggcacaggtactttcatccagcagtgggatcccagggcccccagccgccccgcccctgcccggggttgggccccccccgccaccccccgccccacccctgcccggtggggccccactccctcccccacccccacctctgcctgggatgatgggcatccctccccctccacccccaccactcttatttggcggcccccctccccctcctcccttagggggggtgccaccccctcccggtatatcccttaatctgccatatggcatgaagcagaagaaaatgtacaaacccgaggtgtccatgaaaagaataaattggtctaagattgagcctactgagctgtccgagaactgtttttggctccgcgtcaaggaagataagtttgaaaaccctgatttgttcgcaaaacttgccctgaattttgcaactcagatcaaagtgcagaagaatgctgaggcactggaggagaaaaagacagggcctactaaaaagaaggtcaaagaactgcgcattttggatcccaagacggcacagaacctgtccatctttctgggatcctacagaatgccatacgaggacatccggaatgtaatcttggaggttaacgaggacatgttgagcgaggccctcatacaaaatttggtcaagcatctgcccgagcaaaaaatcctgaatgaactcgcagaattgaagaatgaatatgacgatctgtgcgagcctgagcagtttggcgtggtgatgtctagcgtgaaaatgctgcaaccacgcctttcttctattctgtttaagctgacgtttgaagaacacatcaacaacattaaaccctccattatcgccgtgacccttgcgtgcgaagagctgaaaaagtcagaaagcttcaatcgcctcctggaactggttctgttagttggaaattatatgaacagtgggtctcgcaatgcacagagtttagggttcaagatcaattttctctgtaagattagagacacaaagtcggccgaccagaaaacaaccttacttcacttcatagctgacatctgtgaggaaaaatatcgcgatatactgaaattccctgaggaattagagcacgtagagtccgcctctaaagtatcagcacaaatcctcaagtcaaatctagctagcatggaacagcaaatagttcaccttgagagagacataaaaaaatttcctcaggccgaaaaccagcacgacaagttcgtggagaaaatgacatcattcactaaaaccgcacgggagcaatatgaaaagctgagtacaatgcacaataacatgatgaagctgtatgaaaatctgggcgagtatttcattttcgattcaaagactgtatcaattgaagagttctttggagatctgaataattttcgaacgctgttcttggaagctgtgcgggagaataacaagcgacgtgagatggaagagaagacacggcgtgccaagttagcaaaagaaaaggctgaacaggaaaaactcgagaggcaaaagaagaagaaacagcttatagatataaacaaagagggagacgagaccggggtaatggacaatctactggaggccctgcaaagcggggccgctttcagagaccgcaggaagcggatcccaaggaatcccgttgtgaatcacccatgcgccactcgagccaatcctcgctccgcaacctag

SEQ ID NO: 167416 - DNA, 3294 bp, Artificial Sequence
  derived and/or modified sequence
atggagcagcccggcgccgccgccagcggcgccggcggcggcagcgaggagcctggcggtggaaggtccaacaaaagatcagcagggaacagagcggcaaatgaagaggagaccaagaataaaccaaagctacgagatcgaattacctcatttcgtaaatccacagtgaagaaggagaaaccccttattcaacaccctattgattcccaagtggctatgtcagaatttcctgccgcacagcccctgtacgacgagaggtcccttaacctcagcgaaaaggaagttctcgatctgtttgagaagatgatggaggatatgaatctgaacgaggaaaagaaagcacctttgcggaacaaggactttactacaaagagagagatggtcgtccagtatataagcgcaacagccaaaagtgtaataagctctcatatcaagggtgggcttaagaatagcaaacatgagtgcacactctcgagccaggagtacgtgcacgagctgagatcggggattagcgacgaaaaactgctgaactgcctggaaagcctgcgggtaagtctgactagcaacccggtatcttgggttaataacttcggacacgagggactgggcctcctgcttgacgagcttgagaagttgctcgacaaaaagcaacaagaaaacattgataaaaaaaaccagtacaaactgatccagtgcttaaaggcatttatgaataataaattcggactacaacgcatcctgggagacgagcggtcactgctcctgctggccagggctatcgatcctaaacagcctaacatgatgactgagatcgtgaaaatattgagcgcaatctgcattgtgggggaagagaacatactggacaagttgcttggcgccataacaactgctgccgaacgcaataatcgggaaagattttccccaatcgtggagggcctggagaaccaggaagctttacagttgcaggttgcttgtatgcagtttataaacgcgttggtcacctctccctatgaactggattttaggatacatttacggaatgagtttttaaggtccggtctgaagaccatgctccccgacctcaaagaaaaggaaaacgatgagcttgatatacagcttaaagtgtttgacgagaataaggaagacgacttgacagaacttagtcatcggctgaatgacatcagagcggagatggatgacatgaacgaggtctatcacctgctgtacaatatgcttaaagacaccgctgcagagaactacttcctgtctattctgcagcacttcctcctaattcggaatgattattatatccgcccacaatactataaaatcatagaagagtgtgtgagccagattgtgcttcattgttccggcatggatccagacttcaagtaccgccagcgactggacatagatttaacccatctgatcgactcatgcgtaaataaggccaaagtggaagaaagcgagcagaaggcagccgaattctcaaaaaagtttgacgaagaatttaccgcgcgacaggaagctcaggctgaactgcagaaacgtgatgagaaaattaaagaacttgaagcagagattcaacagcttcgaactcaagctcaggtgctgagctcgtccagcgggattccgggccctcccgccgccccgccactcccgggtgtggggcccccccctcccccccccgccccccccttacctgggggcgctccccttcccccgcccccaccaccactgcctggaatgatgggaatcccgccaccgccaccccccccacttttgtttggggggcctccaccaccccccccactgggaggcgtgcctccaccgcctggcataagccttaacctgccttacggtatgaagcagaagaagatgtataagcccgaagtctctatgaaacgaattaattggtctaagatcgaaccaactgagctcagcgagaattgtttctggctgagagtcaaggaagacaaatttgaaaaccctgatctgtttgccaagcttgccctaaactttgcgacacaaatcaaggtgcagaagaacgccgaggcactggaagagaagaagactggcccaaccaaaaagaaagtcaaggaactgcgaatcttggatcccaagacagcccagaacctttctatatttctcggctcctacagaatgccttatgaggacatccgcaatgtaatcctggaggtgaacgaggatatgctgtcggaggctctgattcagaatctggtcaagcacctccccgaacagaaaattctcaacgagctggccgagctgaaaaatgaatatgacgatctgtgcgaacctgagcagttcggggttgtgatgtctagcgtaaagatgcttcaaccaagattgagctctatcctttttaagttaacatttgaagaacatatcaacaacatcaagccatccatcatcgccgttaccctggcgtgtgaggaactgaagaagtctgagagtttcaataggctgctggagctggtgctgctggtgggaaactacatgaatagcggctcccggaacgcacagagcctggggttcaagattaattttctttgcaaaatccgagacaccaagagcgccgaccaaaagacaacccttctgcacttcattgcagatatttgtgaggagaagtatagagacatcctaaagtttcctgaggaattggaacacgttgaaagtgcttcaaaagttagtgctcagattttaaagtctaatcttgcttctatggaacagcagatcgtgcatttggagagagatattaaaaaatttccccaagccgagaaccagcacgacaaattcgtcgagaagatgactatctttacaaagactgctagagagcagtatgagaagctctctacaatgcataataacatgatgaaattatatgaaaatttaggagagtactttatcttcgattccaaaacggtttctatagaggagttcttcggggatctgaataattttagaactcttttcctagaggctgtgcgggagaacaataaaagacgcgaaatggaggagaagacccggcgggcgaagctggccaaagagaaggccgagcaggagaaactggagcggcaaaaaaagaagaaacagctaattgatataaacaaagagggcgatgaaaccggtgtcatggacaatctgctggaggctcttcagtctggggccgcattcagagaccggcgtaaaaggattcctcgaaatccagacaaccgtcgagtgccccttgagcgtagtaggtctcgtcacaacggtgcgataagcagtaagtag

SEQ ID NO: 167417 - DNA, 3306 bp, Artificial Sequence
  derived and/or modified sequence
atggagcagcccggcgccgccgccagcggcgccggcggcggcagcgaagaaccaggaggtggacggtctaataagaggtctgccggaaacagggcagctaacgaggaagagaccaagaacaagcctaagctgaacattcaaatcaagactcttgcggatgacgttagagacaggatcacaagttttaggaagtcaacagtcaaaaaagagaagcccctcatccaacacccaattgactctcaagtcgcaatgtccgagtttccagctgcacagccactctatgatgaacgatcattgaacctcagcgaaaaagaggttttggatctgtttgagaagatgatggaagatatgaatctgaacgaggagaaaaaggctcctctgcgcaacaaagacttcactactaagcgagagatggtcgtccagtatatctctgctactgcgaagagtggaggactgaagaacagcaaacacgaatgtactttaagttctcaagagtatgtccatgagctgaggtccggcatctctgacgagaaattgctgaattgtctagagtcactgagggtcagtctgacttcaaatcctgtaagttgggttaacaatttcggccatgaaggactgggactgttgctggatgaactggagaaactgctcgacaagaagcagcaggaaaatatagataaaaaaaaccagtataaactgatccagtgtctcaaagcattcatgaacaataagtttggcctccagcgcatcttgggtgatgagcgtagtctattgttgttagcacgggccattgaccctaagcaaccaaacatgatgactgaaatcgtgaaaatactgtctgccatctgtattgtaggagaagagaacattttggataaacttcttggcgcaataaccaccgcagcagagcgcaataacagggaaaggttttcccctattgtggagggtttagagaaccaggaagcgttgcagctccaggttgcctgtatgcagttcatcaatgctctggtcactagcccctacgagttagatttccggattcacctgcgtaatgagttcctgcggtctggcctgaagacaatgcttccagatcttaaggaaaaagagaacgacgagttggatatacagctgaaggtgttcgatgaaaacaaagaggacgatttaacggagctgtctcacaggttaaacgatatcagggccgagatggatgatatgaatgaagtgtatcacttgctgtacaatatgctcaaggataccgctgcagaaaattacttcctgtcgattttgcagcactttctgctgatccgaaatgattattacatcaggccccagtattataaaattatcgaagagtgtgtctctcagatcgtcctccattgttccgggatggacccagatttcaagtatagacagaggctcgatattgacttaactcacctgatcgactcatgcgttaacaaggcaaaggtagaggagtcagagcagaaagctgctgagttttcaaaaaagtttgatgaggagtttaccgctcggcaggaggcccaggccgaattgcagaaaagggacgaaaagattaaggaactcgaagcagagatccagcaacttcgcacccaggcccaggtgctatcctcatcgagcggcattccggggcctcctgcggccccaccactgcctggagtggggcctcccccccctccccccgccccgcctctccccgggggcgcaccacttccccctcccccaccccccttgcctggaatgatgggcattcctccccctcctccccccccgctcctgttcggaggcccccccccccctcccccgttgggcggtgtccctcccccgccgggcatcagtctgaacctaccgtatgggatgaaacaaaagaagatgtataaacccgaggtgtctatgaaacgtatcaattggtccaagatcgaaccaacggaactgtcagagaattgtttttggctgcgagtgaaagaggataagtttgagaatcccgacttgtttgctaaactggctctaaactttgccacccaaataaaggttcagaagaatgcggaagcactggaggagaaaaagaccgggcctaccaaaaagaaagtgaaagaactgcgtattttggatcctaagacagctcagaacctgtctatatttctaggctcttatcggatgccttacgaggatatcagaaatgtgattttagaagtgaatgaagacatgttgagtgaggcattgatccaaaacctagtcaaacatttgcctgagcagaagattctaaacgagctggctgagctgaagaatgagtatgatgacctctgcgagcccgagcaatttggagtcgtaatgagcagcgtcaaaatgttgcaacctagattgtcttccattctcttcaagctcaccttcgaggaacatatcaataatattaaaccctcgatcatagctgtcaccctcgcctgtgaggagctgaaaaaaagcgaatcctttaatagacttctcgaattagtgctgcttgtcggaaattacatgaattcaggctctaggaacgcccaatccctgggcttcaagatcaacttcctttgcaagatccgggatactaaatcagccgaccagaagacaaccctccttcactttattgcggatatctgtgaagagaagtaccgcgacatattgaaatttcccgaggagttagagcatgttgagtcggcgtctaaggtcagtgcacagatcctgaagtccaacctcgctagtatggaacagcagatcgtgcatctggaaagagacataaagaaattcccacaagctgaaaaccaacatgacaaattcgtcgagaagatgaccatctttactaaaacagctagagaacagtatgaaaaactgtcaactatgcataataatatgatgaagttatacgagaacctgggggagtacttcatttttgactcaaagacagtgtcaatagaggagttcttcggggatttaaacaattttcgcacacttttcctggaagcggtcagagaaaacaacaaaaggagagagatggaagagaaaaccaggagggctaaactagccaaggaaaaggcggaacaagagaagctggagaggcaaaaaaagaaaaagcagttgattgatatcaataaggaaggagacgaaactggcgtgatggacaatctcctggaagcactccagagcggcgccgcttttagagaccgcaggaagcggattcctcgcaaccccgacaacaggcgcgtgcccttagagagaagccggtctcgtcacaatggggctatttcttccaaatag

SEQ ID NO: 167418 - DNA, 3312 bp, Artificial Sequence
  derived and/or modified sequence
atggagcagcccggcgccgccgccagcggcgccggcggcggcagcgaggagcccgggggaggccgcagtaataaaagaagcgccggcaatagggctgccaatgaagaggaaacaaaaaacaagccaaagttaaacatccagattaagaccctggcagatgacgttagagacaggattacgtcctttagaaagagtacggtgaaaaaagaaaagcccttaattcagcacccaatagacagccaggtcgccatgagcgaattcccagctgcacagccactgtatgatgaacgctcactcaacttaagcgagaaagaagttcttgatctgtttgagaaaatgatggaagatatgaatctgaatgaggagaagaaggccccactgcggaacaaagatttcacgacaaagagagaaatggtggttcagtacatatctgctactgccaagtccatagttgggagcaaagttacaggaggcttgaaaaactcaaagcacgagtgcacactcagctcccaagagtacgtgcacgaacttcgctcgggaatctccgacgagaaactgctcaattgtctggaatctctgcgtgtttcgctcacttccaatccagtatcgtgggtgaacaatttcgggcacgaaggcctcggactgctcttggacgagttggagaagttgctggacaagaagcaacaggaaaatattgataagaagaatcagtacaaactgatccagtgcctgaaagcttttatgaataacaagttcggtctgcagaggatcttgggcgacgaaagaagccttctcctgctagcccgcgccatagacccgaaacagcctaatatgatgactgagatcgttaagatcctttccgcaatctgtatcgtcggcgaagaaaatattctcgacaaactgctcggggccatcacaacggccgctgaacggaacaacagagagaggttcagcccgattgtggagggcttagaaaatcaggaagccctgcagttgcaagtggcttgtatgcaatttataaacgccctagtaacctctccatatgagttggacttccggatacaccttaggaacgaatttctgcgttcaggcctcaaaacaatgcttccagacttgaaagagaaggagaacgacgaactcgatatccagctgaaggtgtttgatgaaaataaagaagatgatttgacggaattgagccacagactgaacgacatccgcgctgaaatggacgacatgaatgaggtgtatcatctgctgtacaacatgctcaaggacaccgccgctgagaactactttttatctattctacaacattttctcctcatcaggaatgactactatatccggccgcagtactataagattatcgaagaatgtgtatcccagattgtgctgcactgctccggaatggacccagatttcaagtaccggcaaagactcgacatcgacttgactcacctaatcgactcatgtgttaataaggctaaagtagaggagtctgagcagaaggcagccgaattcagtaaaaaattcgacgaagagtttaccgccagacaggaggctcaagcagaattgcagaaaagggatgaaaaaatcaaagaattagaagccgagatccagcaattacgtactcaagcacaggtcttgtcctccagctccggcattccaggccccccagcggctccgcccctccctggcgtgggaccccccccaccccctcctgctccccccctgccgggcggggcaccgctgcctccaccacctccccctttgccaggcatgatggggattcctcctccaccgcccccccctttgctgtttggaggtccccctccgcctccccccctgggtggggtgccccctccccccggcattagcctgaaccttccatacggcatgaaacagaaaaaaatgtacaaaccggaggttagcatgaaaagaatcaattggagcaagattgaacccacagaactgtccgaaaactgtttctggcttcgagtgaaagaggataagtttgaaaatcccgaccttttcgccaaattggctctaaactttgcgactcagataaaggttcagaaaaatgccgaggctctggaagaaaagaagaccgggcccactaagaagaaggtgaaggaattgcgcatcttagatcccaaaactgcgcaaaacctgagcatctttttggggagttatagaatgccatacgaagacatcagaaacgtaattttggaggtcaacgaagacatgctcagcgaagcgcttatccagaatcttgtcaagcacctcccagaacagaagatcttaaacgagcttgcggagctcaagaatgaatacgacgatctgtgtgagcccgagcagtttggagtggttatgtcaagtgttaagatgttgcagccccgcctaagttctattctgttcaagctgacctttgaagaacacattaacaacatcaagccctctatcatcgcagtgaccctggcatgcgaggagctgaagaaaagcgaatccttcaaccgcctgctggaactggtgctgctggtgggaaattacatgaactctggctctcgtaacgcacagtccctcggattcaaaatcaatttcctgtgcaagattcgagataccaaaagcgcagatcagaagaccacactgcttcacttcattgccgatatctgtgaagagaaatatagggacatactgaagttccccgaggaactcgaacatgtggagagtgcaagcaaggtgagcgcacaaatacttaagtcgaacctggctagtatggagcaacagatagttcaccttgagcgcgacatcaagaaatttcctcaagcagagaaccagcatgacaagttcgtggagaaaatgaccattttcaccaagaccgcacgggagcagtacgaaaaactctccacaatgcacaacaacatgatgaaattgtacgagaacctgggcgagtattttatttttgattctaagacggtatctatcgaggaattcttcggcgatttaaacaactttcgtaccttgtttctggaggccgtccgggaaaacaacaaaaggagagagatggaagagaaaacgcggcgggccaaactagccaaggagaaagcagaacaggagaaactggagaggcaaaaaaaaaaaaagcagctgattgatatcaataaggagggcgacgagaccggcgtgatggacaatctcctggaggctttacagtccggcgccgcatttcgcgatcggcggaaacggattcctcgcaacccagtggtaaaccacccatgtgctacacgcgccaatccacgctctgccacttag

SEQ ID NO: 167419 - DNA, 3306 bp, Artificial Sequence
  derived and/or modified sequence
atggagcagccaggtgccgctgcctctggagctggcggaggctctgaagaaccgggtggaggcagatctaataaacgcagtgctggcaaccgcgctgccaacgaagaggaaacaaaaaataagcccaaacttaacattcagattaaaactctcgccgacgacgtgagagaccggattacctcattcaggaaaagcaccgtgaaaaaagaaaagccattgattcaacaccctatcgatagtcaggtggcgatgtccgaatttccggctgctcagcccctttacgacgagcggagtttaaacctgtcagagaaagaggtgctcgatctttttgaaaagatgatggaagacatgaatttgaacgaggaaaagaaagctcctctgaggaacaaggacttcaccactaagcgtgaaatggtggtccagtatatctctgctaccgccaagtctggcggtctgaaaaacagtaaacacgagtgtacactgagcagccaggagtatgtgcacgaactgcgcagcggcatcagtgacgaaaaattactcaactgcctcgagagcctcagggtgagtctgacgtcaaaccccgtctcttgggtgaataatttcggccacgagggactgggtttactgctggacgaactggagaaactcctggacaaaaagcagcaagaaaacatcgataagaagaatcagtacaagctgattcaatgcctcaaggcttttatgaacaacaagttcggcctgcaaagaatactcggagatgagaggagcctgctgctcctggcccgagccattgaccccaagcagcctaacatgatgacagagatcgtgaagatcttgagcgcaatttgtatcgtgggagaagagaacattctagacaagctactgggggctattaccactgccgctgaacgaaacaaccgggagcggttcagcccaatcgtggaaggactggagaatcaggaagctctgcagttacaggttgcctgcatgcaattcatcaacgctctcgtgacttccccatatgagctcgacttcagaattcacctgcgaaacgaattccttcgctcaggtctaaagactatgctccctgatctcaaagagaaggagaacgatgagctggacattcagctcaaggtgtttgatgagaacaaggaagatgaccttacagagctgtcacacagactgaatgatattagagctgagatggatgatatgaatgaagtgtatcatctcctgtataacatgctgaaggataccgccgctgaaaactatttcttatcaattcttcaacatttcctcctgattcgaaacgattattacatacgacctcaatattacaagataatagaggagtgcgtttcgcagatagtactacactgttcaggcatggacccagacttcaagtatagacagcgacttgacatcgacctgacacatctgattgacagctgtgtgaacaaagctaaggtcgaagaatcagagcaaaaagccgctgaatttagtaagaagttcgacgaggaattcacagcacgtcaagaagcccaagctgaactacagaagcgggatgagaagattaaggaactggaagccgaaatacagcagctcaggactcaagctcaggtgcttagttcatcgtccggaataccgggaccccctgctgcaccccctcttcccggagtggggcctcctccccctccccctgctccacctctgcctgggggagcaccgttacctccccctccacctccactccctggcatgatgggaattcccccaccccctccaccccctctgttgtttggcggacctcccccacccccaccactgggcggagttccccctccacccggaatttcactaaacctgccctatggaatgaagcagaagaagatgtacaagccggaggtttctatgaagcggataaactggagcaaaatcgaaccaacggaactgtctgagaattgtttctggctcagggtgaaggaggataaattcgagaatcccgatttgttcgccaaactagccctgaatttcgccacccagattaaggtacagaaaaacgccgaagcgctagaagagaagaaaacaggaccaacaaagaaaaaagtgaaagagttgcggatcctggatccgaaaacagctcagaatttgagcatttttctgggaagctaccgtatgccttacgaggacatccggaacgtcatcctagaggtgaacgaggacatgctgagcgaagccttaattcagaaccttgtgaaacatttgcctgaacagaagattttaaacgaactggccgagttgaagaacgagtatgatgacctttgcgagcccgagcagttcggcgttgtgatgtcaagcgtcaaaatgctacagcctcgtttaagctctattttgtttaagctcaccttcgaggagcatatcaataatatcaagccctctatcatagccgtcaccctggcatgtgaagaactcaaaaagagtgagagcttcaatcggctgctcgagctggtcctactggtgggcaactacatgaacagcggctcccgcaacgcccagtccttgggcttcaagatcaacttcttgtgtaagataagagacaccaagagcgcagatcagaaaaccaccctgttacactttattgctgatatctgcgaggaaaaatacagagacatactgaaatttcccgaagaattggagcatgtagagagcgccagtaaagttagtgctcaaatcttgaagtccaatctggcctccatggagcaacagattgtccacctcgagagggacataaagaaattcccacaggcagagaatcagcatgacaaattcgttgagaaaatgacctcattcactaaaactgccagggaacaatacgagaagctatctaccatgcataacaatatgatgaaactttacgaaaacctgggagagtatttcatctttgactctaagacagtgtccatcgaggagttctttggagatctaaataacttccgaactttgttcctggaggcagtacgagaaaacaataaacgcagagagatggaggaaaaaacgagacgggcaaagctagccaaagagaaagccgaacaagagaaactggagagacagaagaagaaaaagcagttaattgatatcaataaagagggcgatgaaaccggcgttatggacaacttgctggaagctttgcagagcggcgcagcttttcgcgatcgacggaagagaataccaagaaacccagacaatcggcgtgtgcccctggaaagaagtaggagcagacacaacggtgccattagctcaaaatag

SEQ ID NO: 167420 - DNA, 3291 bp, Artificial Sequence
  derived and/or modified sequence
atggagcaacctggagcagccgctagtggagctgggggaggctctgaggaaccaggcggaggacgaagtaacaagcggtctgcagggaatagagcggcaaacgaagaggagactaaaaataagcccaaactgaacatccaaatcaagacattggccgacgacgtgagggatcgaattacttcatttaggaaaagcacagtgaaaaaggagaagccattgatccagcatcctatagattcccaggtagctatgtctgaattccccgcagcccaaccactttatgacgagcgctctctgaatctttcagagaaggaggtgcttgatctgtttgaaaaaatgatggaagacatgaatctgaatgaagaaaaaaaggcccctctgcggaacaaagattttaccacaaaaagggaaatggtcgtgcagtacatatccgctacagccaaatcaggaggtctgaaaaactcaaaacacgaatgtacactttcttcacaggagtatgtgcacgagctgcggtctgggatcagcgatgagaaattgctaaattgtctggagtccctgagagtctccttgacctcaaaccccgtcagttgggtgaataattttggccacgagggtctgggccttctactggacgagctggaaaaacttctggacaaaaagcagcaagagaacatcgacaaaaagaaccaatataagctcatccaatgcctcaaagcattcatgaacaacaagtttggcctccagcggattctgggtgacgagcggagcttgctactgttagctcgtgccattgacccaaaacagcccaatatgatgaccgagattgtcaaaattctgtctgccatttgcattgtgggcgaggaaaatattctggataaattactcggcgcaatcacgaccgccgcagaaaggaataatcgggaacgattttctcctatcgtcgaaggcctagaaaatcaggaagcactgcagctgcaggtggcttgtatgcaattcataaacgccctggttacatcaccctacgaacttgacttccgcattcacttgcggaacgagttccttcgcagtgggctaaagaccatgctccccgacctgaaggagaaagaaaacgatgaactagacatccaattgaaggtttttgatgagaacaaagaagatgaccttactgaattgtcacaccgcctcaacgacatccgagccgagatggacgacatgaatgaggtgtaccacttattatataacatgctaaaagatacagcggcagagaattattttctgtctatattacagcatttcctgctcatcagaaacgattattatatccgcccacagtattataaaatcatcgaggaatgtgtttcccagatcgtgctccactgttcgggcatggatcccgatttcaagtaccgccagaggctcgacatcgacctgacacacctgattgatagttgcgttaataaggccaaggtcgaagaatctgagcagaaggctgccgaattctcgaagaaattcgatgaggaattcactgctcggcaggaagcccaagccgaactgcagaagcgggacgagaaaatcaaggaactggaagctgagatacaacagctgagaacacaggcacaggttctgtccagttcctcagggattcctggacctccagcagcacccccattgcctggcgtcggaccgcctcccccaccaccagcaccacctttgcccggtggagccccactgccaccgcctcctcctccattacctggtatgatgggcatccctccaccaccacccccaccactgctgtttggcggtccgcctcctcctccacctctggggggtgtgcctcccccacctggcataagcctgaacctcccttacggaatgaagcagaagaaaatgtataaacccgaagttagtatgaagcgcatcaactggtctaaaatagagccgactgagttatccgagaactgtttttggttgcgggtgaaagaggataaatttgaaaacccggatctcttcgccaagctggccttaaactttgcaacacagattaaggttcagaaaaacgcagaggccctggaagagaagaagacaggcccaactaagaagaaggtcaaggaactgcgaatcctcgacccaaaaacggcccagaatctgtctatcttccttgggagttaccgcatgccttacgaagacatcagaaatgttatcctggaggtcaatgaggacatgctgtccgaggccttaattcagaatctagtgaaacatctgccagagcagaaaatcctgaatgaattggcagaactgaagaacgagtacgatgacctgtgcgagcctgagcagtttggagtggttatgtcttctgtcaaaatgttacagccacgcttatccagtatcctatttaaactgacctttgaagagcacatcaacaacatcaagcctagcattatcgctgtcactctggcgtgcgaagaactgaaaaagagcgaatctttcaaccgcctcttggagctcgttcttctggttggcaattacatgaatagcggctcacgtaacgcccagtctctagggtttaaaatcaacttcttatgtaaaattcgcgatacaaaatcggccgaccaaaaaacaactctgctacactttattgccgacatttgcgaggaaaagtacagggatatcctcaagtttccagaggagctcgaacacgtcgagtctgcatcgaaggtctccgctcaaatcctgaagagcaatctggcctctatggagcagcagatcgtgcatctcgaaagagacattaagaagtttccgcaagccgaaaaccaacacgacaagttcgttgagaaaatgaccatattcaccaaaaccgccagggagcagtatgaaaagctgtctaccatgcataataatatgatgaagctgtacgagaacctcggggaatacttcatcttcgactctaagactgtgagtattgaggagtttttcggtgacttgaacaatttccggacactttttctcgaggcagtgagggaaaataataagcggagggaaatggaggaaaaaacacggcgagcaaagctggctaaagaaaaggcagagcaggagaagttggagaggcagaagaaaaagaagcagctgatcgatattaataaggagggagacgagactggagtgatggacaacctgctggaggccctgcagtcaggcgcagcattccgcgacagacgcaagagaatcccgcgaaatcctgtggtgaatcacccctgtgccacccgcgcaaacccgcgaagcgcgacttag

SEQ ID NO: 167421 - DNA, 3291 bp, Artificial Sequence
  derived and/or modified sequence
atggaacagccgggagcggcagcctctggcgcaggaggagggagtgaggaaccgggagggggacgatccaacaaaaggtctgctgggaatagggcagctaacgaagaggagactaagaataagcctaaactgaacatccagatcaagaccctggctgacgacgtcagagaccgtattacatcctttaggaaatcaactgtgaaaaaggaaaaacccctgatccaacaccctatcgattcccaggtggccatgagtgagttccctgctgcccagcctctatacgacgaacgcagcttaaatctatccgagaaggaggtcctggatcttttcgagaaaatgatggaggatatgaacttgaacgaggaaaaaaaagcccctctgcggaacaaagacttcactaccaagcgtgagatggtggttcagtacataagcgccaccgcgaagagtggaggcttgaagaattccaagcatgagtgtactctgagcagccaggagtacgttcacgagcttcgctcaggcattagcgatgagaaattgctgaactgtcttgaatccctccgggtgtccctcacgtccaatcctgtcagctgggtaaacaatttcggtcacgagggattgggactgctgttggacgagctggagaaactgttagataagaagcagcaggaaaatattgataaaaagaaccaatacaagctcatacaatgcttgaaggctttcatgaataacaaattcggccttcaaagaatccttggtgacgaaaggtccctgcttcttctagcacgcgcaattgatcccaaacagcccaatatgatgactgaaatcgtgaagattctaagcgcaatctgtattgtgggcgaagaaaacatacttgataaactgctgggcgctatcacaacggcagccgagcggaataatcgtgagagattcagcccaattgtggaaggactggagaaccaggaggctttgcagctccaagtagcatgcatgcagttcatcaacgcactcgtgaccagcccttacgagctagatttccggatccatctgagaaacgaattccttcggtcaggtcttaagacaatgttacccgacctaaaggaaaaagaaaacgatgaactcgatatccagttaaaggtgtttgatgaaaacaaagaggacgatctgaccgagctaagccaccgattgaatgatatcagggccgagatggatgatatgaatgaggtttatcacctactgtataacatgcttaaggatactgccgctgaaaactacttccttagcatcctgcagcatttccttttaatccggaatgactactatattaggcctcaatattacaagatcatcgaggagtgcgtgtcacagattgttctgcactgttccggcatggaccctgatttcaaatataggcagcgtctcgacattgaccttacgcatctgatcgattcatgtgtcaataaagcaaaggtggaggaaagtgagcaaaaagctgccgaatttagcaagaagttcgatgaggagtttacggctagacaagaagcccaggccgaattgcagaaaagagacgaaaaaattaaagaacttgaagcggaaattcagcaactccgcacacaggcacaggttctttccagtagtagcgggataccagggcctccagctgcgcctccattgcctggggtgggaccgcctcccccaccaccggctccccctctgcctggcggagcgcctttacccccacctcccccacctctaccaggcatgatgggaattccacctcccccaccgcctccactactgttcggaggcccaccgccacctccacctttgggcggagtgccaccaccccctggaatcagcttaaacttgccatatgggatgaagcagaaaaagatgtataaacctgaggtgagtatgaagaggattaactggtctaaaatagagccaacggaactgagcgagaattgcttctggctaagagtgaaagaagataagttcgaaaacccagatctctttgccaaactcgctttaaatttcgctacccaaatcaaggtgcagaaaaatgcagaagctttagaggagaagaagactggtcccaccaaaaagaaagtaaaagagctgcgcattctcgacccaaaaactgcacagaacctcagcattttcctcggctcctatcgcatgccatacgaagatattagaaacgttattctggaggttaacgaggatatgctgtccgaagccctaatacagaacctggtcaagcaccttcccgagcaaaaaatcttgaacgagctcgcagagcttaagaatgaatacgacgatctgtgtgagcccgagcagttcggggtggttatgtcctctgtgaaaatgttgcaaccgcgtctgtccagtattttgttcaagctcactttcgaggagcatataaacaatatcaagccttctattatcgctgtgacgctggcctgtgaggaattgaaaaaatccgagtcttttaaccggctcctggagttggtcttgctagtaggaaattatatgaactccggctccaggaacgcccagtcgttaggatttaaaataaacttcttgtgtaagatacgtgatacaaagtctgctgatcagaaaaccaccctgctccattttatcgccgacatatgcgaagagaagtaccgggatatcctgaagttcccagaagagctagaacacgtagagtccgcctccaaagtgagtgctcagatcctgaagagcaacctggcatctatggaacagcaaatcgttcacctcgaaagggacatcaagaaatttccacaagctgaaaatcagcatgacaaatttgtcgagaagatgacaagtttcactaaaaccgcccgtgagcagtacgaaaagctgtccacgatgcataataatatgatgaagctgtacgaaaatctgggcgagtattttatcttcgacagcaaaacagtcagcattgaagagttcttcggcgacttgaacaacttcaggacacttttcctagaggccgtcagagaaaataacaaaagacgtgagatggaagagaagacacgcagagccaagctggccaaggagaaagccgaacaggaaaaactcgagcgccagaaaaagaagaagcagctcattgacatcaacaaggagggagatgaaacaggagtgatggacaatctcttggaggcactacagtccggtgctgcttttcgggatcgacggaagaggattcccaggaacccagttgtgaaccacccttgtgctacacgtgccaaccccagatccgctacttag

SEQ ID NO: 167422 - DNA, 3294 bp, Artificial Sequence
  derived and/or modified sequence
atggagcagccaggcgcagcagcctcaggagccggtggaggtagtgaagaacctggcggtggccgatcaaacaagagaagtgcaggaaatcgcgcagcaaacgaggaggagacaaaaaataagccaaaattgagggatcggatcacaagcttccgcaagtccacagtgaagaaggagaagcccctgatacagcaccccatcgattcccaagtggcgatgagcgaattcccagccgcacagccactgtacgacgaaaggtccctgaatcttagcgaaaaggaggtactggaccttttcgagaaaatgatggaagatatgaaccttaacgaggaaaaaaaggcgcctctgagaaataaggacttcacaaccaagcgcgaaatggtggtccagtacatttccgccacagccaaaagtgtgataagctcacacattaaagggggtctcaagaactccaagcacgagtgtaccctttcttcccaagaatacgtgcatgagctccgatcgggtatctcggatgagaagctgctaaactgtctggaatccctgagggtgagtctcacttccaaccctgtgagctgggtcaacaactttggtcacgaaggactgggcttgctacttgatgagttggaaaaactgcttgacaagaagcaacaagagaatatcgataagaagaatcaatataagctgattcagtgccttaaggcattcatgaataataagttcggtcttcaaaggattctgggcgacgagagatctctgctgctgttggccagagccatcgacccaaagcaacctaatatgatgacagagatcgtgaaaattctgagcgctatatgcatcgtgggggaggaaaatatacttgacaagctgctgggcgctatcaccacagcagcagagcgtaataaccgggagcggttcagcccgatcgtcgaagggctcgagaatcaggaggcactgcagcttcaagtggcctgtatgcagtttatcaatgcactggttacaagtccctatgaactggactttagaattcatctgcgaaacgagttcctgcgcagcggactaaagaccatgctgccagacctgaaggaaaaggagaatgacgaactcgatatacagctgaaagtttttgatgagaacaaggaggacgacctgacagaactgtcacatcggctcaatgatattagggcagaaatggatgacatgaatgaggtgtaccacttgttgtacaatatgctgaaggataccgcggcagaaaattacttcctgtcaatcctccaacatttcttgttaattcggaatgactactatatccgcccacaatattacaagattattgaagaatgcgtaagtcagatcgtgttgcactgcagcggtatggaccccgatttcaagtacagacaacggctagacatcgatctgacccatctgattgactcgtgcgttaacaaggctaaagttgaggagtccgagcaaaaagccgctgagttctccaagaagtttgacgaggagttcacagctagacaggaagctcaagctgaattacaaaagagagacgaaaagatcaaagagctggaagctgagatccagcaactgaggactcaagcacaggtcttgtcatccagctcgggtatccctggcccaccagctgcacctcctctgcccggtgtgggccctcctccccctcccccagcccctcccttaccaggaggggcacctctccccccacccccaccccctctgcctggcatgatgggaattcccccaccaccccctcctcctctactattcggaggacctccaccaccgcctcctcttggaggggtgcccccacctccaggcattagtttgaaccttccttatgggatgaaacaaaaaaagatgtacaaacccgaggtctctatgaagagaatcaactggagcaaaattgaaccaaccgaactgagcgagaactgcttctggctgagagtgaaagaagacaagtttgagaacccggacttgttcgccaaactggctctgaattttgcgacacagatcaaggtacagaagaatgctgaggccctcgaagagaagaagaccggaccaactaaaaaaaaagtgaaagagttgagaatcctagatcccaagacagctcagaatctgagtatttttctaggtagctacagaatgccatacgaagacatcagaaacgttattttggaggtcaacgaagacatgctttcagaagccttgatacaaaacttggtgaagcacctgccagaacaaaaaatcctgaacgagctggcagagctgaagaatgagtatgatgacctctgcgagcctgaacaattcggggtggtgatgagtagcgtcaaaatgctgcaacccagactgtcttccattctatttaagctaactttcgaggagcacatcaacaatattaagccatcaattatagccgtcactctcgcatgcgaggaattaaagaaatctgaaagctttaatcgcctcttggaattagtccttttagttggcaactatatgaatagcggatctagaaatgctcaaagtttgggatttaaaatcaattttttgtgcaagattcgcgatacaaagagcgccgaccagaagaccaccttattgcacttcatcgcagacatctgcgaagaaaagtaccgggacattctgaaattccctgaagagttggagcatgtagaatccgcaagcaaagtgtccgcccagatccttaagtctaacttagcctccatggaacaacagatcgtgcatttggaacgcgacatcaagaaattccctcaggccgagaaccaacatgataaatttgtggagaaaatgacaatatttacaaagacagctcgcgagcagtacgagaaattaagtacaatgcacaacaacatgatgaagctgtatgagaatctaggtgagtattttattttcgatagcaaaacggtgagtatcgaggagttctttggcgatctcaacaatttcaggaccctgtttcttgaagctgtcagggagaacaataagagaagagagatggaagaaaaaacaagacgggcaaaactggctaaggagaaggccgaacaggagaagctagaacgacagaaaaaaaagaagcagctaatcgatatcaacaaagagggagatgagactggagtcatggataacctgctggaggccctccagtctggcgctgcttttcgtgatagacgcaaaaggattcccagaaacccagataaccgacgcgtaccactcgagagatctcggtcccgccataacggagccatttccagtaaatag

SEQ ID NO: 167423 - DNA, 3306 bp, Artificial Sequence
  derived and/or modified sequence
atggaacagcccggtgctgctgctagtggagctggtggaggctccgaggagcccggaggcggaagaagcaacaaaagatcagcgggaaatagagccgctaacgaagaggagactaaaaacaaacctaagctcaatatccaaataaaaactctagctgacgatgtacgggataggattacttctttccgaaagtccactgtcaaaaaggagaaacccctgattcagcatcctattgattcccaggtggccatgtcagagttccctgccgctcagcccctgtacgatgagagatccctgaatctcagcgagaaagaggtgttggacctgttcgagaaaatgatggaggacatgaacctgaacgaggagaaaaaggccccactgaggaacaaagattttacaaccaagcgggaaatggtggttcagtatatcagcgccactgctaaaagcggaggcctgaagaacagtaaacacgaatgtactctttctagtcaggaatacgtgcatgaattgagaagcggtatctctgacgaaaagcttcttaattgcttggaaagcttacgggtctccctgacgtccaaccctgtgagctgggtgaataactttggccacgaagggctgggtctgctgctggacgaactggagaaattactggataaaaaacagcaggaaaatatagataaaaaaaaccagtataagttgatccagtgcttgaaggcctttatgaataataaatttggactccagcggatcctgggggatgagaggagccttctgctgctcgccagagcaatcgatcccaagcagcccaatatgatgacggagattgtaaaaatactatcagcgatctgtattgtcggcgaagagaacatcctcgacaaactgctcggagccatcacaaccgccgcagaaaggaataaccgggagagatttagcccaattgttgagggccttgaaaatcaagaagccctacagctgcaagtggcgtgtatgcagtttattaatgccctggtgacttccccctatgaattggactttaggatccatctcaggaacgaatttctacgcagcggtctaaaaacaatgttaccagatttgaaagagaaagagaatgacgagttagacattcagctgaaagtgtttgacgagaataaggaagacgacttgacagaactctcccatcgactgaacgatatccgcgcagaaatggacgacatgaatgaggtttaccatctgttgtataacatgcttaaggataccgccgctgaaaattactttctgtccattttgcagcatttcctgctcatccgcaacgactactatattcgcccacagtattataaaattatagaagaatgtgtcagccaaattgttctgcattgcagtgggatggatcctgattttaaataccggcagcggctcgacattgacctgacacatctcattgactcctgcgttaataaggccaaagtggaggagtctgaacagaaagccgctgagttctccaagaaattcgacgaagagttcacagcgagacaggaggcccaggcagaactgcagaaacgggacgaaaaaattaaagagctcgaagcagagatacagcaacttagaactcaagctcaggtgctgtcctcatcttccgggatccccggtcctcccgcagcccctcctctccccggagtgggcccacctccacctccgccagcgcctccactccctggaggggctcccctgcccccaccacccccacctctcccaggcatgatggggattcctcccccacctccccctcctctgctcttcgggggacccccaccgccaccgccactggggggtgtaccgccaccacctggcatcagcctgaatctcccttatggaatgaagcaaaaaaagatgtataagcccgaggtgtctatgaaaaggatcaattggagtaaaattgagccaacagagctgagtgaaaattgcttctggctgagagtgaaggaggataaattcgagaacccggacctgttcgctaagttggctttaaacttcgctacccagataaaagtccaaaaaaatgcagaagcccttgaagaaaaaaagactggccctacgaagaaaaaggtgaaggagcttcgcatcctggatcctaagaccgcccagaacctgtcaatctttctcggaagctatcggatgccctacgaagatatccgcaatgtgattttggaagtcaatgaagacatgctctccgaagcgttaattcaaaatcttgtaaagcatctgcctgagcagaaaatactgaatgagctggcagagcttaagaacgagtacgacgacctttgcgagcctgagcaatttggtgttgttatgtctagtgtgaagatgttgcagcctcggttatctagcattcttttcaagcttacatttgaggaacacattaacaacattaagccaagtattattgcagtgacattggcatgcgaggagctgaagaagtcagagtccttcaatagattactggagctggtgctgctggtggggaactacatgaattccggcagcaggaacgctcaatccctgggttttaagataaactttctgtgtaagattcgagataccaaatctgccgatcagaaaacaactctcctgcacttcattgcggatatctgcgaggaaaagtaccgggatatcctgaaattcccagaagaactggaacacgtggaaagcgcttcaaaggtgtccgcccagatccttaaaagtaacctggcaagtatggagcagcagatcgtacacctagaacgcgatattaaaaagtttccccaggcagagaatcagcatgataagtttgtagaaaagatgacaatctttaccaagaccgccagagaacagtacgagaagctctccactatgcacaataatatgatgaaactgtatgaaaatctaggagagtatttcatctttgattcaaagaccgtctcaatcgaggaattctttggagacttaaacaactttcggaccctgtttctggaagccgttcgggaaaataataagcgccgagagatggaggaaaagacaagacgggcaaagctggccaaagaaaaagctgagcaggaaaaacttgaacggcagaagaaaaaaaagcagcttatcgatatcaacaaagaaggggatgagaccggcgtcatggacaacctcctggaggctcttcaatccggagccgcatttcgcgaccggagaaagcgaattcccagaaacccagataatcggagggtccctctcgagcgcagtaggtccaggcacaacggggcaatcagctctaagtag

SEQ ID NO: 167424 - DNA, 3312 bp, Artificial Sequence
  derived and/or modified sequence
atggagcaaccaggtgccgctgccagtggagcaggtggcggatccgaagagcccggtgggggtagatccaacaagagatccgcaggaaatcgggctgccaacgaggaagagacaaaaaataagcccaagttaaatatccagatcaagactctcgccgatgacgtgcgcgacaggatcacctctttccgtaaatccactgtaaagaaggagaaaccgctgatccagcacccaatcgattcccaggtggccatgagcgaattcccagccgcacagccgctctatgacgaacgctcgctgaacctgagcgagaaggaagtccttgatctatttgagaagatgatggaggatatgaacttaaacgaagagaaaaaagccccattgcgtaataaggactttacaaccaagcgagagatggtggtacaatatatttctgccactgctaaatccattgtcggcagcaaagtcacaggtgggcttaagaatagcaagcatgaatgcactttgagcagtcaggagtacgtgcacgagctgagatccggcatctccgacgaaaagttactgaattgcttggaatctctcagagtctccctgacatcaaatcccgttagttgggtcaataactttggccacgaagggctcgggcttctcctggatgagctggagaaactgttggacaagaaacagcaggagaatatcgataagaagaaccagtataagctgattcagtgtctgaaagcttttatgaataacaaattcggcctgcaacgaattttgggcgacgagcgaagcctcctcctgctggcccgagctatcgaccccaaacagcctaatatgatgactgagattgttaaaatcctgagcgcgatctgcatcgtaggtgaagagaacatcttggacaaactactcggagcaataactaccgccgcagagagaaataatcgggagaggttctctccgatagttgaagggctagagaaccaggaggccctccagcttcaagtggcttgcatgcagtttattaatgcgctcgtgacgagtccatacgagctggatttccggatccatctccgtaacgaatttctgaggtctggactcaaaacaatgctgccagacctcaaagagaaggagaacgacgaacttgacatccagcttaaagtctttgacgaaaataaagaggacgatttaaccgagttgtcccaccgtctgaacgatatccgcgcagaaatggacgacatgaacgaggtgtaccacttgctttataacatgctgaaggatactgcagcagagaactattttctgtcaatactgcagcactttttgttaatccggaacgattactatattagaccccagtattataagattattgaggaatgtgtatctcaaattgtcttacactgttctgggatggaccccgactttaaatatagacagcgactcgatatcgatctgactcacctgattgattcttgcgtgaacaaggccaaagttgaagagagcgagcaaaaggccgcagagttttctaaaaaatttgacgaggagttcactgcacggcaggaggcccaggcggaactccagaaaagagacgagaaaataaaggaactggaagccgagatacagcagcttaggactcaagcccaggttctctcctcttcgtctggaatccctggccctccggcagccccaccccttccaggcgtgggcccaccaccgccaccacccgctcccccactgcccggaggggcacccctgcccccacccccacctccgttacccggaatgatgggcattccacccccaccaccacctccgctcctgttcggcggtcctcctccacctccaccactgggtggcgtccctcctcctcccggaatctctctaaatttaccatatggaatgaagcaaaaaaagatgtacaaaccggaggtgtccatgaagcgcattaactggtcaaaaattgaacctaccgagctgagcgaaaactgtttttggctgcgcgtaaaagaagataaatttgagaatcccgatttattcgctaagctcgcattgaattttgcaacacagataaaagtgcagaaaaatgccgaggccctggaggaaaaaaaaaccggaccaacaaagaaaaaggtgaaagagctgaggatattggaccctaaaaccgcacagaatctttcaatcttcttggggtcctaccggatgccctacgaggatatccgaaacgttattctcgaagtcaatgaggatatgctctctgaagcactgattcagaaccttgttaagcacctgccagagcagaagatcttgaatgaactggccgagttgaaaaatgaatacgacgacttatgtgaacctgagcagttcggcgtggtcatgtctagcgtgaaaatgctgcaaccacgcctgagcagcattcttttcaagctaactttcgaagaacacatcaacaatataaaacccagtattattgcggtgaccctggcttgtgaagaactgaagaagtcggagtccttcaaccgactcctggagcttgtgctcctggtgggcaactacatgaacagtggatcacggaatgcccagagccttgggtttaaaataaattttctttgtaagatccgggacactaagtctgcagatcaaaaaactacactgctccatttcatcgctgacatttgtgaggagaagtaccgggacattttgaaattcccagaggaactggaacacgtggaatctgcctctaaagtgagcgcccagattctgaaaagtaatctggcttctatggagcagcaaatcgtgcatctggagagggacattaaaaagtttccccaggcagagaaccagcatgataaatttgtcgagaagatgacgatcttcaccaagacagccagggaacaatatgaaaagctgtctacgatgcacaacaacatgatgaaactgtatgaaaacctgggcgaatatttcatcttcgactctaaaactgtatctattgaggaattttttggagatctcaacaattttcggactttgttcctggaggctgttcgcgaaaataacaaaagaagagagatggaggaaaaaactcgcagggcaaaactggcgaaggaaaaggcagaacaagaaaagctcgaacgacagaagaagaaaaagcaactcatcgatatcaacaaggagggtgatgagactggcgtgatggataatttgttggaagccctgcaaagcggggctgcattccgggatcgaaggaaaagaataccgcgaaatcctgtggtcaaccatccatgcgccacaagggcgaatcctcggagcgcaacctag

SEQ ID NO: 167425 - DNA, 3306 bp, Artificial Sequence
  derived and/or modified sequence
atggagcagcccggcgccgccgccagcggcgccggcggcggcagcgaggagcccggcggcggcagaagcaacaagagaagcgccggcaacagagccgccaacgaggaggagaccaagaacaagcccaagctgaacatccagatcaagaccctggccgacgacgtgagagacagaatcaccagcttcagaaagagcaccgtgaagaaggagaagcccctgatccagcaccccatcgacagccaggtggccatgagcgagttccccgccgcccagcccctgtacgacgagagaagcctgaacctgagcgagaaggaggtgctggacctgttcgagaagatgatggaggacatgaacctgaacgaggagaagaaggcccccctgagaaacaaggacttcaccaccaagagagagatggtggtgcagtacatcagcgccaccgccaagagcggcggcctgaagaacagcaagcacgagtgcaccctgagcagccaggagtacgtgcacgagctgagaagcggcatcagcgacgagaagctgctgaactgcctggagagcctgagagtgagcctgaccagcaaccccgtgagctgggtgaacaacttcggccacgagggcctgggcctgctgctggacgagctggagaagctgctggacaagaagcagcaggagaacatcgacaagaagaaccagtacaagctgatccagtgcctgaaggccttcatgaacaacaagttcggcctgcagagaatcctgggcgacgagagaagcctgctgctgctggccagagccatcgaccccaagcagcccaacatgatgaccgagatcgtgaagatcctgagcgccatctgcatcgtgggcgaggagaacatcctggacaagctgctgggcgccatcaccaccgccgccgagagaaacaacagagagagattcagccccatcgtggagggcctggagaaccaggaggccctgcagctgcaggtggcctgcatgcagttcatcaacgccctggtgaccagcccctacgagctggacttcagaatccacctgagaaacgagttcctgagaagcggcctgaagaccatgctgcccgacctgaaggagaaggagaacgacgagctggacatccagctgaaggtgttcgacgagaacaaggaggacgacctgaccgagctgagccacagactgaacgacatcagagccgagatggacgacatgaacgaggtgtaccacctgctgtacaacatgctgaaggacaccgccgccgagaactacttcctgagcatcctgcagcacttcctgctgatcagaaacgactactacatcagaccccagtactacaagatcatcgaggagtgcgtgagccagatcgtgctgcactgcagcggcatggaccccgacttcaagtacagacagagactggacatcgacctgacccacctgatcgacagctgcgtgaacaaggccaaggtggaggagagcgagcagaaggccgccgagttcagcaagaagttcgacgaggagttcaccgccagacaggaggcccaggccgagctgcagaagagagacgagaagatcaaggagctggaggccgagatccagcagctgagaacccaggcccaggtgctgagcagcagcagcggcatccccggcccccccgccgccccccccctgcccggcgtgggcccccccccccccccccccgccccccccctgcccggcggcgcccccctgccccccccccccccccccctgcccggcatgatgggcatccccccccccccccccccccccctgctgttcggcggcccccccccccccccccccctgggcggcgtgccccccccccccggcatcagcctgaacctgccctacggcatgaagcagaagaagatgtacaagcccgaggtgagcatgaagagaatcaactggagcaagatcgagcccaccgagctgagcgagaactgcttctggctgagagtgaaggaggacaagttcgagaaccccgacctgttcgccaagctggccctgaacttcgccacccagatcaaggtgcagaagaacgccgaggccctggaggagaagaagaccggccccaccaagaagaaggtgaaggagctgagaatcctggaccccaagaccgcccagaacctgagcatcttcctgggcagctacagaatgccctacgaggacatcagaaacgtgatcctggaggtgaacgaggacatgctgagcgaggccctgatccagaacctggtgaagcacctgcccgagcagaagatcctgaacgagctggccgagctgaagaacgagtacgacgacctgtgcgagcccgagcagttcggcgtggtgatgagcagcgtgaagatgctgcagcccagactgagcagcatcctgttcaagctgaccttcgaggagcacatcaacaacatcaagcccagcatcatcgccgtgaccctggcctgcgaggagctgaagaagagcgagagcttcaacagactgctggagctggtgctgctggtgggcaactacatgaacagcggcagcagaaacgcccagagcctgggcttcaagatcaacttcctgtgcaagatcagagacaccaagagcgccgaccagaagaccaccctgctgcacttcatcgccgacatctgcgaggagaagtacagagacatcctgaagttccccgaggagctggagcacgtggagagcgccagcaaggtgagcgcccagatcctgaagagcaacctggccagcatggagcagcagatcgtgcacctggagagagacatcaagaagttcccccaggccgagaaccagcacgacaagttcgtggagaagatgaccagcttcaccaagaccgccagagagcagtacgagaagctgagcaccatgcacaacaacatgatgaagctgtacgagaacctgggcgagtacttcatcttcgacagcaagaccgtgagcatcgaggagttcttcggcgacctgaacaacttcagaaccctgttcctggaggccgtgagagagaacaacaagagaagagagatggaggagaagaccagaagagccaagctggccaaggagaaggccgagcaggagaagctggagagacagaagaagaagaagcagctgatcgacatcaacaaggagggcgacgagaccggcgtgatggacaacctgctggaggccctgcagagcggcgccgccttcagagacagaagaaagagaatccccagaaaccccgacaacagaagagtgcccctggagagaagcagaagcagacacaacggcgccatcagcagcaagtag

SEQ ID NO: 167426 - DNA, 3291 bp, Artificial Sequence
  derived and/or modified sequence
atggagcagcccggcgccgccgccagcggcgccggcggcggcagcgaggagcccggcggcggcagaagcaacaagagaagcgccggcaacagagccgccaacgaggaggagaccaagaacaagcccaagctgaacatccagatcaagaccctggccgacgacgtgagagacagaatcaccagcttcagaaagagcaccgtgaagaaggagaagcccctgatccagcaccccatcgacagccaggtggccatgagcgagttccccgccgcccagcccctgtacgacgagagaagcctgaacctgagcgagaaggaggtgctggacctgttcgagaagatgatggaggacatgaacctgaacgaggagaagaaggcccccctgagaaacaaggacttcaccaccaagagagagatggtggtgcagtacatcagcgccaccgccaagagcggcggcctgaagaacagcaagcacgagtgcaccctgagcagccaggagtacgtgcacgagctgagaagcggcatcagcgacgagaagctgctgaactgcctggagagcctgagagtgagcctgaccagcaaccccgtgagctgggtgaacaacttcggccacgagggcctgggcctgctgctggacgagctggagaagctgctggacaagaagcagcaggagaacatcgacaagaagaaccagtacaagctgatccagtgcctgaaggccttcatgaacaacaagttcggcctgcagagaatcctgggcgacgagagaagcctgctgctgctggccagagccatcgaccccaagcagcccaacatgatgaccgagatcgtgaagatcctgagcgccatctgcatcgtgggcgaggagaacatcctggacaagctgctgggcgccatcaccaccgccgccgagagaaacaacagagagagattcagccccatcgtggagggcctggagaaccaggaggccctgcagctgcaggtggcctgcatgcagttcatcaacgccctggtgaccagcccctacgagctggacttcagaatccacctgagaaacgagttcctgagaagcggcctgaagaccatgctgcccgacctgaaggagaaggagaacgacgagctggacatccagctgaaggtgttcgacgagaacaaggaggacgacctgaccgagctgagccacagactgaacgacatcagagccgagatggacgacatgaacgaggtgtaccacctgctgtacaacatgctgaaggacaccgccgccgagaactacttcctgagcatcctgcagcacttcctgctgatcagaaacgactactacatcagaccccagtactacaagatcatcgaggagtgcgtgagccagatcgtgctgcactgcagcggcatggaccccgacttcaagtacagacagagactggacatcgacctgacccacctgatcgacagctgcgtgaacaaggccaaggtggaggagagcgagcagaaggccgccgagttcagcaagaagttcgacgaggagttcaccgccagacaggaggcccaggccgagctgcagaagagagacgagaagatcaaggagctggaggccgagatccagcagctgagaacccaggcccaggtgctgagcagcagcagcggcatccccggcccccccgccgccccccccctgcccggcgtgggcccccccccccccccccccgccccccccctgcccggcggcgcccccctgccccccccccccccccccctgcccggcatgatgggcatccccccccccccccccccccccctgctgttcggcggcccccccccccccccccccctgggcggcgtgccccccccccccggcatcagcctgaacctgccctacggcatgaagcagaagaagatgtacaagcccgaggtgagcatgaagagaatcaactggagcaagatcgagcccaccgagctgagcgagaactgcttctggctgagagtgaaggaggacaagttcgagaaccccgacctgttcgccaagctggccctgaacttcgccacccagatcaaggtgcagaagaacgccgaggccctggaggagaagaagaccggccccaccaagaagaaggtgaaggagctgagaatcctggaccccaagaccgcccagaacctgagcatcttcctgggcagctacagaatgccctacgaggacatcagaaacgtgatcctggaggtgaacgaggacatgctgagcgaggccctgatccagaacctggtgaagcacctgcccgagcagaagatcctgaacgagctggccgagctgaagaacgagtacgacgacctgtgcgagcccgagcagttcggcgtggtgatgagcagcgtgaagatgctgcagcccagactgagcagcatcctgttcaagctgaccttcgaggagcacatcaacaacatcaagcccagcatcatcgccgtgaccctggcctgcgaggagctgaagaagagcgagagcttcaacagactgctggagctggtgctgctggtgggcaactacatgaacagcggcagcagaaacgcccagagcctgggcttcaagatcaacttcctgtgcaagatcagagacaccaagagcgccgaccagaagaccaccctgctgcacttcatcgccgacatctgcgaggagaagtacagagacatcctgaagttccccgaggagctggagcacgtggagagcgccagcaaggtgagcgcccagatcctgaagagcaacctggccagcatggagcagcagatcgtgcacctggagagagacatcaagaagttcccccaggccgagaaccagcacgacaagttcgtggagaagatgaccatcttcaccaagaccgccagagagcagtacgagaagctgagcaccatgcacaacaacatgatgaagctgtacgagaacctgggcgagtacttcatcttcgacagcaagaccgtgagcatcgaggagttcttcggcgacctgaacaacttcagaaccctgttcctggaggccgtgagagagaacaacaagagaagagagatggaggagaagaccagaagagccaagctggccaaggagaaggccgagcaggagaagctggagagacagaagaagaagaagcagctgatcgacatcaacaaggagggcgacgagaccggcgtgatggacaacctgctggaggccctgcagagcggcgccgccttcagagacagaagaaagagaatccccagaaaccccgtggtgaaccacccctgcgccaccagagccaaccccagaagcgccacctag

SEQ ID NO: 167427 - DNA, 3291 bp, Artificial Sequence
  derived and/or modified sequence
atggagcagcccggcgccgccgccagcggcgccggcggcggcagcgaggagcccggcggcggcagaagcaacaagagaagcgccggcaacagagccgccaacgaggaggagaccaagaacaagcccaagctgaacatccagatcaagaccctggccgacgacgtgagagacagaatcaccagcttcagaaagagcaccgtgaagaaggagaagcccctgatccagcaccccatcgacagccaggtggccatgagcgagttccccgccgcccagcccctgtacgacgagagaagcctgaacctgagcgagaaggaggtgctggacctgttcgagaagatgatggaggacatgaacctgaacgaggagaagaaggcccccctgagaaacaaggacttcaccaccaagagagagatggtggtgcagtacatcagcgccaccgccaagagcggcggcctgaagaacagcaagcacgagtgcaccctgagcagccaggagtacgtgcacgagctgagaagcggcatcagcgacgagaagctgctgaactgcctggagagcctgagagtgagcctgaccagcaaccccgtgagctgggtgaacaacttcggccacgagggcctgggcctgctgctggacgagctggagaagctgctggacaagaagcagcaggagaacatcgacaagaagaaccagtacaagctgatccagtgcctgaaggccttcatgaacaacaagttcggcctgcagagaatcctgggcgacgagagaagcctgctgctgctggccagagccatcgaccccaagcagcccaacatgatgaccgagatcgtgaagatcctgagcgccatctgcatcgtgggcgaggagaacatcctggacaagctgctgggcgccatcaccaccgccgccgagagaaacaacagagagagattcagccccatcgtggagggcctggagaaccaggaggccctgcagctgcaggtggcctgcatgcagttcatcaacgccctggtgaccagcccctacgagctggacttcagaatccacctgagaaacgagttcctgagaagcggcctgaagaccatgctgcccgacctgaaggagaaggagaacgacgagctggacatccagctgaaggtgttcgacgagaacaaggaggacgacctgaccgagctgagccacagactgaacgacatcagagccgagatggacgacatgaacgaggtgtaccacctgctgtacaacatgctgaaggacaccgccgccgagaactacttcctgagcatcctgcagcacttcctgctgatcagaaacgactactacatcagaccccagtactacaagatcatcgaggagtgcgtgagccagatcgtgctgcactgcagcggcatggaccccgacttcaagtacagacagagactggacatcgacctgacccacctgatcgacagctgcgtgaacaaggccaaggtggaggagagcgagcagaaggccgccgagttcagcaagaagttcgacgaggagttcaccgccagacaggaggcccaggccgagctgcagaagagagacgagaagatcaaggagctggaggccgagatccagcagctgagaacccaggcccaggtgctgagcagcagcagcggcatccccggcccccccgccgccccccccctgcccggcgtgggcccccccccccccccccccgccccccccctgcccggcggcgcccccctgccccccccccccccccccctgcccggcatgatgggcatccccccccccccccccccccccctgctgttcggcggcccccccccccccccccccctgggcggcgtgccccccccccccggcatcagcctgaacctgccctacggcatgaagcagaagaagatgtacaagcccgaggtgagcatgaagagaatcaactggagcaagatcgagcccaccgagctgagcgagaactgcttctggctgagagtgaaggaggacaagttcgagaaccccgacctgttcgccaagctggccctgaacttcgccacccagatcaaggtgcagaagaacgccgaggccctggaggagaagaagaccggccccaccaagaagaaggtgaaggagctgagaatcctggaccccaagaccgcccagaacctgagcatcttcctgggcagctacagaatgccctacgaggacatcagaaacgtgatcctggaggtgaacgaggacatgctgagcgaggccctgatccagaacctggtgaagcacctgcccgagcagaagatcctgaacgagctggccgagctgaagaacgagtacgacgacctgtgcgagcccgagcagttcggcgtggtgatgagcagcgtgaagatgctgcagcccagactgagcagcatcctgttcaagctgaccttcgaggagcacatcaacaacatcaagcccagcatcatcgccgtgaccctggcctgcgaggagctgaagaagagcgagagcttcaacagactgctggagctggtgctgctggtgggcaactacatgaacagcggcagcagaaacgcccagagcctgggcttcaagatcaacttcctgtgcaagatcagagacaccaagagcgccgaccagaagaccaccctgctgcacttcatcgccgacatctgcgaggagaagtacagagacatcctgaagttccccgaggagctggagcacgtggagagcgccagcaaggtgagcgcccagatcctgaagagcaacctggccagcatggagcagcagatcgtgcacctggagagagacatcaagaagttcccccaggccgagaaccagcacgacaagttcgtggagaagatgaccagcttcaccaagaccgccagagagcagtacgagaagctgagcaccatgcacaacaacatgatgaagctgtacgagaacctgggcgagtacttcatcttcgacagcaagaccgtgagcatcgaggagttcttcggcgacctgaacaacttcagaaccctgttcctggaggccgtgagagagaacaacaagagaagagagatggaggagaagaccagaagagccaagctggccaaggagaaggccgagcaggagaagctggagagacagaagaagaagaagcagctgatcgacatcaacaaggagggcgacgagaccggcgtgatggacaacctgctggaggccctgcagagcggcgccgccttcagagacagaagaaagagaatccccagaaaccccgtggtgaaccacccctgcgccaccagagccaaccccagaagcgccacctag

SEQ ID NO: 167428 - DNA, 3294 bp, Artificial Sequence
  derived and/or modified sequence
atggagcagcccggcgccgccgccagcggcgccggcggcggcagcgaggagcccggcggcggcagaagcaacaagagaagcgccggcaacagagccgccaacgaggaggagaccaagaacaagcccaagctgagagacagaatcaccagcttcagaaagagcaccgtgaagaaggagaagcccctgatccagcaccccatcgacagccaggtggccatgagcgagttccccgccgcccagcccctgtacgacgagagaagcctgaacctgagcgagaaggaggtgctggacctgttcgagaagatgatggaggacatgaacctgaacgaggagaagaaggcccccctgagaaacaaggacttcaccaccaagagagagatggtggtgcagtacatcagcgccaccgccaagagcgtgatcagcagccacatcaagggcggcctgaagaacagcaagcacgagtgcaccctgagcagccaggagtacgtgcacgagctgagaagcggcatcagcgacgagaagctgctgaactgcctggagagcctgagagtgagcctgaccagcaaccccgtgagctgggtgaacaacttcggccacgagggcctgggcctgctgctggacgagctggagaagctgctggacaagaagcagcaggagaacatcgacaagaagaaccagtacaagctgatccagtgcctgaaggccttcatgaacaacaagttcggcctgcagagaatcctgggcgacgagagaagcctgctgctgctggccagagccatcgaccccaagcagcccaacatgatgaccgagatcgtgaagatcctgagcgccatctgcatcgtgggcgaggagaacatcctggacaagctgctgggcgccatcaccaccgccgccgagagaaacaacagagagagattcagccccatcgtggagggcctggagaaccaggaggccctgcagctgcaggtggcctgcatgcagttcatcaacgccctggtgaccagcccctacgagctggacttcagaatccacctgagaaacgagttcctgagaagcggcctgaagaccatgctgcccgacctgaaggagaaggagaacgacgagctggacatccagctgaaggtgttcgacgagaacaaggaggacgacctgaccgagctgagccacagactgaacgacatcagagccgagatggacgacatgaacgaggtgtaccacctgctgtacaacatgctgaaggacaccgccgccgagaactacttcctgagcatcctgcagcacttcctgctgatcagaaacgactactacatcagaccccagtactacaagatcatcgaggagtgcgtgagccagatcgtgctgcactgcagcggcatggaccccgacttcaagtacagacagagactggacatcgacctgacccacctgatcgacagctgcgtgaacaaggccaaggtggaggagagcgagcagaaggccgccgagttcagcaagaagttcgacgaggagttcaccgccagacaggaggcccaggccgagctgcagaagagagacgagaagatcaaggagctggaggccgagatccagcagctgagaacccaggcccaggtgctgagcagcagcagcggcatccccggcccccccgccgccccccccctgcccggcgtgggcccccccccccccccccccgccccccccctgcccggcggcgcccccctgccccccccccccccccccctgcccggcatgatgggcatccccccccccccccccccccccctgctgttcggcggcccccccccccccccccccctgggcggcgtgccccccccccccggcatcagcctgaacctgccctacggcatgaagcagaagaagatgtacaagcccgaggtgagcatgaagagaatcaactggagcaagatcgagcccaccgagctgagcgagaactgcttctggctgagagtgaaggaggacaagttcgagaaccccgacctgttcgccaagctggccctgaacttcgccacccagatcaaggtgcagaagaacgccgaggccctggaggagaagaagaccggccccaccaagaagaaggtgaaggagctgagaatcctggaccccaagaccgcccagaacctgagcatcttcctgggcagctacagaatgccctacgaggacatcagaaacgtgatcctggaggtgaacgaggacatgctgagcgaggccctgatccagaacctggtgaagcacctgcccgagcagaagatcctgaacgagctggccgagctgaagaacgagtacgacgacctgtgcgagcccgagcagttcggcgtggtgatgagcagcgtgaagatgctgcagcccagactgagcagcatcctgttcaagctgaccttcgaggagcacatcaacaacatcaagcccagcatcatcgccgtgaccctggcctgcgaggagctgaagaagagcgagagcttcaacagactgctggagctggtgctgctggtgggcaactacatgaacagcggcagcagaaacgcccagagcctgggcttcaagatcaacttcctgtgcaagatcagagacaccaagagcgccgaccagaagaccaccctgctgcacttcatcgccgacatctgcgaggagaagtacagagacatcctgaagttccccgaggagctggagcacgtggagagcgccagcaaggtgagcgcccagatcctgaagagcaacctggccagcatggagcagcagatcgtgcacctggagagagacatcaagaagttcccccaggccgagaaccagcacgacaagttcgtggagaagatgaccatcttcaccaagaccgccagagagcagtacgagaagctgagcaccatgcacaacaacatgatgaagctgtacgagaacctgggcgagtacttcatcttcgacagcaagaccgtgagcatcgaggagttcttcggcgacctgaacaacttcagaaccctgttcctggaggccgtgagagagaacaacaagagaagagagatggaggagaagaccagaagagccaagctggccaaggagaaggccgagcaggagaagctggagagacagaagaagaagaagcagctgatcgacatcaacaaggagggcgacgagaccggcgtgatggacaacctgctggaggccctgcagagcggcgccgccttcagagacagaagaaagagaatccccagaaaccccgacaacagaagagtgcccctggagagaagcagaagcagacacaacggcgccatcagcagcaagtag

SEQ ID NO: 167429 - DNA, 3306 bp, Artificial Sequence
  derived and/or modified sequence
atggagcagcccggcgccgccgccagcggcgccggcggcggcagcgaggagcccggcggcggcagaagcaacaagagaagcgccggcaacagagccgccaacgaggaggagaccaagaacaagcccaagctgaacatccagatcaagaccctggccgacgacgtgagagacagaatcaccagcttcagaaagagcaccgtgaagaaggagaagcccctgatccagcaccccatcgacagccaggtggccatgagcgagttccccgccgcccagcccctgtacgacgagagaagcctgaacctgagcgagaaggaggtgctggacctgttcgagaagatgatggaggacatgaacctgaacgaggagaagaaggcccccctgagaaacaaggacttcaccaccaagagagagatggtggtgcagtacatcagcgccaccgccaagagcggcggcctgaagaacagcaagcacgagtgcaccctgagcagccaggagtacgtgcacgagctgagaagcggcatcagcgacgagaagctgctgaactgcctggagagcctgagagtgagcctgaccagcaaccccgtgagctgggtgaacaacttcggccacgagggcctgggcctgctgctggacgagctggagaagctgctggacaagaagcagcaggagaacatcgacaagaagaaccagtacaagctgatccagtgcctgaaggccttcatgaacaacaagttcggcctgcagagaatcctgggcgacgagagaagcctgctgctgctggccagagccatcgaccccaagcagcccaacatgatgaccgagatcgtgaagatcctgagcgccatctgcatcgtgggcgaggagaacatcctggacaagctgctgggcgccatcaccaccgccgccgagagaaacaacagagagagattcagccccatcgtggagggcctggagaaccaggaggccctgcagctgcaggtggcctgcatgcagttcatcaacgccctggtgaccagcccctacgagctggacttcagaatccacctgagaaacgagttcctgagaagcggcctgaagaccatgctgcccgacctgaaggagaaggagaacgacgagctggacatccagctgaaggtgttcgacgagaacaaggaggacgacctgaccgagctgagccacagactgaacgacatcagagccgagatggacgacatgaacgaggtgtaccacctgctgtacaacatgctgaaggacaccgccgccgagaactacttcctgagcatcctgcagcacttcctgctgatcagaaacgactactacatcagaccccagtactacaagatcatcgaggagtgcgtgagccagatcgtgctgcactgcagcggcatggaccccgacttcaagtacagacagagactggacatcgacctgacccacctgatcgacagctgcgtgaacaaggccaaggtggaggagagcgagcagaaggccgccgagttcagcaagaagttcgacgaggagttcaccgccagacaggaggcccaggccgagctgcagaagagagacgagaagatcaaggagctggaggccgagatccagcagctgagaacccaggcccaggtgctgagcagcagcagcggcatccccggcccccccgccgccccccccctgcccggcgtgggcccccccccccccccccccgccccccccctgcccggcggcgcccccctgccccccccccccccccccctgcccggcatgatgggcatccccccccccccccccccccccctgctgttcggcggcccccccccccccccccccctgggcggcgtgccccccccccccggcatcagcctgaacctgccctacggcatgaagcagaagaagatgtacaagcccgaggtgagcatgaagagaatcaactggagcaagatcgagcccaccgagctgagcgagaactgcttctggctgagagtgaaggaggacaagttcgagaaccccgacctgttcgccaagctggccctgaacttcgccacccagatcaaggtgcagaagaacgccgaggccctggaggagaagaagaccggccccaccaagaagaaggtgaaggagctgagaatcctggaccccaagaccgcccagaacctgagcatcttcctgggcagctacagaatgccctacgaggacatcagaaacgtgatcctggaggtgaacgaggacatgctgagcgaggccctgatccagaacctggtgaagcacctgcccgagcagaagatcctgaacgagctggccgagctgaagaacgagtacgacgacctgtgcgagcccgagcagttcggcgtggtgatgagcagcgtgaagatgctgcagcccagactgagcagcatcctgttcaagctgaccttcgaggagcacatcaacaacatcaagcccagcatcatcgccgtgaccctggcctgcgaggagctgaagaagagcgagagcttcaacagactgctggagctggtgctgctggtgggcaactacatgaacagcggcagcagaaacgcccagagcctgggcttcaagatcaacttcctgtgcaagatcagagacaccaagagcgccgaccagaagaccaccctgctgcacttcatcgccgacatctgcgaggagaagtacagagacatcctgaagttccccgaggagctggagcacgtggagagcgccagcaaggtgagcgcccagatcctgaagagcaacctggccagcatggagcagcagatcgtgcacctggagagagacatcaagaagttcccccaggccgagaaccagcacgacaagttcgtggagaagatgaccatcttcaccaagaccgccagagagcagtacgagaagctgagcaccatgcacaacaacatgatgaagctgtacgagaacctgggcgagtacttcatcttcgacagcaagaccgtgagcatcgaggagttcttcggcgacctgaacaacttcagaaccctgttcctggaggccgtgagagagaacaacaagagaagagagatggaggagaagaccagaagagccaagctggccaaggagaaggccgagcaggagaagctggagagacagaagaagaagaagcagctgatcgacatcaacaaggagggcgacgagaccggcgtgatggacaacctgctggaggccctgcagagcggcgccgccttcagagacagaagaaagagaatccccagaaaccccgacaacagaagagtgcccctggagagaagcagaagcagacacaacggcgccatcagcagcaagtag

SEQ ID NO: 167430 - DNA, 3312 bp, Artificial Sequence
  derived and/or modified sequence
atggagcagcccggcgccgccgccagcggcgccggcggcggcagcgaggagcccggcggcggcagaagcaacaagagaagcgccggcaacagagccgccaacgaggaggagaccaagaacaagcccaagctgaacatccagatcaagaccctggccgacgacgtgagagacagaatcaccagcttcagaaagagcaccgtgaagaaggagaagcccctgatccagcaccccatcgacagccaggtggccatgagcgagttccccgccgcccagcccctgtacgacgagagaagcctgaacctgagcgagaaggaggtgctggacctgttcgagaagatgatggaggacatgaacctgaacgaggagaagaaggcccccctgagaaacaaggacttcaccaccaagagagagatggtggtgcagtacatcagcgccaccgccaagagcatcgtgggcagcaaggtgaccggcggcctgaagaacagcaagcacgagtgcaccctgagcagccaggagtacgtgcacgagctgagaagcggcatcagcgacgagaagctgctgaactgcctggagagcctgagagtgagcctgaccagcaaccccgtgagctgggtgaacaacttcggccacgagggcctgggcctgctgctggacgagctggagaagctgctggacaagaagcagcaggagaacatcgacaagaagaaccagtacaagctgatccagtgcctgaaggccttcatgaacaacaagttcggcctgcagagaatcctgggcgacgagagaagcctgctgctgctggccagagccatcgaccccaagcagcccaacatgatgaccgagatcgtgaagatcctgagcgccatctgcatcgtgggcgaggagaacatcctggacaagctgctgggcgccatcaccaccgccgccgagagaaacaacagagagagattcagccccatcgtggagggcctggagaaccaggaggccctgcagctgcaggtggcctgcatgcagttcatcaacgccctggtgaccagcccctacgagctggacttcagaatccacctgagaaacgagttcctgagaagcggcctgaagaccatgctgcccgacctgaaggagaaggagaacgacgagctggacatccagctgaaggtgttcgacgagaacaaggaggacgacctgaccgagctgagccacagactgaacgacatcagagccgagatggacgacatgaacgaggtgtaccacctgctgtacaacatgctgaaggacaccgccgccgagaactacttcctgagcatcctgcagcacttcctgctgatcagaaacgactactacatcagaccccagtactacaagatcatcgaggagtgcgtgagccagatcgtgctgcactgcagcggcatggaccccgacttcaagtacagacagagactggacatcgacctgacccacctgatcgacagctgcgtgaacaaggccaaggtggaggagagcgagcagaaggccgccgagttcagcaagaagttcgacgaggagttcaccgccagacaggaggcccaggccgagctgcagaagagagacgagaagatcaaggagctggaggccgagatccagcagctgagaacccaggcccaggtgctgagcagcagcagcggcatccccggcccccccgccgccccccccctgcccggcgtgggcccccccccccccccccccgccccccccctgcccggcggcgcccccctgccccccccccccccccccctgcccggcatgatgggcatccccccccccccccccccccccctgctgttcggcggcccccccccccccccccccctgggcggcgtgccccccccccccggcatcagcctgaacctgccctacggcatgaagcagaagaagatgtacaagcccgaggtgagcatgaagagaatcaactggagcaagatcgagcccaccgagctgagcgagaactgcttctggctgagagtgaaggaggacaagttcgagaaccccgacctgttcgccaagctggccctgaacttcgccacccagatcaaggtgcagaagaacgccgaggccctggaggagaagaagaccggccccaccaagaagaaggtgaaggagctgagaatcctggaccccaagaccgcccagaacctgagcatcttcctgggcagctacagaatgccctacgaggacatcagaaacgtgatcctggaggtgaacgaggacatgctgagcgaggccctgatccagaacctggtgaagcacctgcccgagcagaagatcctgaacgagctggccgagctgaagaacgagtacgacgacctgtgcgagcccgagcagttcggcgtggtgatgagcagcgtgaagatgctgcagcccagactgagcagcatcctgttcaagctgaccttcgaggagcacatcaacaacatcaagcccagcatcatcgccgtgaccctggcctgcgaggagctgaagaagagcgagagcttcaacagactgctggagctggtgctgctggtgggcaactacatgaacagcggcagcagaaacgcccagagcctgggcttcaagatcaacttcctgtgcaagatcagagacaccaagagcgccgaccagaagaccaccctgctgcacttcatcgccgacatctgcgaggagaagtacagagacatcctgaagttccccgaggagctggagcacgtggagagcgccagcaaggtgagcgcccagatcctgaagagcaacctggccagcatggagcagcagatcgtgcacctggagagagacatcaagaagttcccccaggccgagaaccagcacgacaagttcgtggagaagatgaccatcttcaccaagaccgccagagagcagtacgagaagctgagcaccatgcacaacaacatgatgaagctgtacgagaacctgggcgagtacttcatcttcgacagcaagaccgtgagcatcgaggagttcttcggcgacctgaacaacttcagaaccctgttcctggaggccgtgagagagaacaacaagagaagagagatggaggagaagaccagaagagccaagctggccaaggagaaggccgagcaggagaagctggagagacagaagaagaagaagcagctgatcgacatcaacaaggagggcgacgagaccggcgtgatggacaacctgctggaggccctgcagagcggcgccgccttcagagacagaagaaagagaatccccagaaaccccgtggtgaaccacccctgcgccaccagagccaaccccagaagcgccacctag

SEQ ID NO: 167431 - DNA, 9333 bp, Artificial Sequence
  derived and/or modified sequence
gggcactttgaagaatcacgtgtgttgaggccctcttaaagagataggcacctacttttccctccaccctaaacaccgccctgagggcggcggcgaccgtggtaattgcaactgctcaggggcagggcttgccccagcgccgagtagtggcaacggcgtggttgcgtcgggggtgcctgggagcctggagtcccgggggcctgaaatcggcagcttcccgggcagacactctctccctcaggaagaggtgccgccgagtcagcgcggggcagtgtgagcgccccgaggtgctttctcagttgaggagaggtggggttacagggcacaggtgacagggccggagaaagatggagcagcccggggcggcggcgtcgggagcgggaggcggcagcgaggaacccggtgggggccggagcaacaagcggagcgcggggaaccgggccgccaatgaagaggaaacgaaaaacaaacccaaattgaacattcaaataaaaactttggcagatgatgtgcgtgaccgaattacaagttttagaaaatctactgtcaaaaaagaaaaacctcttattcaacatcctattgattctcaagtcgcgatgagtgagtttcctgcagctcagccattatatgatgaacgatctttgaatttgtcagaaaaggaagtattggatctctttgaaaaaatgatggaggacatgaaccttaacgaagagaaaaaagctcctttacgaaacaaagactttaccaccaaacgtgagatggttgtccagtatatttctgccactgccaaatctggtgggctgaaaaacagcaaacatgaatgcaccctgtcttcacaagaatatgttcatgaattacgatcgggtatatcagatgagaaacttcttaattgcctagaatccctcagggtttctttaaccagcaatccggtcagctgggttaacaactttggccatgaaggtcttggactcttattggatgagctggaaaagcttctggacaaaaaacagcaagaaaatattgacaagaagaatcagtataaacttattcaatgcctcaaagcatttatgaataataagtttggattacaaaggattctaggagatgaaagaagtcttttactattggcaagagcaattgaccccaaacaacccaacatgatgactgaaatagtaaaaatactttctgctatttgcattgttggagaagagaacattctagataaacttttaggggctataacaacagcagcagaaagaaataacagggaacgattttcaccaattgtggaaggtttagaaaatcaggaagccttgcaattacaggtggcctgcatgcagtttataaatgcccttgtcacttctccttatgagcttgattttcgaatacatttaaggaatgaattcctccgttcaggactaaaaacaatgttaccagatctaaaagaaaaagagaatgatgagcttgatattcagttgaaagtatttgatgaaaacaaagaagatgacctaactgaattatcacaccgtctcaatgacattcgagcagaaatggatgatatgaatgaagtctaccatcttctatataatatgctgaaggacactgctgctgaaaattacttcttatctattctacaacattttttgcttatcagaaatgattattatatcaggccacaatattataaaataattgaggaatgtgtttcacagatagtgctacactgcagtggtatggatccagacttcaaatacaggcaaagattagacatcgatttaactcatctgatagattcttgtgtgaacaaggcgaaagttgaagaaagtgaacaaaaagctgcagagttttcaaagaagttcgatgaagaattcacagctcgacaggaagctcaagcagagcttcaaaaaagagatgagaaaatcaaagaacttgaagcagaaatccagcaacttcgaacccaggcacaagtactctcaagttcatcaggaattccaggtcctcctgcagcacctccattgccaggtgtagggccgcctccaccaccacccgcgccacctctacccggaggagctcctcttcctcctccaccacctcctttacctggaatgatggggataccaccaccacccccaccaccacttttatttgggggacctcctccaccaccaccccttggaggagttcctcctcccccaggaatatcacttaatctaccttatggaatgaagcagaaaaaaatgtataaacctgaagtgtccatgaagagaatcaattggtcaaagattgaacccacagaattatctgagaactgtttctggttaagagtcaaagaagacaagtttgagaatccagatctctttgccaaattggcattgaattttgctactcagataaaagttcaaaagaacgcagaagcattagaagaaaagaagactgggcctacaaagaagaaagtgaaagaactgagaattttggatcccaaaacagctcagaatctgtccatctttctgggatcatatcgcatgccatatgaagacataagaaacgttattctggaggttaatgaagacatgctgagtgaggctttaattcagaaccttgtgaaacatcttcctgagcagaagatactcaacgaattagcagagcttaagaatgaatatgatgacctctgtgagcctgaacaatttggagttgtgatgagctctgtgaaaatgttacagcctcgtctcagtagtatcctgttcaagctcacatttgaagaacacataaacaacatcaaaccaagcatcatagcagtaactcttgcctgtgaagaactgaagaaaagtgaaagctttaacagacttttagagttagttcttcttgttggaaactacatgaactcaggctcaagaaatgcccagtctttgggatttaagatcaacttcctttgtaagatcagagatactaaatcagcggatcaaaaaacaacccttttgcattttattgccgacatttgtgaggaaaaatatcgagatatcctaaaatttcctgaagaactggaacacgtagaaagtgcaagcaaagtttcagctcaaattctcaagagcaaccttgcatcaatggaacaacaaattgttcatctggaacgtgacatcaagaaattcccccaagcagaaaatcaacacgataagtttgtggaaaagatgaccagctttacaaagactgcccgagaacagtatgaaaaactctccaccatgcacaacaacatgatgaagctctatgagaatcttggagaatacttcatttttgactcaaagacagtgagcatagaagagttctttggtgatctcaacaacttccgaactttgtttttggaagcagtgagagaaaacaataagagaagagaaatggaagagaagaccaggagggcaaaacttgcaaaagagaaagctgaacaagaaaagttagaacgccagaagaaaaagaaacaactcattgatataaacaaagagggtgatgagactggtgtgatggataatcttctagaagccctacaatcaggtgcagcattcagagaccgtcgaaagcggattccaaggaatccagataacagacgagtacctttggaaaggtcacgctctcgccacaatggagctatctcatctaagtgattcctgatgccaaagaatatgaaaatatttaagtaaaaacaaaatgatgcattttgagaagaacaaagtgtgcactcagcggctggaaaggaaataagtgcatttctgcaaagatcaagataagctggatgaagtagtgtgcatttgtaatactattgcaagactcctcccacaattattctaatctgaacacagttatcaggattacaaaatgtgttccattttagtgtaaagatgtgtatcatttgtaattgtgtgtgacctgactgtgatgatggaagtgtaagaaattgaagagttctaaggctttcaaaaacactcagtcaaaaatttaaaatcttaaatgtgtaagtcacccccaccaaaaacaaaagagaagaaaaagaatagaaagaattatccagtgtcagcttccaatccctagtacatatataatagaaaagggccaagaaaaatatgcatcttgatttggagagaggctaatattatgcacactgtaagagaagccattttggaaattcacgaaagtactgctccaccccagttgagttatttagaattttatctcaagtgaaagctgatggattcatctgctttggctgaaattaaacttatcattagtctagctagcatttcagcatgatattgcaagcacttctcattgctaaaaataaataaaccaaagtttaaccgaatcagttagggaaagtgatttaaactttatttaaagaggtattttctaattatgcacagatatctactttatacaaatactttatatggctatttttgagaaaaccctcacattttaatgtttatgctagggatgaacctgaaaattctattacgtttatttagatttcaaaggcaaatattgattcctatgctctgtggtttatttcttttttctattgcttctttctcccttgagtcccttgaaggcagggaatagacttctagaaaacctgagaggaaaaagaattctttttacaggaggcagcagaaaactgtctgaaaggtcaattgttttatctccctttccactctctttccaatttcactttggtggtctgaagaagaaaaagaaattttatgtatgtatgtgtaaatatgtgtatatatttctatctcttgctacaataattccaactaagtgaacttctcaattatcatcatacttacttaccttatattaacaaattaagatgatgctgccaaaacaagtctagcagggaaaacaggttctacatttttcttaaataaattagggagtaaaagttatacttaacttgtctgtctattattttaaaatatgcattgaaataatgtggtataacttctctggagtgcaattttaagtctaattcatgcagatgattgattgtgattattgtaagaaatttcttacatgtatatttcttatgtagaaaatactgtttctactcattcaaagcacattgtagatattcagagagaagaacaaatggctggcttggcaaatccccatctgagataaagtaaacaagtgaccagcagcccacagatgattcctttatatagatgtataatgattcaaactgctgcctttgcctccagtgcatccttacttaggtattatacttctttaaaaagctctgaagctgctacaatagaaaaatcaaaaagggtaacagtatctgaaatttcacagtcctatccgatctgaaaacacacatacacaaatgcacacacatgcacacacacatttaagggacatagcagtaacactgttttttaacaacaacaaaagtttaggttctaatttatgtaaatacctagtatgtgtatttttgactttacaaagtctttcttttctgaaatcttcgtggtatggcttttttaattcttttgacagcttatcagtctgtaggagaatgatcttgaaatgttaaccctgactaaaatttgggagcatatgccttgctatattatcaagctggtcaaggtagaaatactgatatgtatcatcaccttttccagatacaaacttgccttattttctagtttgtgaacaagaacgaatgaagtactattattgataacttatatatttttatttagagcaatcccacatgcttttcacaaacattaaaaaaaaaaacctttcagggtctttcatgaagttccaatagttgagtgagttaaaaggtttgtttcccagatttgtaatggtcctgctctagccatttgcagttttgttttagatgattggaaagtatatcaccaaaaaaagtatatagtgacatttttagtatgaaaccaaattacactaaggtcttttgttggccatattactgccacacatgagaagcaccatttatgcagattttcttcagaatatttttaaaaggtacagaatccttaaaatattaacaactaattgcatccatcatctcctttggctgctgtaacaaattaccaccaataatatgatggcttaacacaacagaaacttatttgcttacatttttgaagggcagcaaagccatgctccctccagaggctctagaggagaatctttccttgccacgtccaccttttggtggctattggcattttttggcttatggccacatttctctttctgctgtgtcttcacatcaccctcctctgtatacctaatctgcctctgcctctgtttaataaggatccttatgatgacttttagggactacccagattactccaggataatctcctcacctcatgagtcttaacttaattacatctgcaaggcccccttctccaaataagataaattcatggttttggggattaggatgtggctatgtcttttaggaagccactcttagcccaccagagtctgccctttggcccaaaatttatgtctgtctcatgtgtaaaagacattcatcccatcctaacattaccaaaagtctcaacccattatatcaatcctaagtccaaaatttcattcaaatatcatcggttcaaaagttccaaagcttatcatttagatcatctaaatcaggtatgagtgaaactctgggtatggtctttcctgaggccaaattcctcttcctctgagaaccagtgaaacagaaaagttaatctgctttcaaattacaatggtgggaacaggcataggataacagttacagacatttctgtctcaaaaaggagagaatggaaattggaatggagtctcctgtcccaatcattttcaaaatctagccaggcaaatttctgttatatttcaaggcctggcagtaatcctctttctcagggctccaccctttgggcctgtagctcttctttcttggactatggattgggcctctgcctctgtgcctatgggttgcacttcttcctctgttcccacacttgggcctctgcctctgtacctgcagctctgctctcgggatggtgcttcctttatcttgaagggtggcacatgtttgcagctgagaagttttatcaacgggtttcctacctgtagaattctggcagtctcacaatcttctttcatttttttctgtctctgtcccttttaggcccagttggaagtgtttctgatggtagaacattctcaaaaatcttgtgggtcttctacgtatgtcacattgattcacacattcagaaaagagggtcctcacagatttttcctgaacaaccccatctctattcttggcttctgttgaaacagtcaaataaatccacaagttaatgcctaacctcttcagcactagccaaaggttgtcaagacacacccttgggcttatctacagagcacacttttctaacagtgaatctcctaattttagcatctttttttttttttacaatcattcagattgtgaattcaggctcagaatttacccagtcatcagatactgattccttttgtccacttatatagttattttctctttaaaaaaaaattttttttaatgtattagagatgaggtctcactctgtcacccaggctgcagtgtagtggtgcaaacatagctccctgtaacctcaaactcccaggctcaagggatcctcctgcatcagccttccaagtagctgggtctacaggtgcatgccaccatgcctggctaattttttgcatttttttgtagagacttgatcttgctatgttgtccaggctgctctcgaactcctagcctcaagcaatccacccatcttggcctcctaaagtgccggattacaggtgtaagccaccatgcccagcctgttttgtcaatgtatctgttttctgtcttattttactataagcactaagaagaaactaagctatatctctaacactagacttgaaaatttcctcagctaaacatccaagttcatcatttattcaacttttcacactactgtagtagacaatttagatagataaactttttgccactatatgacaaggattccctttcttccattttccaataaaatcttcatttccttctaaaccatcactagaaatgcctttaacattcatactactaccatctggtaaaggcaatctagttttttctatcacagccaccaaaattcttctagtctctacccattatccaattccaaagcctttttcacattttaagacatttgttacagaagtacccaatccgtcccagttccacaatctgcattagattcccatggctgctgtaacaaattaccctctagcccagtggcttaaaacaatagaaatttattatcttgttgttttggaggccaaaagtccaaaattgaggggttggcagggctgaacgtcttctggagactctaagggaaacactcttcccgtgtcttccagtttcttgtggctgccatcattccttggtttgtgactgcatctccctctcctctgtcttcacatcacttcccctctgtatatataatctacctctgcctctctcttataaggacacttgtgacgggacttagggcccatccagattacccatgataattcccttattccaagattcttaattatatctgaaaggaccttttttccaaataaggtactatcacaggttccagggagtaggatattgaatatcttttttggggagggggcaccatgcagctcactacactattcattgcacacaaatgaatttttcactttttaagatgcattcttggtgctcaaaccagatcgaagtttgtctctaaaagctattgtctgcacaggctgctgcatgctctgttgttaaatggatggacaggctattctaaattttggttgatacttttgctactatgggcaattaacttgaaaaaaataatcgatcccaactctgtgctctgatgtacctcttctgccccttttatgacacctttgaccaaatgccttctatggttcacagtgcaggcacaaaactacctctgatacagaagggttctttacaagcttattttacataccgtgaatccctcacctaaagggagaggtgaaagcaaagactgctttgaatgggtattgagggagattgtgtccataccaagccaccctgaagaagtatttcacttgcagtagaactgtggatttgtgctgtcatttcaccttggaataaacacctatctctaagcaggaccaagaatgacttgcaatctatatgtaatggctacttacttattcaataaagttaagatatacgttaaa

SEQ ID NO: 167432 - DNA, 3782 bp, Artificial Sequence
  derived and/or modified sequence
ctcggctgcgggagtaggaagcagctttgcgcgcccgggcggccgatgcgggcactttgaagaatcacgtgtgttgaggccctcttaaagagataggcacctacttttccctccaccctaaacaccgccctgagggcggcggcgaccgtggtaattgcaactgctcaggggcagggcttgccccagcgccgagtagtggcaacggcgtggttgcgtcgggggtgcctgggagcctggagtcccgggggcctgaaatcggcagcttcccgggcagacactctctccctcaggaagaggtgccgccgagtcagcgcggggcagtgtgagcgccccgaggtgctttctcagttgaggagaggtggggttacagggcacaggtgacagggccggagaaagatggagcagcccggggcggcggcgtcgggagcgggaggcggcagcgaggaacccggtgggggccggagcaacaagcggagcgcggggaaccgggccgccaatgaagaggaaacgaaaaacaaacccaaattgaacattcaaataaaaactttggcagatgatgtgcgtgaccgaattacaagttttagaaaatctactgtcaaaaaagaaaaacctcttattcaacatcctattgattctcaagtcgcgatgagtgagtttcctgcagctcagccattatatgatgaacgatctttgaatttgtcagaaaaggaagtattggatctctttgaaaaaatgatggaggacatgaaccttaacgaagagaaaaaagctcctttacgaaacaaagactttaccaccaaacgtgagatggttgtccagtatatttctgccactgccaaatctggtgggctgaaaaacagcaaacatgaatgcaccctgtcttcacaagaatatgttcatgaattacgatcgggtatatcagatgagaaacttcttaattgcctagaatccctcagggtttctttaaccagcaatccggtcagctgggttaacaactttggccatgaaggtcttggactcttattggatgagctggaaaagcttctggacaaaaaacagcaagaaaatattgacaagaagaatcagtataaacttattcaatgcctcaaagcatttatgaataataagtttggattacaaaggattctaggagatgaaagaagtcttttactattggcaagagcaattgaccccaaacaacccaacatgatgactgaaatagtaaaaatactttctgctatttgcattgttggagaagagaacattctagataaacttttaggggctataacaacagcagcagaaagaaataacagggaacgattttcaccaattgtggaaggtttagaaaatcaggaagccttgcaattacaggtggcctgcatgcagtttataaatgcccttgtcacttctccttatgagcttgattttcgaatacatttaaggaatgaattcctccgttcaggactaaaaacaatgttaccagatctaaaagaaaaagagaatgatgagcttgatattcagttgaaagtatttgatgaaaacaaagaagatgacctaactgaattatcacaccgtctcaatgacattcgagcagaaatggatgatatgaatgaagtctaccatcttctatataatatgctgaaggacactgctgctgaaaattacttcttatctattctacaacattttttgcttatcagaaatgattattatatcaggccacaatattataaaataattgaggaatgtgtttcacagatagtgctacactgcagtggtatggatccagacttcaaatacaggcaaagattagacatcgatttaactcatctgatagattcttgtgtgaacaaggcgaaagttgaagaaagtgaacaaaaagctgcagagttttcaaagaagttcgatgaagaattcacagctcgacaggaagctcaagcagagcttcaaaaaagagatgagaaaatcaaagaacttgaagcagaaatccagcaacttcgaacccaggcacaagtactctcaagttcatcaggaattccaggtcctcctgcagcacctccattgccaggtgtagggccgcctccaccaccacccgcgccacctctacccggaggagctcctcttcctcctccaccacctcctttacctggaatgatggggataccaccaccacccccaccaccacttttatttgggggacctcctccaccaccaccccttggaggagttcctcctcccccaggaatatcacttaatctaccttatggaatgaagcagaaaaaaatgtataaacctgaagtgtccatgaagagaatcaattggtcaaagattgaacccacagaattatctgagaactgtttctggttaagagtcaaagaagacaagtttgagaatccagatctctttgccaaattggcattgaattttgctactcagataaaagttcaaaagaacgcagaagcattagaagaaaagaagactgggcctacaaagaagaaagtgaaagaactgagaattttggatcccaaaacagctcagaatctgtccatctttctgggatcatatcgcatgccatatgaagacataagaaacgttattctggaggttaatgaagacatgctgagtgaggctttaattcagaaccttgtgaaacatcttcctgagcagaagatactcaacgaattagcagagcttaagaatgaatatgatgacctctgtgagcctgaacaatttggagttgtgatgagctctgtgaaaatgttacagcctcgtctcagtagtatcctgttcaagctcacatttgaagaacacataaacaacatcaaaccaagcatcatagcagtaactcttgcctgtgaagaactgaagaaaagtgaaagctttaacagacttttagagttagttcttcttgttggaaactacatgaactcaggctcaagaaatgcccagtctttgggatttaagatcaacttcctttgtaagatcagagatactaaatcagcggatcaaaaaacaacccttttgcattttattgccgacatttgtgaggaaaaatatcgagatatcctaaaatttcctgaagaactggaacacgtagaaagtgcaagcaaagtttcagctcaaattctcaagagcaaccttgcatcaatggaacaacaaattgttcatctggaacgtgacatcaagaaattcccccaagcagaaaatcaacacgataagtttgtggaaaagatgaccatctttacaaagactgcccgagaacagtatgaaaaactctccaccatgcacaacaacatgatgaagctctatgagaatcttggagaatacttcatttttgactcaaagacagtgagcatagaagagttctttggtgatctcaacaacttccgaactttgtttttggaagcagtgagagaaaacaataagagaagagaaatggaagagaagaccaggagggcaaaacttgcaaaagagaaagctgaacaagaaaagttagaacgccagaagaaaaagaaacaactcattgatataaacaaagagggtgatgagactggtgtgatggataatcttctagaagccctacaatcaggtgcagcattcagagaccgtcgaaagcggattccaaggaatccagtggtaaatcatccctgtgcaacaagggctaatccaagatcagctacataaacggcctgagtgctgttttaaacaggattgggtgatggtacaacatgactttttaagataatcaagtagtaaaagtttctagtggaaacatgata

SEQ ID NO: 167433 - DNA, 3730 bp, Artificial Sequence
  derived and/or modified sequence
gggcactttgaagaatcacgtgtgttgaggccctcttaaagagataggcacctacttttccctccaccctaaacaccgccctgagggcggcggcgaccgtggtaattgcaactgctcaggggcagggcttgccccagcgccgagtagtggcaacggcgtggttgcgtcgggggtgcctgggagcctggagtcccgggggcctgaaatcggcagcttcccgggcagacactctctccctcaggaagaggtgccgccgagtcagcgcggggcagtgtgagcgccccgaggtgctttctcagttgaggagaggtggggttacagggcacaggtgacagggccggagaaagatggagcagcccggggcggcggcgtcgggagcgggaggcggcagcgaggaacccggtgggggccggagcaacaagcggagcgcggggaaccgggccgccaatgaagaggaaacgaaaaacaaacccaaattgaacattcaaataaaaactttggcagatgatgtgcgtgaccgaattacaagttttagaaaatctactgtcaaaaaagaaaaacctcttattcaacatcctattgattctcaagtcgcgatgagtgagtttcctgcagctcagccattatatgatgaacgatctttgaatttgtcagaaaaggaagtattggatctctttgaaaaaatgatggaggacatgaaccttaacgaagagaaaaaagctcctttacgaaacaaagactttaccaccaaacgtgagatggttgtccagtatatttctgccactgccaaatctggtgggctgaaaaacagcaaacatgaatgcaccctgtcttcacaagaatatgttcatgaattacgatcgggtatatcagatgagaaacttcttaattgcctagaatccctcagggtttctttaaccagcaatccggtcagctgggttaacaactttggccatgaaggtcttggactcttattggatgagctggaaaagcttctggacaaaaaacagcaagaaaatattgacaagaagaatcagtataaacttattcaatgcctcaaagcatttatgaataataagtttggattacaaaggattctaggagatgaaagaagtcttttactattggcaagagcaattgaccccaaacaacccaacatgatgactgaaatagtaaaaatactttctgctatttgcattgttggagaagagaacattctagataaacttttaggggctataacaacagcagcagaaagaaataacagggaacgattttcaccaattgtggaaggtttagaaaatcaggaagccttgcaattacaggtggcctgcatgcagtttataaatgcccttgtcacttctccttatgagcttgattttcgaatacatttaaggaatgaattcctccgttcaggactaaaaacaatgttaccagatctaaaagaaaaagagaatgatgagcttgatattcagttgaaagtatttgatgaaaacaaagaagatgacctaactgaattatcacaccgtctcaatgacattcgagcagaaatggatgatatgaatgaagtctaccatcttctatataatatgctgaaggacactgctgctgaaaattacttcttatctattctacaacattttttgcttatcagaaatgattattatatcaggccacaatattataaaataattgaggaatgtgtttcacagatagtgctacactgcagtggtatggatccagacttcaaatacaggcaaagattagacatcgatttaactcatctgatagattcttgtgtgaacaaggcgaaagttgaagaaagtgaacaaaaagctgcagagttttcaaagaagttcgatgaagaattcacagctcgacaggaagctcaagcagagcttcaaaaaagagatgagaaaatcaaagaacttgaagcagaaatccagcaacttcgaacccaggcacaagtactctcaagttcatcaggaattccaggtcctcctgcagcacctccattgccaggtgtagggccgcctccaccaccacccgcgccacctctacccggaggagctcctcttcctcctccaccacctcctttacctggaatgatggggataccaccaccacccccaccaccacttttatttgggggacctcctccaccaccaccccttggaggagttcctcctcccccaggaatatcacttaatctaccttatggaatgaagcagaaaaaaatgtataaacctgaagtgtccatgaagagaatcaattggtcaaagattgaacccacagaattatctgagaactgtttctggttaagagtcaaagaagacaagtttgagaatccagatctctttgccaaattggcattgaattttgctactcagataaaagttcaaaagaacgcagaagcattagaagaaaagaagactgggcctacaaagaagaaagtgaaagaactgagaattttggatcccaaaacagctcagaatctgtccatctttctgggatcatatcgcatgccatatgaagacataagaaacgttattctggaggttaatgaagacatgctgagtgaggctttaattcagaaccttgtgaaacatcttcctgagcagaagatactcaacgaattagcagagcttaagaatgaatatgatgacctctgtgagcctgaacaatttggagttgtgatgagctctgtgaaaatgttacagcctcgtctcagtagtatcctgttcaagctcacatttgaagaacacataaacaacatcaaaccaagcatcatagcagtaactcttgcctgtgaagaactgaagaaaagtgaaagctttaacagacttttagagttagttcttcttgttggaaactacatgaactcaggctcaagaaatgcccagtctttgggatttaagatcaacttcctttgtaagatcagagatactaaatcagcggatcaaaaaacaacccttttgcattttattgccgacatttgtgaggaaaaatatcgagatatcctaaaatttcctgaagaactggaacacgtagaaagtgcaagcaaagtttcagctcaaattctcaagagcaaccttgcatcaatggaacaacaaattgttcatctggaacgtgacatcaagaaattcccccaagcagaaaatcaacacgataagtttgtggaaaagatgaccagctttacaaagactgcccgagaacagtatgaaaaactctccaccatgcacaacaacatgatgaagctctatgagaatcttggagaatacttcatttttgactcaaagacagtgagcatagaagagttctttggtgatctcaacaacttccgaactttgtttttggaagcagtgagagaaaacaataagagaagagaaatggaagagaagaccaggagggcaaaacttgcaaaagagaaagctgaacaagaaaagttagaacgccagaagaaaaagaaacaactcattgatataaacaaagagggtgatgagactggtgtgatggataatcttctagaagccctacaatcaggtgcagcattcagagaccgtcgaaagcggattccaaggaatccagtggtaaatcatccctgtgcaacaagggctaatccaagatcagctacataaacggcctgagtgctgttttaaacaggattgggtgatggtacaacatgactttttaagataatcaagtagtaaaagtttctagtggaaacatg

SEQ ID NO: 167434 - DNA, 3690 bp, Artificial Sequence
  derived and/or modified sequence
ctcggctgcgggagtaggaagcagctttgcgcgcccgggcggccgatgcgggcactttgaagaatcacgtgtgttgaggccctcttaaagagataggcacctacttttccctccaccctaaacaccgccctgagggcggcggcgaccgtggtaattgcaactgctcaggggcagggcttgccccagcgccgagtagtggcaacggcgtggttgcgtcgggggtgcctgggagcctggagtcccgggggcctgaaatcggcagcttcccgggcagacactctctccctcaggaagaggtgccgccgagtcagcgcggggcagtgtgagcgccccgaggtgctttctcagttgaggagaggtggggttacagggcacaggtgacagggccggagaaagatggagcagcccggggcggcggcgtcgggagcgggaggcggcagcgaggaacccggtgggggccggagcaacaagcggagcgcggggaaccgggccgccaatgaagaggaaacgaaaaacaaacccaaattgcgtgaccgaattacaagttttagaaaatctactgtcaaaaaagaaaaacctcttattcaacatcctattgattctcaagtcgcgatgagtgagtttcctgcagctcagccattatatgatgaacgatctttgaatttgtcagaaaaggaagtattggatctctttgaaaaaatgatggaggacatgaaccttaacgaagagaaaaaagctcctttacgaaacaaagactttaccaccaaacgtgagatggttgtccagtatatttctgccactgccaaatctgtaatatcctcacatattaagggtgggctgaaaaacagcaaacatgaatgcaccctgtcttcacaagaatatgttcatgaattacgatcgggtatatcagatgagaaacttcttaattgcctagaatccctcagggtttctttaaccagcaatccggtcagctgggttaacaactttggccatgaaggtcttggactcttattggatgagctggaaaagcttctggacaaaaaacagcaagaaaatattgacaagaagaatcagtataaacttattcaatgcctcaaagcatttatgaataataagtttggattacaaaggattctaggagatgaaagaagtcttttactattggcaagagcaattgaccccaaacaacccaacatgatgactgaaatagtaaaaatactttctgctatttgcattgttggagaagagaacattctagataaacttttaggggctataacaacagcagcagaaagaaataacagggaacgattttcaccaattgtggaaggtttagaaaatcaggaagccttgcaattacaggtggcctgcatgcagtttataaatgcccttgtcacttctccttatgagcttgattttcgaatacatttaaggaatgaattcctccgttcaggactaaaaacaatgttaccagatctaaaagaaaaagagaatgatgagcttgatattcagttgaaagtatttgatgaaaacaaagaagatgacctaactgaattatcacaccgtctcaatgacattcgagcagaaatggatgatatgaatgaagtctaccatcttctatataatatgctgaaggacactgctgctgaaaattacttcttatctattctacaacattttttgcttatcagaaatgattattatatcaggccacaatattataaaataattgaggaatgtgtttcacagatagtgctacactgcagtggtatggatccagacttcaaatacaggcaaagattagacatcgatttaactcatctgatagattcttgtgtgaacaaggcgaaagttgaagaaagtgaacaaaaagctgcagagttttcaaagaagttcgatgaagaattcacagctcgacaggaagctcaagcagagcttcaaaaaagagatgagaaaatcaaagaacttgaagcagaaatccagcaacttcgaacccaggcacaagtactctcaagttcatcaggaattccaggtcctcctgcagcacctccattgccaggtgtagggccgcctccaccaccacccgcgccacctctacccggaggagctcctcttcctcctccaccacctcctttacctggaatgatggggataccaccaccacccccaccaccacttttatttgggggacctcctccaccaccaccccttggaggagttcctcctcccccaggaatatcacttaatctaccttatggaatgaagcagaaaaaaatgtataaacctgaagtgtccatgaagagaatcaattggtcaaagattgaacccacagaattatctgagaactgtttctggttaagagtcaaagaagacaagtttgagaatccagatctctttgccaaattggcattgaattttgctactcagataaaagttcaaaagaacgcagaagcattagaagaaaagaagactgggcctacaaagaagaaagtgaaagaactgagaattttggatcccaaaacagctcagaatctgtccatctttctgggatcatatcgcatgccatatgaagacataagaaacgttattctggaggttaatgaagacatgctgagtgaggctttaattcagaaccttgtgaaacatcttcctgagcagaagatactcaacgaattagcagagcttaagaatgaatatgatgacctctgtgagcctgaacaatttggagttgtgatgagctctgtgaaaatgttacagcctcgtctcagtagtatcctgttcaagctcacatttgaagaacacataaacaacatcaaaccaagcatcatagcagtaactcttgcctgtgaagaactgaagaaaagtgaaagctttaacagacttttagagttagttcttcttgttggaaactacatgaactcaggctcaagaaatgcccagtctttgggatttaagatcaacttcctttgtaagatcagagatactaaatcagcggatcaaaaaacaacccttttgcattttattgccgacatttgtgaggaaaaatatcgagatatcctaaaatttcctgaagaactggaacacgtagaaagtgcaagcaaagtttcagctcaaattctcaagagcaaccttgcatcaatggaacaacaaattgttcatctggaacgtgacatcaagaaattcccccaagcagaaaatcaacacgataagtttgtggaaaagatgaccatctttacaaagactgcccgagaacagtatgaaaaactctccaccatgcacaacaacatgatgaagctctatgagaatcttggagaatacttcatttttgactcaaagacagtgagcatagaagagttctttggtgatctcaacaacttccgaactttgtttttggaagcagtgagagaaaacaataagagaagagaaatggaagagaagaccaggagggcaaaacttgcaaaagagaaagctgaacaagaaaagttagaacgccagaagaaaaagaaacaactcattgatataaacaaagagggtgatgagactggtgtgatggataatcttctagaagccctacaatcaggtgcagcattcagagaccgtcgaaagcggattccaaggaatccagataacagacgagtacctttggaaaggtcacgctctcgccacaatggagctatctcatctaagtga

SEQ ID NO: 167435 - DNA, 4983 bp, Artificial Sequence
  derived and/or modified sequence
ctcggctgcgggagtaggaagcagctttgcgcgcccgggcggccgatgcgggcactttgaagaatcacgtgtgttgaggccctcttaaagagataggcacctacttttccctccaccctaaacaccgccctgagggcggcggcgaccgtggtaattgcaactgctcaggggcagggcttgccccagcgccgagtagtggcaacggcgtggttgcgtcgggggtgcctgggagcctggagtcccgggggcctgaaatcggcagcttcccgggcagacactctctccctcaggaagaggtgccgccgagtcagcgcggggcagtgtgagcgccccgaggtgctttctcagttgaggagaggtggggttacagggcacaggtgacagggccggagaaagatggagcagcccggggcggcggcgtcgggagcgggaggcggcagcgaggaacccggtgggggccggagcaacaagcggagcgcggggaaccgggccgccaatgaagaggaaacgaaaaacaaacccaaattgaacattcaaataaaaactttggcagatgatgtgcgtgaccgaattacaagttttagaaaatctactgtcaaaaaagaaaaacctcttattcaacatcctattgattctcaagtcgcgatgagtgagtttcctgcagctcagccattatatgatgaacgatctttgaatttgtcagaaaaggaagtattggatctctttgaaaaaatgatggaggacatgaaccttaacgaagagaaaaaagctcctttacgaaacaaagactttaccaccaaacgtgagatggttgtccagtatatttctgccactgccaaatctggtgggctgaaaaacagcaaacatgaatgcaccctgtcttcacaagaatatgttcatgaattacgatcgggtatatcagatgagaaacttcttaattgcctagaatccctcagggtttctttaaccagcaatccggtcagctgggttaacaactttggccatgaaggtcttggactcttattggatgagctggaaaagcttctggacaaaaaacagcaagaaaatattgacaagaagaatcagtataaacttattcaatgcctcaaagcatttatgaataataagtttggattacaaaggattctaggagatgaaagaagtcttttactattggcaagagcaattgaccccaaacaacccaacatgatgactgaaatagtaaaaatactttctgctatttgcattgttggagaagagaacattctagataaacttttaggggctataacaacagcagcagaaagaaataacagggaacgattttcaccaattgtggaaggtttagaaaatcaggaagccttgcaattacaggtggcctgcatgcagtttataaatgcccttgtcacttctccttatgagcttgattttcgaatacatttaaggaatgaattcctccgttcaggactaaaaacaatgttaccagatctaaaagaaaaagagaatgatgagcttgatattcagttgaaagtatttgatgaaaacaaagaagatgacctaactgaattatcacaccgtctcaatgacattcgagcagaaatggatgatatgaatgaagtctaccatcttctatataatatgctgaaggacactgctgctgaaaattacttcttatctattctacaacattttttgcttatcagaaatgattattatatcaggccacaatattataaaataattgaggaatgtgtttcacagatagtgctacactgcagtggtatggatccagacttcaaatacaggcaaagattagacatcgatttaactcatctgatagattcttgtgtgaacaaggcgaaagttgaagaaagtgaacaaaaagctgcagagttttcaaagaagttcgatgaagaattcacagctcgacaggaagctcaagcagagcttcaaaaaagagatgagaaaatcaaagaacttgaagcagaaatccagcaacttcgaacccaggcacaagtactctcaagttcatcaggaattccaggtcctcctgcagcacctccattgccaggtgtagggccgcctccaccaccacccgcgccacctctacccggaggagctcctcttcctcctccaccacctcctttacctggaatgatggggataccaccaccacccccaccaccacttttatttgggggacctcctccaccaccaccccttggaggagttcctcctcccccaggaatatcacttaatctaccttatggaatgaagcagaaaaaaatgtataaacctgaagtgtccatgaagagaatcaattggtcaaagattgaacccacagaattatctgagaactgtttctggttaagagtcaaagaagacaagtttgagaatccagatctctttgccaaattggcattgaattttgctactcagataaaagttcaaaagaacgcagaagcattagaagaaaagaagactgggcctacaaagaagaaagtgaaagaactgagaattttggatcccaaaacagctcagaatctgtccatctttctgggatcatatcgcatgccatatgaagacataagaaacgttattctggaggttaatgaagacatgctgagtgaggctttaattcagaaccttgtgaaacatcttcctgagcagaagatactcaacgaattagcagagcttaagaatgaatatgatgacctctgtgagcctgaacaatttggagttgtgatgagctctgtgaaaatgttacagcctcgtctcagtagtatcctgttcaagctcacatttgaagaacacataaacaacatcaaaccaagcatcatagcagtaactcttgcctgtgaagaactgaagaaaagtgaaagctttaacagacttttagagttagttcttcttgttggaaactacatgaactcaggctcaagaaatgcccagtctttgggatttaagatcaacttcctttgtaagatcagagatactaaatcagcggatcaaaaaacaacccttttgcattttattgccgacatttgtgaggaaaaatatcgagatatcctaaaatttcctgaagaactggaacacgtagaaagtgcaagcaaagtttcagctcaaattctcaagagcaaccttgcatcaatggaacaacaaattgttcatctggaacgtgacatcaagaaattcccccaagcagaaaatcaacacgataagtttgtggaaaagatgaccatctttacaaagactgcccgagaacagtatgaaaaactctccaccatgcacaacaacatgatgaagctctatgagaatcttggagaatacttcatttttgactcaaagacagtgagcatagaagagttctttggtgatctcaacaacttccgaactttgtttttggaagcagtgagagaaaacaataagagaagagaaatggaagagaagaccaggagggcaaaacttgcaaaagagaaagctgaacaagaaaagttagaacgccagaagaaaaagaaacaactcattgatataaacaaagagggtgatgagactggtgtgatggataatcttctagaagccctacaatcaggtgcagcattcagagaccgtcgaaagcggattccaaggaatccagataacagacgagtacctttggaaaggtcacgctctcgccacaatggagctatctcatctaagtgattcctgatgccaaagaatatgaaaatatttaagtaaaaacaaaatgatgcattttgagaagaacaaagtgtgcactcagcggctggaaaggaaataagtgcatttctgcaaagatcaagataagctggatgaagtagtgtgcatttgtaatactattgcaagactcctcccacaattattctaatctgaacacagttatcaggattacaaaatgtgttccattttagtgtaaagatgtgtatcatttgtaattgtgtgtgacctgactgtgatgatggaagtgtaagaaattgaagagttctaaggctttcaaaaacactcagtcaaaaatttaaaatcttaaatgtgtaagtcacccccaccaaaaacaaaagagaagaaaaagaatagaaagaattatccagtgtcagcttccaatccctagtacatatataatagaaaagggccaagaaaaatatgcatcttgatttggagagaggctaatattatgcacactgtaagagaagccattttggaaattcacgaaagtactgctccaccccagttgagttatttagaattttatctcaagtgaaagctgatggattcatctgctttggctgaaattaaacttatcattagtctagctagcatttcagcatgatattgcaagcacttctcattgctaaaaataaataaaccaaagtttaaccgaatcagttagggaaagtgatttaaactttatttaaagaggtattttctaattatgcacagatatctactttatacaaatactttatatggctatttttgagaaaaccctcacattttaatgtttatgctagggatgaacctgaaaattctattacgtttatttagatttcaaaggcaaatattgattcctatgctctgtggtttatttcttttttctattgcttctttctcccttgagtcccttgaaggcagggaatagacttctagaaaacctgagaggaaaaagaattctttttacaggaggcagcagaaaactgtctgaaaggtcaattgttttatctccctttccactctctttccaatttcactttggtggtctgaagaagaaaaagaaattttatgtatgtatgtgtaaatatgtgtatatatttctatctcttgctacaataattccaactaagtgaacttctcaattatcatcatacttacttaccttatattaacaaattaagatgatgctgccaaaacaagtctagcagggaaaacaggttctacatttttcttaaataaattagggagtaaaagtta

SEQ ID NO: 167436 - DNA, 3376 bp, Artificial Sequence
  derived and/or modified sequence
agaggtggggttacagggcacaggtgacagggccggagaaagatggagcagcccggggcggcggcgtcgggagcgggaggcggcagcgaggaacccggtgggggccggagcaacaagcggagcgcggggaaccgggccgccaatgaagaggaaacgaaaaacaaacccaaattgaacattcaaataaaaactttggcagatgatgtgcgtgaccgaattacaagttttagaaaatctactgtcaaaaaagaaaaacctcttattcaacatcctattgattctcaagtcgcgatgagtgagtttcctgcagctcagccattatatgatgaacgatctttgaatttgtcagaaaaggaagtattggatctctttgaaaaaatgatggaggacatgaaccttaacgaagagaaaaaagctcctttacgaaacaaagactttaccaccaaacgtgagatggttgtccagtatatttctgccactgccaaatctatagttggaagtaaagttacgggtgggctgaaaaacagcaaacatgaatgcaccctgtcttcacaagaatatgttcatgaattacgatcgggtatatcagatgagaaacttcttaattgcctagaatccctcagggtttctttaaccagcaatccggtcagctgggttaacaactttggccatgaaggtcttggactcttattggatgagctggaaaagcttctggacaaaaaacagcaagaaaatattgacaagaagaatcagtataaacttattcaatgcctcaaagcatttatgaataataagtttggattacaaaggattctaggagatgaaagaagtcttttactattggcaagagcaattgaccccaaacaacccaacatgatgactgaaatagtaaaaatactttctgctatttgcattgttggagaagagaacattctagataaacttttaggggctataacaacagcagcagaaagaaataacagggaacgattttcaccaattgtggaaggtttagaaaatcaggaagccttgcaattacaggtggcctgcatgcagtttataaatgcccttgtcacttctccttatgagcttgattttcgaatacatttaaggaatgaattcctccgttcaggactaaaaacaatgttaccagatctaaaagaaaaagagaatgatgagcttgatattcagttgaaagtatttgatgaaaacaaagaagatgacctaactgaattatcacaccgtctcaatgacattcgagcagaaatggatgatatgaatgaagtctaccatcttctatataatatgctgaaggacactgctgctgaaaattacttcttatctattctacaacattttttgcttatcagaaatgattattatatcaggccacaatattataaaataattgaggaatgtgtttcacagatagtgctacactgcagtggtatggatccagacttcaaatacaggcaaagattagacatcgatttaactcatctgatagattcttgtgtgaacaaggcgaaagttgaagaaagtgaacaaaaagctgcagagttttcaaagaagttcgatgaagaattcacagctcgacaggaagctcaagcagagcttcaaaaaagagatgagaaaatcaaagaacttgaagcagaaatccagcaacttcgaacccaggcacaagtactctcaagttcatcaggaattccaggtcctcctgcagcacctccattgccaggtgtagggccgcctccaccaccacccgcgccacctctacccggaggagctcctcttcctcctccaccacctcctttacctggaatgatggggataccaccaccacccccaccaccacttttatttgggggacctcctccaccaccaccccttggaggagttcctcctcccccaggaatatcacttaatctaccttatggaatgaagcagaaaaaaatgtataaacctgaagtgtccatgaagagaatcaattggtcaaagattgaacccacagaattatctgagaactgtttctggttaagagtcaaagaagacaagtttgagaatccagatctctttgccaaattggcattgaattttgctactcagataaaagttcaaaagaacgcagaagcattagaagaaaagaagactgggcctacaaagaagaaagtgaaagaactgagaattttggatcccaaaacagctcagaatctgtccatctttctgggatcatatcgcatgccatatgaagacataagaaacgttattctggaggttaatgaagacatgctgagtgaggctttaattcagaaccttgtgaaacatcttcctgagcagaagatactcaacgaattagcagagcttaagaatgaatatgatgacctctgtgagcctgaacaatttggagttgtgatgagctctgtgaaaatgttacagcctcgtctcagtagtatcctgttcaagctcacatttgaagaacacataaacaacatcaaaccaagcatcatagcagtaactcttgcctgtgaagaactgaagaaaagtgaaagctttaacagacttttagagttagttcttcttgttggaaactacatgaactcaggctcaagaaatgcccagtctttgggatttaagatcaacttcctttgtaagatcagagatactaaatcagcggatcaaaaaacaacccttttgcattttattgccgacatttgtgaggaaaaatatcgagatatcctaaaatttcctgaagaactggaacacgtagaaagtgcaagcaaagtttcagctcaaattctcaagagcaaccttgcatcaatggaacaacaaattgttcatctggaacgtgacatcaagaaattcccccaagcagaaaatcaacacgataagtttgtggaaaagatgaccatctttacaaagactgcccgagaacagtatgaaaaactctccaccatgcacaacaacatgatgaagctctatgagaatcttggagaatacttcatttttgactcaaagacagtgagcatagaagagttctttggtgatctcaacaacttccgaactttgtttttggaagcagtgagagaaaacaataagagaagagaaatggaagagaagaccaggagggcaaaacttgcaaaagagaaagctgaacaagaaaagttagaacgccagaagaaaaagaaacaactcattgatataaacaaagagggtgatgagactggtgtgatggataatcttctagaagccctacaatcaggtgcagcattcagagaccgtcgaaagcggattccaaggaatccagtggtaaatcatccctgtgcaacaagggctaatccaagatcagctacataaacggcctgagtgctgttttaaa

SEQ ID NO: 167437 - protein, 338 aa, Artificial Sequence
  derived and/or modified sequence
MFQAFPGDYDSGSRCSSSPSAESQYLSSVDSFGSPPTAAASQECAGLGEMPGSFVPTVTAITTSQDLQWLVQPTLISSMAQSQGQPLASQPPVVDPYDMPGTSYSTPGMSGYSSGGASGSGGPSTSGTTSGPGPARPARARPRRPREETLTPEEEEKRRVRRERNKLAAAKCRNRRRELTDRLQAETDQLEEEKAELESEIAELQKEKERLEFVLVAHKPGCKIPYEEGPGPGPLAEVRDLPGSAPAKEDGFSWLLPPPPPPPLPFQTSQDAPPNLTASLFTHSEVQVLGDPFPVVNPSYTSSFVLTCPEVSAFAGAQRTSGSDQPSDPLNSPSLLAL

SEQ ID NO: 167438 - protein, 195 aa, Artificial Sequence
  derived and/or modified sequence
MFQAFPGDYDSGSRCSSSPSAESQYLSSVDSFGSPPTAAASQETDQLEEEKAELESEIAELQKEKERLEFVLVAHKPGCKIPYEEGPGPGPLAEVRDLPGSAPAKEDGFSWLLPPPPPPPLPFQTSQDAPPNLTASLFTHSEVQVLGDPFPVVNPSYTSSFVLTCPEVSAFAGAQRTSGSDQPSDPLNSPSLLAL

SEQ ID NO: 167439 - DNA, 3776 bp, Artificial Sequence
  derived and/or modified sequence
cattcataagactcagagctacggccacggcagggacacgcggaaccaagacttggaaacttgattgttgtggttcttcttgggggttatgaaatttcattaatctttttttttccggggagaaagtttttggaaagattcttccagatatttcttcattttcttttggaggaccgacttactttttttggtcttctttattactcccctccccccgtgggacccgccggacgcgtggaggagaccgtagctgaagctgattctgtacagcgggacagcgctttctgcccctgggggagcaacccctccctcgcccctgggtcctacggagcctgcactttcaagaggtacagcggcatcctgtgggggcctgggcaccgcaggaagactgcacagaaactttgccattgttggaacgggacgttgctccttccccgagcttccccggacagcgtactttgaggactcgctcagctcaccggggactcccacggctcaccccggacttgcaccttacttccccaacccggccatagccttggcttcccggcgacctcagcgtggtcacaggggcccccctgtgcccagggaaatgtttcaggctttccccggagactacgactccggctcccggtgcagctcctcaccctctgccgagtctcaatatctgtcttcggtggactccttcggcagtccacccaccgccgccgcctcccaggagtgcgccggtctcggggaaatgcccggttccttcgtgcccacggtcaccgcgatcacaaccagccaggacctccagtggcttgtgcaacccaccctcatctcttccatggcccagtcccaggggcagccactggcctcccagcccccggtcgtcgacccctacgacatgccgggaaccagctactccacaccaggcatgagtggctacagcagtggcggagcgagtggcagtggtgggccttccaccagcggaactaccagtgggcctgggcctgcccgcccagcccgagcccggcctaggagaccccgagaggagacgctcaccccagaggaagaggagaagcgaagggtgcgccgggaacgaaataaactagcagcagctaaatgcaggaaccggcggagggagctgaccgaccgactccaggcggagacagatcagttggaggaagaaaaagcagagctggagtcggagatcgccgagctccaaaaggagaaggaacgtctggagtttgtgctggtggcccacaaaccgggctgcaagatcccctacgaagaggggcccgggccgggcccgctggcggaggtgagagatttgccgggctcagcaccggctaaggaagatggcttcagctggctgctgccgcccccgccaccaccgcccctgcccttccagaccagccaagacgcaccccccaacctgacggcttctctctttacacacagtgaagttcaagtcctcggcgaccccttccccgttgttaacccttcgtacacttcttcgtttgtcctcacctgcccggaggtctccgcgttcgccggcgcccaacgcaccagcggcagtgaccagccttccgatcccctgaactcgccctccctcctcgctctgtgaactctttagacacacaaaacaaacaaacacatgggggagagagacttggaagaggaggaggaggaggagaaggaggagagagaggggaagagacaaagtgggtgtgtggcctccctggctcctccgtctgaccctctgcggccactgcgccactgccatcggacaggaggattccttgtgttttgtcctgcctcttgtttctgtgccccggcgaggccggagagctggtgactttggggacagggggtgggaaggggatggacacccccagctgactgttggctctctgacgtcaacccaagctctggggatgggtggggaggggggcgggtgacgcccaccttcgggcagtcctgtgtgaggattaagggacgggggtgggaggtaggctgtggggtgggctggagtcctctccagagaggctcaacaaggaaaaatgccactccctacccaatgtctcccacacccaccctttttttggggtgcctaggttggtttcccctgcactcccgaccttagcttattgatcccacatttccatggtgtgagatcctctttactctgggcagaagtgagccccccccttaaagggaattcgatgcccccctagaataatctcatccccccacccgacttcttttgaaatgtgaacgtccttccttgactgtctagccactccctcccagaaaaactggctctgattggaatttctggcctcctaaggctccccaccccgaaatcagcccccagccttgtttctgatgacagtgttatcccaagaccctgccccctgccagccgaccctcctggccttcctcgttgggccgctctgatttcaggcagcaggggctgctgtgatgccgtcctgctggagtgatttatactgtgaaatgagttggccagattgtggggtgcagctgggtggggcagcacacctctggggggataatgtccccactcccgaaagcctttcctcggtctcccttccgtccatcccccttcttcctcccctcaacagtgagttagactcaagggggtgacagaaccgagaagggggtgacagtcctccatccacgtggcctctctctctctcctcaggaccctcagccctggcctttttctttaaggtcccccgaccaatccccagcctaggacgccaacttctcccaccccttggcccctcacatcctctccaggaagggagtgaggggctgtgacatttttccggagaagatttcagagctgaggctttggtacccccaaacccccaatatttttggactggcagactcaaggggctggaatctcatgattccatgcccgagtccgcccatccctgaccatggttttggctctcccaccccgccgttccctgcgcttcatctcatgaggatttctttatgaggcaaatttatattttttaatatcggggggtggaccacgccgccctccatccgtgctgcatgaaaaacattccacgtgccccttgtcgcgcgtctcccatcctgatcccagacccattccttagctatttatccctttcctggtttccgaaaggcaattatatctattatgtataagtaaatatattatatatggatgtgtgtgtgtgcgtgcgcgtgagtgtgtgagcgcttctgcagcctcggcctaggtcacgttggccctcaaagcgagccgttgaattggaaactgcttctagaaactctggctcagcctgtctcgggctgacccttttctgatcgtctcggcccctctgattgttcccgatggtctctctccctctgtcttttctcctccgcctgtgtccatctgaccgttttcacttgtctcctttctgactgtccctgccaatgctccagctgtcgtctgactctgggttcgttggggacatgagattttattttttgtgagtgagactgagggatcgtagatttttacaatctgtatctttgacaattctgggtgcgagtgtgagagtgtgagcagggcttgctcctgccaaccacaattcaatgaatccccgacccccctaccccatgctgtacttgtggttctctttttgtattttgcatctgaccccggggggctgggacagattggcaatgggccgtcccctctccccttggttctgcactgttgccaataaaaagctcttaaaaacgca

SEQ ID NO: 167440 - DNA, 3753 bp, Artificial Sequence
  derived and/or modified sequence
cattcataagactcagagctacggccacggcagggacacgcggaaccaagacttggaaacttgattgttgtggttcttcttgggggttatgaaatttcattaatctttttttttccggggagaaagtttttggaaagattcttccagatatttcttcattttcttttggaggaccgacttactttttttggtcttctttattactcccctccccccgtgggacccgccggacgcgtggaggagaccgtagctgaagctgattctgtacagcgggacagcgctttctgcccctgggggagcaacccctccctcgcccctgggtcctacggagcctgcactttcaagaggtacagcggcatcctgtgggggcctgggcaccgcaggaagactgcacagaaactttgccattgttggaacgggacgttgctccttccccgagcttccccggacagcgtactttgaggactcgctcagctcaccggggactcccacggctcaccccggacttgcaccttacttccccaacccggccatagccttggcttcccggcgacctcagcgtggtcacaggggcccccctgtgcccagggaaatgtttcaggctttccccggagactacgactccggctcccggtgcagctcctcaccctctgccgagtctcaatatctgtcttcggtggactccttcggcagtccacccaccgccgccgcctcccaggagtgcgccggtctcggggaaatgcccggttccttcgtgcccacggtcaccgcgatcacaaccagccaggacctccagtggcttgtgcaacccaccctcatctcttccatggcccagtcccaggggcagccactggcctcccagcccccggtcgtcgacccctacgacatgccgggaaccagctactccacaccaggcatgagtggctacagcagtggcggagcgagtggcagtggtgggccttccaccagcggaactaccagtgggcctgggcctgcccgcccagcccgagcccggcctaggagaccccgagaggagacgctcaccccagaggaagaggagaagcgaagggtgcgccgggaacgaaataaactagcagcagctaaatgcaggaaccggcggagggagctgaccgaccgactccaggcggagacagatcagttggaggaagaaaaagcagagctggagtcggagatcgccgagctccaaaaggagaaggaacgtctggagtttgtgctggtggcccacaaaccgggctgcaagatcccctacgaagaggggcccgggccgggcccgctggcggaggtgagagatttgccgggctcagcaccggctaaggaagatggcttcagctggctgctgccgcccccgccaccaccgcccctgcccttccagaccagccaagacgcaccccccaacctgacggcttctctctttacacacagtgaagttcaagtcctcggcgaccccttccccgttgttaacccttcgtacacttcttcgtttgtcctcacctgcccggaggtctccgcgttcgccggcgcccaacgcaccagcggcagtgaccagccttccgatcccctgaactcgccctccctcctcgctctgtgaactctttagacacacaaaacaaacaaacacatgggggagagagacttggaagaggaggaggaggaggagaaggaggagagagaggggaagagacaaagtgggtgtgtggcctccctggctcctccgtctgaccctctgcggccactgcgccactgccatcggacaggaggattccttgtgttttgtcctgcctcttgtttctgtgccccggcgaggccggagagctggtgactttggggacagggggtgggaaggggatggacacccccagctgactgttggctctctgacgtcaacccaagctctggggatgggtggggaggggggcgggtgacgcccaccttcgggcagtcctgtgtgaggattaagggacgggggtgggaggtaggctgtggggtgggctggagtcctctccagagaggctcaacaaggaaaaatgccactccctacccaatgtctcccacacccaccctttttttggggtgcctaggttggtttcccctgcactcccgaccttagcttattgatcccacatttccatggtgtgagatcctctttactctgggcagaagtgagccccccccttaaagggaattcgatgcccccctagaataatctcatccccccacccgacttcttttgaaatgtgaacgtccttccttgactgtctagccactccctcccagaaaaactggctctgattggaatttctggcctcctaaggctccccaccccgaaatcagcccccagccttgtttctgatgacagtgttatcccaagaccctgccccctgccagccgaccctcctggccttcctcgttgggccgctctgatttcaggcagcaggggctgctgtgatgccgtcctgctggagtgatttatactgtgaaatgagttggccagattgtggggtgcagctgggtggggcagcacacctctggggggataatgtccccactcccgaaagcctttcctcggtctcccttccgtccatcccccttcttcctcccctcaacagtgagttagactcaagggggtgacagaaccgagaagggggtgacagtcctccatccacgtggcctctctctctctcctcaggaccctcagccctggcctttttctttaaggtcccccgaccaatccccagcctaggacgccaacttctcccaccccttggcccctcacatcctctccaggaagggagtgaggggctgtgacatttttccggagaagatttcagagctgaggctttggtacccccaaacccccaatatttttggactggcagactcaaggggctggaatctcatgattccatgcccgagtccgcccatccctgaccatggttttggctctcccaccccgccgttccctgcgcttcatctcatgaggatttctttatgaggcaaatttatattttttaatatcggggggtggaccacgccgccctccatccgtgctgcatgaaaaacattccacgtgccccttgtcgcgcgtctcccatcctgatcccagacccattccttagctatttatccctttcctggtttccgaaaggcaattatatctattatgtataagtaaatatattatatatggatgtgtgtgtgtgcgtgcgcgtgagtgtgtgagcgcttctgcagcctcggcctaggtcacgttggccctcaaagcgagccgttgaattggaaactgcttctagaaactctggctcagcctgtctcgggctgacccttttctgatcgtctcggcccctctgattgttcccgatggtctctctccctctgtcttttctcctccgcctgtgtccatctgaccgttttcacttgtctcctttctgactgtccctgccaatgctccagctgtcgtctgactctgggttcgttggggacatgagattttattttttgtgagtgagactgagggatcgtagatttttacaatctgtatctttgacaattctgggtgcgagtgtgagagtgtgagcagggcttgctcctgccaaccacaattcaatgaatccccgacccccctaccccatgctgtacttgtggttctctttttgtattttgcatctgaccccggggggctgggacagattggcaatgggccgtcccctctccccttggttctgcactgttgcc

SEQ ID NO: 167441 - DNA, 1017 bp, Artificial Sequence
  derived and/or modified sequence
atgttccaggcttttccaggagactacgatagcgggtcccgatgtagttcttccccatcagcagaatcacagtacctatcttccgtcgacagctttgggtctccccctaccgccgccgcctcccaggaatgcgccggcctgggagagatgccaggttctttcgtgcccacagtaacagccattaccacctcccaggacctgcagtggctggtacagcccactctgataagctccatggctcagagccaggggcaaccacttgctagccaaccacccgtggtggacccctacgatatgccaggtacctcatatagcactccgggcatgagcgggtattctagtggcggcgctagtgggagtggaggcccatctacctccgggacaacgagtggacccgggccggcccgccctgctagagcacgccctcggcggccaagggaggagacactgacacccgaagaggaagagaaaaggcgcgtcaggagagaaaggaacaagctggccgcagccaagtgccggaatagaagaagagagcttaccgacagactccaggccgagactgatcagcttgaggaggagaaggctgaactggaaagcgagattgccgaattacaaaaggaaaaggagcgattagaatttgtactggtggcacacaaacccgggtgcaaaatcccttacgaggagggtcccggtcccgggccgctggctgaggtgcgcgacctgcccggcagcgcccccgccaaggaggacggattctcgtggctgttgccgcctcccccaccacctcctctgcccttccagacgtcacaggacgctccaccaaacctgaccgcaagcctttttacccactccgaggtccaggtacttggagaccccttcccagtggtcaatccgtcatacacgtcctccttcgtgctcacctgccccgaagtttctgctttcgccggggcccagcggacttccggctctgaccaaccaagtgatccactgaactccccgtcactgcttgccttgtag

SEQ ID NO: 167442 - DNA, 1017 bp, Artificial Sequence
  derived and/or modified sequence
atgttccaggccttccctggggactatgattctggcagccgctgcagcagcagccccagcgctgagagccagtacctgagctctgtggacagctttggcagccccccaacagctgctgccagccaggagtgtgccggcctgggggagatgcctggcagctttgtgcccaccgtgacagccatcaccaccagccaggacctgcagtggctggtgcagcccaccctcatcagctccatggcccagagccagggccagcccctggccagccagccccctgtggtggacccctatgacatgcctggcaccagctacagcaccccaggcatgagcggctacagcagcggcggggccagcggcagcggcggccccagcaccagcggcaccaccagcggccctggccctgcccggcctgcccgggcccggccccggcggccccgggaggagaccctgaccccagaggaggaggagaagagaagagtgagaagagagaggaacaagctggccgccgccaagtgcaggaacagaagaagagagctgacagaccggctgcaggccgagacagaccagctggaggaggagaaggccgagctggagagcgagattgctgagctgcagaaggagaaggagcggctggagtttgtgctggtggcccacaagccaggctgcaagatcccctatgaggagggccctggccctggccccctggccgaggtgcgggacctgcccggcagcgccccagccaaggaggatggcttctcctggctgctgcccccacctcctcctccacccctgcccttccagaccagccaggatgccccacccaacctgacagccagcctcttcacccacagcgaggtgcaggtgctgggggaccccttccctgtggtgaaccccagctacaccagcagctttgtgctgacctgcccagaggtgtctgcctttgctggggcccagaggaccagcggcagtgaccagcccagcgaccccctgaacagccccagcctgctggccctgtag

SEQ ID NO: 167443 - DNA, 1017 bp, Artificial Sequence
  derived and/or modified sequence
atgttccaggccttccccggcgactacgacagcggcagccggtgcagctcttcacccagcgcagagtcacagtacctgagcagcgtggactcttttggatctcctcctacagcggctgcctcacaagaatgtgctggactgggagaaatgcccggcagtttcgtcccaaccgtaactgcaataacgactagccaggacttacagtggctggtgcagcctaccctcattagctccatggcccagtcccagggacagcctctggcatctcagccccccgtagtggacccatacgacatgccaggcaccagctactccacccccgggatgtcaggatatagttctggcggagcgtctggaagcggaggcccgtcaacctccgggacaacaagcggtcccgggcccgcccggccggccagagcacgtcctagacgaccgagagaagaaacccttacaccagaagaggaagaaaaaaggagggtgcgccgagaacgcaataaactggctgccgccaaatgccgcaataggagaagggagctgaccgatcgtttacaagctgagaccgatcagctggaggaagagaaggcagagctggagtctgaaatagccgagctgcagaaggagaaagagcggctggagttcgtactggtggcccacaagccagggtgcaaaatcccatatgaggagggacctggaccgggaccactggccgaggtgcgggatttaccagggtccgcaccagccaaggaggatggttttagctggcttctcccccctccccccccacccccattaccgttccagactagccaggatgcaccaccaaatctcacggctagtctatttacacactctgaggttcaagtgcttggggacccattcccagttgttaacccctcatatacctcgagctttgtcctcacatgccccgaggtctcagccttcgcgggagcccagcgaacttcgggctctgaccagccatctgacccactgaacagcccatctctgctggcgctgtag

SEQ ID NO: 167444 - DNA, 1017 bp, Artificial Sequence
  derived and/or modified sequence
atgttccaggcattcccaggcgattacgattcggggtcgcgctgtagttcatctccctccgccgaatcccagtatctaagttccgtggactcattcggaagtcctccaaccgcagccgcaagccaggagtgcgccggtttaggtgaaatgcccggatcttttgtgcctacggtgacggcaatcacaacgagtcaagatctccagtggctagtgcagcccaccctgatatcatcgatggcccagagtcaggggcagccgctcgcctcccaacctccagtcgtcgatccctatgacatgcccggaacttcctattctacgcctgggatgtccggatactctagtggaggcgcatctggatctggtggtccttctacatcaggcaccactagtggaccaggccctgccagaccagccagggccagacctagacggccacgagaggaaaccctgaccccagaggaagaggaaaaaagaagggttcgacgtgaacggaacaaactcgcggctgccaaatgccggaatcgcaggagggagctaaccgacaggctgcaggctgaaacagaccagttggaagaggaaaaggcagagttggaaagtgagattgccgagctgcaaaaggagaaagaacgcctcgaattcgtactcgtcgcccacaagcctggttgtaagattccatatgaagaaggcccagggcctggaccactggcggaggtcagggacctgcctggttcagcaccagctaaggaagatggcttttcatggcttctgcctcctcccccacctccacccttgccgtttcagacctctcaggacgcacccccaaacttgactgccagcctgtttacccattcagaagtgcaggttttaggagatcctttcccggtggtgaatccctcatacacctccagcttcgtgttgacctgcccggaggtctctgccttcgccggagctcaacgaaccagtggttcagatcagccctcagaccccctgaactcaccgagtctcttagcgctctag

SEQ ID NO: 167445 - DNA, 1017 bp, Artificial Sequence
  derived and/or modified sequence
atgttccaggccttccccggcgactacgacagcggcagcagatgcagcagcagccccagcgccgagagccagtacctgagcagcgtggacagcttcggcagcccccccaccgccgccgccagccaggagtgcgccggcctgggcgagatgcccggcagcttcgtgcccaccgtgaccgccatcaccaccagccaggacctgcagtggctggtgcagcccaccctgatcagcagcatggcccagagccagggccagcccctggccagccagccccccgtggtggacccctacgacatgcccggcaccagctacagcacccccggcatgagcggctacagcagcggcggcgccagcggcagcggcggccccagcaccagcggcaccaccagcggccccggccccgccagacccgccagagccagacccagaagacccagagaggagaccctgacccccgaggaggaggagaagagaagagtgagaagagagagaaacaagctggccgccgccaagtgcagaaacagaagaagagagctgaccgacagactgcaggccgagaccgaccagctggaggaggagaaggccgagctggagagcgagatcgccgagctgcagaaggagaaggagagactggagttcgtgctggtggcccacaagcccggctgcaagatcccctacgaggagggccccggccccggccccctggccgaggtgagagacctgcccggcagcgcccccgccaaggaggacggcttcagctggctgctgcccccccccccccccccccccctgcccttccagaccagccaggacgccccccccaacctgaccgccagcctgttcacccacagcgaggtgcaggtgctgggcgaccccttccccgtggtgaaccccagctacaccagcagcttcgtgctgacctgccccgaggtgagcgccttcgccggcgcccagagaaccagcggcagcgaccagcccagcgaccccctgaacagccccagcctgctggccctgtag

SEQ ID NO: 167446 - protein, 2446 aa, Artificial Sequence
  derived and/or modified sequence
MDTGDTALGQKATSRSGETDKASGRWRQEQSAVIKMSTFGSHEGQRQPQIEPEQIGNTASAQLFGSGKLASPSEVVQQVAEKQYPPHRPSPYSCQHSLSFPQHSLPQGVMHSTKPHQSLEGPPWLFPGPLPSVASEDLFPFPIHGHSGGYPRKKISSLNPAYSQYSQKSIEQAEEAHKKEHKPKKPGKYICPYCSRACAKPSVLKKHIRSHTGERPYPCIPCGFSFKTKSNLYKHRKSHAHAIKAGLVPFTESAVSKLDLEAGFIDVEAEIHSDGEQSTDTDEESSLFAEASDKMSPGPPIPLDIASRGGYHGSLEESLGGPMKVPILIIPKSGIPLPNESSQYIGPDMLPNPSLNTKADDSHTVKQKLALRLSEKKGQDSEPSLNLLSPHSKGSTDSGYFSRSESAEQQISPPNTNAKSYEEIIFGKYCRLSPRNALSVTTTSQERAAMGRKGIMEPLPHVNTRLDVKMFEDPVSQLIPSKGDVDPSQTSMLKSTKFNSESRQPQIIPSSIRNEGKLYPANFQGSNPVLLEAPVDSSPLIRSNSVPTSSATNLTIPPSLRGSHSFDERMTGSDDVFYPGTVGIPPQRMLRRQAAFELPSVQEGHVEVEHHGRMLKGISSSSLKEKKLSPGDRVGYDYDVCRKPYKKWEDSETPKQNYRDISCLSSLKHGGEYFMDPVVPLQGVPSMFGTTCENRKRRKEKSVGDEEDTPMICSSIVSTPVGIMASDYDPKLQMQEGVRSGFAMAGHENLSHGHTERFDPCRPQLQPGSPSLVSEESPSAIDSDKMSDLGGRKPPGNVISVIQHTNSLSRPNSFERSESAELVACTQDKAPSPSETCDSEISEAPVSPEWAPPGDGAESGGKPSPSQQVQQQSYHTQPRLVRQHNIQVPEIRVTEEPDKPEKEKEAQSKEPEKPVEEFQWPQRSETLSQLPAEKLPPKKKRLRLADMEHSSGESSFESTGTGLSRSPSQESNLSHSSSFSMSFEREETSKLSALPKQDEFGKHSEFLTVPAGSYSLSVPGHHHQKEMRRCSSEQMPCPHPAEVPEVRSKSFDYGNLSHAPVSGAAASTVSPSRERKKCFLVRQASFSGSPEISQGEVGMDQSVKQEQLEHLHAGLRSGWHHGPPAVLPPLQQEDPGKQVAGPCPPLSSGPLHLAQPQIMHMDSQESLRNPLIQPTSYMTSKHLPEQPHLFPHQETIPFSPIQNALFQFQYPTVCMVHLPAQQPPWWQAHFPHPFAQHPQKSYGKPSFQTEIHSSYPLEHVAEHTGKKPAEYAHTKEQTYPCYSGASGLHPKNLLPKFPSDQSSKSTETPSEQVLQEDFASANAGSLQSLPGTVVPVRIQTHVPSYGSVMYTSISQILGQNSPAIVICKVDENMTQRTLVTNAAMQGIGFNIAQVLGQHAGLEKYPIWKAPQTLPLGLESSIPLCLPSTSDSVATLGGSKRMLSPASSLELFMETKQQKRVKEEKMYGQIVEELSAVELTNSDIKKDLSRPQKPQLVRQGCASEPKDGLQSGSSSFSSLSPSSSQDYPSVSPSSREPFLPSKEMLSGSRAPLPGQKSSGPSESKESSDELDIDETASDMSMSPQSSSLPAGDGQLEEEGKGHKRPVGMLVRMASAPSGNVADSTLLLTDMADFQQILQFPSLRTTTTVSWCFLNYTKPNYVQQATFKSSVYASWCISSCNPNPSGLNTKTTLALLRSKQKITAEIYTLAAMHRPGTGKLTSSSAWKQFTQMKPDASFLFGSKLERKLVGNILKERGKGDIHGDKDIGSKQTEPIRIKIFEGGYKSNEDYVYVRGRGRGKYICEECGIRCKKPSMLKKHIRTHTDVRPYVCKLCNFAFKTKGNLTKHMKSKAHMKKCLELGVSMTSVDDTETEEAENLEDLHKAAEKHSMSSISTDHQFSDAEESDGEDGDDNDDDDEDEDDFDDQGDLTPKTRSRSTSPQPPRFSSLPVNVGAVPHGVPSDSSLGHSSLISYLVTLPSIRVTQLMTPSDSCEDTQMTEYQRLFQSKSTDSEPDKDRLDIPSCMDEECMLPSEPSSSPRDFSPSSHHSSPGYDSSPCRDNSPKRYLIPKGDLSPRRHLSPRRDLSPMRHLSPRKEAALRREMSQRDVSPRRHLSPRRPVSPGKDITARRDLSPRRERRYMTTIRAPSPRRALYHNPPLSMGQYLQAEPIVLGPPNLRRGLPQVPYFSLYGDQEGAYEHPGSSLFPEGPNDYVFSHLPLHSQQQVRAPIPMVPVGGIQMVHSMPPALSSLHPSPTLPLPMEGFEEKKGASGESFSKDPYVLSKQHEKRGPHALQSSGPPSTPSSPRLLMKQSTSEDSLNATEREQEENIQTCTKAIASLRIATEEAALLGPDQPARVQEPHQNPLGSAHVSIRHFSRPEPGQPCTSATHPDLHDGEKDNFGTSQTPLAHSTFYSKSCVDDKQLDFHSSKELSSSTEESKDPSSEKSQLH

SEQ ID NO: 167447 - DNA, 9732 bp, Artificial Sequence
  derived and/or modified sequence
gctggaggcaggaatgtgcctgcttactaatgagcgacgtgcaccggcgcgcacggcccggccaccgctgcggctgcggcggccggcggcggcccgttgtcaggtggagcctttgaattttttaaaagaccatagtaatcagatctacttgaaaaattaagtgaattgatttggttggaatgctcttttaccgatgctttaacatacagccactagattcccagaagttgtgcatgagttcctgtgaggagagttggcatcttggaaatcaaagacggttgtgatgcagttttttgatatgaggataacaggaagcgtcaggacaatcatgcccataagaactctaaactgttcagatcattttatcttagtgaaactggcaattgaactttgctctagttgatgggcaaaatttctcctagactattcatcatcccaatttcatcctagttgaaaattttcaaatgccataagaaatctttatagatttgcacttagcttttggatggacgtttctacaatggagagaactgtgttatagccctggtccaaggacattactagctaatgcccatcgactgtggtgtgcgtgtggaaggttccaaagagaaggagcaatcagcaagtttgcagacaccctggaacatggaagcaaccaagctttaagaagcacagctttggagacactccatgagtctgcactgctttcaggggaactagcacttaagaccttgtgtaacaaaatggacactggggacacagctctaggacaaaaagctacctcaaggtctggagaaactgataaagcatcaggtagatggagacaggaacaatcagctgttattaagatgagcacttttggcagtcatgaaggacagcggcaaccacaaatagagcctgagcaaatcggaaacacagcatcagcacaactgtttggttctgggaaactggcctcccctagtgaagtggtgcagcaagtcgcagagaagcaatatccaccgcatcgtccgagtccttactcatgccaacactcactctctttccctcagcactcattgccacagggggtcatgcacagcaccaagccacatcagagcctcgaaggtcctccgtggcttttccctggccctttgccatccgttgcctctgaggacttatttccttttcctatacatggccacagtggtggttatcctagaaaaaagatttcaagtctgaaccctgcttatagccaatactcccagaaaagtattgaacaggcagaagaggctcacaagaaagagcacaaacccaaaaagcctggcaagtacatttgcccttactgcagcagagcgtgtgccaaacctagtgtactgaaaaaacacatcaggtcccatactggggagcggccatatccatgtataccttgtggtttctctttcaagacaaagagcaatttgtacaagcacaggaagtcacatgcccatgcaattaaggcaggattagtacctttcacagagtcagctgtatctaaattggacctagaggctggttttattgatgtagaagcagaaatacattcagatggtgaacagagtacagacacagatgaggagagttctttatttgccgaggcttctgacaaaatgagtcctggtccacccatcccactggacattgccagcagaggcggctatcatgggtcattggaagaatcattgggaggtccaatgaaggtgccgattttgattatccctaaaagtgggattcctctccctaatgaaagctctcagtatattggccctgatatgctaccaaatccatctttaaatactaaggctgatgattcgcacacagtcaaacagaaacttgcactaagactgtcagagaaaaaaggacaagattctgagccatcgctcaaccttctgagcccgcacagtaaaggaagcactgattctggttacttttctcgctcagaaagtgctgagcagcaaataagccctcccaacacaaatgcaaagtcttatgaagaaatcatctttggaaaatactgtcggcttagtccgagaaatgcactcagtgttacaaccacaagtcaggagcgtgccgcaatgggtaggaagggcataatggaaccattacctcacgttaacaccaggttagatgtcaagatgtttgaagatcctgtttcacagctgatcccaagcaagggagatgtcgaccccagtcaaacgagcatgctgaaatccactaagttcaacagtgagtccagacaaccccagattattccatcatctatcaggaacgaaggaaaactttatccagcaaacttccaaggcagcaacccggttctcttagaagctcctgtagactcttcaccccttattagaagcaactcagtgccaacttcttcagcaactaatctaactattcctccttctttgagaggaagtcactcatttgatgaaaggatgactggttccgacgatgtattctatccagggaccgtgggcataccccctcagcgcatgctaagaagacaagcggcatttgagctgccttcggtacaggagggccacgtggaagtcgagcaccatggcaggatgttgaagggtatcagcagttcatccctgaaggaaaagaaattgtctcctggggacagggttgggtatgactatgatgtctgtcggaaaccctataagaagtgggaggactctgaaacaccaaagcaaaactacagggacatttcctgcttgagttctttaaagcatggtggagaatatttcatggatcccgtggtgccattgcagggagtaccaagcatgtttggaactacctgtgaaaacaggaaacgccggaaagagaagagcgtaggggatgaagaggacacgcccatgatctgcagcagcattgtaagcactcctgtgggcatcatggcttccgattatgaccccaaactgcagatgcaggaaggagtcaggagtggatttgccatggctggacacgaaaacctttctcatggtcacacggaacgctttgacccatgtcggccccaactgcagcctggaagtccatctcttgtgtcagaggagtcaccttcagccattgattcagacaagatgtcagacctagggggcaggaaacctcctggaaatgtgatttctgtgattcagcacaccaactcactgagccgacccaattcatttgaaaggtctgagtcagccgaacttgtggcttgcacacaggataaagccccttccccttcagagacttgtgacagtgagatttcagaagccccagtgagtcctgagtgggctccacctggggatggtgcagaaagtggggggaaaccctctccatctcagcaggtgcagcagcagtcctatcacacacagcccaggctagttcggcaacacaacatccaggttcctgagattcgagtgaccgaggagcctgataaacctgagaaggagaaggaagcccagagcaaagagccagagaagcctgtggaagaatttcagtggccccagagaagtgagaccctttcccagctccccgcggagaagttgccacccaaaaagaagcgtctgcgacttgcagatatggagcactcctcaggggagtccagctttgaatccacaggcacaggcctctcccgcagccccagccaagaaagcaacttgtcccacagctccagtttctccatgtcttttgaaagagaagaaaccagtaagctttctgcacttcctaagcaggatgagtttgggaagcattcagagtttctgactgtccctgctggttcatactcattgtctgtcccaggccatcaccaccagaaagagatgcgacgctgctcatcagagcagatgccttgtcctcacccagcggaagtcccagaagttcggagcaaatcatttgattatgggaatctgtcccatgctcctgtgtcgggagcagcagcctccacggtatcaccgtccagggagaggaagaaatgctttctggtgcggcaagcttccttcagtggctccccagaaatctcccagggcgaggttggcatggatcagagcgtgaagcaagagcagctggagcacctgcatgctggcctccggtccgggtggcaccatggcccgcctgctgtgctgcctcctcttcagcaagaggacccagggaagcaggtggcgggtccttgtcccccgctgagctcggggccactgcacctggcccagccacagatcatgcacatggacagtcaggaatctttgagaaatcccttgatccaaccaacatcctatatgacaagcaagcacttacctgaacagccacacttatttccacatcaagagacaattccattttctccaatccagaatgccttgtttcagtttcagtatcctacagtttgtatggttcatttaccagctcagcagcctccctggtggcaggcacatttcccacatccctttgctcagcaccctcagaagagctatggcaagccctcttttcagacagaaatccattcgagctatcccttagagcatgtggcagagcacactggaaagaaacctgctgagtatgcacacacgaaagagcagacctacccatgttattcaggagcatcagggctacacccaaagaaccttcttccaaagtttccatcagaccagagcagtaagtcaactgaaacgccctctgagcaggttcttcaagaagattttgcctcggcaaatgctgggtctttgcagtccctcccaggaacagtggttcctgttcggatccagacgcacgtaccatcctatggaagtgtcatgtacacaagcatttctcagatacttgggcagaatagccctgccattgtcatatgcaaagtcgatgagaatatgacccaaaggacactggtcaccaacgcagccatgcaagggataggattcaacattgcccaggtgctggggcagcatgcgggcttggagaagtaccccatttggaaagcacctcagactttgcccctcggcttagaatcctccatccccttgtgtttaccttccacctctgacagcgtggccaccctgggaggtagcaagcgaatgctttctccagccagtagcttggagctcttcatggaaaccaagcagcagaaaagggtcaaagaagaaaagatgtacggacagattgtggaggagcttagtgctgtggagctgaccaactcagacatcaaaaaggacctctcccgcccccagaaaccccagctggttcgacaaggatgtgcttctgagccaaaagatggcttgcagtcagggtcatcttccttctcctcgctgtcgccctcctcatctcaagactatccttctgttagcccgtcttccagggagccattcctgcccagcaaggagatgctttccggttcccgggcaccacttccggggcagaagtccagtgggccttctgaaagcaaagaatcttcagatgaattagatatcgatgagacggcatcggacatgagcatgagcccacagagttcttcattaccagcaggagatggtcagctggaagaggaagggaagggccacaagcggcctgttggcatgctggtccgcatggcctctgcccccagcgggaacgtggcagactcaactcttcttctcacggacatggcagatttccagcagattcttcagttccccagtctgcggacaacaactactgtgagttggtgcttcttgaattatacaaaacccaattatgtgcaacaggccaccttcaaatcctcggtttatgcttcatggtgcattagttcctgtaatccaaacccatcaggattgaacaccaagaccacgctggctcttctgaggtccaagcaaaaaatcactgcagaaatttatactctggctgctatgcataggcctggaaccggcaagcttacatcatcaagtgcttggaagcagtttactcagatgaaacctgatgcgtcctttttatttggcagcaaactagaaaggaaactagtgggaaatatcttaaaggaaagagggaaaggagatattcatggagataaagatattggatccaaacaaactgagccaatccgaattaaaatatttgaaggagggtacaaatcgaatgaagattatgtatatgtcagaggacgtggccggggaaagtacatttgtgaagaatgtgggattcgctgtaagaagccaagcatgctcaaaaaacacatccgtacccatactgatgttcggccttatgtatgcaagttatgtaactttgccttcaaaacgaaaggaaacctaacgaagcatatgaaatctaaagcacacatgaaaaaatgcctggaattgggagtctcaatgacatcggtggatgatacagaaactgaggaagcagaaaatttggaagatttgcacaaagcagcagagaagcatagcatgtccagcatttcaactgatcatcagttctccgatgctgaggaatcagatggtgaggatggagatgataatgatgatgatgatgaagatgaagatgactttgacgaccagggagatttaacaccaaaaacaagatcaagaagcaccagtcctcagcctcctagattctcctccttgcctgtgaatgttggcgccgtaccccacggggttccttcagatagttccctgggacattcttcgttgatcagctatttggttactttgccaagtattcgagttactcagcttatgacacccagtgattcatgtgaagatacccagatgacagaataccagaggctattccagagcaaaagtacggactcagaaccagacaaagacagattggacatacctagttgtatggatgaggagtgcatgctaccttcagagccaagctcctctcccagggacttctcaccctcaagccaccattcctctccaggatatgattcttcaccctgtcgagataattcaccaaagaggtatctgatacccaaaggagatttatctcccaggagacatttatcacctaggagagatctgtcacccatgagacatctttcaccaagaaaggaagctgcattgagaagagagatgtcccaaagagatgtttcaccaagaaggcatttgtctccaaggaggccagtgtctcctgggaaagatatcacagcaagaagagacctctctcctagaagagagagaagatacatgaccacaataagagcgccatctcccagaagggctttataccataacccaccattgtccatgggacagtatttgcaagcagagccaattgtattggggcctcctaatttaagaagaggattacctcaggttccttacttcagtctctatggagaccaagaaggtgcttatgaacatccaggctccagccttttccctgagggtcctaatgactatgtcttcagtcatcttccactccactctcagcaacaagtgcgagcccctatccccatggtgcccgttggtgggatccagatggttcactccatgccgccagccctttccagtttacatccttcacccacattgcccctgccaatggagggctttgaggagaagaaaggcgcgtcaggggagtccttctccaaggacccctatgtgctttctaagcagcatgagaagcgaggtcctcacgctttgcagtcatctggtccacctagcactccctcctctcctcggctgttgatgaaacagagcacttcggaagacagcctaaacgcaacagagcgggaacaggaggaaaatatacagacttgtacaaaagccattgcctctctccggattgccacggaagaggcagctctgctcgggccagatcagccagcgcgggtgcaggagccccaccagaaccccctgggaagtgcacatgttagcattagacactttagtagacctgagccaggtcagccctgtacctcagccacccaccctgacttgcatgatggtgaaaaggacaattttggtacatcacagactccattagctcactccacgttttacagcaagagttgtgtggatgacaagcagttggactttcacagcagcaaggaattatcttcaagcacagaggaaagcaaagatccttcatcagaaaagagtcagctacattgatctatgatgcatggagactttcatttccacattttcccatttttttgtttttgtttttctagaaatggaggtaatccagtttatagcatgcctgtcctaagttacagtagtttgctattatatatacttttgttatatcaaaagaattaggtaaattaacaagtcatcatgagcctgaccaaaacaaaatttgaaattaacctattgggtctggtacttttaaaattgtacagatgtttgtgccttttctttactttgcttatattcttataagcattttttagcagtaatttgtacatattttagaatttgtgtatctgctttgtaataaatgtaatttctttccttttttggacacttggatctaaatgatgtaaagcaaaacagcatcaatatatatgtgaggttgcactaaaacatatttttatatgattaaaactgaacagcttttatgtacagctctgattctgtaatactaatatttatttactttgtttcataaattgtacattttttcttaatgttgtggattgcttttctatgtgaagcatgggatttactgttgcgtaactagaacaaaaatgtacattgtaaacaagatatttaaactagagtatcttattctgcacttatgcattagttaaaaaaagataaaggatgtatcagtcagttcttaactcttgtatatttttttgtctcttgtttgctggattgactataacttaagtgctgattgtgattttaaaatgatagtaccgtaaagcattaaagtaaacaatgtgctattgtgagttttttcaaagctttataaatcagttataaataatattaaaagtatttggtcttatgtgaacatgttgatctatatactcatctaaaaatatgggaaaacattccaccccatgtaaatatgtacaagtgcatcactggtacaattttatgtaactcagttggacactaggttgccacagacctatgctaggtgtctttaaaaaattaaggtgacaaagcacatgggactgtgtagagcttggttatcggccggcccggtggcttggcaggcagtgctgtgcgctgctcatggagaagacctgggcttagcaatctccttagttcttgctacacaggatggtgactggaactaaggctacacagagggtcgcacttggactctgagggttgggtgtggaagggggaaaaggagatggagacctgctccccagctcttcctgtcagccggtttacatgggaacagggttaacatctgtgttaggggaggtcaccttaccctttttcataggggaagagtgtcacactcctggctatctcagggggaatggggaaaagaatctttcaagggcaaagaactcgtgggaggatgtctgttgtatgtaatactcacaatggcttttggttagtgttgaaggtgggaagagcatttgtaggtccagaagagtgaaagagagggaggggtgcagcaacatgtgcacaggcacgcacatgtgtgcacgcacacatacaatctgggttatctttgtgctatatagtggattataattctgtgaaaccaagtttgtatattgaattacattaaggagtgttctttaaaaagagaaataaatatacaattacatgcttgaaaaaaaaa

SEQ ID NO: 167448 - DNA, 7341 bp, Artificial Sequence
  derived and/or modified sequence
atggatacaggcgacaccgccctgggccagaaggcaacaagccgtagcggagagacagacaaagcctctgggcggtggcggcaggagcagtcagccgttataaagatgtccacctttggcagtcatgagggtcaaaggcagcctcagattgagccggagcagattggcaatactgcctcagcacagttgttcgggtcgggaaaactggcctctccctctgaagtcgtccagcaggttgccgagaaacagtacccaccgcaccgaccctcaccttattcctgtcagcacagcctctctttccctcaacactctctgccgcagggcgttatgcacagcaccaaaccacaccaatcgctggaggggccaccctggctgtttcccggtccattgccgtctgtcgcttcagaagacctgttcccttttcctatccatggacattccggcggataccccaggaaaaagatttcctccctgaaccccgcatatagtcagtattcccagaagtcgattgagcaagcggaagaggctcacaagaaggagcacaaacccaagaaaccaggcaagtatatttgcccatactgctctagggcatgtgctaagccaagcgtcctgaagaaacatatccgctcccacactggcgagcgtccttacccctgcatcccctgtggttttagcttcaagacaaagtcaaatctctacaaacatcgaaagtcccacgcacacgctattaaagccgggctggtgcctttcaccgaatccgcggtatctaagctcgatctggaggcgggctttattgatgtagaggccgaaatccatagcgacggggagcagagtaccgataccgacgaggagagttcactgtttgccgaggccagtgacaagatgtcaccaggtccacccatcccactcgatattgccagtcgaggggggtatcatggaagcctggaagaaagcctcggaggtccaatgaaagtgcctattttaatcatccccaagtctggcatccccctccccaatgaatcctcccagtatattggtcctgatatgctgcctaatcctagcctgaacactaaggccgacgactctcacacagtgaaacagaagctggccctgaggctaagtgagaaaaagggtcaagatagcgagccttcattgaacctgctgtctccccatagtaaaggaagcactgacagcggatatttctcccgaagtgagtcggcggaacaacagatttcacctcccaataccaatgcaaagagctacgaggagattatctttggcaagtattgtcgactgagtcctcgcaatgcactgtcagtgacaacaacgtcacaggagagggcagcaatgggacggaagggcatcatggaacctctgccgcacgtgaacacgagacttgacgtgaaaatgtttgaggaccctgtgtctcagcttattcccagcaagggggacgtggatccatctcagacatcgatgctgaagtcaaccaaattcaattctgaatcaaggcagccccaaatcataccgagcagcattcgcaatgaaggaaagttgtatccagccaattttcagggtagtaatcccgtattgttggaagctcctgtcgattcctcacccctcatcaggtctaattccgtgccaaccagcagtgccactaacctgacgattccaccctctcttcgtggttcacatagctttgatgagcgcatgacaggttcagatgatgtgttctacccggggaccgtgggcattcccccccagaggatgttaaggcgacaggcggcctttgagcttccgtcagtccaagaagggcatgttgaagtggagcaccatgggcgcatgctgaaggggatcagttcatcatctctgaaagaaaagaagttgtcccccggggatagagttgggtatgattacgacgtatgccgtaaaccttacaaaaagtgggaagacagtgagacccctaagcagaattaccgggacatcagttgcctgagctccctgaagcatggcggagagtatttcatggatccagtcgtgccacttcagggggtcccatctatgttcggtacaacatgcgagaaccgcaaacggagaaaggaaaaaagcgtcggtgacgaagaggatacaccaatgatctgttccagcattgtgagcacccccgtgggaatcatggcctcagattatgaccctaaattacagatgcaggaaggcgtcagaagcggattcgccatggctggacacgagaacctgtctcatgggcatacagaacgcttcgacccctgcaggccacaactgcaacccgggtctccttctttagtttcagaagagtcccctagcgccatcgacagcgataaaatgagcgacctgggaggccgaaaacctcctggtaatgttatctccgttatacagcacaccaactctctgagtagacccaacagctttgagcggtctgagtctgcggagttagtggcttgcactcaggacaaggcaccttccccatctgagacctgcgactctgagataagcgaggcgcccgtctcacccgagtgggcgcctcctggggacggcgcagaatcgggcgggaagccctcgcctagccagcaggttcaacaacagtcttaccacacccagccccgactggttcgacagcataatattcaggtgccagaaattcgggtgacagaggagcctgataagcccgagaaagaaaaggaggcccaatctaaggagcctgaaaagcccgtcgaagagttccagtggccccagcgctccgagaccttatcgcagcttccggcagagaaactgcccccaaagaagaagcgcctgcgcttggccgacatggagcattcttctggcgaatcaagttttgaaagtaccggtaccgggttgtctagaagtccgtcccaagagagcaacttgagccattcaagtagcttttccatgagctttgaacgggaggaaacttcaaagctctccgcacttcccaaacaggatgagtttggtaaacatagcgagttcctgaccgtgccagccgggtcttattcactcagtgtccctgggcaccaccaccaaaaggagatgagacgatgctcctcagaacagatgccttgtccgcacccagcagaggtccccgaagttcgctccaagtcatttgactacggaaacctctctcacgcgccagttagtggtgcggccgccagtacagtgagcccttcaagggaaagaaagaagtgtttccttgtacggcaggccagctttagcgggtctccagagatcagccagggggaagtcggcatggaccagtcggtgaagcaagaacaactagagcacttgcacgccggcctgcgcagtggatggcaccacggcccaccagcagtattgcccccactgcagcaggaggatccaggcaaacaggtcgctggcccttgcccgcctctgtcaagcggccccctgcatctggctcagcctcagatcatgcacatggactctcaggaaagtctcaggaacccactgatccaacctaccagctatatgacgtcaaagcacctgcctgagcaaccacatctgtttccccaccaggaaacaatccccttttcccctatccaaaatgccctttttcaattccagtatcccacagtctgtatggttcacctgccggcccaacagccaccctggtggcaggcacactttcctcacccttttgcccaacaccctcagaagtcttacggcaagccctcatttcagacagagatccactcatcctaccccttagagcacgtggcagagcataccggcaagaaaccggccgagtacgcccacaccaaagagcagacctacccatgttacagcggagcctccggtttacacccaaaaaatctgctgccgaagttcccttcggatcaatcctctaaatccacagagactccatctgaacaggtgcttcaagaggatttcgcctccgccaacgccgggagtctgcaatccctgccaggaaccgtggtgccagttcggatccaaacacatgtccccagctatggatcggttatgtatacatccatatcccaaatcttaggccagaactcacccgcaatagtcatttgcaaagtagatgaaaacatgacacagagaaccctggtgacaaatgcagcaatgcaagggatcggctttaacatcgcccaggtcctaggccagcacgcaggacttgaaaaatatccaatctggaaagcccctcagactctgccactaggcttggagagctctatccctctgtgtctccctagtacttctgattcagttgcgaccctgggcgggagtaagaggatgctgagccctgcctcttcgctggagcttttcatggaaactaagcagcaaaaacgggtgaaggaagagaagatgtatggccagatcgtggaagagcttagcgcggtagagctgaccaactccgatatcaagaaggatctgtcaagacctcagaaacctcagctcgtccgccagggctgcgcatcagagcccaaggatggactccagtcggggtcttcttccttcagctccttgtcaccctcctctagtcaggactacccttccgtgtcccccagcagcagagagccatttctcccgtctaaggagatgttatcagggtctcgtgctcccctcccaggacagaagagcagtggtccaagtgagtccaaagagtcttccgatgagctagacattgatgaaaccgctagcgacatgagcatgtccccgcaaagcagcagtctgccagcaggcgacggccagctagaagaagaaggcaagggtcacaaaagacctgtaggcatgctggtgaggatggcaagcgcccctagcggtaacgtggccgactctaccctcttgctaactgacatggccgactttcagcagattttgcagtttcccagtctgagaacgacaaccactgtgagctggtgtttcctcaactataccaaacccaactacgttcaacaggctacgttcaagagctctgtgtacgcgtcttggtgcatcagttcatgcaaccctaatcccagcggcctcaacacaaaaacaacactggcactcctgaggagtaaacagaagattaccgccgagatttatactctggccgccatgcaccgaccaggaaccgggaaacttacgtcgtcttctgcctggaagcagttcacacagatgaagcccgatgctagctttctttttgggtcaaagctggagcgaaagctggttggcaacattttaaaggagcgaggtaagggcgacatccacggggataaggacataggctccaagcagaccgagccgattcgtatcaaaatattcgagggcggctataagtctaacgaagactacgtttacgtgagaggaagagggagagggaaatacatttgtgaggagtgtggcattcgctgcaagaagccaagtatgctgaaaaaacatattaggacccacaccgatgttcgaccatacgtctgtaagctgtgcaattttgcatttaagacaaaaggaaatctgaccaaacacatgaagtcaaaggcccacatgaaaaaatgccttgagcttggcgtgtcaatgacttcggtggatgacaccgagaccgaagaggcagagaatctcgaggacctgcataaggctgccgagaagcactccatgagttcgatctctaccgaccaccagttttctgatgctgaggaaagtgacggcgaggatggcgatgataatgatgatgacgacgaagatgaggacgacttcgacgatcagggcgacctcacaccaaaaacgaggtccaggagcacttctcctcaacctcctcgcttctcttctcttccagtcaatgtcggcgccgtgccgcatggcgtcccctccgacagttcgctgggacatagctcacttattagctacctcgtaactcttcccagcattagagtgacgcaactgatgaccccatcagactcttgcgaggatacacagatgactgagtaccagaggctgtttcagtcaaagtctactgacagtgagccggacaaggatcgactcgacatccccagttgcatggatgaagaatgcatgctaccctcagaacccagctctagtcctcgggacttcagtccaagttcacatcatagtagcccagggtacgattcaagtccctgccgtgataatagcccgaagagatatctgattcctaaaggtgacttgagccccagaagacatctcagccctagaagggatttatctcccatgagacatctgagcccccgaaaagaggccgccctacggcgggagatgtctcaaagggacgtgtcccccaggaggcatctttccccacgtcgacccgtgagtccggggaaagacataaccgctcgcagggacctttcacctaggcgcgagaggcgatatatgactaccatccgcgcaccttcaccaaggcgggcactctatcacaacccaccactgtcaatgggacaatacttgcaagcggagcctatcgtgttgggtccacccaacctgcgccgtggtctgcctcaggttccctatttcagcctgtacggcgatcaggaaggggcctacgagcatccggggtcctctctgtttccagaggggccaaacgattacgtttttagccacctccctcttcactcgcagcaacaggtgagagctccaatcccaatggtccccgtgggcggcatccaaatggtgcactctatgcctcccgccttatctagccttcatccttcacccactctgccactgccaatggaaggattcgaggagaaaaagggggcgtcaggggagtcattctcaaaggatccttatgtcttaagcaaacagcacgagaagaggggacctcacgcactgcagagcagtgggccaccatcaacgccttcttctcccagactactgatgaaacaaagcactagcgaagactcacttaacgccactgagcgagagcaggaggaaaatattcagacatgcaccaaggctatcgccagcctgcggatcgcaaccgaagaggcagctctcctgggcccagatcaaccagcaagggtacaggagccccatcaaaatcccttagggtctgcccacgtgtcgatacggcacttttctcgccccgagcctggacagccttgcacatccgcaactcatcccgacctccacgacggcgagaaggacaactttggtacctcacaaacacccctggcacactctaccttttattccaagtcatgcgtggatgataagcagctcgatttccatagttcaaaggaactgagctcaagcaccgaggaatcaaaagatcctagttcagagaagtctcagctccactag

SEQ ID NO: 167449 - DNA, 7341 bp, Artificial Sequence
  derived and/or modified sequence
atggatactggcgacaccgctctaggccaaaaggcgacctcacgcagcggcgaaacagacaaggcttctggtagatggcggcaggagcagtctgctgtgataaaaatgtctaccttcggtagtcatgagggccagagacagccacagatcgagccggaacagatcggtaacacagcaagtgcccagctgttcgggagcggcaaattggccagtccatcggaagttgtgcagcaggtggcagagaagcagtatcctccccatcggccctccccttactcgtgccaacattctttgtcatttccacaacacagcctcccccaaggtgtgatgcactccacaaaaccacatcaaagcttggaagggccgccctggttattccccggcccactgccatctgtggccagtgaggatctttttccttttcctattcacggtcacagtggcggctatcctagaaagaaaatctctagcctaaacccagcctactcccaatacagccagaaatcaattgaacaggcggaagaggcccacaaaaaggaacacaagccaaagaaacccggcaagtatatctgtccttactgttccagagcctgcgcaaagcccagtgtcctaaagaagcacattcggagtcacacgggtgagcgaccatacccttgcatcccttgcggattttcgttcaaaaccaagtctaatctatacaagcaccgcaagagtcatgcacacgctattaaggccggcctcgtgccattcacagaatctgctgtgtccaaactggatctagaagcgggctttatagatgttgaagcggaaattcactccgatggggagcagtccacagatacagacgaggaaagttccttgttcgccgaagctagcgataagatgagtccgggacctcctatcccactggatatcgcatcaagggggggataccacggctcgctcgaagagagcctcggcggcccgatgaaggtcccgatcctcatcatcccaaaatcaggtattccactcccaaatgagagcagccagtacattggcccagatatgttgccgaatccctcattaaacactaaggccgatgatagccatacagtgaagcagaagcttgcccttagactcagcgaaaaaaaaggtcaagacagcgagcccagtctgaatcttctgtctcctcacagtaaaggctccaccgattcagggtatttttcccgatccgagagcgcagaacagcagatctctcccccaaacaccaacgctaagtcatatgaggaaatcattttcggaaagtattgtcggctttctccaaggaacgccctttcggtgacaactacctcccaagagcgtgccgctatgggacgcaaaggaattatggaacccctcccacacgtaaatacacgcctggatgttaaaatgtttgaggaccccgtaagccagttgataccgtctaaaggggatgtggaccctagccaaacttctatgcttaagtccactaagtttaattcagaatcccggcagccccagataatcccatctagtattagaaacgaaggaaaactgtacccagctaattttcaaggaagtaatcctgtgctgctagaagcccccgttgattcatcccccctaatacggagcaattcggttcccacttcctccgctacaaatctgacaattccccccagcctcagagggtcccattccttcgacgagcgtatgacaggatcggacgatgtcttctaccctggaactgtgggaattccgcctcagagaatgctccggcgtcaggcggcgttcgaactgccttccgtacaggaaggccacgtggaggtggaacaccacggtcggatgctcaagggaatttcatcttcgagccttaaggagaaaaaacttagtcctggagatcgcgtgggatatgactatgatgtgtgccgcaaaccttataagaagtgggaggattccgaaacaccgaagcagaactatagggatatctcttgcctgtcgagcctaaaacatgggggcgaatactttatggatccagtggtgcccctccaaggagtgccatcaatgtttgggactacttgtgaaaatcgcaaaaggcgcaaggaaaagtcagttggagatgaggaggatacaccaatgatttgcagctctattgtgtctacacccgtcggaataatggcttcagactatgatccgaagctgcagatgcaggagggtgtgcgcagcgggttcgccatggctggtcacgagaacctttctcacgggcacacggaacgattcgacccatgcaggccccaacttcaaccggggtccccttccctcgtaagtgaagaaagcccgtccgcgattgattccgacaaaatgagcgaccttggtgggcgcaagccaccaggaaacgtcatcagtgtgattcagcacacaaattccttgtctaggccaaactccttcgagcgctctgagtctgcggaactggttgcctgcacccaagataaggctccaagtccgtctgaaacctgcgactccgagatctccgaggccccggtgtctcctgaatgggctccacctggggacggggctgagtctggaggcaagcccagtcccagtcagcaagtccagcagcaaagctatcacacgcagccccgactcgttagacagcataacattcaggtccccgagattagggtgaccgaagagccagacaagccagaaaaggaaaaagaagcccagagcaaggagcccgaaaaacctgtagaggaattccagtggcctcagaggtctgaaactctgtctcaactccctgcagaaaaactgcctccgaagaagaaaaggttgcgcctggcagacatggaacacagctccggagagtcatcctttgaatctacaggcacaggcctgagtaggtccccctctcaagaaagcaacttgtctcattcatcgtccttctcaatgtcattcgagagagaggagacctctaagctgtctgctctgccaaaacaggacgagtttgggaaacattccgagtttttaacggttccggcgggctcctacagcctgagtgtgcctgggcaccaccaccaaaaagagatgcggaggtgttcaagcgagcagatgccatgcccacacccagctgaggttcccgaggtccggtctaagtcatttgactatggcaatctgtcacatgcccctgtgagcggcgcagccgcctccacagtcagcccatccagagagcgcaagaagtgtttcctggtgcggcaggccagcttttctggcagccctgagattagtcagggagaggtcggcatggaccagtccgttaagcaagagcagctggagcatctccatgccggcctaagaagcggctggcaccacggacctccagccgtcctgccgcctcttcagcaggaggaccccgggaaacaggtggcaggaccttgccctcctctcagctccgggcccttgcacctggcccagccacaaattatgcatatggacagtcaggagtcgttgcggaatcccctgattcagccaactagctatatgaccagtaagcatcttcccgaacagccccacctgtttccgcatcaggagaccatacctttctctcccattcagaatgcactgtttcagttccagtatcccactgtgtgcatggtccacctgcctgcccaacaacctccatggtggcaggctcactttccccatccttttgcacagcacccccagaagtcttacgggaagccaagctttcaaactgagatccacagcagttacccattggagcacgtggcagagcatactgggaaaaagcctgcagaatatgctcatactaaggaacagacgtacccatgttattccggggccagcgggctacacccaaagaatctgcttcctaagtttccctctgatcagtctagcaaaagtaccgagacaccctccgagcaggtactgcaggaagatttcgcctcggctaacgcgggctcattgcagtccttgcctgggactgtggtgcctgtgaggattcaaactcacgtgccctcttatgggtccgtgatgtacaccagcatcagccaaatactgggccagaatagtcccgctatcgtgatctgtaaagtagacgaaaatatgacccagcgaaccctggtgactaatgccgccatgcagggcataggcttcaatattgctcaggtgctggggcaacacgccggtttggagaagtaccctatttggaaggccccacagaccttgcccctgggcctggagtccagcattcccctgtgcttgccttctaccagcgactccgtggccacactggggggttctaaacgcatgctgtctcctgcctcgagtttggaactgttcatggagaccaaacagcagaaacgcgttaaagaagagaagatgtatgggcagatcgtggaagagctgtcagccgtggagttgaccaactcagatatcaagaaggatctctcgcggccacaaaagcctcagctggtcaggcaaggctgcgcctcggagcctaaagacggtctccaatcaggctcatccagctttagctcccttagtccctcctcctcacaagactatccctcagtgtcaccttcttcacgtgagccatttctcccgagcaaggagatgctgagtgggagccgagcccccctacccggacagaagagttccggcccaagcgagtcaaaggagtcaagcgatgagttggacatcgatgaaaccgcttctgatatgtcaatgtcaccgcagagtagctctctgccagccggagacggacagctggaggaggagggtaagggacacaaacggcccgttggaatgcttgtgagaatggccagtgctccgtcagggaatgtggccgattcaacattgcttttaaccgatatggcggatttccagcagatcttgcaattcccaagccttcggaccacgacaactgtcagctggtgctttctcaactacactaagccaaattacgttcagcaggctacattcaaatcctctgtgtacgcttcctggtgcatctcatcatgcaaccctaatccttctggattgaataccaaaacaactttggctcttcttcggtccaagcaaaagatcactgcagagatttacactctggccgcaatgcatcggcctggcacgggtaaactgactagttccagcgcctggaaacaattcacacaaatgaagcccgacgcaagttttctgttcggaagtaagctcgagagaaagctagtcggcaacattctcaaggagaggggcaagggtgacatacacggggataaagatatcggcagcaagcagacagagccaatccggatcaaaatttttgagggcgggtacaaatccaacgaagattatgtttacgtgagaggaagaggcaggggtaaatatatatgcgaagaatgcgggatccgctgcaaaaagccatccatgctgaagaaacacattcggactcacacagatgtccgcccttacgtttgtaagctgtgtaactttgcattcaaaactaaaggtaacttaacaaagcacatgaaatcgaaggcccatatgaagaaatgcttagagcttggcgtttcaatgacaagcgttgatgacacagagacagaggaagccgagaatcttgaggaccttcacaaggctgcagagaaacacagcatgagcagcatctctacggaccatcagttttctgatgctgaggaatccgatggagaggacggcgatgacaatgacgacgacgacgaagatgaggacgactttgatgatcagggggatctgactcctaagacacgttctcgcagcactagcccccagccacccaggttctctagcttgcctgtcaatgttggcgcggtcccccatggcgtgccctccgattcgagtcttgggcatagttcgctcatctcctacctcgtgactttgccaagcatcagggtcacacagcttatgaccccctccgattcttgtgaggatactcagatgaccgagtaccagcgactgttccagtccaagagtaccgactccgagcctgacaaagatagactagacatcccttcatgtatggacgaagagtgtatgctgccttcagagccctcttcctcaccccgggatttctcacccagcagtcaccattcaagccccgggtatgacagttccccatgccgtgataatagcccgaagaggtaccttatcccgaagggagatctgtcacctagaagacacctaagcccccgccgggacttgtccccaatgcggcatttgtcccccagaaaagaggccgccctcagaagggagatgagccagcgggatgtgagtccccgccggcacctctcaccgaggcgccctgtttctcccggaaaggatattactgccagaagagatcttagtccaaggcgggaacggaggtatatgaccaccattagggcaccatcacccaggagagccttatatcataaccctcctctatccatgggccagtacctgcaagcagagcctatcgtcctcgggcctcctaatctgcgaagagggctcccacaggtgccatacttctcactgtatggcgaccaggagggcgcctatgaacaccctgggagctccctttttcccgaggggcccaacgactacgtgttttcccatctgccattgcactcacagcagcaggtacgcgccccaatacctatggttccagtgggcggaattcagatggtgcacagcatgcctcccgcccttagctctctgcatcctagccctaccttgcccctccccatggaagggtttgaagaaaagaagggggccagcggagaatcctttagtaaagacccctatgttctaagcaaacagcacgagaagcgaggtcctcacgccttgcaatccagcgggcctcccagtactcccagctctccacgactgctgatgaaacagagtaccagtgaggactccctgaatgctacagaaagggagcaagaagagaatatccagacctgtactaaagcaatagccagcctgaggattgcgaccgaggaggccgccctcctgggccccgatcagccagcccgcgtccaggaaccccaccaaaaccctctaggtagtgctcacgtatctataagacacttttctagacccgagccagggcagccctgtacttccgccacacacccagacctgcatgatggcgagaaggacaacttcggcacatctcagacacccctggctcatagcaccttctattctaaatcctgcgtcgatgacaagcagctggattttcacagctctaaagaactgagcagctcaacagaggagtctaaggatccctcatcggaaaaaagccagttgcattag

SEQ ID NO: 167450 - DNA, 7341 bp, Artificial Sequence
  derived and/or modified sequence
atggacacgggggacacagccctgggacagaaggctacttctcgctcaggagagacagataaagcctccggacgctggcgccaggaacaatccgccgtgattaaaatgtcaacttttggatcccatgagggtcagcgccaaccccagattgagcccgaacagatagggaacacggcatcagctcagctctttggatcgggtaagctagcatcccctagtgaggtggtacagcaggtggccgaaaagcagtaccctccccaccgcccgtccccttacagttgccagcactcattgtcatttccccaacacagcctgccacaaggcgtgatgcatagtacaaagccccatcagtccctggaggggcccccctggctgtttcccgggcctctgccaagtgtagcttccgaggatctcttccccttccctatccatggtcactctggaggatatccccgaaagaaaatttcctccctaaaccctgcatactcccaatatagccagaaatcaatcgagcaagccgaagaggcccacaagaaagagcacaaaccaaaaaaaccggggaagtacatttgtccttactgcagcagggcctgtgccaagccttcagttcttaaaaagcatatcaggtctcacacgggcgagcgcccctatccctgtattccatgcggattctcctttaagaccaaatctaatctgtacaagcaccgcaaatctcatgcccatgcgatcaaagcaggactcgtccccttcactgaatctgccgtgtccaagttagatttagaggccggattcatcgacgtagaggccgagattcactctgacggcgagcaaagcaccgataccgacgaggaatcctcgttgtttgcggaagcaagcgataagatgtcacccgggcctcccatacccttggatattgcgagccggggagggtaccacggctctctcgaggagtcactggggggccccatgaaggtgccaattttgattattcccaaatctgggatccctctccccaatgagagtagtcagtacatcggacccgacatgctgcctaatccttctctcaatacaaaggcagacgatagtcatacagtgaagcaaaaactggccttgaggttgtctgaaaagaaaggacaggatagcgagcctagccttaatctgctgtcaccccattccaaaggcagcacagactcaggatatttctccagatctgaatcagctgaacaacagatcagtccaccgaacacaaacgccaagtcttacgaagagattatcttcggaaaatattgtcgcctttctcctagaaatgctctctccgttactactacttctcaggaaagagctgcgatgggccgcaaaggcatcatggagcctcttcctcacgtgaacacaaggctggacgtgaaaatgttcgaggaccccgtctctcaactgatcccctcaaaaggcgatgtcgaccccagccagacttccatgctcaaaagcaccaagtttaattctgaaagccggcagccacagattatcccttcttcgatacgtaatgaagggaagctgtacccagcaaattttcagggatctaatcccgtgctgctggaggccccagtggattcatcacccctgatccgcagtaattctgtcccaactagcagcgcaactaaccttaccatccctccaagcctgcggggcagccattcattcgatgagaggatgaccggaagtgatgacgtgttctatcccggaacagtcgggatcccccctcaacgcatgttgaggaggcaggctgccttcgagctgccttccgttcaggaagggcacgtcgaggtcgagcaccatgggaggatgttgaaaggtatcagcagtagttccctcaaggaaaagaagctctcacctggagatcgagtgggatacgactatgacgtgtgccgaaagccgtacaagaaatgggaggactcagagacccctaaacagaattatcgtgacatctcttgcctgtcttcactgaaacatggcggtgagtacttcatggaccctgtggtgccattgcagggggtgccatctatgttcggtaccacctgcgagaatagaaaaaggcggaaggagaagtctgtgggcgacgaagaggacacacctatgatctgctctagtattgtgtctactccagtgggtatcatggcctctgactatgatcctaagctccaaatgcaagaaggggttagatctgggtttgccatggcaggccacgaaaatctgagccatggtcacaccgagcgctttgacccttgtaggccgcagctgcagcccggctccccatcgctagtatcagaagaaagtccttcagccatcgacagcgacaaaatgtctgatctgggtgggcggaagccgccagggaacgtgatatctgtgattcaacacaccaatagcctctctagaccaaattcttttgaacgctctgagtcagccgagctggtggcctgcacacaggacaaagctccgtcgccctcagagacctgcgactccgaaatcagtgaagccccagtctctcctgagtgggctccacccggggacggggcagaatcaggtggaaagccaagcccgtctcagcaggttcagcaacagtcctatcacacacaaccgcggttggtgcgccagcacaacatccaggtacccgaaatcagggtgactgaggaacctgataagccagagaaagagaaggaagcccagtcaaaggagcccgaaaaacccgttgaagaattccagtggccgcaaagatcagaaaccttgtcccaactccctgcagagaaattaccacccaagaagaaaagactccgccttgcagacatggagcactcttccggggaatcatctttcgaatctacaggaacgggactaagtaggagccccagtcaggaatccaatctgtcccattcttcaagcttctctatgagcttcgagcgagaggagacctccaagctcagcgccttgcccaaacaggatgagttcggcaagcactccgagttcctgacagttccagctggatcttattctctgtctgttcctgggcaccatcaccagaaggaaatgagacgctgtagctccgagcagatgccatgtccccatccagccgaggtcccagaggttcgctccaaaagtttcgactacggtaatttgagccatgctcctgtcagtggcgccgccgcatctaccgtctctccttctcgtgaaagaaagaaatgctttctggttcggcaggctagctttagcggttctcccgagatctctcagggcgaggtcggtatggatcagagcgttaagcaagagcagctcgagcacctgcacgcaggtctacgctcggggtggcaccatggcccacccgctgtactcccccccctgcagcaggaagatcctggaaagcaagtcgccggcccttgccctcctctgagcagcggtccactccacctggcgcaaccacaaatcatgcacatggattctcaggaaagtctgcgcaatccactgatccagccaacttcctatatgacctcaaagcacctccctgaacaaccccatctcttcccacatcaggaaacaattccattctcccccattcagaatgcactgttccagttccaatacccaacagtgtgtatggtgcacctcccagcacaacaaccaccttggtggcaggcccactttcctcacccttttgcccagcacccccagaagtcctacggaaagccctccttccagacggaaatccacagttcgtaccctttggagcatgtcgctgagcatactggaaagaaacccgctgaatacgcccacaccaaagagcagacatacccgtgttatagtggagcttccggcctgcatcctaagaatcttctaccgaaatttccctcagatcaatcttccaagagtacagagactccgtccgagcaggtactgcaggaagactttgcttctgctaacgcgggctcccttcagtccctgcctggaaccgtggtacctgttcgaatccagacgcatgttccgtcctatggaagcgtgatgtatacatctattagccagatcttggggcagaattccccagccatcgttatttgtaaagtggatgagaatatgacccaacggaccctcgttaccaatgctgcgatgcagggtatcgggtttaacatcgcacaagtgctgggtcagcacgctggcctggagaaataccctatctggaaggccccacagaccctgcctcttggactcgaatcctccattccactgtgcctgccctccacttccgatagtgtcgccacgttgggagggtcgaagcggatgctttcccccgcatctagccttgaactgttcatggagacgaagcaacagaagcgggttaaggaggagaagatgtacggtcagattgttgaggaactgagcgccgtcgagctgacaaactccgacataaagaaagatctcagtaggccacagaagccccaactcgttcgacagggttgcgccagtgagcctaaagatggccttcagtctgggtcaagtagcttcagctcattgtcaccctccagtagccaggattacccttcagtgtctcctagttctagagagccctttttgcctagcaaagaaatgcttagcgggtcaagagccccattgcctggccagaaatccagcggccctagtgaaagtaaggagtcctccgacgagctggacatcgatgagaccgcttctgatatgtctatgagtccccagtcgtcatccctccccgccggcgacggacagctggaagaggagggaaaaggacataagcgcccagtcggaatgctggttcggatggctagtgcaccaagtggtaatgtcgctgactccacactcctgcttaccgatatggccgatttccaacaaattcttcagtttccatctctgcgcactacaacaactgtgagctggtgcttcctgaactatacgaaacccaattatgtccagcaggcgacatttaaatcttcagtgtatgcgagttggtgtatcagctcctgtaatcccaatcctagcggtttgaacacaaagacaacgctcgcgctgctccgcagcaagcagaaaatcaccgcagagatctacactctcgcggccatgcaccggcctggtactggtaagctaacatcgtcgtccgcatggaagcagttcacccagatgaagcccgatgccagtttcctgttcggttctaagctcgaaagaaaattagtgggcaatatcctgaaggaacgcggcaaaggagacatacatggtgataaggatatcggaagtaagcagacagagcctattagaattaagatttttgaaggaggctataaatccaacgaagactacgtttacgtccggggccgcgggagggggaaatacatttgcgaagagtgtggaatcagatgtaagaagccaagcatgctgaagaaacatattagaacacacacagatgtgcgcccatatgtttgcaaactttgcaatttcgcattcaagacgaagggaaatctaaccaaacacatgaaatcaaaggcgcatatgaaaaagtgccttgagctaggggtatccatgactagtgtcgatgacactgagaccgaggaagcagagaatctcgaggatctgcataaggccgcggagaaacacagcatgtcgtcaatcagcacagatcatcagttctctgatgccgaggaatctgatggtgaggatggagacgataatgacgatgatgacgaagatgaagacgacttcgatgaccaaggagacctcactcccaagacccgtagtaggagtaccagtccacaaccccccagattctccagcctgccagtcaacgtgggcgctgtccctcacggtgtaccctcggactcttcgctgggtcacagctccctcatatcttatctggtcacacttccctctatcagggttactcaactgatgacaccttccgactcctgcgaggatacacagatgaccgaatatcagcgcctattccaatccaagagcacagactcagaacccgataaggacagactggatataccctcctgtatggatgaagaatgtatgttgccctcagaaccgtcctccagcccacgagacttttccccttcaagccaccactcctcaccgggctatgatagtagtccctgccgagataactcccctaagaggtatttgatcccaaaaggtgacctctctcctcgtaggcacttaagcccaaggagagacttgtccccaatgcgccatctttcgccgcgaaaagaggccgctctgaggagggagatgagtcagcgcgacgtgtcccctcgccgacatttgagccccaggcgacctgtcagcccaggaaaagacatcacagccagaagggatctgtccccgagacgggaacgtcgatacatgaccaccattagagccccaagcccaagaagagcactctatcataatccacccctctctatggggcaataccttcaggcagagcctatcgtcttaggccctccaaatttgaggcgcggactgccccaagtgccctacttctccctgtacggggaccaggagggcgcttacgagcaccccggctccagcctgtttcctgaaggcccaaacgactacgtgtttagtcacctccctttacacagtcagcagcaggttcgggctcccatcccaatggtccctgttggtggcatccaaatggtccactcaatgccaccagcgttgagctcattgcacccctctccgacactgcctctgcccatggagggcttcgaggagaagaaaggtgcttcaggagagagctttagcaaggacccctacgtgctcagcaaacaacatgagaagagaggaccccacgcacttcagtccagtgggccgcccagcacaccctcgtctccacgtttgcttatgaaacaaagtacaagcgaggactctctaaatgccactgagcgtgagcaggaggagaatattcaaacttgcactaaggccatcgccagcctacgaatcgctacagaggaggccgccttgctcggacccgaccagcccgcccgagtccaggagccgcatcagaaccctctgggctccgcacatgtcagtattcgccacttcagtaggccggagcccggccagccatgtacctccgccactcatcccgacctgcacgatggtgagaaagataactttggtaccagccagacacccctggctcacagcaccttttattccaagtcctgcgtggacgacaagcaactggacttccattcctcgaaagagctgtcttcaagtaccgaggagagcaaagacccatccagcgaaaagagtcagctgcactag

SEQ ID NO: 167451 - DNA, 9524 bp, Artificial Sequence
  derived and/or modified sequence
gtggagcctttgaattttttaaaagaccatagtaatcagatctacttgaaaaattaagtgaattgatttggttggaatgctcttttaccgatgctttaacatacagccactaggaagcgtcaggacaatcatgcccataagaactctaaactgttcagatcattttatcttagtgaaactggcaattgaactttgctctagttgatgggcaaaatttctcctagactattcatcatcccaatttcatcctagttgaaaattttcaaatgccataagaaatctttatagatttgcacttagcttttggatggacgtttctacaatggagagaactgtgttatagccctggtccaaggacattactagctaatgcccatcgactgtggtgtgcgtgtggaaggttccaaagagaaggagcaatcagcaagtttgcagacaccctggaacatggaagcaaccaagctttaagaagcacagctttggagacactccatgagtctgcactgctttcaggggaactagcacttaagaccttgtgtaacaaaatggacactggggacacagctctaggacaaaaagctacctcaaggtctggagaaactgataaagcatcaggtagatggagacaggaacaatcagctgttattaagatgagcacttttggcagtcatgaaggacagcggcaaccacaaatagagcctgagcaaatcggaaacacagcatcagcacaactgtttggttctgggaaactggcctcccctagtgaagtggtgcagcaagtcgcagagaagcaatatccaccgcatcgtccgagtccttactcatgccaacactcactctctttccctcagcactcattgccacagggggtcatgcacagcaccaagccacatcagagcctcgaaggtcctccgtggcttttccctggccctttgccatccgttgcctctgaggacttatttccttttcctatacatggccacagtggtggttatcctagaaaaaagatttcaagtctgaaccctgcttatagccaatactcccagaaaagtattgaacaggcagaagaggctcacaagaaagagcacaaacccaaaaagcctggcaagtacatttgcccttactgcagcagagcgtgtgccaaacctagtgtactgaaaaaacacatcaggtcccatactggggagcggccatatccatgtataccttgtggtttctctttcaagacaaagagcaatttgtacaagcacaggaagtcacatgcccatgcaattaaggcaggattagtacctttcacagagtcagctgtatctaaattggacctagaggctggttttattgatgtagaagcagaaatacattcagatggtgaacagagtacagacacagatgaggagagttctttatttgccgaggcttctgacaaaatgagtcctggtccacccatcccactggacattgccagcagaggcggctatcatgggtcattggaagaatcattgggaggtccaatgaaggtgccgattttgattatccctaaaagtgggattcctctccctaatgaaagctctcagtatattggccctgatatgctaccaaatccatctttaaatactaaggctgatgattcgcacacagtcaaacagaaacttgcactaagactgtcagagaaaaaaggacaagattctgagccatcgctcaaccttctgagcccgcacagtaaaggaagcactgattctggttacttttctcgctcagaaagtgctgagcagcaaataagccctcccaacacaaatgcaaagtcttatgaagaaatcatctttggaaaatactgtcggcttagtccgagaaatgcactcagtgttacaaccacaagtcaggagcgtgccgcaatgggtaggaagggcataatggaaccattacctcacgttaacaccaggttagatgtcaagatgtttgaagatcctgtttcacagctgatcccaagcaagggagatgtcgaccccagtcaaacgagcatgctgaaatccactaagttcaacagtgagtccagacaaccccagattattccatcatctatcaggaacgaaggaaaactttatccagcaaacttccaaggcagcaacccggttctcttagaagctcctgtagactcttcaccccttattagaagcaactcagtgccaacttcttcagcaactaatctaactattcctccttctttgagaggaagtcactcatttgatgaaaggatgactggttccgacgatgtattctatccagggaccgtgggcataccccctcagcgcatgctaagaagacaagcggcatttgagctgccttcggtacaggagggccacgtggaagtcgagcaccatggcaggatgttgaagggtatcagcagttcatccctgaaggaaaagaaattgtctcctggggacagggttgggtatgactatgatgtctgtcggaaaccctataagaagtgggaggactctgaaacaccaaagcaaaactacagggacatttcctgcttgagttctttaaagcatggtggagaatatttcatggatcccgtggtgccattgcagggagtaccaagcatgtttggaactacctgtgaaaacaggaaacgccggaaagagaagagcgtaggggatgaagaggacacgcccatgatctgcagcagcattgtaagcactcctgtgggcatcatggcttccgattatgaccccaaactgcagatgcaggaaggagtcaggagtggatttgccatggctggacacgaaaacctttctcatggtcacacggaacgctttgacccatgtcggccccaactgcagcctggaagtccatctcttgtgtcagaggagtcaccttcagccattgattcagacaagatgtcagacctagggggcaggaaacctcctggaaatgtgatttctgtgattcagcacaccaactcactgagccgacccaattcatttgaaaggtctgagtcagccgaacttgtggcttgcacacaggataaagccccttccccttcagagacttgtgacagtgagatttcagaagccccagtgagtcctgagtgggctccacctggggatggtgcagaaagtggggggaaaccctctccatctcagcaggtgcagcagcagtcctatcacacacagcccaggctagttcggcaacacaacatccaggttcctgagattcgagtgaccgaggagcctgataaacctgagaaggagaaggaagcccagagcaaagagccagagaagcctgtggaagaatttcagtggccccagagaagtgagaccctttcccagctccccgcggagaagttgccacccaaaaagaagcgtctgcgacttgcagatatggagcactcctcaggggagtccagctttgaatccacaggcacaggcctctcccgcagccccagccaagaaagcaacttgtcccacagctccagtttctccatgtcttttgaaagagaagaaaccagtaagctttctgcacttcctaagcaggatgagtttgggaagcattcagagtttctgactgtccctgctggttcatactcattgtctgtcccaggccatcaccaccagaaagagatgcgacgctgctcatcagagcagatgccttgtcctcacccagcggaagtcccagaagttcggagcaaatcatttgattatgggaatctgtcccatgctcctgtgtcgggagcagcagcctccacggtatcaccgtccagggagaggaagaaatgctttctggtgcggcaagcttccttcagtggctccccagaaatctcccagggcgaggttggcatggatcagagcgtgaagcaagagcagctggagcacctgcatgctggcctccggtccgggtggcaccatggcccgcctgctgtgctgcctcctcttcagcaagaggacccagggaagcaggtggcgggtccttgtcccccgctgagctcggggccactgcacctggcccagccacagatcatgcacatggacagtcaggaatctttgagaaatcccttgatccaaccaacatcctatatgacaagcaagcacttacctgaacagccacacttatttccacatcaagagacaattccattttctccaatccagaatgccttgtttcagtttcagtatcctacagtttgtatggttcatttaccagctcagcagcctccctggtggcaggcacatttcccacatccctttgctcagcaccctcagaagagctatggcaagccctcttttcagacagaaatccattcgagctatcccttagagcatgtggcagagcacactggaaagaaacctgctgagtatgcacacacgaaagagcagacctacccatgttattcaggagcatcagggctacacccaaagaaccttcttccaaagtttccatcagaccagagcagtaagtcaactgaaacgccctctgagcaggttcttcaagaagattttgcctcggcaaatgctgggtctttgcagtccctcccaggaacagtggttcctgttcggatccagacgcacgtaccatcctatggaagtgtcatgtacacaagcatttctcagatacttgggcagaatagccctgccattgtcatatgcaaagtcgatgagaatatgacccaaaggacactggtcaccaacgcagccatgcaagggataggattcaacattgcccaggtgctggggcagcatgcgggcttggagaagtaccccatttggaaagcacctcagactttgcccctcggcttagaatcctccatccccttgtgtttaccttccacctctgacagcgtggccaccctgggaggtagcaagcgaatgctttctccagccagtagcttggagctcttcatggaaaccaagcagcagaaaagggtcaaagaagaaaagatgtacggacagattgtggaggagcttagtgctgtggagctgaccaactcagacatcaaaaaggacctctcccgcccccagaaaccccagctggttcgacaaggatgtgcttctgagccaaaagatggcttgcagtcagggtcatcttccttctcctcgctgtcgccctcctcatctcaagactatccttctgttagcccgtcttccagggagccattcctgcccagcaaggagatgctttccggttcccgggcaccacttccggggcagaagtccagtgggccttctgaaagcaaagaatcttcagatgaattagatatcgatgagacggcatcggacatgagcatgagcccacagagttcttcattaccagcaggagatggtcagctggaagaggaagggaagggccacaagcggcctgttggcatgctggtccgcatggcctctgcccccagcgggaacgtggcagactcaactcttcttctcacggacatggcagatttccagcagattcttcagttccccagtctgcggacaacaactactgtgagttggtgcttcttgaattatacaaaacccaattatgtgcaacaggccaccttcaaatcctcggtttatgcttcatggtgcattagttcctgtaatccaaacccatcaggattgaacaccaagaccacgctggctcttctgaggtccaagcaaaaaatcactgcagaaatttatactctggctgctatgcataggcctggaaccggcaagcttacatcatcaagtgcttggaagcagtttactcagatgaaacctgatgcgtcctttttatttggcagcaaactagaaaggaaactagtgggaaatatcttaaaggaaagagggaaaggagatattcatggagataaagatattggatccaaacaaactgagccaatccgaattaaaatatttgaaggagggtacaaatcgaatgaagattatgtatatgtcagaggacgtggccggggaaagtacatttgtgaagaatgtgggattcgctgtaagaagccaagcatgctcaaaaaacacatccgtacccatactgatgttcggccttatgtatgcaagttatgtaactttgccttcaaaacgaaaggaaacctaacgaagcatatgaaatctaaagcacacatgaaaaaatgcctggaattgggagtctcaatgacatcggtggatgatacagaaactgaggaagcagaaaatttggaagatttgcacaaagcagcagagaagcatagcatgtccagcatttcaactgatcatcagttctccgatgctgaggaatcagatggtgaggatggagatgataatgatgatgatgatgaagatgaagatgactttgacgaccagggagatttaacaccaaaaacaagatcaagaagcaccagtcctcagcctcctagattctcctccttgcctgtgaatgttggcgccgtaccccacggggttccttcagatagttccctgggacattcttcgttgatcagctatttggttactttgccaagtattcgagttactcagcttatgacacccagtgattcatgtgaagatacccagatgacagaataccagaggctattccagagcaaaagtacggactcagaaccagacaaagacagattggacatacctagttgtatggatgaggagtgcatgctaccttcagagccaagctcctctcccagggacttctcaccctcaagccaccattcctctccaggatatgattcttcaccctgtcgagataattcaccaaagaggtatctgatacccaaaggagatttatctcccaggagacatttatcacctaggagagatctgtcacccatgagacatctttcaccaagaaaggaagctgcattgagaagagagatgtcccaaagagatgtttcaccaagaaggcatttgtctccaaggaggccagtgtctcctgggaaagatatcacagcaagaagagacctctctcctagaagagagagaagatacatgaccacaataagagcgccatctcccagaagggctttataccataacccaccattgtccatgggacagtatttgcaagcagagccaattgtattggggcctcctaatttaagaagaggattacctcaggttccttacttcagtctctatggagaccaagaaggtgcttatgaacatccaggctccagccttttccctgagggtcctaatgactatgtcttcagtcatcttccactccactctcagcaacaagtgcgagcccctatccccatggtgcccgttggtgggatccagatggttcactccatgccgccagccctttccagtttacatccttcacccacattgcccctgccaatggagggctttgaggagaagaaaggcgcgtcaggggagtccttctccaaggacccctatgtgctttctaagcagcatgagaagcgaggtcctcacgctttgcagtcatctggtccacctagcactccctcctctcctcggctgttgatgaaacagagcacttcggaagacagcctaaacgcaacagagcgggaacaggaggaaaatatacagacttgtacaaaagccattgcctctctccggattgccacggaagaggcagctctgctcgggccagatcagccagcgcgggtgcaggagccccaccagaaccccctgggaagtgcacatgttagcattagacactttagtagacctgagccaggtcagccctgtacctcagccacccaccctgacttgcatgatggtgaaaaggacaattttggtacatcacagactccattagctcactccacgttttacagcaagagttgtgtggatgacaagcagttggactttcacagcagcaaggaattatcttcaagcacagaggaaagcaaagatccttcatcagaaaagagtcagctacattgatctatgatgcatggagactttcatttccacattttcccatttttttgtttttgtttttctagaaatggaggtaatccagtttatagcatgcctgtcctaagttacagtagtttgctattatatatacttttgttatatcaaaagaattaggtaaattaacaagtcatcatgagcctgaccaaaacaaaatttgaaattaacctattgggtctggtacttttaaaattgtacagatgtttgtgccttttctttactttgcttatattcttataagcattttttagcagtaatttgtacatattttagaatttgtgtatctgctttgtaataaatgtaatttctttccttttttggacacttggatctaaatgatgtaaagcaaaacagcatcaatatatatgtgaggttgcactaaaacatatttttatatgattaaaactgaacagcttttatgtacagctctgattctgtaatactaatatttatttactttgtttcataaattgtacattttttcttaatgttgtggattgcttttctatgtgaagcatgggatttactgttgcgtaactagaacaaaaatgtacattgtaaacaagatatttaaactagagtatcttattctgcacttatgcattagttaaaaaaagataaaggatgtatcagtcagttcttaactcttgtatatttttttgtctcttgtttgctggattgactataacttaagtgctgattgtgattttaaaatgatagtaccgtaaagcattaaagtaaacaatgtgctattgtgagttttttcaaagctttataaatcagttataaataatattaaaagtatttggtcttatgtgaacatgttgatctatatactcatctaaaaatatgggaaaacattccaccccatgtaaatatgtacaagtgcatcactggtacaattttatgtaactcagttggacactaggttgccacagacctatgctaggtgtctttaaaaaattaaggtgacaaagcacatgggactgtgtagagcttggttatcggccggcccggtggcttggcaggcagtgctgtgcgctgctcatggagaagacctgggcttagcaatctccttagttcttgctacacaggatggtgactggaactaaggctacacagagggtcgcacttggactctgagggttgggtgtggaagggggaaaaggagatggagacctgctccccagctcttcctgtcagccggtttacatgggaacagggttaacatctgtgttaggggaggtcaccttaccctttttcataggggaagagtgtcacactcctggctatctcagggggaatggggaaaagaatctttcaagggcaaagaactcgtgggaggatgtctgttgtatgtaatactcacaatggcttttggttagtgttgaaggtgggaagagcatttgtaggtccagaagagtgaaagagagggaggggtgcagcaacatgtgcacaggcacgcacatgtgtgcacgcacacatacaatctgggttatctttgtgctatatagtggattataattctgtgaaaccaagtttgtatattgaattacattaaggagtgttctttaaaaagagaaataaatatacaattacatgctt

SEQ ID NO: 167452 - DNA, 9723 bp, Artificial Sequence
  derived and/or modified sequence
gctggaggcaggaatgtgcctgcttactaatgagcgacgtgcaccggcgcgcacggcccggccaccgctgcggctgcggcggccggcggcggcccgttgtcaggtggagcctttgaattttttaaaagaccatagtaatcagatctacttgaaaaattaagtgaattgatttggttggaatgctcttttaccgatgctttaacatacagccactagattcccagaagttgtgcatgagttcctgtgaggagagttggcatcttggaaatcaaagacggttgtgatgcagttttttgatatgaggataacaggaagcgtcaggacaatcatgcccataagaactctaaactgttcagatcattttatcttagtgaaactggcaattgaactttgctctagttgatgggcaaaatttctcctagactattcatcatcccaatttcatcctagttgaaaattttcaaatgccataagaaatctttatagatttgcacttagcttttggatggacgtttctacaatggagagaactgtgttatagccctggtccaaggacattactagctaatgcccatcgactgtggtgtgcgtgtggaaggttccaaagagaaggagcaatcagcaagtttgcagacaccctggaacatggaagcaaccaagctttaagaagcacagctttggagacactccatgagtctgcactgctttcaggggaactagcacttaagaccttgtgtaacaaaatggacactggggacacagctctaggacaaaaagctacctcaaggtctggagaaactgataaagcatcaggtagatggagacaggaacaatcagctgttattaagatgagcacttttggcagtcatgaaggacagcggcaaccacaaatagagcctgagcaaatcggaaacacagcatcagcacaactgtttggttctgggaaactggcctcccctagtgaagtggtgcagcaagtcgcagagaagcaatatccaccgcatcgtccgagtccttactcatgccaacactcactctctttccctcagcactcattgccacagggggtcatgcacagcaccaagccacatcagagcctcgaaggtcctccgtggcttttccctggccctttgccatccgttgcctctgaggacttatttccttttcctatacatggccacagtggtggttatcctagaaaaaagatttcaagtctgaaccctgcttatagccaatactcccagaaaagtattgaacaggcagaagaggctcacaagaaagagcacaaacccaaaaagcctggcaagtacatttgcccttactgcagcagagcgtgtgccaaacctagtgtactgaaaaaacacatcaggtcccatactggggagcggccatatccatgtataccttgtggtttctctttcaagacaaagagcaatttgtacaagcacaggaagtcacatgcccatgcaattaaggcaggattagtacctttcacagagtcagctgtatctaaattggacctagaggctggttttattgatgtagaagcagaaatacattcagatggtgaacagagtacagacacagatgaggagagttctttatttgccgaggcttctgacaaaatgagtcctggtccacccatcccactggacattgccagcagaggcggctatcatgggtcattggaagaatcattgggaggtccaatgaaggtgccgattttgattatccctaaaagtgggattcctctccctaatgaaagctctcagtatattggccctgatatgctaccaaatccatctttaaatactaaggctgatgattcgcacacagtcaaacagaaacttgcactaagactgtcagagaaaaaaggacaagattctgagccatcgctcaaccttctgagcccgcacagtaaaggaagcactgattctggttacttttctcgctcagaaagtgctgagcagcaaataagccctcccaacacaaatgcaaagtcttatgaagaaatcatctttggaaaatactgtcggcttagtccgagaaatgcactcagtgttacaaccacaagtcaggagcgtgccgcaatgggtaggaagggcataatggaaccattacctcacgttaacaccaggttagatgtcaagatgtttgaagatcctgtttcacagctgatcccaagcaagggagatgtcgaccccagtcaaacgagcatgctgaaatccactaagttcaacagtgagtccagacaaccccagattattccatcatctatcaggaacgaaggaaaactttatccagcaaacttccaaggcagcaacccggttctcttagaagctcctgtagactcttcaccccttattagaagcaactcagtgccaacttcttcagcaactaatctaactattcctccttctttgagaggaagtcactcatttgatgaaaggatgactggttccgacgatgtattctatccagggaccgtgggcataccccctcagcgcatgctaagaagacaagcggcatttgagctgccttcggtacaggagggccacgtggaagtcgagcaccatggcaggatgttgaagggtatcagcagttcatccctgaaggaaaagaaattgtctcctggggacagggttgggtatgactatgatgtctgtcggaaaccctataagaagtgggaggactctgaaacaccaaagcaaaactacagggacatttcctgcttgagttctttaaagcatggtggagaatatttcatggatcccgtggtgccattgcagggagtaccaagcatgtttggaactacctgtgaaaacaggaaacgccggaaagagaagagcgtaggggatgaagaggacacgcccatgatctgcagcagcattgtaagcactcctgtgggcatcatggcttccgattatgaccccaaactgcagatgcaggaaggagtcaggagtggatttgccatggctggacacgaaaacctttctcatggtcacacggaacgctttgacccatgtcggccccaactgcagcctggaagtccatctcttgtgtcagaggagtcaccttcagccattgattcagacaagatgtcagacctagggggcaggaaacctcctggaaatgtgatttctgtgattcagcacaccaactcactgagccgacccaattcatttgaaaggtctgagtcagccgaacttgtggcttgcacacaggataaagccccttccccttcagagacttgtgacagtgagatttcagaagccccagtgagtcctgagtgggctccacctggggatggtgcagaaagtggggggaaaccctctccatctcagcaggtgcagcagcagtcctatcacacacagcccaggctagttcggcaacacaacatccaggttcctgagattcgagtgaccgaggagcctgataaacctgagaaggagaaggaagcccagagcaaagagccagagaagcctgtggaagaatttcagtggccccagagaagtgagaccctttcccagctccccgcggagaagttgccacccaaaaagaagcgtctgcgacttgcagatatggagcactcctcaggggagtccagctttgaatccacaggcacaggcctctcccgcagccccagccaagaaagcaacttgtcccacagctccagtttctccatgtcttttgaaagagaagaaaccagtaagctttctgcacttcctaagcaggatgagtttgggaagcattcagagtttctgactgtccctgctggttcatactcattgtctgtcccaggccatcaccaccagaaagagatgcgacgctgctcatcagagcagatgccttgtcctcacccagcggaagtcccagaagttcggagcaaatcatttgattatgggaatctgtcccatgctcctgtgtcgggagcagcagcctccacggtatcaccgtccagggagaggaagaaatgctttctggtgcggcaagcttccttcagtggctccccagaaatctcccagggcgaggttggcatggatcagagcgtgaagcaagagcagctggagcacctgcatgctggcctccggtccgggtggcaccatggcccgcctgctgtgctgcctcctcttcagcaagaggacccagggaagcaggtggcgggtccttgtcccccgctgagctcggggccactgcacctggcccagccacagatcatgcacatggacagtcaggaatctttgagaaatcccttgatccaaccaacatcctatatgacaagcaagcacttacctgaacagccacacttatttccacatcaagagacaattccattttctccaatccagaatgccttgtttcagtttcagtatcctacagtttgtatggttcatttaccagctcagcagcctccctggtggcaggcacatttcccacatccctttgctcagcaccctcagaagagctatggcaagccctcttttcagacagaaatccattcgagctatcccttagagcatgtggcagagcacactggaaagaaacctgctgagtatgcacacacgaaagagcagacctacccatgttattcaggagcatcagggctacacccaaagaaccttcttccaaagtttccatcagaccagagcagtaagtcaactgaaacgccctctgagcaggttcttcaagaagattttgcctcggcaaatgctgggtctttgcagtccctcccaggaacagtggttcctgttcggatccagacgcacgtaccatcctatggaagtgtcatgtacacaagcatttctcagatacttgggcagaatagccctgccattgtcatatgcaaagtcgatgagaatatgacccaaaggacactggtcaccaacgcagccatgcaagggataggattcaacattgcccaggtgctggggcagcatgcgggcttggagaagtaccccatttggaaagcacctcagactttgcccctcggcttagaatcctccatccccttgtgtttaccttccacctctgacagcgtggccaccctgggaggtagcaagcgaatgctttctccagccagtagcttggagctcttcatggaaaccaagcagcagaaaagggtcaaagaagaaaagatgtacggacagattgtggaggagcttagtgctgtggagctgaccaactcagacatcaaaaaggacctctcccgcccccagaaaccccagctggttcgacaaggatgtgcttctgagccaaaagatggcttgcagtcagggtcatcttccttctcctcgctgtcgccctcctcatctcaagactatccttctgttagcccgtcttccagggagccattcctgcccagcaaggagatgctttccggttcccgggcaccacttccggggcagaagtccagtgggccttctgaaagcaaagaatcttcagatgaattagatatcgatgagacggcatcggacatgagcatgagcccacagagttcttcattaccagcaggagatggtcagctggaagaggaagggaagggccacaagcggcctgttggcatgctggtccgcatggcctctgcccccagcgggaacgtggcagactcaactcttcttctcacggacatggcagatttccagcagattcttcagttccccagtctgcggacaacaactactgtgagttggtgcttcttgaattatacaaaacccaattatgtgcaacaggccaccttcaaatcctcggtttatgcttcatggtgcattagttcctgtaatccaaacccatcaggattgaacaccaagaccacgctggctcttctgaggtccaagcaaaaaatcactgcagaaatttatactctggctgctatgcataggcctggaaccggcaagcttacatcatcaagtgcttggaagcagtttactcagatgaaacctgatgcgtcctttttatttggcagcaaactagaaaggaaactagtgggaaatatcttaaaggaaagagggaaaggagatattcatggagataaagatattggatccaaacaaactgagccaatccgaattaaaatatttgaaggagggtacaaatcgaatgaagattatgtatatgtcagaggacgtggccggggaaagtacatttgtgaagaatgtgggattcgctgtaagaagccaagcatgctcaaaaaacacatccgtacccatactgatgttcggccttatgtatgcaagttatgtaactttgccttcaaaacgaaaggaaacctaacgaagcatatgaaatctaaagcacacatgaaaaaatgcctggaattgggagtctcaatgacatcggtggatgatacagaaactgaggaagcagaaaatttggaagatttgcacaaagcagcagagaagcatagcatgtccagcatttcaactgatcatcagttctccgatgctgaggaatcagatggtgaggatggagatgataatgatgatgatgatgaagatgaagatgactttgacgaccagggagatttaacaccaaaaacaagatcaagaagcaccagtcctcagcctcctagattctcctccttgcctgtgaatgttggcgccgtaccccacggggttccttcagatagttccctgggacattcttcgttgatcagctatttggttactttgccaagtattcgagttactcagcttatgacacccagtgattcatgtgaagatacccagatgacagaataccagaggctattccagagcaaaagtacggactcagaaccagacaaagacagattggacatacctagttgtatggatgaggagtgcatgctaccttcagagccaagctcctctcccagggacttctcaccctcaagccaccattcctctccaggatatgattcttcaccctgtcgagataattcaccaaagaggtatctgatacccaaaggagatttatctcccaggagacatttatcacctaggagagatctgtcacccatgagacatctttcaccaagaaaggaagctgcattgagaagagagatgtcccaaagagatgtttcaccaagaaggcatttgtctccaaggaggccagtgtctcctgggaaagatatcacagcaagaagagacctctctcctagaagagagagaagatacatgaccacaataagagcgccatctcccagaagggctttataccataacccaccattgtccatgggacagtatttgcaagcagagccaattgtattggggcctcctaatttaagaagaggattacctcaggttccttacttcagtctctatggagaccaagaaggtgcttatgaacatccaggctccagccttttccctgagggtcctaatgactatgtcttcagtcatcttccactccactctcagcaacaagtgcgagcccctatccccatggtgcccgttggtgggatccagatggttcactccatgccgccagccctttccagtttacatccttcacccacattgcccctgccaatggagggctttgaggagaagaaaggcgcgtcaggggagtccttctccaaggacccctatgtgctttctaagcagcatgagaagcgaggtcctcacgctttgcagtcatctggtccacctagcactccctcctctcctcggctgttgatgaaacagagcacttcggaagacagcctaaacgcaacagagcgggaacaggaggaaaatatacagacttgtacaaaagccattgcctctctccggattgccacggaagaggcagctctgctcgggccagatcagccagcgcgggtgcaggagccccaccagaaccccctgggaagtgcacatgttagcattagacactttagtagacctgagccaggtcagccctgtacctcagccacccaccctgacttgcatgatggtgaaaaggacaattttggtacatcacagactccattagctcactccacgttttacagcaagagttgtgtggatgacaagcagttggactttcacagcagcaaggaattatcttcaagcacagaggaaagcaaagatccttcatcagaaaagagtcagctacattgatctatgatgcatggagactttcatttccacattttcccatttttttgtttttgtttttctagaaatggaggtaatccagtttatagcatgcctgtcctaagttacagtagtttgctattatatatacttttgttatatcaaaagaattaggtaaattaacaagtcatcatgagcctgaccaaaacaaaatttgaaattaacctattgggtctggtacttttaaaattgtacagatgtttgtgccttttctttactttgcttatattcttataagcattttttagcagtaatttgtacatattttagaatttgtgtatctgctttgtaataaatgtaatttctttccttttttggacacttggatctaaatgatgtaaagcaaaacagcatcaatatatatgtgaggttgcactaaaacatatttttatatgattaaaactgaacagcttttatgtacagctctgattctgtaatactaatatttatttactttgtttcataaattgtacattttttcttaatgttgtggattgcttttctatgtgaagcatgggatttactgttgcgtaactagaacaaaaatgtacattgtaaacaagatatttaaactagagtatcttattctgcacttatgcattagttaaaaaaagataaaggatgtatcagtcagttcttaactcttgtatatttttttgtctcttgtttgctggattgactataacttaagtgctgattgtgattttaaaatgatagtaccgtaaagcattaaagtaaacaatgtgctattgtgagttttttcaaagctttataaatcagttataaataatattaaaagtatttggtcttatgtgaacatgttgatctatatactcatctaaaaatatgggaaaacattccaccccatgtaaatatgtacaagtgcatcactggtacaattttatgtaactcagttggacactaggttgccacagacctatgctaggtgtctttaaaaaattaaggtgacaaagcacatgggactgtgtagagcttggttatcggccggcccggtggcttggcaggcagtgctgtgcgctgctcatggagaagacctgggcttagcaatctccttagttcttgctacacaggatggtgactggaactaaggctacacagagggtcgcacttggactctgagggttgggtgtggaagggggaaaaggagatggagacctgctccccagctcttcctgtcagccggtttacatgggaacagggttaacatctgtgttaggggaggtcaccttaccctttttcataggggaagagtgtcacactcctggctatctcagggggaatggggaaaagaatctttcaagggcaaagaactcgtgggaggatgtctgttgtatgtaatactcacaatggcttttggttagtgttgaaggtgggaagagcatttgtaggtccagaagagtgaaagagagggaggggtgcagcaacatgtgcacaggcacgcacatgtgtgcacgcacacatacaatctgggttatctttgtgctatatagtggattataattctgtgaaaccaagtttgtatattgaattacattaaggagtgttctttaaaaagagaaataaatatacaattacatgcttg

SEQ ID NO: 167453 - DNA, 9621 bp, Artificial Sequence
  derived and/or modified sequence
gtggagcctttgaattttttaaaagaccatagtaatcagatctacttgaaaaattaagtgaattgatttggttggaatgctcttttaccgatgctttaacatacagccactagattcccagaagttgtgcatgagttcctgtgaggagagttggcatcttggaaatcaaagacggttgtgatgcagttttttgatatgaggataacaggaagcgtcaggacaatcatgcccataagaactctaaactgttcagatcattttatcttagtgaaactggcaattgaactttgctctagttgatgggcaaaatttctcctagactattcatcatcccaatttcatcctagttgaaaattttcaaatgccataagaaatctttatagatttgcacttagcttttggatggacgtttctacaatggagagaactgtgttatagccctggtccaaggacattactagctaatgcccatcgactgtggtgtgcgtgtggaaggttccaaagagaaggagcaatcagcaagtttgcagacaccctggaacatggaagcaaccaagctttaagaagcacagctttggagacactccatgagtctgcactgctttcaggggaactagcacttaagaccttgtgtaacaaaatggacactggggacacagctctaggacaaaaagctacctcaaggtctggagaaactgataaagcatcaggtagatggagacaggaacaatcagctgttattaagatgagcacttttggcagtcatgaaggacagcggcaaccacaaatagagcctgagcaaatcggaaacacagcatcagcacaactgtttggttctgggaaactggcctcccctagtgaagtggtgcagcaagtcgcagagaagcaatatccaccgcatcgtccgagtccttactcatgccaacactcactctctttccctcagcactcattgccacagggggtcatgcacagcaccaagccacatcagagcctcgaaggtcctccgtggcttttccctggccctttgccatccgttgcctctgaggacttatttccttttcctatacatggccacagtggtggttatcctagaaaaaagatttcaagtctgaaccctgcttatagccaatactcccagaaaagtattgaacaggcagaagaggctcacaagaaagagcacaaacccaaaaagcctggcaagtacatttgcccttactgcagcagagcgtgtgccaaacctagtgtactgaaaaaacacatcaggtcccatactggggagcggccatatccatgtataccttgtggtttctctttcaagacaaagagcaatttgtacaagcacaggaagtcacatgcccatgcaattaaggcaggattagtacctttcacagagtcagctgtatctaaattggacctagaggctggttttattgatgtagaagcagaaatacattcagatggtgaacagagtacagacacagatgaggagagttctttatttgccgaggcttctgacaaaatgagtcctggtccacccatcccactggacattgccagcagaggcggctatcatgggtcattggaagaatcattgggaggtccaatgaaggtgccgattttgattatccctaaaagtgggattcctctccctaatgaaagctctcagtatattggccctgatatgctaccaaatccatctttaaatactaaggctgatgattcgcacacagtcaaacagaaacttgcactaagactgtcagagaaaaaaggacaagattctgagccatcgctcaaccttctgagcccgcacagtaaaggaagcactgattctggttacttttctcgctcagaaagtgctgagcagcaaataagccctcccaacacaaatgcaaagtcttatgaagaaatcatctttggaaaatactgtcggcttagtccgagaaatgcactcagtgttacaaccacaagtcaggagcgtgccgcaatgggtaggaagggcataatggaaccattacctcacgttaacaccaggttagatgtcaagatgtttgaagatcctgtttcacagctgatcccaagcaagggagatgtcgaccccagtcaaacgagcatgctgaaatccactaagttcaacagtgagtccagacaaccccagattattccatcatctatcaggaacgaaggaaaactttatccagcaaacttccaaggcagcaacccggttctcttagaagctcctgtagactcttcaccccttattagaagcaactcagtgccaacttcttcagcaactaatctaactattcctccttctttgagaggaagtcactcatttgatgaaaggatgactggttccgacgatgtattctatccagggaccgtgggcataccccctcagcgcatgctaagaagacaagcggcatttgagctgccttcggtacaggagggccacgtggaagtcgagcaccatggcaggatgttgaagggtatcagcagttcatccctgaaggaaaagaaattgtctcctggggacagggttgggtatgactatgatgtctgtcggaaaccctataagaagtgggaggactctgaaacaccaaagcaaaactacagggacatttcctgcttgagttctttaaagcatggtggagaatatttcatggatcccgtggtgccattgcagggagtaccaagcatgtttggaactacctgtgaaaacaggaaacgccggaaagagaagagcgtaggggatgaagaggacacgcccatgatctgcagcagcattgtaagcactcctgtgggcatcatggcttccgattatgaccccaaactgcagatgcaggaaggagtcaggagtggatttgccatggctggacacgaaaacctttctcatggtcacacggaacgctttgacccatgtcggccccaactgcagcctggaagtccatctcttgtgtcagaggagtcaccttcagccattgattcagacaagatgtcagacctagggggcaggaaacctcctggaaatgtgatttctgtgattcagcacaccaactcactgagccgacccaattcatttgaaaggtctgagtcagccgaacttgtggcttgcacacaggataaagccccttccccttcagagacttgtgacagtgagatttcagaagccccagtgagtcctgagtgggctccacctggggatggtgcagaaagtggggggaaaccctctccatctcagcaggtgcagcagcagtcctatcacacacagcccaggctagttcggcaacacaacatccaggttcctgagattcgagtgaccgaggagcctgataaacctgagaaggagaaggaagcccagagcaaagagccagagaagcctgtggaagaatttcagtggccccagagaagtgagaccctttcccagctccccgcggagaagttgccacccaaaaagaagcgtctgcgacttgcagatatggagcactcctcaggggagtccagctttgaatccacaggcacaggcctctcccgcagccccagccaagaaagcaacttgtcccacagctccagtttctccatgtcttttgaaagagaagaaaccagtaagctttctgcacttcctaagcaggatgagtttgggaagcattcagagtttctgactgtccctgctggttcatactcattgtctgtcccaggccatcaccaccagaaagagatgcgacgctgctcatcagagcagatgccttgtcctcacccagcggaagtcccagaagttcggagcaaatcatttgattatgggaatctgtcccatgctcctgtgtcgggagcagcagcctccacggtatcaccgtccagggagaggaagaaatgctttctggtgcggcaagcttccttcagtggctccccagaaatctcccagggcgaggttggcatggatcagagcgtgaagcaagagcagctggagcacctgcatgctggcctccggtccgggtggcaccatggcccgcctgctgtgctgcctcctcttcagcaagaggacccagggaagcaggtggcgggtccttgtcccccgctgagctcggggccactgcacctggcccagccacagatcatgcacatggacagtcaggaatctttgagaaatcccttgatccaaccaacatcctatatgacaagcaagcacttacctgaacagccacacttatttccacatcaagagacaattccattttctccaatccagaatgccttgtttcagtttcagtatcctacagtttgtatggttcatttaccagctcagcagcctccctggtggcaggcacatttcccacatccctttgctcagcaccctcagaagagctatggcaagccctcttttcagacagaaatccattcgagctatcccttagagcatgtggcagagcacactggaaagaaacctgctgagtatgcacacacgaaagagcagacctacccatgttattcaggagcatcagggctacacccaaagaaccttcttccaaagtttccatcagaccagagcagtaagtcaactgaaacgccctctgagcaggttcttcaagaagattttgcctcggcaaatgctgggtctttgcagtccctcccaggaacagtggttcctgttcggatccagacgcacgtaccatcctatggaagtgtcatgtacacaagcatttctcagatacttgggcagaatagccctgccattgtcatatgcaaagtcgatgagaatatgacccaaaggacactggtcaccaacgcagccatgcaagggataggattcaacattgcccaggtgctggggcagcatgcgggcttggagaagtaccccatttggaaagcacctcagactttgcccctcggcttagaatcctccatccccttgtgtttaccttccacctctgacagcgtggccaccctgggaggtagcaagcgaatgctttctccagccagtagcttggagctcttcatggaaaccaagcagcagaaaagggtcaaagaagaaaagatgtacggacagattgtggaggagcttagtgctgtggagctgaccaactcagacatcaaaaaggacctctcccgcccccagaaaccccagctggttcgacaaggatgtgcttctgagccaaaagatggcttgcagtcagggtcatcttccttctcctcgctgtcgccctcctcatctcaagactatccttctgttagcccgtcttccagggagccattcctgcccagcaaggagatgctttccggttcccgggcaccacttccggggcagaagtccagtgggccttctgaaagcaaagaatcttcagatgaattagatatcgatgagacggcatcggacatgagcatgagcccacagagttcttcattaccagcaggagatggtcagctggaagaggaagggaagggccacaagcggcctgttggcatgctggtccgcatggcctctgcccccagcgggaacgtggcagactcaactcttcttctcacggacatggcagatttccagcagattcttcagttccccagtctgcggacaacaactactgtgagttggtgcttcttgaattatacaaaacccaattatgtgcaacaggccaccttcaaatcctcggtttatgcttcatggtgcattagttcctgtaatccaaacccatcaggattgaacaccaagaccacgctggctcttctgaggtccaagcaaaaaatcactgcagaaatttatactctggctgctatgcataggcctggaaccggcaagcttacatcatcaagtgcttggaagcagtttactcagatgaaacctgatgcgtcctttttatttggcagcaaactagaaaggaaactagtgggaaatatcttaaaggaaagagggaaaggagatattcatggagataaagatattggatccaaacaaactgagccaatccgaattaaaatatttgaaggagggtacaaatcgaatgaagattatgtatatgtcagaggacgtggccggggaaagtacatttgtgaagaatgtgggattcgctgtaagaagccaagcatgctcaaaaaacacatccgtacccatactgatgttcggccttatgtatgcaagttatgtaactttgccttcaaaacgaaaggaaacctaacgaagcatatgaaatctaaagcacacatgaaaaaatgcctggaattgggagtctcaatgacatcggtggatgatacagaaactgaggaagcagaaaatttggaagatttgcacaaagcagcagagaagcatagcatgtccagcatttcaactgatcatcagttctccgatgctgaggaatcagatggtgaggatggagatgataatgatgatgatgatgaagatgaagatgactttgacgaccagggagatttaacaccaaaaacaagatcaagaagcaccagtcctcagcctcctagattctcctccttgcctgtgaatgttggcgccgtaccccacggggttccttcagatagttccctgggacattcttcgttgatcagctatttggttactttgccaagtattcgagttactcagcttatgacacccagtgattcatgtgaagatacccagatgacagaataccagaggctattccagagcaaaagtacggactcagaaccagacaaagacagattggacatacctagttgtatggatgaggagtgcatgctaccttcagagccaagctcctctcccagggacttctcaccctcaagccaccattcctctccaggatatgattcttcaccctgtcgagataattcaccaaagaggtatctgatacccaaaggagatttatctcccaggagacatttatcacctaggagagatctgtcacccatgagacatctttcaccaagaaaggaagctgcattgagaagagagatgtcccaaagagatgtttcaccaagaaggcatttgtctccaaggaggccagtgtctcctgggaaagatatcacagcaagaagagacctctctcctagaagagagagaagatacatgaccacaataagagcgccatctcccagaagggctttataccataacccaccattgtccatgggacagtatttgcaagcagagccaattgtattggggcctcctaatttaagaagaggattacctcaggttccttacttcagtctctatggagaccaagaaggtgcttatgaacatccaggctccagccttttccctgagggtcctaatgactatgtcttcagtcatcttccactccactctcagcaacaagtgcgagcccctatccccatggtgcccgttggtgggatccagatggttcactccatgccgccagccctttccagtttacatccttcacccacattgcccctgccaatggagggctttgaggagaagaaaggcgcgtcaggggagtccttctccaaggacccctatgtgctttctaagcagcatgagaagcgaggtcctcacgctttgcagtcatctggtccacctagcactccctcctctcctcggctgttgatgaaacagagcacttcggaagacagcctaaacgcaacagagcgggaacaggaggaaaatatacagacttgtacaaaagccattgcctctctccggattgccacggaagaggcagctctgctcgggccagatcagccagcgcgggtgcaggagccccaccagaaccccctgggaagtgcacatgttagcattagacactttagtagacctgagccaggtcagccctgtacctcagccacccaccctgacttgcatgatggtgaaaaggacaattttggtacatcacagactccattagctcactccacgttttacagcaagagttgtgtggatgacaagcagttggactttcacagcagcaaggaattatcttcaagcacagaggaaagcaaagatccttcatcagaaaagagtcagctacattgatctatgatgcatggagactttcatttccacattttcccatttttttgtttttgtttttctagaaatggaggtaatccagtttatagcatgcctgtcctaagttacagtagtttgctattatatatacttttgttatatcaaaagaattaggtaaattaacaagtcatcatgagcctgaccaaaacaaaatttgaaattaacctattgggtctggtacttttaaaattgtacagatgtttgtgccttttctttactttgcttatattcttataagcattttttagcagtaatttgtacatattttagaatttgtgtatctgctttgtaataaatgtaatttctttccttttttggacacttggatctaaatgatgtaaagcaaaacagcatcaatatatatgtgaggttgcactaaaacatatttttatatgattaaaactgaacagcttttatgtacagctctgattctgtaatactaatatttatttactttgtttcataaattgtacattttttcttaatgttgtggattgcttttctatgtgaagcatgggatttactgttgcgtaactagaacaaaaatgtacattgtaaacaagatatttaaactagagtatcttattctgcacttatgcattagttaaaaaaagataaaggatgtatcagtcagttcttaactcttgtatatttttttgtctcttgtttgctggattgactataacttaagtgctgattgtgattttaaaatgatagtaccgtaaagcattaaagtaaacaatgtgctattgtgagttttttcaaagctttataaatcagttataaataatattaaaagtatttggtcttatgtgaacatgttgatctatatactcatctaaaaatatgggaaaacattccaccccatgtaaatatgtacaagtgcatcactggtacaattttatgtaactcagttggacactaggttgccacagacctatgctaggtgtctttaaaaaattaaggtgacaaagcacatgggactgtgtagagcttggttatcggccggcccggtggcttggcaggcagtgctgtgcgctgctcatggagaagacctgggcttagcaatctccttagttcttgctacacaggatggtgactggaactaaggctacacagagggtcgcacttggactctgagggttgggtgtggaagggggaaaaggagatggagacctgctccccagctcttcctgtcagccggtttacatgggaacagggttaacatctgtgttaggggaggtcaccttaccctttttcataggggaagagtgtcacactcctggctatctcagggggaatggggaaaagaatctttcaagggcaaagaactcgtgggaggatgtctgttgtatgtaatactcacaatggcttttggttagtgttgaaggtgggaagagcatttgtaggtccagaagagtgaaagagagggaggggtgcagcaacatgtgcacaggcacgcacatgtgtgcacgcacacatacaatctgggttatctttgtgctatatagtggattataattctgtgaaaccaagtttgtatattgaattacattaaggagtgttctttaaaaagagaaataaatatacaattacatgcttga

SEQ ID NO: 167454 - DNA, 7341 bp, Artificial Sequence
  derived and/or modified sequence
atggacacaggagacacagccctgggccagaaggccaccagccgcagcggggagacagacaaggccagcggccgctggaggcaggagcagagcgctgtgatcaagatgagcaccttcggcagccatgagggccagaggcagccccagatcgagcctgagcagatcggcaacacagccagcgcccagctgtttggcagcggcaagctggccagccccagcgaggtggtgcagcaggtggccgagaagcagtacccaccccaccggcccagcccctacagctgccagcacagcctgtccttcccccagcacagcctgccccagggcgtgatgcacagcaccaagccccaccagagcctggagggccccccctggctgtttcctggccccctgcccagcgtggccagcgaggacctcttccccttccccatccacggccacagcggcggctaccccaggaagaagatcagcagcctgaacccagcctacagccagtacagccagaagagcattgagcaggccgaggaggcccacaagaaggagcacaagcccaagaagccaggcaagtacatctgcccctactgcagccgggcctgtgccaagcccagcgtgctgaagaagcacatccgcagccacactggagagcggccctacccctgcatcccctgtggcttctccttcaagaccaagagcaacctgtacaagcacaggaagagccacgcccacgccatcaaggccggcctggtgcccttcacagaatctgctgtgtccaagctggacctggaggccggcttcattgatgtggaggccgagatccacagtgatggagagcagagcacagacacagatgaggagagcagcctgtttgctgaggccagtgacaagatgagccctggcccccccatccccctggacatcgccagcagaggaggctaccacggcagcctggaggagagcctgggcggccccatgaaggtgcccatcctgatcatccccaagagcggcatccccctgcccaatgaaagcagccagtacatcggccctgacatgctgcccaaccccagcctgaacaccaaggcagatgacagccacacagtgaagcagaagctggccctgcggctgtctgagaagaagggccaggacagcgagcccagcctgaacctgctgagcccccacagcaagggcagcacagacagcggctacttcagccgctctgagagcgctgagcagcagatcagcccccccaacaccaatgccaagagctatgaggagatcatctttgggaagtactgccgcctgagccccagaaatgccctgtctgtgaccaccaccagccaggagcgggccgccatgggcaggaagggcatcatggagcccctgccccacgtgaacacccggctggatgtgaagatgtttgaggaccctgtgtcccagctgatccccagcaaaggagatgtggaccccagccagacctccatgctgaagagcaccaagttcaacagcgagagccggcagccccagatcatccccagcagcatcagaaatgaaggcaagctgtacccagccaacttccagggcagcaaccctgtgctgctggaggcccctgtggacagcagccccctcatccgcagcaacagcgtgcccaccagcagcgccaccaacctgaccatcccccccagcctgcggggcagccacagctttgatgagaggatgactggaagtgatgatgtgttctacccaggcaccgtgggcatccccccccagaggatgctgcggcggcaggccgcctttgagctgcccagcgtgcaggagggccacgtggaggtggagcaccacggccgcatgctgaagggcatcagcagcagcagcctgaaggagaagaagctgagccctggggacagagtgggctatgactatgatgtgtgcaggaagccctacaagaagtgggaggacagcgagacccccaagcagaactacagagacatcagctgcctgagcagcctgaagcatggaggagagtacttcatggaccctgtggtgcccctgcagggcgtgcccagcatgtttggcaccacctgtgaaaataggaagaggaggaaggagaagtctgtgggagatgaggaggacacccccatgatctgcagcagcatcgtgtccacccctgtgggcatcatggccagtgactatgaccccaagctgcagatgcaggagggcgtgcgcagcggctttgccatggccggccacgagaacctgagccacggccacacagaaagatttgacccctgccggccccagctgcagcccggcagccccagcctggtgtctgaggagagccccagcgccatcgacagcgacaagatgtctgacctgggcggcaggaagcccccaggaaatgtcatcagcgtcatccagcacaccaacagcctgagccggcccaacagctttgagaggtctgagagcgctgagctggtggcctgcacccaggacaaggcccccagccccagcgagacctgtgacagcgagatcagcgaggcccctgtgtccccagagtgggcccctcctggagatggagctgagagcggcggcaagcccagccccagccagcaggtgcagcagcagagctaccacacccagccccggctggtgcggcagcacaacatccaggtgcctgagatccgggtgacagaggagccagacaagccagagaaggagaaggaggcccagagcaaggagcctgagaagcctgtggaggagttccagtggccccagaggtctgagaccctgagccagctgcctgctgagaagctgccccccaagaagaagaggctgcggctggccgacatggagcacagcagtggagagagcagctttgagagcactggaacaggcctgagccgcagccccagccaggagagcaacctgagccacagcagcagcttctccatgagctttgagcgggaggagaccagcaagctgagcgccctgcccaagcaggatgaatttgggaagcacagcgagttcctgactgtgcctgctggcagctacagcctgtctgtgcccggccaccaccaccagaaggagatgaggcgctgcagcagcgagcagatgccctgcccccaccctgctgaggtgcctgaggtgcgcagcaagagctttgattatggcaacctgagccacgcccctgtgtctggagctgctgccagcacagtgagccccagccgggagaggaagaagtgcttcctggtgcggcaggccagcttcagcggcagccctgagatcagccagggcgaggtgggcatggaccagagcgtgaagcaggagcagctggagcacctgcatgctggcctgcggagcggctggcaccacggccccccagctgtgctgccccccctgcagcaggaggaccccgggaagcaggtggccggcccctgcccccccctgagcagcggccccctgcacctggcccagccccagatcatgcacatggacagccaggagagcctgaggaaccccctcatccagcccaccagctacatgaccagcaagcacctgcctgagcagccccacctgttcccccaccaggagaccatccccttcagccccatccagaatgccctcttccagttccagtaccccaccgtgtgcatggtgcacctgcctgcccagcagcccccctggtggcaggcccacttcccccacccctttgcccagcacccccagaagagctatggcaagcccagcttccagacagagatccacagcagctaccccctggagcacgtggccgagcacacaggcaagaagccagcagaatatgcccacaccaaggagcagacctacccctgctacagcggggccagcggcctgcaccccaagaacctgctgcccaagttccccagcgaccagagcagcaagagcacagagacccccagcgagcaggtgctgcaggaggactttgccagcgccaatgccggcagcctgcagagcctgcccggcaccgtggtgcctgtgcgcatccagacccacgtgcccagctatggctctgtgatgtacaccagcatcagccagatcctgggccagaacagccctgccatcgtcatctgcaaggtggatgagaacatgacccagaggaccctggtgaccaatgctgccatgcagggcatcggcttcaacatcgcccaggtgctgggccagcacgccggcctggagaagtaccccatctggaaggccccccagaccctgcccctgggcctggagagcagcatccccctgtgcctgcccagcaccagtgacagcgtggccaccctgggcggcagcaagaggatgctgagccctgccagcagcctggagctgttcatggagaccaagcagcagaagagggtgaaggaggagaagatgtatggccagatcgtggaggagctgtctgctgtggagctgaccaacagcgacatcaagaaggacctgagccggccccagaagccccagctggtgcggcagggctgtgccagcgagcccaaggatggcctgcagagcggcagcagcagcttcagcagcctgagccccagcagcagccaggactaccccagcgtgagccccagcagccgggagcccttcctgcccagcaaggagatgctgagcggcagccgggcccccctgcccggccagaagagcagcggccccagcgagagcaaggagagcagtgatgagctggacattgatgaaacagccagtgacatgtccatgagcccccagagcagcagcctgcctgctggagatggccagctggaggaggagggcaagggccacaagaggcctgtgggcatgctggtgaggatggccagcgcccccagcggaaatgtggccgacagcaccctgctgctgacagacatggctgacttccagcagatcctgcagttccccagcctgcggaccaccaccaccgtgtcctggtgcttcctgaactacaccaagcccaactacgtgcagcaggccaccttcaagagctctgtgtatgcctcctggtgcatcagcagctgcaaccccaaccccagcggcctgaacaccaagaccaccctggccctgctgcggagcaagcagaagatcacagctgagatctacaccctggccgccatgcacaggcctggcaccgggaagctgaccagcagcagcgcctggaagcagttcacccagatgaagccagatgccagcttcctgtttggcagcaagctggagaggaagctggtgggcaacatcctgaaggagcggggcaagggggacatccacggggacaaggacatcggcagcaagcagacagagcccatccgcatcaagatctttgagggcggctacaagagcaatgaagattatgtgtatgtgcggggccggggccggggcaagtacatctgtgaagaatgtggcatccgctgcaagaagcccagcatgctgaagaagcacatccgcacccacacagatgtgcggccctacgtgtgcaagctgtgcaactttgccttcaagaccaagggcaacctgaccaagcacatgaagagcaaggcccacatgaagaagtgcctggagctgggcgtgtccatgacctctgtggatgacacagaaacagaggaggccgagaacctggaggacctgcacaaggctgctgagaagcacagcatgagcagcatcagcacagaccaccagttcagtgatgctgaggagagtgatggagaagatggagatgacaatgatgatgatgatgaagatgaagatgactttgatgaccagggcgacctgacccccaagaccaggagccgcagcaccagcccccagcccccacgcttcagcagcctgcctgtgaatgtgggcgctgtgccccatggagtgcccagcgacagcagcctgggccacagcagcctcatctcctacctggtgaccctgcccagcatccgggtgacccagctgatgacccccagcgacagctgtgaggacacccagatgacagagtaccagaggctcttccagagcaagagcacagattctgagccagacaaggaccggctggacatccccagctgcatggatgaggagtgcatgctgcccagcgagcccagcagcagcccccgggacttcagccccagcagccaccacagcagccctggctatgacagcagcccctgccgggacaacagccccaagcgctacctgatccccaagggggacctgagccccaggaggcacctgagcccccggcgggacctgagccccatgaggcacctgagccccaggaaggaggccgccctgcggcgggagatgagccagagagatgtgagcccccggcggcacctgagcccccggcggcctgtgtccccaggcaaggacatcacagcccggcgggacctgagcccccggcgggagcggcgctacatgaccaccatccgggcccccagcccccggcgggccctgtaccacaacccccccctgtccatgggccagtacctgcaggccgagcccatcgtgctgggcccccccaacctgcggcggggcctgccccaggtgccctacttcagcctgtatggagaccaggagggcgcctatgagcaccctggcagcagcctcttccctgagggccccaatgactatgtgttcagccacctgcccctgcacagccagcagcaggtgcgggcccccatccccatggtgcctgtgggcggcatccagatggtgcacagcatgcccccagccctgagcagcctgcaccccagccccaccctgcccctgcccatggagggctttgaggagaagaagggggccagcggggagagcttcagcaaggacccctacgtgctgagcaagcagcacgagaagaggggcccccacgccctgcagagcagcggcccccccagcacccccagcagcccccggctgctgatgaagcagagcaccagcgaggacagcctgaatgccacagagcgggagcaggaggagaacatccagacctgcaccaaggccatcgccagcctgcgcatcgccacagaggaggccgccctgctgggccctgaccagcctgcccgggtgcaggagccccaccagaaccccctgggcagcgcccacgtgtccatccgccacttcagcaggcctgagcccggccagccctgcaccagcgccacccacccagacctgcatgatggagagaaggacaactttggcaccagccagacccccctggcccacagcaccttctacagcaagagctgtgtggatgacaagcagctggacttccacagcagcaaggagctgagcagcagcacagaggagagcaaggaccccagcagcgagaagagccagctgcactag

SEQ ID NO: 167455 - DNA, 7341 bp, Artificial Sequence
  derived and/or modified sequence
atggacaccggcgacaccgccctgggccagaaggccaccagccggagtggcgagaccgataaggcatctggccggtggcggcaggagcagagtgccgtgattaagatgagcaccttcggttcacacgagggccagcggcaacctcagatcgaacccgaacagattggtaataccgcgtcagcccaactcttcggttcaggtaaacttgccagcccctctgaagttgtgcagcaggtggccgagaagcaatatcccccccaccgcccatccccttatagttgccagcattctctgagctttccgcagcacagccttccacagggagtaatgcactccactaagcctcaccagtccttggaaggccccccctggctgtttcctgggcctttgccttcagtggccagcgaagatctgtttccattccctatccatgggcacagcggcggttatccgagaaagaagatctccagccttaatccagcatattcacagtactcccagaagagtatcgagcaggccgaagaggctcacaagaaagaacataagccaaaaaagcccggcaaatacatctgcccctattgctctcgggcttgtgcgaagccttccgtgctgaagaagcatatccggtcacatacgggagaacggccctacccatgcattccttgcggcttcagctttaagaccaagtccaacctttacaagcatcgaaagtcccatgctcacgctattaaggccgggctcgtgcccttcacagaaagcgcggtgtcgaagttggaccttgaggctggattcatagatgtagaggccgagatccacagcgatggagaacagtctacagatacggatgaggaatcttctctctttgccgaagctagcgataaaatgtccccggggcccccaattcccctcgatatagccagtcgaggaggctatcacggtagtttggaagagtccctcggtggacccatgaaggttccaatcttgatcatccctaaaagtgggatcccactccctaacgaatcttcacagtacataggtcctgacatgttaccaaatccctcactcaataccaaagctgatgacagccacacggttaagcaaaaactggcgctgcggctgagcgagaaaaagggccaggacagtgaaccttctctcaacctgttatcaccacatagtaaggggagcacggacagcggatatttttctcggtctgagtccgccgaacaacaaattagtccacccaacaccaacgctaagagctacgaagaaatcattttcggtaagtattgtcggctctccccacggaacgccctctcagtcacgaccacatctcaggagagagctgccatgggacgtaaagggataatggaacctctgcctcacgtaaatactcgcctggatgtgaagatgttcgaggatcctgtttcccagctcatacccagcaaaggggacgtggacccgagccagacgtcaatgctcaagtccaccaagttcaactctgaatcaaggcaacctcagataatcccctcttctatacgcaatgaagggaaactatatcctgccaacttccaggggtcaaaccctgtgctgctggaagctccagtggacagctcaccactaatcagatccaattcggtgcccacaagctcagctacaaatctgaccatccctcctagtctgagagggtcgcatagctttgacgagagaatgacaggaagcgatgatgttttttatccaggcaccgtgggtattcctccgcagaggatgctccgcagacaggctgccttcgagttgccctccgtgcaagaaggccacgtggaggtggagcaccatggtcgaatgttgaagggaatttctagttcctccttgaaagaaaagaagctttcaccaggggacagagttgggtacgactacgacgtttgccggaaaccgtacaaaaaatgggaagattcagagacccctaagcagaactaccgtgatattagctgtttaagttctctgaagcatggcggcgaatactttatggatcccgtagtaccactgcagggtgtcccgagcatgttcggaacgacttgcgagaatcggaagaggaggaaagagaagtcagtgggtgatgaggaggacacaccaatgatttgcagctctatagtgagcactcccgtgggaatcatggcgtcggattatgatcccaagctgcaaatgcaggaaggcgtccgctctgggttcgcgatggcagggcatgaaaatctgtcccatgggcacacagagcggttcgacccctgtagaccccagttgcaaccgggcagcccatcgcttgtaagcgaagagtcaccttccgccattgatagcgacaaaatgagcgacttgggtggccgaaagccgcctgggaatgtgatcagtgtgatccagcacaccaatagcttatcgcgccccaacagttttgagagatccgaaagcgccgagctcgttgcctgtacccaggacaaagccccatctccatctgagacatgcgactctgagatcagcgaggcgccagtgagccccgagtgggcacctcctggtgatggtgcagagtcagggggcaaacccagcccatcccagcaggtgcaacagcagtcctaccatacacaaccaaggctggtaagacaacacaatatccaggtgccagagattcgcgttactgaggaaccagataaacccgaaaaggaaaaggaggcccagtcaaaggaacccgaaaaaccagttgaagaattccagtggccccagcgctctgaaacgttgtcacaacttcctgctgaaaagctgcctccaaagaaaaagcgtcttcgtctcgccgacatggagcattctagtggggaaagctccttcgaatctaccggcaccggactgtctcgctccccaagtcaagaatcaaatctctcccactcatccagcttcagtatgtcctttgagagggaagagacatccaagctgagtgctcttccaaagcaggacgagttcgggaagcactccgagttcttgaccgtccccgccgggtcctatagcctgtctgttccaggccaccatcaccaaaaggagatgaggcgctgcagcagtgagcagatgccatgtccccaccctgcagaagtgccggaggtccgttccaagagtttcgattacggaaacctctcccatgcccctgtaagtggagcagccgccagcactgtgtcaccatccagggaacgtaaaaagtgcttcttagtgaggcaagcctcttttagtgggagccctgaaatctctcagggtgaagtcggcatggaccagtcggtaaagcaggagcagttggagcatctccacgccggactacgaagtgggtggcaccacggcccccccgccgtgctgcctcccctgcagcaggaagatcccggtaaacaggttgcaggtccctgcccaccactgtcatccgggccactccatctagcacagccacagattatgcacatggacagccaggaatcattgcgtaaccccctgattcagcccacgagctatatgaccagtaagcacctacctgaacaaccccacttgtttcctcatcaagaaacaatcccattttcacctattcagaatgcattgtttcagtttcagtacccaaccgtctgtatggtgcatctgccagctcagcagcccccctggtggcaggctcactttcctcaccccttcgcacagcacccgcagaaaagctatggaaaacccagctttcagacagaaattcacagtagctatcccctggaacacgttgctgagcacacaggcaagaagcccgccgagtacgcccataccaaagaacagacctacccatgctattccggagctagcggactgcaccccaaaaatctcctgcctaagttcccaagcgatcaatcttcaaagtctactgaaacaccgtcagaacaggtgcttcaggaagattttgcctctgcaaatgccggctcacttcagagcctccctggcaccgtggtccctgtgagaatacagacacacgtgccaagttatggctccgtgatgtatacatctatatcccaaatcctggggcagaatagtccggctatcgtcatctgcaaggtggatgaaaatatgacccagcgcacgcttgtcacgaacgccgcaatgcaaggaatagggttcaatattgcccaggtgctcggccaacacgctgggctagaaaagtaccccatctggaaggctccccagaccctcccgctcgggctggagtcatccatcccactctgccttccaagcacatctgattctgtggcgacactaggcggatctaaacgcatgctgtcacccgccagcagcttagagctgtttatggagaccaaacagcagaagagggtgaaagaagaaaaaatgtacggtcagatcgttgaagagctgagtgccgtcgaactcacaaattcagacattaagaaggacctgtcaagacctcagaaacctcaattagtccgccaaggatgcgcgagcgagcctaaagacgggctacagagtggaagttcctcattctccagtttatctcccagctccagccaggactacccatctgtgagcccgagcagccgcgaaccctttctgccctccaaagagatgctgagcggctccagagcacccctcccagggcaaaagagttcagggccttcggagagcaaggagtccagtgacgagctcgatattgacgaaacggctagtgatatgtctatgtctcctcagtctagctctttacccgccggtgatggccaattggaggaggaaggtaagggccacaaacggccggtgggcatgctggtgagaatggcaagtgccccatccggtaacgttgctgacagcactctcctgctcacagacatggcggatttccaacagatcctgcagttcccctctctgaggaccaccacaaccgtgagttggtgtttcctgaactatactaagccaaattacgtccagcaggccacatttaaatcatctgtgtacgccagctggtgcatttctagttgtaatcctaacccctcaggtttgaacactaagacaacactcgcactcctccggtccaagcagaagattacggctgaaatctacacactagccgcaatgcatcggcctggcactgggaagcttactagttcgtcagcctggaagcagtttacccagatgaaacctgacgcaagttttctctttggcagcaagctggagcgcaaactcgtaggcaatatactgaaggaacgaggcaagggcgacatccacggtgataaggatatcggctcaaaacaaaccgagccaatccggattaaaatctttgagggtgggtataagtcaaatgaagactatgtatacgtcagaggacggggccggggtaagtacatatgcgaggagtgtggcatcaggtgtaagaaacccagcatgttgaagaaacatatccggactcataccgatgtgaggccatatgtttgtaaactctgcaatttcgcgttcaagaccaaaggtaatctcactaagcatatgaagagtaaagcccatatgaaaaagtgtctggagttaggagtttctatgactagcgtcgacgacaccgagaccgaggaggccgaaaacttggaagatctgcacaaagccgccgagaaacatagcatgagctccatcagcaccgatcatcaattttctgatgctgaagagagcgacggtgaagacggggacgacaatgacgatgatgacgaagacgaggatgatttcgacgaccagggggacctcacaccgaaaactcgatctagaagcaccagcccccagcctccaaggtttagtagtctgccggtaaacgtgggtgccgtgccacatggggtgcctagtgactcatccttgggtcacagttcactgatttcatacctggtcactctcccgtcaatccgcgtgacccagttgatgactccatccgactcttgtgaggatacacagatgactgaatatcagcgactctttcagtctaagtccaccgactctgagcccgataaggaccggctggatataccaagctgcatggatgaggaatgtatgctgccatcggagccaagcagctccccaagagacttcagccctagcagccaccactcctctccaggctatgattcttccccatgtcgcgataacagccccaagaggtacctgattccaaaaggtgatctgtcaccacggcgccacttgtctcctaggcgggacctgagcccgatgcgccatcttagtcctaggaaggaagccgcgctccggagagagatgtcccaacgcgacgtatctccgcggaggcacttaagcccccgccggcctgtctctcccggcaaggatattacagcgcgtcgggacctgtccccccgcagagaacgtcggtacatgaccaccattcgcgccccctccccacgcagagcgctctaccacaacccaccgttgtccatggggcagtatctacaggcagagcctatcgtcctcggcccacccaacttgagaagggggctgccacaggtgccttattttagcctgtacggagatcaggaaggtgcatatgagcaccctggctcctctttgtttccagagggacccaacgattacgtgtttagccacctgccactgcatagccagcaacaagtacgggcccccatccccatggtccctgtgggagggattcagatggtgcatagtatgccccctgccctatctagtcttcacccctctcccacactgcctctgccaatggaggggttcgaggaaaagaaaggagcatccggcgagtccttctcaaaagacccctatgtcctcagcaagcagcacgagaagaggggacctcatgcgcttcagagcagtgggccaccatccactccttctagcccccgcctgcttatgaagcagtctacctcagaagacagcttaaatgcgaccgaaagagagcaggaagaaaatattcagacatgcaccaaagctatcgcttcattgaggatcgccactgaagaggccgccctgcttggtccggaccaacctgctagggtgcaagagccccaccagaaccctctcggatcggcgcacgtctctatccgccatttcagccgacccgagccagggcagccttgcacctcagcaacccacccagacctgcacgatggagagaaggacaacttcggtacctctcagacacccttggcacatagtacgttttacagcaagagctgcgtagatgataaacaattggacttccacagtagtaaggaactttcaagctccactgaagagagcaaggatccttcatctgaaaagagccagcttcattag

SEQ ID NO: 167456 - DNA, 7341 bp, Artificial Sequence
  derived and/or modified sequence
atggacaccggcgacaccgccctgggccagaaggccaccagccggagtggcgaaacggataaggcttcaggccgatggcgccaggaacagagcgcagtaatcaagatgagtacattcggcagccacgaaggccagcgtcaacctcagatcgaacctgaacagatcggaaatacagcctccgcacagctcttcgggagcggaaagctagccagcccgagtgaggtcgtgcaacaggttgccgaaaaacagtaccccccccaccggccctctccttattcttgtcagcatagcctgtctttcccccagcactcactgcctcaaggtgtgatgcactctactaaaccacaccagtcattagagggcccgccgtggctgttccctggacccttaccctctgtcgcctccgaggatctgtttccattcccaattcacggacattctgggggttatccacggaaaaaaatctccagtctaaaccccgcctacagccaatatagccagaaaagcatcgagcaggccgaggaagcccacaagaaggagcataagcctaagaagcccggcaagtacatttgtccttactgtagcagagcatgcgccaagccttccgtgctgaagaagcacataagaagccatacgggtgagcgcccgtacccctgcatcccatgcggcttttccttcaaaaccaagagtaatttatacaagcaccgcaagagccatgcccacgcaatcaaggctgggctggtgccttttacggagagtgcagtatcgaagttggacctggaagccgggttcattgatgtggaggccgaaatccactccgatggtgagcagtccaccgacactgacgaggaatcaagtcttttcgctgaggcgtccgacaagatgagccctggaccacctattccactggacatcgctagtcgcggtggctaccatggttcactagaagagtctctcgggggtcccatgaaggtcccaattctgatcattcctaagagcggaatcccgctccctaacgagagctctcagtatatcggaccagatatgctccctaatccaagtctgaacaccaaggcagacgatagtcataccgtgaaacagaaactggctctgcggctttcagaaaagaaaggacaggatagtgaaccttctctgaatctgctatcccctcactccaagggaagtaccgactccggctacttctcgcgctcagagagtgccgagcagcagatcagcccccccaacactaacgccaagagttatgaggaaatcatctttggaaagtattgccggctgagccccaggaacgctctgagcgtaactacaacgagccaggaacgcgctgcgatggggcggaagggcatcatggagccactgccacacgtgaacacccgtttggatgtgaagatgtttgaagatcccgtgagccagctgataccaagcaagggcgatgtcgacccgtcccagacctctatgctgaagagcaccaaattcaacagcgaatcgagacaacctcagatcataccttcaagcataaggaatgagggcaaactttaccccgcaaactttcagggctctaatccagtgttgctggaagcaccggtagactcttcccccctgattagatccaacagcgtgcctacaagctccgcaacaaatctgaccatacccccatccctgagggggagccactcatttgatgagcggatgacgggcagcgatgacgtgttctaccccggaactgtaggtattcccccgcagcgtatgctgaggaggcaagctgctttcgagcttccatcagtccaggagggccatgtggaagtcgaacatcatggcagaatgttgaaagggatctcgtcgagttctctcaaagagaagaagctgtctcccggagatcgggttggatacgattatgacgtgtgccggaagccgtataagaaatgggaagatagcgagaccccaaagcagaactatcgagacatctcgtgtttatcttccctgaaacatgggggagagtactttatggaccccgttgtgccactccagggagtgccctctatgtttgggacaacctgcgaaaacagaaaaagacggaaagagaagagcgtcggcgacgaggaggacacgcccatgatctgcagtagcattgtgtccacacctgtcggaatcatggcttccgattacgatccaaagcttcaaatgcaggagggagtgaggtctggtttcgcaatggcggggcatgagaacttgtctcacggtcatacggagcgcttcgatccatgccggccccagcttcagccaggctctccgtcgctggtgtccgaggaatccccgagtgcgattgatagtgacaagatgagcgatttgggcggaaggaagccccctggtaacgtgatctccgtgattcagcacacaaactctctcagccggcccaactccttcgagcggtctgagagcgcagaactggtggcatgtacccaggataaagccccttctccttcagagacctgtgatagtgagatctccgaagctccagtcagtccggagtgggctcctcccggggacggcgccgagtccggcggtaagccctccccctctcagcaggtgcagcagcagagctaccacactcagcctagactggttcgccagcataacattcaggtacccgaaattcgagtcaccgaggaaccagacaagccagaaaaggagaaagaggctcaatctaaggagccagagaaacccgttgaagagttccagtggcctcagaggtctgagaccctgagccaactgcctgcggaaaaactgccgcctaagaaaaagcggctcaggctggcggatatggagcattcctccggagagagctcctttgaatccacagggacgggattatccagaagtcctagccaggaaagcaacctgtcacacagcagctccttttctatgtcattcgaacgcgaagagacaagcaagctatccgccctcccaaaacaagacgagtttggcaagcattccgaattcctgacagtgccagccggttcttactccctttcagttcccgggcatcatcaccagaaggaaatgcggcgttgtagctcagagcagatgccctgccctcaccctgcagaggtcccagaagtgaggtcgaagtcttttgactatggaaatcttagccacgcccctgtgagcggcgctgccgcctccacagtgtcccccagcagggaacgcaaaaagtgcttcctggttaggcaggcctctttcagcggctctccagaaatctcccagggcgaagttggtatggaccagtctgttaaacaagagcagctggagcatctccacgcggggttacggagcggctggcatcacgggcctcccgccgtgctaccccctttacagcaggaggatcctggcaagcaagtggctggaccttgcccgccactatctagtgggccgctgcacctggcacagccacagatcatgcatatggattcccaggaatcccttcgaaaccctctcatacagccaacatcatatatgacttcaaaacacctgcccgagcagccacatctttttccacatcaggagactattcccttctcccccatccaaaacgctctgttccagtttcagtaccccaccgtctgcatggttcatctgccggcccagcagcccccgtggtggcaggcccatttcccacacccttttgcccagcatccacagaaatcatacggtaagccatccttccagacagagatccactcctcatatccgttggaacacgtggcagaacataccggcaaaaaacccgccgaatatgcacatacaaaagaacaaacgtacccttgctactctggggcctcaggcctgcatcccaagaacttgctgcccaaatttccaagtgatcagagcagcaagtctacagagactccttcagagcaggtcctgcaggaggactttgcaagcgcaaacgccggttcactccagtcgttaccaggaacggtggtcccagtcagaatccagacacacgttccttcctatggaagcgtcatgtacacctccatcagtcaaatcctggggcagaactccccggctatcgtcatttgtaaggtcgatgagaacatgacccaacgaactctggttaccaacgctgccatgcagggcattggctttaacatcgctcaggtgctagggcaacatgccggtctggagaaataccctatatggaaagcccctcaaactctgccgctcggactggagtccagtatccccctgtgtcttcctagtactagcgactcagtcgccacactgggggggtcaaaacgcatgctgagtcctgcctcttctctagaactttttatggagacaaaacagcaaaaaagagtgaaagaagagaagatgtacggccagatagtagaggaattgagcgcggtagaactaaccaatagcgatattaagaaggatttatccaggccacaaaagccgcagctggtgcgccagggatgtgctagtgagccaaaagacggcctacaatccgggtcctccagtttctctagcttgagtccatcctcatctcaggactatcctagcgtaagtccaagctccagagagccattcctgccatctaaagaaatgctgtcaggatccagagctccgttacctggccagaagagtagcggtccctcggagagcaaggagtcatccgacgaactcgacatcgacgaaacggcgtctgacatgagcatgagcccccaaagctcatctttaccggcaggagacggccagctggaggaagaagggaaaggtcataaacggcccgtgggaatgctggtgcgaatggctagcgcccccagcgggaatgtggctgatagcacactcctactgaccgacatggctgattttcagcagatcctgcagtttcctagccttcgaaccaccaccacagtgagttggtgctttctcaactacacaaaacctaattatgtacagcaggctaccttcaaatcttctgtctacgcaagttggtgcatctcatcctgcaaccctaatccatctggcctgaatacaaagaccacccttgcgttgctgcggagcaaacaaaagattactgctgagatctacactctcgctgcaatgcaccgacctggaacaggaaaactcacctctagtagcgcttggaagcagtttacacagatgaaacctgacgcctccttcctatttggctctaaactggagaggaagctcgtggggaatattctgaaagagagaggcaagggcgacatccacggcgataaggacatcggaagcaaacagactgagccaattcgaatcaagatcttcgagggaggatataagtcaaacgaagactatgtctacgttcgggggcggggtagggggaagtatatctgcgaggagtgtggaattaggtgcaaaaaaccttccatgcttaagaagcatattaggactcacacagatgtcaggccttacgtttgcaagctgtgtaatttcgcctttaagactaagggcaacctgactaaacatatgaagagcaaggcccacatgaaaaagtgcctggaactgggggtctcaatgaccagcgtggacgacaccgaaaccgaggaagctgaaaacctggaggatcttcacaaggcggcagagaagcacagcatgtcctctattagcaccgaccaccagttttcagacgcggaggagtctgacggcgaggacggggatgacaatgatgatgacgacgaagacgaggatgatttcgatgaccagggagatctgacccccaaaacccggagcagatcgacatcccctcagcccccccgctttagttccttaccagtgaatgtaggagctgtgcctcacggagttccctcggattctagtcttggtcactccagtctgattagctacctcgtcacactcccaagtattcgggtgactcagctgatgactcctagcgactcgtgtgaagacactcagatgaccgaataccagagactgttccagtccaagtcgacggatagcgagccagacaaggaccggttagatataccaagttgtatggacgaggagtgtatgctcccgtctgagcccagcagttcaccacgagatttctcgccatcgtcccatcattcctcccctggctacgattcctccccctgtagggacaattcaccgaagcgttacttgatccccaagggagatctgagcccacgacgacatctgtcccccagaagggacctctccccaatgcgtcacctgtcccctcgaaaagaggccgctcttaggcgggagatgtcccagagagatgtttcccctcgtagacacctgagcccaaggaggccagtgtccccaggtaaggatattacggcacggcgcgatctgagccccaggagggaaagaaggtacatgactacaatcagggcgccgtcaccgcgtcgcgctttataccacaacccccctttgtccatgggacagtatctgcaggccgagcctatcgtcctggggccccccaatctcagacgtggtcttccacaggtgccttatttttccttgtacggggaccaggaaggcgcatacgagcatccagggagctccctgttcccagagggacccaatgactacgtgttttcccacctgcccttacactcccagcagcaagtgagggcgcccattccaatggtgccggtcggcggcatccaaatggtccactctatgccacctgccctgtcctctctgcacccatcgcctacactgcctctgccaatggaggggtttgaagaaaagaaaggggccagtggtgagagtttttctaaggatccctacgtgctgtctaagcagcacgagaagagaggaccccacgctctccagagctcagggccacccagtactccctcatcccccagattgctgatgaagcagtccacctccgaggactccctcaatgccaccgaaagggagcaggaggagaacatccagacttgcaccaaagcgattgccagtctccgcattgccactgaggaagctgcactgctcggccccgaccagcccgcaagagtccaggaaccccatcagaaccccttggggtcagcacatgtgtctattagacacttctcacggccggagcctgggcagccgtgcacaagcgcaacccacccagaccttcacgacggagagaaggacaacttcggcacgtcgcagacccctctggcccacagtacattttatagtaagtcatgcgttgacgataaacagctagatttccatagttccaaagaactttcatcatccacggaagagtctaaagatccgtcaagtgagaagtcgcagctgcactag

SEQ ID NO: 167457 - DNA, 7341 bp, Artificial Sequence
  derived and/or modified sequence
atggacaccggcgacaccgccctgggccagaaggccaccagccggagcggagaaaccgataaagcctctggaaggtggcggcaagaacaaagcgccgtaattaagatgtccacctttgggagtcatgaaggtcagagacaacctcagattgagcctgaacagatcgggaatacagcatcagcccagctcttcggcagtggcaaattagccagcccctcagaggtggtgcaacaggtcgccgagaagcagtatcctcctcaccgtccttcaccttactcttgtcagcattctcttagttttccacagcactcacttccacagggggtcatgcactcaactaagccgcaccagtcactggaggggcccccatggctgtttcccggccccctgcctagcgtcgcgagcgaagacctcttcccgttcccgatccacggtcactcaggtggttatccgagaaaaaagatttccagcttgaacccagcttattctcagtactctcagaagagtatcgagcaggccgaggaagcacacaagaaagaacacaagcctaagaagccaggtaagtatatctgcccatactgtagccgtgcttgcgcaaagccatctgtgctaaaaaagcacatacgctcccataccggcgagcgtccttatccatgtattccgtgcgggttctccttcaagactaaaagcaatttgtacaaacatcggaagtcccatgcccacgctatcaaggctggtcttgtgccctttactgagtcagccgtgtcaaagctggacctagaagctggctttattgatgttgaggctgagatacactccgatggggagcagtccacagatactgatgaggaatcctccctgtttgctgaagcctccgacaaaatgtccccaggaccccctatcccactcgatatcgcctcccgtggtgggtatcatgggtcattagaggagtcactgggcggacccatgaaggtcccaatccttatcattcctaagtctggtattccacttcctaatgagagctcccagtacattgggcctgatatgctcccaaatccgagcttgaatactaaagctgatgattcccacaccgtgaagcagaagctggcgctccggcttagcgagaaaaagggacaggattcagaacccagcctcaacctgctgagccctcacagtaaggggtctaccgactctggctacttctcaagaagcgagagcgcggagcagcagatcagcccacccaacaccaatgcaaagtcatacgaggaaattattttcggaaaatattgtcggctttccccccggaacgctctgtccgtcaccaccacaagtcaggagcgcgctgcaatgggccggaagggaattatggagcccctcccccatgtgaacactcgacttgacgttaagatgttcgaggatcccgtttctcagctcatcccgtccaaaggtgacgtggacccatcacagacctcaatgctcaaaagtacaaagtttaactcggaatcgaggcagccccagatcattccgtcttcaatccggaacgagggtaaactctacccggcaaattttcagggttccaacccagtgctcttggaagcacctgtagacagttcacctcttatcagaagtaactctgtgcccacctcctctgcgactaatctgaccatcccgccaagcctaagggggtctcattcgttcgacgaacgcatgacgggttctgacgacgttttttaccccggaaccgtagggattccccctcaacgaatgctacggaggcaagctgcatttgaactgccatccgtgcaggaaggccacgtagaagtggagcaccatggacgtatgctcaagggaattagttcttcctcactgaaggagaagaaactgtctcccggggaccgggtgggctatgactacgacgtgtgccgcaagccctataagaagtgggaagatagcgagacgccaaaacagaattaccgggatatcagttgtttgagtagcctgaaacacggcggagagtatttcatggaccctgttgtgccactacagggggtaccctctatgttcgggaccacttgtgaaaatcgaaaacgccgcaaggaaaaaagcgttggcgatgaggaggacaccccaatgatatgttctagtattgtctccactcctgtgggaatcatggcctctgattatgacccgaagctccaaatgcaggagggagtgcgtagcggcttcgccatggccgggcatgaaaatcttagccatgggcatacagagaggttcgacccatgtagacctcagctacaacctggttcacctagcctcgtgagcgaagaaagcccttctgctattgactctgataaaatgtccgatctgggagggcggaaaccaccaggaaacgtcatttccgttattcagcatactaatagcttgtctagaccaaatagctttgaacgctccgagagtgccgaactcgtggcctgtacccaagacaaggctcctagcccgtctgaaacttgcgacagtgagatctccgaggctcccgtctcacccgaatgggccccgccgggcgatggggcagagtccggaggcaaacctagcccaagccagcaggtacaacagcagtcttatcatacgcaacctagattggtaaggcagcacaatatccaagtgcccgaaattcgagttacagaagagccagataagcccgaaaaagaaaaagaggcccaaagtaaggagccggaaaaaccggtggaggaattccaatggccacagcggagcgagaccctgtcccagttgcctgctgaaaaattacctccaaagaaaaaacgcctccgcctggctgatatggagcactcctctggcgagtcatcttttgaatctacagggactggcctgagccggtcccccagtcaagagtccaatctgagccattcttcttccttttcaatgtcttttgagagagaggagacatcaaagctttctgcgctgccaaaacaggatgaatttggaaaacattccgagttcttaactgtacctgcagggagctactcccttagtgtgccaggacaccaccaccagaaggagatgagaagatgttcgtctgaacaaatgccttgtccacacccggccgaggtgccagaggtgagatccaagtcatttgattatgggaatctgtcccacgcacccgtgagcggagcagctgcaagcaccgtgagcccaagcagggaaaggaaaaaatgcttcctggttagacaagcctcctttagcggatctcccgaaatatctcagggcgaagtaggtatggatcaaagcgtcaaacaggagcaacttgaacatctgcatgctggattaaggtccggatggcaccacggcccaccggccgtcctgccccccctccaacaagaggatcctgggaaacaggtagccggcccctgtcctcccctgtccagtggtcctttgcatctagcacaaccacaaatcatgcacatggacagtcaggaaagcctgagaaatccgctgatccagcctacgagttatatgacctctaaacatctccctgagcagccccacctgtttcctcaccaagagacaataccttttagtccaattcagaacgctctcttccagttccaatatccaactgtctgtatggtgcatcttcctgcccagcaacctccttggtggcaggcccattttccacacccttttgcccagcaccctcaaaaaagttatggtaagccaagcttccagaccgagatccactcttcctatcctctggagcacgtggctgagcacacaggtaagaagccagctgaatacgcacatacgaaggaacagacgtacccttgctattccggcgcctctggactgcatccaaagaacctgctcccaaagttcccatctgaccaaagcagtaagtccacagaaacaccttccgagcaggttctgcaagaggacttcgcctcagccaacgcagggagcttgcagtcccttcccgggacagttgtacctgtgcgcattcaaacccatgtgcctagctatggcagtgtgatgtatacctcgatatcacaaatcctgggacaaaacagtcccgcaattgtcatttgcaaggttgacgaaaatatgacccagcgtacactcgtcaccaacgcagccatgcaggggatcggcttcaatatcgcacaggttctggggcaacacgccggtttagaaaaatatcccatttggaaggcccctcaaacattgcctttggggctcgaatcttctattcccctgtgcctcccaagcacttcagactcggtggcgactcttggaggctctaaaaggatgttatcgcccgcatcgtctcttgaactgtttatggagaccaaacagcagaaacgggtcaaagaggaaaaaatgtacggccagatagttgaagagttgtccgctgtcgaactgactaattccgatattaaaaaggatctgtctcgcccacagaagccccagttagtgcgccagggttgtgcaagtgagcccaaagatggcctgcagagcggtagtagctcattctcatccttgagtcctagtagcagtcaggactatcccagtgtgtcaccctcgagtcgggaaccttttcttccttccaaggaaatgctctctggctctagagcaccactgcctggccagaagagttcagggccttccgagtccaaggaaagtagcgatgaattggatatcgatgaaaccgcttccgacatgtctatgtcccctcaatccagttcactgcctgccggagatggtcagctggaagaagaaggaaagggtcataagaggcccgtcggaatgctcgttcggatggccagtgccccctccgggaatgttgctgatagcacactgctgcttactgacatggccgatttccagcagatcctccaatttcccagtctgcgcacaacgactaccgtatcttggtgctttctcaattacacgaaacccaactatgtgcagcaggctacctttaaaagctctgtttatgcctcctggtgtatttcatcctgcaaccccaatcccagcggcctgaacacgaagacaacattagcactactccggagcaagcaaaaaattaccgcagagatatacactctggcagctatgcatcgcccagggacggggaagctaaccagctcaagcgcttggaaacagtttacacagatgaagccagacgcctctttcctcttcggaagcaaacttgagcgcaaactcgtgggcaatatcctcaaggagagaggaaagggcgatatccatggggataaggatattggaagtaagcagactgaaccaattcggattaaaatcttcgaaggcgggtacaagagtaacgaggattacgtgtacgttcggggaagaggaagaggaaagtacatatgcgaggaatgtggaatcagatgtaagaagccctccatgctgaaaaaacatattcgcacacacactgatgtcaggccctatgtgtgtaagctgtgcaattttgccttcaaaactaaaggtaatctgactaaacacatgaagagtaaggcccacatgaaaaaatgcctcgagctaggcgtatccatgacctccgttgacgacactgaaactgaggaggctgaaaatctggaggatttacataaggccgccgaaaagcatagcatgtctagtatctcgaccgatcaccagtttagcgacgcagaggagtctgacggagaggacggagacgataatgatgatgacgatgaggatgaggatgactttgatgatcaaggggacctgacccctaaaacccgcagtagatcaacgagtccccagcccccccgtttctcgtctttacccgtaaacgtgggggccgtgccccatggagtgccctccgactcgagcctgggtcacagttctctaatttcttacctggttacacttccgagtattcgcgtcacccaacttatgactcctagcgactcttgcgaggatacacagatgacagaataccagagactgttccagtccaagtccacagactccgagcccgataaagatcgcctcgacatcccaagttgcatggacgaggagtgtatgctgcccagcgagccatcgtctagtccccgggacttctctccaagcagccatcatagctctccaggatacgacagctcaccatgtagggacaattccccaaaacgttaccttatccccaaaggcgatttgtcacctcggaggcacctttctcccaggcgggacctcagtcccatgcggcacctgagccctaggaaggaggccgctttacgaagagagatgtctcagcgcgacgtgtccccccgacgccacttgtcccccaggcggcccgtgtctccgggcaaagatataacggctagacgcgatctcagtccaagacgggagcggcgttacatgacgaccatccgagcgccatctcctcgtcgagccctctatcataacccaccactctctatgggtcagtacttgcaagcagagcctattgtgctgggaccgccaaatcttcgccgagggctaccccaggttccttatttctctctctatggagaccaagagggggcgtacgagcatcctgggtcgtctttgttccctgaggggcccaacgattatgtgttcagccacctcccgctgcacagccaacagcaagtcagggccccaattccaatggtgcctgtaggtggcattcaaatggtgcacagcatgcccccggccctctcaagtctgcacccatctccaactctgcccctgcccatggaggggtttgaggaaaagaaaggcgctagcggagaaagcttttctaaggatccatatgtgctctctaaacagcacgaaaagagaggaccacacgcactccagtcaagtggtcctccgagtactccttcctcacctcggctgctcatgaagcagtctacctcagaggattccctgaatgctaccgagcgtgagcaagaggaaaatattcagacctgcaccaaggccatcgctagcctccgcatcgctactgaggaggcggctttactgggacccgaccagcccgcacgcgtgcaggagccacaccagaatcccctgggatccgcacatgtcagcatccgtcactttagccgccctgaaccgggacagccttgtacctcagccacccacccagacttacacgatggagagaaggataactttggcacgtcccagactccacttgcgcacagcactttttatagcaagagctgcgttgatgacaaacagctggacttccattccagcaaggagctcagctcctctacagaagagtccaaagacccgtcgtccgaaaaatcacagctgcactag

SEQ ID NO: 167458 - DNA, 7341 bp, Artificial Sequence
  derived and/or modified sequence
atggatacaggcgatactgcccttggccagaaagccacctcacgatccggggaaactgacaaagcatcaggcaggtggaggcaggaacaaagtgctgtgataaaaatgagcacattcgggtcacacgagggacagagacagccgcagattgagcccgaacagatcggtaacaccgcttctgcacagctgttcggcagcggcaagcttgcgagcccatcggaagtggtgcagcaagtcgccgagaagcaataccctccacatcgcccttctccttatagctgccagcattccctgagcttcccgcagcacagcctcccacaaggagtgatgcatagtaccaaaccacaccaatctctcgaaggcccaccctggctgtttcccggaccactgccgagcgtggcctccgaggatctcttcccatttccgatacacggccactccggaggctacccaagaaaaaaaatttccagtctgaatcccgcatattcccagtacagtcaaaaatcaatcgaacaagctgaggaagcccataaaaaggagcacaagccaaaaaaacctggtaagtatatctgtccctactgctcgcgtgcatgcgccaaaccttccgttttaaaaaaacacattaggagccatacaggggaacgaccgtatccctgcatcccatgcggtttttctttcaagactaaatccaacctctataagcaccgcaaatctcacgcccatgcaattaaggcaggactcgtcccattcactgagtccgccgtgtctaaattagatcttgaggccggtttcatcgatgtggaagcggagatccatagtgacggggaacaaagtaccgacactgacgaggagtcttcactttttgctgaagctagcgacaagatgagtcccggaccccctattcctttggatatcgcctcaaggggcggttatcatggatctttagaagagtccctggggggtcccatgaaagtaccgatcttaataatcccaaaatccggcattcccctgcctaatgagagtagccagtacataggccctgatatgctgcccaatcccagcttaaacaccaaagccgacgactcacacaccgtcaagcaaaaactagccctacgcctgtccgagaagaaaggtcaggattctgagccttccctcaacttactgagcccacattcgaaagggagtaccgatagcggatatttttccaggagcgagtccgccgagcagcagatcagcccgccaaataccaacgctaagagttacgaggaaatcattttcgggaagtattgccggctatcccccagaaatgccctgtccgtaacaacaactagccaggaacgggctgccatgggcaggaaaggtatcatggagcctctgccccacgtaaacactcggctggatgtgaaaatgttcgaggacccagtatcccagctcatccctagcaagggagatgtagatccaagccagactagcatgttgaagtccaccaagtttaattcagagtcgcggcaaccacagattatcccctcatcgattcgcaatgaaggaaaattgtatcccgcaaattttcagggcagtaatcccgtgctgctggaagcgcctgtggatagcagtcccttaattaggagcaactctgtgccaacaagcagtgccactaacctcactatcccacccagcctcagagggagccactcatttgatgagcggatgaccggtagcgatgatgtcttctaccccggtaccgtcggaatccctccacagcgtatgctgaggaggcaggctgcatttgagctgccttcagtacaggagggtcatgtagaggtggaacatcatggcaggatgctaaagggaatctcaagttctagtcttaaagaaaaaaaactctcccccggtgaccgagtaggctatgactacgacgtgtgtcgtaagccttataagaaatgggaagacagcgagacaccaaaacagaactacagagatataagctgcctctcaagcctcaagcacggcggagagtacttcatggacccggttgttccccttcagggcgtaccttccatgttcggaacgacctgcgaaaaccgaaagcgccgtaaggagaagtccgttggcgacgaggaggatacaccaatgatttgttcttcaattgtgagcactcccgtcgggatcatggcatcagattacgaccctaaactacaaatgcaggagggagttaggtccgggtttgccatggcgggtcacgaaaatctcagtcacgggcatactgaaaggttcgacccttgccggcctcaactgcagccgggatcacctagcctcgtgtctgaggagtctccgtctgcaatcgattctgataagatgagtgatctcggcggtcggaagccccctggcaatgttatctccgttattcagcacacaaacagcctgtcacgccctaacagttttgagcgttctgagagtgcagaactcgtcgcttgcacccaggataaggccccatccccatctgaaacttgcgactcagagatcagcgaagcccctgtgtcacccgaatgggccccaccaggcgacggcgctgagtctgggggaaagccctctccctcccagcaggttcaacagcagagttaccacacacagccaaggcttgtcaggcagcacaacatccaggtccccgaaatccgggtgactgaggaacccgacaagcccgagaaagagaaggaggcgcagagtaaggagcccgagaaacctgtggaggagtttcaatggccccagcgaagcgagacactgagccaactgcctgctgagaagctcccaccaaagaaaaaaagactccgcctggccgacatggagcactccagcggcgagagcagctttgagtctaccggtaccggcctcagtcgcagccctagccaggaatcaaacctcagtcactcatcctccttctcaatgagcttcgaacgagaagagaccagcaagctgtccgctctgccaaagcaagacgaatttgggaaacactctgaattcctgacagttccagccggatcctacagccttagtgtccctgggcatcaccatcaaaaagaaatgcgacgctgttcgtcagagcagatgccatgcccccatcccgcagaagtaccagaggtgagatcaaagtcctttgactatgggaacctttctcacgcacccgtgagtggcgcagccgcttctaccgtgtcccctagtcgtgaaagaaagaagtgcttcttggtgagacaggcgtccttctccggcagccccgaaatatcacagggcgaggtgggtatggatcagtccgtcaagcaggaacagctggagcatctgcatgcaggcctgagatctggatggcaccacgggcctccagcagtgctgccaccccttcagcaggaggaccctggtaagcaggtggcgggtccttgtcctcctctcagcagtgggcctttgcacctcgcccaaccccaaattatgcacatggattcccaggaaagtctgagaaacccgctcatccagcctacatcatatatgactagtaagcacctgccagaacagccacatctgttccctcatcaggagacaatccccttctctcccatccagaacgccctgttccagtttcaataccccactgtctgcatggtccatcttcctgctcagcaacccccttggtggcaagcacactttccccatccatttgctcagcacccacagaagagctatgggaagccatctttccagacagaaatacatagttcttacccactggagcatgtcgcagagcacaccgggaaaaagcccgctgagtatgcacacactaaagagcaaacttacccatgttattctggagccagcggactgcaccccaagaaccttttgcctaaattcccaagtgaccagagctccaaatccaccgagacaccatccgaacaggtcctgcaggaggattttgcctcggccaatgccggaagcctccagagtctgcctggaaccgtggtcccagtgcgaattcagacgcacgtcccgtcgtacggttcagtgatgtacacatctatttctcagatccttggccagaactcacctgcaattgtaatttgcaaagttgacgagaacatgactcaacgaacgctcgtcaccaatgccgcaatgcagggaattggtttcaacattgctcaggttctcgggcagcatgctggcttggagaagtacccaatatggaaggcccctcagacgctcccacttgggttagaatcctctatcccgctgtgtctgcctagcacatccgattctgtagctacactgggaggctcaaaacgaatgttaagcccagctagctcactggaattgttcatggaaacaaagcagcaaaaaagggtaaaggaggagaagatgtatggtcaaatcgttgaagaattatccgctgtagagctgaccaactctgacataaagaaggacctcagtaggccccagaaaccccagctggtgcgtcaaggctgtgcctcggaacccaaggacggactacagtctggcagcagtagcttctcaagcctctcacccagcagtagtcaggactacccaagtgtgagcccatcctctagagagcccttccttccctcaaaagagatgctctccggcagcagagcccctctgcccggacagaaatcgtcaggcccatcagagagcaaagagagtagcgacgaactcgatatcgatgagactgcttccgatatgtccatgagtccccagtccagcagtctcccagccggtgacggtcagctggaagaggagggcaaaggccacaaacggcctgtcgggatgctggtgcgaatggctagcgccccttcggggaatgtagcggacagcaccctcctactgactgatatggcagattttcagcagattctgcagttcccaagtcttcgtactactacaactgtgagttggtgcttcctgaattataccaagcccaactatgtccagcaggctacattcaaatcgtcagtgtatgcaagttggtgcatcagtagctgcaatccaaatccatctgggttaaatactaaaaccacgctggccctccttcgaagtaagcagaaaattacagccgagatttacactctggctgccatgcatcgtccgggtacgggtaaactcacaagcagctcagcctggaagcagttcacgcagatgaaacccgatgcctccttcctctttgggtcgaagctggagaggaagctggtcggcaacatcctgaaagagaggggtaaaggcgacattcatggggataaggatatcggatctaaacagacagagcctatcagaatcaaaatctttgaggggggatacaaatccaacgaagactacgtctacgtgcgaggcaggggaagaggaaagtacatctgtgaggagtgtggcatccgctgtaaaaaaccctcaatgcttaagaagcacattaggacccatactgatgtgaggccttacgtctgtaagctgtgcaacttcgcgttcaaaacgaaaggaaatcttacaaagcacatgaaatctaaggctcatatgaagaagtgcttggagctgggcgtatcaatgacctctgtagatgataccgaaaccgaggaggcagaaaacctggaggacctccacaaagccgcagagaaacactccatgtctagcattagtactgaccaccaattctccgacgctgaagaatcagatggggaggatggggacgacaacgacgacgacgatgaagatgaggatgatttcgacgatcagggggacctgacccccaaaacaagatctcgctctacaagtcctcagcccccacggttctcctccctcccagtgaatgttggggcagtgccgcatggtgtcccttccgattcttctctggggcactcatctctgataagttatcttgtcaccctcccgagtatccgggtaacccaacttatgacgccttcagattcctgtgaggacacacaaatgactgagtaccagagactgttccaaagtaagtctacagattctgaacctgacaaagacaggttggacattccatcttgcatggacgaagaatgtatgctgccgtccgaaccaagctcaagccccagagacttttctccctcgagtcaccatagcagccctggttacgactccagtccttgccgggacaacagtcctaaacgctaccttattcctaaaggcgatttgtctccaaggaggcacctgtcgccccgtcgggacctgtcccctatgcggcaccttagtcccagaaaggaggccgctctgcggagggaaatgtcacagcgtgatgttagtccaagaaggcacctatccccacggcgtcccgtttcgccagggaaggacattaccgctcggagagatctatccccacgcagagagcggagatatatgaccaccatccgtgctccttctccaagaagggctctctaccacaatccaccacttagcatgggacagtatctgcaggcggaacccatcgtgctgggccctccaaacctcagaagggggcttcctcaggtgccatactttagcttatatggtgatcaagaaggagcgtatgaacacccaggcagctctctctttcctgaaggacccaatgactacgtgttttctcacctgcccttgcactcccagcagcaggtgagagcgccaattcccatggtacctgtggggggtatacaaatggtacactcaatgccccctgcactgtcaagtctacatccctccccaaccctcccattgccgatggaagggttcgaggagaagaagggtgctagcggagagtctttcagcaaggacccatatgtgctgagcaaacaacacgaaaagcggggacctcacgctctgcagagtagtgggccaccttccactccatcatcccctcgacttctcatgaaacaatccacaagtgaagacagcctgaacgcaactgagcgagagcaagaagagaacatccagacatgtaccaaagcaattgcttccctcaggattgccacagaagaggccgcacttcttggacctgaccagccagcacgggtgcaggaacctcaccagaatccactggggtccgctcacgtctcaattaggcacttttcgagacccgagcctggccaaccatgtacctcagctacacaccccgatctacacgatggggaaaaggataactttggtacttcacagaccccactggctcactccacgttctattcgaagtcttgcgttgatgacaagcaattggatttccactccagtaaagaacttagttccagcacagaagaaagcaaagacccttctagtgagaagagccagctgcactag

SEQ ID NO: 167459 - DNA, 7340 bp, Artificial Sequence
  derived and/or modified sequence
atggacactggagacaccgcgctgggccaaaaagcaacgtcacggagcggagagactgacaaggcatcgggcagatggagacaggaacagtcggccgtgatcaaaatgtccaccttcgggtcacatgaaggacagaggcagccccagattgagccagaacagattggtaataccgcgtcagctcagttgttcgggtcaggcaaactggcgtcaccaagtgaggtggttcagcaggtcgcggaaaaacagtacccccctcaccgacctagtccatactcttgtcagcactccctgtccttccctcaacacagtctcccacaaggtgtaatgcatagtaccaagccacatcagtctttggaagggccaccctggctattcccaggaccactgccctcagtggccagtgaggacctgttcccgttccctatccacggtcacagtggcggttatcctaggaaaaaaatttcctctttgaatcccgcttattcacagtacagtcagaaatctatcgagcaggccgaagaggcacacaagaaggagcacaagccaaagaagccaggaaagtacatttgcccttactgtagccgtgcctgcgcaaagccctctgtgctcaagaagcatatcagatctcacacgggcgagcggccttacccctgtatcccttgcggattctcatttaagactaagtctaacctgtacaagcacaggaaatcccatgcacatgccatcaaagccggactggtcccctttactgagagcgcagtgagcaagctggatcttgaggccggtttcattgatgttgaggccgagattcacagtgatggcgaacaaagcaccgatactgacgaggaatcgtccctttttgctgaagccagtgacaagatgtctcccggtccccctattccattggacatcgcttctcgcggaggataccatggatctcttgaagagagcctgggcggacctatgaaagtccctatcttgatcatcccaaagagcggtatcccgctgcctaacgagagctcccaatacatcggacccgatatgctcccgaatccctccctgaataccaaagcggatgattctcacaccgtgaaacagaaactggcactacgcctgtcagagaagaaaggccaggactcagaacctagtctgaatcttttatctccccatagtaaaggctcgacagattcgggctacttctcacggtcagagagcgctgagcagcagatatctcccccaaacactaatgccaaatcctacgaagaaatcatttttgggaagtattgccgcttgtctccaagaaatgcactgagcgtaaccactacaagtcaggagagagccgcaatgggacgtaagggtatcatggaaccgcttccacacgtcaacactcggttggacgtgaaaatgttcgaagatcccgttagtcagctcatcccttcaaaaggggatgtggacccttcccaaaccagtatgctaaaatccactaagttcaacagcgaaagccgacagcctcagataatacctagtagtatcaggaatgagggcaaactctatccagctaattttcaaggatctaatcccgtgctgctggaggcaccggtggattcctcccccctgatccgaagcaactcagttcccacatcgagcgcaacaaaccttacaatccccccaagtctgagagggtcccatagctttgacgaacgaatgactggcagtgacgacgtattctatccaggcaccgttgggatacctccccaacgtatgcttcgacgtcaagctgccttcgagctcccctctgtgcaggagggtcatgtggaggttgaacatcatggcaggatgttgaaaggcatttcaagtagctctctgaaggagaagaagctttctcccggagatagggtcggatacgactatgatgtctgtcggaagccatataagaagtgggaagactcagaaacccccaagcaaaactatcgcgatatctcctgtttgtcctcattgaagcatggtggggagtactttatggatcctgtcgtccctctgcaaggcgtgccgagcatgttcggaaccacatgtgagaatcgtaagagacgcaaagagaagtctgtaggcgacgaggaggatacccccatgatttgctcttccattgtttcgacacccgtgggtattatggcgagcgactatgaccccaaattgcagatgcaagagggcgtcaggtctgggttcgcaatggccggacacgagaacctaagccacggacatactgagcgcttcgatccctgtagaccccaactgcagccagggtcgccctcgctcgtgagcgaggaatccccttccgcaatcgactccgataaaatgtcagacctgggtggaaggaaacctccaggtaacgttatttcggttatccagcatactaacagcctgtctcggccaaattccttcgagcggtctgaaagcgcagagctcgtggcttgcacacaggataaagctccctctccatctgaaacctgtgattccgagatctcggaggccccagtttcacccgagtgggcccctcccggagacggagctgagagtgggggaaagccgtctccgtcacagcaggtgcaacaacagtcctaccatacccagcctagattagtgaggcagcacaacattcaggtgccagaaattcgcgttacagaggaacctgacaagcccgagaaagagaaagaagcgcagtccaaggagcccgaaaagccagtggaagaatttcagtggcctcagagatcggaaacactgtctcaactgcccgctgagaagttaccacccaaaaagaagcgtttgcggctcgctgatatggagcatagcagcggcgaatcctccttcgagtctaccgggactgggctgtcacgctccccgtcccaggagagcaacctctcccattccagtagctttagcatgagcttcgaacgggaagagacttccaaactgagcgccctgcccaaacaggatgaatttgggaaacattcggaatttctaacagtgcccgctggctcgtactctctgtcagtgccaggacatcaccatcaaaaagagatgcgcaggtgctccagtgaacagatgccctgcccacaccccgcagaggtgccagaagtgcgctccaaatcgtttgattatgggaacctgtctcatgcaccagtaagcggcgctgcagcaagtacggtgagcccatctcgcgaaaggaagaagtgttttctggttcggcaggccagcttctctggaagcccggagatttcccagggcgaggtcgggatggaccagtctgtaaaacaagaacaactggagcatcttcatgcagggttgagatccggctggcatcatgggccaccggctgtgcttcctccgttgcagcaggaagaccccggtaaacaggttgcaggtccttgtccccctctctcgtcaggtcctctgcaccttgcccagcctcagatcatgcacatggactctcaggaatccctgcgtaatcccctcattcagcctacatcctacatgactagcaagcatttacccgagcagccccatctattcccccaccaagagaccatacccttttcaccaatccagaacgctctgttccagtttcagtacccaacggtatgcatggtgcatctccctgcccagcagcctccttggtggcaagctcactttcctcatccatttgcgcagcatccccaaaagagttacggcaagccgagttttcagacagaaatccactcttcttaccctcttgagcacgttgctgaacatacgggtaaaaagccggcagagtatgcccatacgaaagagcaaacgtatccctgctactccggggctagcggccttcaccctaaaaatctgctgccaaagtttccttctgaccaatcctctaagtctacagaaactccttcagaacaggtgctgcaggaggacttcgccagtgctaatgcaggatcactccagtcgctcccgggaacagtggtcccagttagaattcagacgcacgtccccagctatggatccgttatgtacacatccatttcccaaatcctcgggcagaacagccccgctatcgttatttgtaaggtcgatgaaaacatgacgcagcgtacattggtgacgaacgccgcaatgcaggggatcggcttcaacatcgcccaggtgcttggacagcatgcaggccttgagaaatacccaatctggaaagctccccagacgctgcccctgggcctcgaatcctctatcccattatgtctgccatcgacatcagattccgtcgccaccctcggagggtccaagagaatgctgtcccctgcctctagcctggagttgtttatggaaaccaagcaacagaagagagtaaaagaagaaaagatgtacggccagattgttgaggaacttagcgcagttgaactgaccaacagcgacattaaaaaggatctgagccggcctcagaagcctcagttagtgagacagggctgcgcctctgaacctaaggatggattacagagcggcagttcgtctttttccagtctctctccaagctcaagccaggactacccatctgtctctcctagctctcgcgaacctttcctcccttcgaaggaaatgctgagcggaagtcgggctcctttaccaggccaaaagagttcgggcccatctgaaagcaaggaaagttctgacgagctggatattgacgagaccgcaagcgacatgtccatgagcccacagagtagttcccttcccgcaggagatggacagctggaagaagagggcaaggggcacaaacggccagtcggaatgctagttaggatggcctccgcaccgagcggtaacgtggccgacagcactttactgctcaccgacatggcagatttccagcagatacttcagttcccatccttgaggaccacaacaacagtgtcttggtgttttctgaattatactaaacctaattatgtgcagcaagcaacgtttaagtcttcagtgtacgcatcttggtgtatcagttcttgcaatcccaacccatccggcctgaatacgaaaactacccttgcgttactcagaagcaagcagaagatcaccgcagagatttacactctcgcagctatgcatcggccaggcacaggaaagctgacttcttcctccgcatggaaacagttcacacaaatgaagcctgatgcttccttcctcttcggaagtaagctggaacggaaattggttgggaacatcctgaaggagcggggaaagggcgatatccatggagacaaagatattggctctaagcaaacagagccaatccgaatcaaaatttttgagggcggatataaatctaatgaggattatgtctacgtccgaggaagagggagaggcaaatacatatgcgaggagtgtggaatcagatgcaagaagcctagtatgctaaagaaacacattcgaacccacacagacgtgcgaccctatgtgtgtaaactctgtaacttcgcctttaaaaccaagggaaaccttaccaaacacatgaagtcgaaggcgcatatgaaaaagtgtctcgaattaggcgtgtccatgaccagtgttgatgacacagaaactgaagaggctgaaaatctggaggatctccacaaagccgctgagaaacactctatgtcctctatcagcactgatcatcagttcagcgacgcagaagaaagcgatggcgaagatggggacgataatgatgacgacgacgaggacgaggacgactttgatgatcaaggcgacctcacccccaaaactcggagcaggtccaccagccctcagcccccaagattctcatccttgcctgtcaacgtgggcgctgtcccccatggcgtacccagcgattcctcccttgggcacagcagtctgatctcttacctggttacactgccttccatccgggtgacccagctgatgaccccgagcgacagttgcgaggacacacagatgacagagtatcaaaggctcttccagagtaagagcacggactcagagccagataaggatagactggacattcccagctgcatggatgaggagtgcatgctccccagcgagcctagctcatcgccacgcgatttcagtccgtcatcccatcattccagccccggatacgacagctccccatgtagggacaactccccgaagcgttacctcatccccaaaggagatctctcccctagacggcacctcagtccgcgaagggacctcagcccaatgcgtcatctgtcaccacgcaaggaagctgccctgcgcagagaaatgagtcagcgtgatgtgtcccccagaagacatctgtccccaagaagacccgtgagcccaggcaaagatatcactgcacgcagggatctgagtcccaggagagagagacgctatatgacgactattagggccccatctcccagacgcgcattataccataatcctcccctgagcatgggccaataccttcaggctgaacctatcgtgttaggaccacccaacctcaggagggggctgccccaggtgccttatttctctttgtacggcgaccaggaaggggcttacgagcatcccggatcctccttgttcccagaaggtccaaacgattatgtgttcagtcacctcccactgcattcccagcaacaggtcagggcccctattcctatggttcctgtcggaggtatccagatggtccattcgatgccacctgcactcagctcactacatccgtctcccaccctgcccctcccgatggagggtttcgaagagaaaaagggcgcatccggagagtctttcagcaaggacccctacgttttatccaaacagcacgaaaagcgtggcccacacgccctgcagagcagtgggcctcccagcacacccagcagtcccagactacttatgaaacaaagcacaagcgaggactctctgaatgccaccgaacgcgaacaagaagagaacatccagacctgcaccaaggctatcgcttcattgcgaatagctaccgaagaagccgctctgttaggacctgaccagcccgctcgggtgcaggagcctcatcagaatcctcttgggtctgcgcacgtcagcattagacatttctcgaggcctgagcctggacagccatgcacaagtgcaactcaccctgatctccacgatggggagaaggataactttggcaccagtcaaactcccctggcacattctactttttacagcaagagttgtgtggatgataagcagctcgactttcactcgtcaaaagagttatctagctcaaccgaggagtcgaaggatcccagtagcgaaaagtctcagttacacta

SEQ ID NO: 167460 - DNA, 7340 bp, Artificial Sequence
  derived and/or modified sequence
atggatactggggatactgcactcggccagaaggcaacttcccggagtggtgagacggacaaagcctctggtcgttggagacaggaacagagtgccgtcatcaaaatgagcacatttgggtctcatgagggccaacgccagccccagattgaacccgaacagatcggaaatactgcatccgcgcagctgtttggtagcggcaagttggcctccccatctgaagtggtgcaacaggtggctgagaagcagtatcctcctcacaggccatcaccatattcatgtcaacactcgctgtccttcccacagcatagcttgccacagggggtgatgcactccaccaagccccaccagtccctggaaggcccaccctggctgttccctgggccactgccctctgtggcctccgaggacctctttccatttcccatacacggccactcaggaggctaccctagaaaaaagatatcgtctttgaacccagcctattcacaatacagtcagaaatctatagaacaggcagaggaggctcataaaaaagaacacaaacctaagaagccaggaaagtatatctgcccatattgttctcgtgcatgcgctaagcccagtgttctcaaaaaacatatccgatctcataccggggaacgcccttatccttgtattccctgcggcttctccttcaagacgaagagcaatctgtataaacacagaaaaagccacgcacacgcgataaaggctggattggtgccatttacagagtcggccgtaagtaagctggacctggaagctggtttcatcgacgtggaggcagagattcatagtgacggggagcagtcaacagacactgacgaggagagcagtctctttgccgaagcaagcgataaaatgagtcctggaccgccaattcccttggacattgccagtaggggaggttatcacggatcactcgaagaatctctcggcggtccaatgaaagtccctattctcataataccgaaatccggtatccctctaccaaacgagtcaagccagtatatcggccctgacatgttgccaaacccgtccttgaacaccaaagctgacgactcccacaccgtgaagcagaaacttgctctgcgactatcggaaaaaaaaggccaggatagtgagccatctctgaatctactgtccccacacagtaagggttctaccgacagcggttatttctccagaagcgagtctgccgagcagcagatttctccgcctaataccaacgccaagtcttacgaggaaattatcttcggcaagtattgtcgcctaagtcctaggaacgctctgtctgtaactacgacaagtcaggagagagccgcaatgggcagaaaaggaatcatggagccgctaccccacgttaatacacggctggacgtgaagatgtttgaagaccccgtctcgcagctaatcccgtcaaaaggggacgtcgaccctagtcagactagcatgctgaagagcacgaagtttaattctgagtcaagacagccccagattataccaagttccatacggaacgaaggaaagctataccctgccaacttccagggctccaaccccgtgttgctggaagcacccgtggacagcagcccgctcataagatcgaactccgtgccgacttcctcagcaaccaatctcacaattccaccctcacttcgcggatctcacagttttgatgagagaatgaccggctctgacgacgtgttttatcctggaacagttggcatacccccacagcgcatgctgagaaggcaggccgcttttgagctcccatcggtccaggagggacatgtggaagtggagcatcacggccgaatgttaaaaggaatctcatcgtccagtcttaaggaaaagaaactctcccccggagaccgagtaggatacgattacgacgtgtgtagaaaaccctacaaaaaatgggaggactctgaaacaccgaaacagaattaccgggacatcagctgcctgagctccctgaagcatggtggggaatacttcatggatcccgtggttcccttacagggtgtcccctcgatgttcggtaccacctgcgagaatcgcaagaggcgcaaggagaagtctgttggagatgaggaggacactccaatgatctgcagtagtattgtatccacacctgttggcataatggcctccgattacgatcctaaactccagatgcaggaaggagtgaggagtggattcgctatggcgggtcatgagaacctcagtcacgggcacacagagcgctttgacccctgtcggccacagctgcagcctgggagcccgtctctggtgtccgaggagtccccttccgcaatagacagcgacaagatgtcagatctgggcggtcggaagccacctgggaacgtgatctctgttattcagcacaccaacagcctatcaaggcctaatagcttcgagaggtccgaatcggcagaactcgtcgcctgcacccaagataaggctccctcccccagcgagacctgcgattcagagatctccgaagctcccgtgtctcccgagtgggcacccccaggtgacggtgccgagtccggcggaaaacccagcccatctcagcaagtccaacagcaatcctatcatacacagcctcgactggtaaggcagcacaacattcaggtgccagaaatacgcgtcactgaggagccagataagcctgaaaaggagaaagaggctcaatctaaggagcccgagaaacctgttgaggaattccagtggccccagagaagcgagaccctgtcccaactgcccgctgaaaagctaccaccaaagaaaaaacggcttaggcttgccgatatggagcatagctctggggagtcaagttttgagagcacaggcacgggcctctcccgctctccctctcaggagagcaacctttcacacagttccagctttagtatgtcctttgagcgggaggagacttccaagctctcagcacttccaaaacaagatgaatttggaaaacacagcgaatttctgactgttcctgcgggatcctatagcctgtccgtgcctggacaccaccaccagaaagagatgcgaagatgcagctctgagcagatgccctgcccccaccccgctgaggttcctgaggtccggtctaaaagcttcgattatgggaatctctctcatgcccctgtgagcggcgctgctgccagcactgtatccccatctagagagaggaaaaagtgcttcctagtgaggcaggcttcattttccgggagcccagagattagtcagggtgaggtcggaatggaccaatcagtgaagcaagagcaacttgaacatctgcacgcaggactccggtcggggtggcatcatggtccccctgctgtgcttccacctttacagcaggaagaccccggaaaacaggtcgcgggaccttgcccaccacttagtagcggtccactccatcttgcacagccacagattatgcacatggacagccaagaatcactccggaatcccctaattcaacccacatcatacatgacttctaagcatctgcctgaacagccgcacctttttccgcatcaggagactattcccttctcgccgattcaaaatgcactgttccaattccagtatccaaccgtttgcatggtgcacctgcctgcacagcagcccccatggtggcaagctcacttcccccatccattcgcccagcacccccagaaatcttatggcaaacctagctttcagactgaaatccattcttcataccctttggaacatgttgccgaacatactggcaagaagccggcagagtacgcccacaccaaggagcaaacatacccttgctattcaggcgcatccggattgcacccaaaaaatcttctgcctaaatttccttcagaccagagttccaagtctaccgagaccccctctgagcaggtcctgcaggaggacttcgcttcagcaaacgctggctcccttcagtctctaccgggaacagtggtccctgtgagaatccagacccacgtgccatcatatggaagtgtcatgtatacatctatctctcaaatactgggacaaaacagcccagcgatcgtgatttgcaaagttgacgagaacatgacccaacgaaccctggtgactaatgccgctatgcaaggaattggcttcaatatagcgcaagttctcggccagcatgccggtctggaaaagtatcccatctggaaggctcctcaaaccctgcctcttggtcttgagagcagcattcctctttgcctcccctccaccagcgattccgtggccaccctcgggggtagcaagagaatgttatcacccgcttcctcactcgaactgtttatggagacgaagcaacagaagagggttaaggaggagaaaatgtatggccagatagtggaggagctgtccgccgtcgagctgacaaactccgacattaagaaggacctgagccgccctcagaagccgcagctcgtgagacaggggtgtgctagcgagcctaaagacgggctgcaatccggcagttcctccttttcctccctgagcccgagttcttcccaggactatcctagtgtgtcacctagcagtagggagccgtttttgccctcaaaagaaatgcttagcggatctagggcccctttgccgggacagaaatcttctggtccttccgagtctaaggaatcctcagatgaactcgacatcgacgagacggccagtgacatgtcgatgagcccccaatcctcctcattgcctgcaggcgatgggcaactcgaagaggaggggaaaggacataagaggcccgtgggtatgctggttagaatggcatcagctccctctggaaacgttgccgactcaaccctcctgctcaccgatatggctgactttcaacagatactgcagttccctagtttgcgaacaacaacaaccgtatcatggtgttttcttaactataccaaacctaattatgtccaacaggccaccttcaagagttccgtatatgctagttggtgtatctcctcctgtaaccccaacccgagcggcctgaatactaagaccactctggctctgctgcgttccaaacagaagataactgctgagatttataccctggctgctatgcaccgccctggtacgggtaaactcacatccagcagtgcgtggaagcagttcacacaaatgaagccagacgcatcgttcctgttcggctccaaactggagcgcaaactcgtcggaaacattttaaaagaaaggggaaaaggcgatattcatggggacaaggacatcggaagcaagcaaaccgagcccattcgtatcaagatttttgaaggcggatacaagtctaacgaagattatgtttacgtgcggggacggggtcggggaaagtacatctgcgaagagtgcggtattaggtgcaagaagccgtcgatgctgaaaaagcacattcgcacgcatactgacgtgcgtccttatgtttgtaaactatgtaatttcgcattcaaaactaagggaaacctgacaaaacacatgaagtccaaggctcatatgaaaaagtgtctggagctaggtgtctcaatgacctccgttgatgatacggaaactgaggaggctgaaaacctggaggatctgcacaaagccgctgaaaagcattctatgtcaagtattagcacagaccaccagttttctgacgcggaggagtccgatggtgaagatggcgatgacaatgatgacgacgatgaggacgaggatgactttgacgaccaaggagatctgacccctaagacaaggtcacgcagcaccagcccacagccgcctcggttcagttcactccccgtgaacgttggagctgtccctcacggcgtcccatccgacagctccctgggacactccagcttgattagttatctagttacactcccaagcattcgcgtgacccagcttatgacaccatccgactcatgtgaagacacccagatgaccgagtaccagcgtctgttccagtccaagtccacggacagtgaaccggacaaggaccgcctcgatattccctcttgcatggacgaggaatgcatgttgcccagtgagccgagctcctcacctcgcgatttctcgccaagctcacaccatagctcgcctggttatgacagttccccatgtagagacaactcaccaaagagatacctcatacctaagggagatctcagcccacggcgacacctgtccccacgaagggatctgtctccaatgagacatctgtccccacggaaggaagctgccctgaggagagaaatgtcacagcgcgatgtgtcacctcgtcgccacctgagtcctaggcgccctgtttctcccggaaaggacataacagctcgacgcgatctgagccccaggagggaaaggagatatatgacaaccattagagccccaagccctaggcgggctctttatcacaatcccccactgtccatggggcagtatcttcaggccgagccaatagtcctcggccctccaaacttacgaagagggctgccccaggtgccatacttttccttgtacggagaccaggaaggcgcttacgaacaccctggtagctccctgtttccagaaggacctaacgactacgtcttttcacaccttccacttcattcccagcagcaggtacgagctcccataccaatggtgcccgttggagggatccaaatggttcactctatgcctcccgcactaagttcccttcaccccagtcctaccttgcctctgccaatggagggctttgaggagaagaaaggggcttctggagagagcttttcaaaggacccctacgtgctgtcaaaacaacacgagaagagaggaccccacgctctgcagtcttccggccctccttctaccccttccagccccaggttgttgatgaagcagagcacctccgaagactccttgaacgccaccgagcgcgaacaggaagaaaacatccaaacttgtacgaaagccattgcgtccctgagaattgccaccgaagaagcggcactgttagggccagaccagcctgccagagtgcaggagcctcatcagaatccactcggaagtgcccatgtgtcaatcagacacttcagcagacccgaaccaggccagccctgcacatctgctactcaccccgacttgcacgacggcgagaaggataacttcgggacgtcccagacacctctggcccattctacgttctactcaaagtcgtgcgtcgacgacaagcagctcgatttccactcctcgaaggagctgtcttctagcactgaagaaagcaaggacccaagtagcgaaaagagtcaacttcacta

SEQ ID NO: 167461 - DNA, 7341 bp, Artificial Sequence
  derived and/or modified sequence
atggacaccggcgatacagcactcgggcagaaagctacgtcacgtagcggtgagactgacaaagcctctgggcggtggagacaggagcagagcgctgtgatcaagatgtccacatttggaagccacgaggggcagcggcagccacagattgaacccgagcagatcggcaatacagccagcgcacagctgttcggctctggaaagttggccagtccaagcgaggttgtacagcaggttgctgagaagcagtatcccccacaccggccttccccctactcttgtcagcacagcttgagcttcccgcagcactcgctacctcagggggtcatgcactcaaccaagccccatcaatcactggaagggccaccctggttattcccaggtcccctgccctccgtcgcctcagaggacctgttccctttccctattcacggccattcaggcgggtacccacgcaagaagatcagcagtctcaacccagcatacagccagtattcccagaagtcaattgagcaggccgaggaagcccataagaaggagcacaaaccaaagaaaccaggaaagtacatctgtccttactgctcgagggcttgtgcgaaaccttcagtgttgaagaaacacatccgatcccacacaggcgagcgaccatacccttgcatcccatgtggtttttcctttaaaaccaagtctaacctctataagcataggaaaagtcatgcacatgcaataaaggccggacttgtgccgtttaccgaaagtgccgttagcaaactggacttggaagccggattcatcgacgtagaagcagaaattcactctgacggcgaacagtcaaccgacaccgatgaggaatcgtccctgtttgcggaggccagtgacaagatgtccccagggcccccaattcctttagacatcgccagcagagggggctaccatgggtcactggaagagtcgctgggagggcccatgaaggtccccatcctgattatccccaaatccgggatacccctcccaaatgaaagctcacagtacattggccccgacatgttacctaaccccagtctgaacaccaaagcggacgattcccacaccgtgaaacagaaacttgcccttcggctctcggagaaaaaaggccaggactctgagcctagtctgaacctgctctctccccatagcaaaggttcaacggatagtggatatttttctagatccgaatccgcggaacaacaaatttcccctccaaataccaatgccaaatcatatgaggagattatattcggcaaatattgtagactgtctccaaggaacgccctcagcgttacaaccacttcccaggaacgggccgccatgggtcgaaaaggcatcatggagcctttaccacacgtgaacaccaggctggacgtgaaaatgttcgaagacccagtgtctcaacttatcccctccaaaggcgacgttgaccctagtcagacgtctatgctaaagagcacgaagtttaatagcgagagccggcagccacagatcatcccttcctctatcaggaacgaggggaagctgtacccagctaatttccagggatcaaatcctgtcctgctcgaagcccctgtggattcttctcctctgattaggtcgaatagcgtgccaacaagctctgctactaacttgacgatcccacccagtttaaggggatcacacagttttgatgaacgaatgacaggtagcgatgacgtgttctatccaggtactgttggcattcctccgcagagaatgttacgtcgacaagccgccttcgagctgcccagcgtgcaggaaggccatgttgaggtcgaacaccacgggcgcatgctgaaagggattagctcatctagcctcaaggaaaagaagttgtcaccaggtgatagggtgggctatgactatgacgtctgccggaagccctataagaagtgggaggatagtgaaacgccaaaacaaaattacagggacatctcgtgcttgagcagccttaaacacggaggagagtatttcatggacccagttgtgccactccagggagtgccctctatgtttggaacaacatgtgagaataggaagaggcgtaaagagaagtctgtcggcgacgaagaggacaccccaatgatctgttcaagcattgtgagcactcctgtcggaatcatggcctcagactacgaccccaaactgcaaatgcaggagggggtgcgcagcgggtttgcaatggcagggcacgagaacttgtctcacggtcacaccgaaaggttcgacccgtgcaggccacagctgcagccgggatcgccaagtcttgtgagcgaggaatcaccttccgccattgatagtgacaagatgtccgacctcggcgggcgaaaaccaccaggcaatgtaattagcgtgattcaacatactaactcgctcagccggcccaacagtttcgagcggtccgaatccgctgaattggtggcctgtacgcaggataaggcaccaagccccagtgaaacatgtgacagcgagatatctgaagccccagtgtctcctgaatgggctccacctggcgacggagcagaatctggtgggaaaccaagtccctcccagcaggtacagcagcaatcctatcacacccagcctcgactcgtccgtcagcataatatccaggtccctgaaataagagtgacagaggagcctgacaaaccagagaaggaaaaagaagcgcaaagcaaggagccagagaagccagtggaagaattccaatggcctcagcggtccgaaacactaagtcagctgcctgctgagaaacttcctcctaagaagaagagattgcgactcgcagatatggagcattcatccggggagtcctcattcgagtcaacaggaactggcctttctaggtctccaagccaagaatccaacctgtcacattcctcctccttctcgatgtcttttgaacgcgaagagacttccaagctgagtgctttacctaaacaggacgaatttgggaaacactccgagtttttaactgtacctgctggatcttactcactcagcgtgcctggacaccaccaccagaaagagatgcgacgctgtagctccgaacagatgccctgcccacaccccgccgaagtgcctgaagttagaagtaaatcattcgactacggtaatctgtcacacgctcccgtgagcggggctgcagccagtacagtgtctccgtcccgcgagagaaagaagtgtttcctggtgcgacaggccagtttctccggatcccccgagatctcacagggagaggtcgggatggaccaaagcgttaagcaggagcagttagagcatcttcatgccggactgcgctcaggctggcatcacggcccccctgccgtcctcccacctctgcagcaggaagaccctggcaaacaggtcgctggaccatgccctcccctgtcttctggccccctgcatctcgcccagccacagattatgcatatggattcccaggagtctctgagaaatcccctgatacagcccacttcgtatatgacgtcaaagcacctgcctgaacagcctcacctctttccccaccaggaaacaattccattttcccctattcagaacgcgctgttccagttccagtacccaaccgtgtgtatggtccaccttcccgctcagcagcccccctggtggcaggcacatttcccccacccctttgcccaacaccctcagaaatcttacggaaagccttccttccaaaccgaaattcactcatcttaccctctggaacacgtcgcagaacatacaggaaagaaacccgccgagtatgcccacaccaaggaacagacctacccatgctactccggcgcaagcggcctgcaccccaaaaaccttctccctaagtttccctccgaccagtcctctaaaagtactgaaaccccatccgagcaggtgctgcaagaggacttcgccagcgctaatgccgggtcccttcagtccctacctgggaccgtggtccctgtgagaatccagacccatgtccctagttatggatctgtgatgtacaccagcatttcacaaatcttagggcagaacagcccggcaattgtaatttgcaaagtggacgagaacatgactcagaggaccttggttactaacgctgcaatgcaagggatcgggtttaatatcgcccaggtgcttggccagcatgcaggactcgagaagtacccaatttggaaagcaccccagacactgcccctcggactagaaagtagtattcctctttgcttgcctagcacatccgacagtgtcgctaccctcggtggctcgaagcgcatgctcagccctgcctcttcccttgagctttttatggaaaccaagcagcagaaacgtgtcaaggaagagaaaatgtacggacagatcgttgaggagctttctgctgtggaactgactaacagcgacataaagaaggacctgtcacgcccacagaaacctcagctcgttaggcagggctgtgcatctgagcctaaggatgggttgcagtccggcagtagctccttctcctcacttagcccaagctctagccaggactacccgtcagtgtccccttccagtagagagcccttcctgccatcaaaggagatgttgtccggatcgcgtgcccctttacccggccagaaatcttccgggcccagtgagtccaaggaatcaagcgatgagttggacatcgacgagacagcatcagacatgtctatgtccccacaatcatcttcactgccagccggcgacggtcagctggaagaagaaggcaaaggacacaaacgccccgtcggaatgctcgtacgcatggcatctgctccgagcggcaacgtcgccgatagtactcttctgcttactgatatggccgactttcaacaaatcctccagtttccctccctccgcactacaaccacggtcagttggtgctttcttaactacaccaagcccaactatgtgcagcaggcgactttcaagagttcagtctatgctagctggtgcattagcagctgcaatccgaacccaagtgggctgaatacgaagactacccttgcgttgctccgctctaagcaaaaaattacagctgagatttacacactggccgcgatgcatagacccggcacaggcaagttaacatcatcaagcgcctggaaacaattcactcagatgaagcccgacgcttcattcctcttcggctcaaagctcgagcgtaaactggtggggaatattttgaaggaacgcggtaagggcgacatccatggtgataaagacatcggatccaagcagaccgagccgatccggattaagatctttgaagggggttataaatccaatgaggactatgtgtacgtgcgaggaagggggcggggcaagtacatctgcgaggaatgtggaatcagatgtaagaagccctccatgttaaaaaaacatatcaggacacatactgacgtccggccatacgtgtgcaaactttgtaattttgcattcaagacaaaaggaaacctgacaaagcatatgaagagcaaggcacatatgaaaaaatgcctggaactcggggtatccatgacttcagtcgatgacaccgagaccgaggaggcagagaatctagaagacttgcacaaggcagctgagaaacattccatgagctctattagtactgaccatcaattttctgacgctgaagagtctgacggggaggatggagacgataacgatgatgacgatgaagatgaggatgattttgatgaccagggggacctcaccccaaaaaccaggagccgaagtacctcgcctcagcctccccgctttagcagtttgcctgtcaatgtgggagccgtcccccacggcgtgcccagcgattcatcactgggccattcttctttaataagctatctcgtgactctgccatccattagagttacccagctcatgacccccagtgatagctgcgaagatacccagatgacagagtaccaacgactgtttcagtccaagagcacagatagcgagcccgacaaagatcgccttgacataccaagctgcatggacgaggagtgcatgctgccatccgagccctccagctcgccccgcgacttctctccttctagccaccatagcagtccagggtatgacagctccccatgtagagataactctccaaagcggtatctaatcccaaagggcgaccttagtcctagaaggcatctgagccctaggcgagacctttcccctatgcgacatttgtctccaaggaaggaagcagctcttcgtcgcgaaatgtctcagagggacgtgtctcctagacgccatctttctccgaggcgccctgtcagccctggcaaggatatcacagctaggcgcgacttatcaccaagaagggaacgtaggtatatgacaactatccgtgcgccaagtcccagaagggctttatatcataacccaccgctctccatgggacaatatcttcaggcagaacctatagtgttaggaccccccaacctacgacgcggactgcctcaagtgccctacttcagcctttatggagaccaggagggtgcatacgaacaccccgggtctagtctgtttccagagggcccgaacgactatgtgtttagtcacctcccgctacatagtcaacagcaggtccgggctccaataccaatggtccctgtgggaggaatccagatggtgcactctatgcctccagctctcagctccctccatccgagcccaacccttcctcttccaatggaaggtttcgaggaaaaaaagggcgccagtggcgaatctttctcaaaagatccttatgtccttagtaagcaacacgagaagagagggccacatgcgcttcagagttcgggccctcctagtacaccctcaagtcctcggctcctaatgaaacaatctacttctgaggattctctgaacgctacggagcgcgagcaagaagagaacatccagacttgcaccaaggcaatcgcaagccttaggatcgccacagaggaggctgccctgctgggcccggatcagcccgcaagagttcaagagccacatcaaaacccgttaggatccgctcacgttagcattcgccacttcagcaggcctgagccaggtcagccctgcacttcagccactcacccagatctccatgacggagaaaaggacaacttcggcacatcccaaaccccgttagcacacagtacattttattccaagagctgcgtcgacgataagcaattggattttcattcctctaaagagttaagttctagcaccgaggaatccaaggatccttcctcagagaagagccagctccactag

SEQ ID NO: 167462 - DNA, 7341 bp, Artificial Sequence
  derived and/or modified sequence
atggataccggcgatacagccctgggccagaaagcaactagccggtccggggagacagataaagctagcggacgatggagacaggaacagtctgctgtgattaaaatgagtaccttcggcagtcatgagggccagaggcaaccacaaattgaaccagagcagattggaaataccgcctccgcccaattgttcggatcaggcaagttggctagtcccagtgaagtagtccagcaggtggcagaaaagcagtatccgcctcaccgaccctccccctattcatgccaacattccctgagctttcctcaacatagtctaccccagggcgttatgcactctacgaaacctcaccagtcgctagaggggcccccatggctgttccccggtccactccccagcgtcgcttcagaggatctgttccccttccctattcacggccatagtgggggataccctagaaaaaaaatatcctccctcaatcccgcttattcccagtatagccagaagtcgattgaacaggcagaggaagcgcataagaaagaacacaaacctaaaaaaccaggaaaatacatttgtccatactgttcaagagcctgcgccaagccatcagtgctgaagaaacacatccgtagccacaccggagagcgcccttacccatgtattccctgcggcttttcgttcaagaccaaatccaatctgtacaaacaccgtaaaagccacgcacacgccattaaggcaggccttgtgcctttcacagaatcagccgtgtcaaagctcgatctagaggccggatttatagatgtggaggcagaaatccatagtgatggcgagcaatccactgacaccgatgaggaatccagtctcttcgccgaagcctccgacaagatgtcccctggtccccctatccctctggatatcgcctcacggggaggttaccatgggtctttagaggaaagtttgggggggcccatgaaggtcccgatactcatcatccccaaaagtggaatccccctgcctaacgagagcagccagtacataggtccagatatgctgccaaatccctctctcaacactaaggcagacgattctcataccgtgaaacaaaagttggcattacgcctcagcgaaaagaagggtcaggacagcgaacccagtctcaatctgttaagtccacatagtaaggggagcactgattccggctacttctctagatccgagtccgcggaacagcagatcagtcctcccaacacaaacgcaaagtcctacgaagagattatattcggaaagtactgtcgactctctcctcggaacgccctgagcgtgactacgacctcccaagagcgggccgccatgggccggaaaggaataatggaacccctacctcatgtgaacaccagactcgatgtaaaaatgttcgaagatcctgtcagccagctcatacctagcaaaggcgatgtcgacccctctcagacttccatgctcaaatctactaagttcaattccgaatcaagacaaccacaaataattccctcatcgatcaggaatgaaggcaaattatatcccgctaactttcagggttccaatcctgtcttattggaggctcccgtggacagttccccacttataagatcgaacagtgtaccaacctccagcgctaccaatctgactataccaccgtcactgcgcggctctcactcgttcgatgagagaatgacaggctcagacgacgtattttaccctggcactgttgggattccgcctcaacggatgctccgcagacaagccgccttcgagctgccttctgttcaggagggacacgtagaggtggagcatcatggccgaatgttgaaaggtatcagctccagttcactgaaggagaaaaaactatctccaggcgacagagtaggatacgattacgatgtgtgtaggaagccctataaaaaatgggaggactccgaaacccctaaacagaactatcgggacattagttgtctgagctcacttaagcacggaggagagtactttatggaccccgtcgttccgctgcagggagtcccctcaatgttcggtacaacatgtgaaaacagaaagagaagaaaggagaagtcagtcggtgacgaagaggacacgccaatgatatgttcatcgatcgtatcgacaccagtgggaataatggcatcagattacgatccgaagctacagatgcaagagggagtccgctctggatttgctatggccggacacgaaaatctctcacacgggcatacagaacgctttgacccctgccggccccaattacagcctggatccccctctttggtcagtgaggaatctccaagcgcaatcgattcagataagatgagcgatctgggcgggcgtaaaccccctggtaatgtgattagcgtaattcaacacacaaattctctgtcccgtcctaacagtttcgaaaggtccgaatcagcagagcttgtagcatgtacccaggacaaagcgccctcaccgtcagaaacttgtgactccgaaatcagcgaagcaccagtgagccccgaatgggcccccccaggggatggagccgagagtggtgggaaaccatccccatcgcaacaggtacagcagcaatcgtaccacacccagccacgacttgtaagacaacacaacattcaggtgccggaaattcgggtgaccgaggagcccgataaaccagagaaagaaaaggaagcccaatcaaaggaaccagagaagcccgtcgaggaattccagtggcctcaaaggtccgagactctctcacaacttcccgccgaaaagctccctccaaaaaagaaaagactaaggctcgctgacatggaacactcttccggcgaaagcagttttgaaagcacaggcaccgggctgtctagatctccatcccaagaaagtaaccttagccacagttcctccttttccatgtctttcgaaagagaggagactagcaaactgtccgccctgccaaaacaggacgaatttggcaaacactccgagttcttaacagtgccagcaggatcctactccctgagtgtgccaggtcaccatcatcagaaagaaatgcggcggtgcagcagcgaacagatgccgtgcccgcatccagccgaggttcccgaggtgcgttctaaatcttttgactacggaaatctcagtcacgcacccgtatccggagcagccgcgtccactgttagccccagcagggaacggaagaagtgctttctagtacgccaggcatccttctccggctcccccgagatctcccagggcgaagtgggaatggatcagagcgtgaagcaggagcaactggagcacctgcatgcagggctcagatccggctggcatcacgggccccccgcagtgcttccacccctgcagcaagaggatcccggcaaacaggtagccggtccatgtccacccctgagtagcggtccacttcatctcgcccagccacagatcatgcacatggactcacaggagagcttacggaatccacttatccaaccaacaagctatatgacttctaaacacttaccagaacaaccacatcttttcccacatcaagaaaccatcccctttagccccattcagaacgctctctttcaattccaatatcccaccgtctgcatggtccacctgcctgcccagcagcccccctggtggcaagctcacttccctcatcctttcgcccagcatccacaaaagtcatatggtaagccctcttttcagacagaaattcattcttcctaccccctcgaacacgtggctgaacacaccggcaaaaaacctgccgagtatgcacataccaaggaacagacctatccttgctactcaggcgcatccggactgcaccctaagaacctactgccaaaattccctagtgaccagagcagtaaaagcaccgaaaccccaagcgaacaggtcctacaggaggatttcgcgtcagcgaacgccggctccctgcaaagcttgcctggtactgtagtgcccgtacggatacaaacgcacgtgccaagctacggctcagttatgtacacctcaatctcacagattctgggacagaactcccccgcgatcgtaatttgtaaagtagacgagaatatgacccaacgaaccttagtgaccaatgcagccatgcaaggaataggctttaatatagcacaggtcctgggccagcatgctggtttggagaagtatcctatctggaaggccccccagacgttgccattaggcctcgagtcctccatcccactgtgcctccctagcacatcagactcagtcgccactttgggaggttccaagcgaatgttatcacctgcaagttccctcgagctgtttatggaaacgaagcaacagaagcgtgtcaaggaagagaagatgtacggacagattgtcgaggaactgtcggccgtggaattaactaatagcgatataaagaaggacctgtcccgaccccaaaagccccaattagtaaggcagggctgcgctagtgaacctaaagatggcctgcagtccggttccagttcattctccagtctgagtcctagttctagccaagattacccttccgtgagcccaagctcccgcgaaccctttttacctagcaaggaaatgctgagtggttctagggcacccctacccggtcaaaagtcaagtggaccatctgagtccaaggagagtagtgacgagttagacatagatgagaccgctagtgatatgagtatgagccctcagagctcctccctgccggccggagacggacagttggaggaggaaggcaaagggcacaaacggcctgtaggaatgctggtaagaatggcaagtgcgccgagcggcaatgtggccgatagcacccttctcctaacagatatggccgatttccagcagattcttcagttccctagcttaagaaccactactactgttagctggtgcttcctcaattacacaaaaccaaactacgtccaacaagcaacttttaagtccagtgtttacgcgtcctggtgcatctctagctgtaatccaaaccccagcggcctgaatactaagaccactctggccctccttcggagtaagcagaagataacagccgagatctataccttggccgctatgcacaggcccgggaccggaaagctgacgagctcctcagcatggaagcaattcacacagatgaagccagatgcctcatttttgtttggcagtaagttggaaaggaagctggtgggaaacatactgaaagaaagagggaagggagatatccatggcgataaggacataggctctaagcagaccgagcctatacgcataaaaatttttgaaggcggttacaaatcaaacgaggactatgtttatgtaagaggaagaggaagggggaaatacatatgtgaagagtgcggcattcgatgcaaaaagccttctatgttaaaaaagcatattcgcacccatacagatgtgcgtccttacgtttgcaagctttgcaacttcgcattcaaaacaaagggaaatctgacaaaacacatgaagtccaaagcccacatgaagaagtgcctggagctaggtgtaagtatgactagcgtggacgatacagagaccgaagaagctgaaaaccttgaggacctccacaaagccgccgaaaaacactctatgagttcaatctctaccgatcatcagttttccgacgcagaagagagcgacggagaggatggggacgataacgatgatgacgacgaggacgaggatgattttgatgaccagggagatctaacgccaaagacacgatcacgcagtacaagcccgcagcctcctagatttagttctctgcctgtaaacgtgggggccgtcccacacggcgtaccctcagactcttcactggggcactcaagcctgatctcttatttggtgaccctgcctagcataagagtgactcaactcatgactcccagtgactcatgcgaagacacccagatgacagaatatcagagactgtttcagtcaaaatccacagactccgagcccgataaggacaggctagatatacccagctgcatggacgaagagtgtatgcttccatccgagccttcaagttcacccagagactttagtccctcttcgcatcactcgagcccggggtacgattcatcaccgtgccgagacaattctcctaagcgatatttgatacccaaaggtgatctgagcccaagaagacacctctcccccagaagagatcttagtccaatgaggcaccttagtcctcgaaaagaagccgccctgagacgggagatgtcacaacgagatgtaagtcctcggaggcacctttccccccgacggcctgtgtcccccggcaaagacattactgctcgacgggatctgtctccccggagagagagaagatacatgaccactatccgagcaccaagcccaagacgcgctctgtaccacaaccccccactcagcatgggacaatacctgcaggccgaacctatcgtgttgggacccccaaacttacggcgcgggctaccacaagtcccgtacttctccttatacggcgatcaggagggcgcatatgagcacccagggtctagcttgttcccggaggggcctaatgactacgtgtttagccacttgcctttacactctcagcaacaggtacgtgcacctataccaatggtgcctgtgggcggaattcaaatggtccattccatgccacccgctctctcaagtttacaccctagcccaacacttcccctgcccatggaggggtttgaagaaaaaaaaggggcctctggggagtcctttagcaaagacccatacgtcctgagtaaacagcacgaaaagagaggacctcacgctctacaatcatccgggcctccaagtactccttccagtcctagacttctcatgaagcaatcaacaagcgaggatagcttaaacgcaacagaacgggaacaggaggaaaatattcagacttgtaccaaagccatcgcctctttgcgcatagcaaccgaggaggctgctctattgggacctgatcaaccagccagagtccaggagccccaccagaatcctctcggaagcgcacatgtgtccatccgccactttagccgcccagagcctggccagccttgtaccagtgccacccacccagatctgcacgacggtgaaaaggacaatttcggcacctctcagacacctctcgcacattcaactttttattctaagtcctgtgtggacgataaacagctggacttccactcttctaaggaactgagcagcagcaccgaagaatctaaagatccctcctcagaaaaaagccaattgcactag

SEQ ID NO: 167463 - DNA, 7341 bp, Artificial Sequence
  derived and/or modified sequence
atggacaccggcgacaccgccctgggccagaaggccaccagcagaagcggcgagaccgacaaggccagcggcagatggagacaggagcagagcgccgtgatcaagatgagcaccttcggcagccacgagggccagagacagccccagatcgagcccgagcagatcggcaacaccgccagcgcccagctgttcggcagcggcaagctggccagccccagcgaggtggtgcagcaggtggccgagaagcagtaccccccccacagacccagcccctacagctgccagcacagcctgagcttcccccagcacagcctgccccagggcgtgatgcacagcaccaagccccaccagagcctggagggccccccctggctgttccccggccccctgcccagcgtggccagcgaggacctgttccccttccccatccacggccacagcggcggctaccccagaaagaagatcagcagcctgaaccccgcctacagccagtacagccagaagagcatcgagcaggccgaggaggcccacaagaaggagcacaagcccaagaagcccggcaagtacatctgcccctactgcagcagagcctgcgccaagcccagcgtgctgaagaagcacatcagaagccacaccggcgagagaccctacccctgcatcccctgcggcttcagcttcaagaccaagagcaacctgtacaagcacagaaagagccacgcccacgccatcaaggccggcctggtgcccttcaccgagagcgccgtgagcaagctggacctggaggccggcttcatcgacgtggaggccgagatccacagcgacggcgagcagagcaccgacaccgacgaggagagcagcctgttcgccgaggccagcgacaagatgagccccggcccccccatccccctggacatcgccagcagaggcggctaccacggcagcctggaggagagcctgggcggccccatgaaggtgcccatcctgatcatccccaagagcggcatccccctgcccaacgagagcagccagtacatcggccccgacatgctgcccaaccccagcctgaacaccaaggccgacgacagccacaccgtgaagcagaagctggccctgagactgagcgagaagaagggccaggacagcgagcccagcctgaacctgctgagcccccacagcaagggcagcaccgacagcggctacttcagcagaagcgagagcgccgagcagcagatcagcccccccaacaccaacgccaagagctacgaggagatcatcttcggcaagtactgcagactgagccccagaaacgccctgagcgtgaccaccaccagccaggagagagccgccatgggcagaaagggcatcatggagcccctgccccacgtgaacaccagactggacgtgaagatgttcgaggaccccgtgagccagctgatccccagcaagggcgacgtggaccccagccagaccagcatgctgaagagcaccaagttcaacagcgagagcagacagccccagatcatccccagcagcatcagaaacgagggcaagctgtaccccgccaacttccagggcagcaaccccgtgctgctggaggcccccgtggacagcagccccctgatcagaagcaacagcgtgcccaccagcagcgccaccaacctgaccatcccccccagcctgagaggcagccacagcttcgacgagagaatgaccggcagcgacgacgtgttctaccccggcaccgtgggcatccccccccagagaatgctgagaagacaggccgccttcgagctgcccagcgtgcaggagggccacgtggaggtggagcaccacggcagaatgctgaagggcatcagcagcagcagcctgaaggagaagaagctgagccccggcgacagagtgggctacgactacgacgtgtgcagaaagccctacaagaagtgggaggacagcgagacccccaagcagaactacagagacatcagctgcctgagcagcctgaagcacggcggcgagtacttcatggaccccgtggtgcccctgcagggcgtgcccagcatgttcggcaccacctgcgagaacagaaagagaagaaaggagaagagcgtgggcgacgaggaggacacccccatgatctgcagcagcatcgtgagcacccccgtgggcatcatggccagcgactacgaccccaagctgcagatgcaggagggcgtgagaagcggcttcgccatggccggccacgagaacctgagccacggccacaccgagagattcgacccctgcagaccccagctgcagcccggcagccccagcctggtgagcgaggagagccccagcgccatcgacagcgacaagatgagcgacctgggcggcagaaagccccccggcaacgtgatcagcgtgatccagcacaccaacagcctgagcagacccaacagcttcgagagaagcgagagcgccgagctggtggcctgcacccaggacaaggcccccagccccagcgagacctgcgacagcgagatcagcgaggcccccgtgagccccgagtgggccccccccggcgacggcgccgagagcggcggcaagcccagccccagccagcaggtgcagcagcagagctaccacacccagcccagactggtgagacagcacaacatccaggtgcccgagatcagagtgaccgaggagcccgacaagcccgagaaggagaaggaggcccagagcaaggagcccgagaagcccgtggaggagttccagtggccccagagaagcgagaccctgagccagctgcccgccgagaagctgccccccaagaagaagagactgagactggccgacatggagcacagcagcggcgagagcagcttcgagagcaccggcaccggcctgagcagaagccccagccaggagagcaacctgagccacagcagcagcttcagcatgagcttcgagagagaggagaccagcaagctgagcgccctgcccaagcaggacgagttcggcaagcacagcgagttcctgaccgtgcccgccggcagctacagcctgagcgtgcccggccaccaccaccagaaggagatgagaagatgcagcagcgagcagatgccctgcccccaccccgccgaggtgcccgaggtgagaagcaagagcttcgactacggcaacctgagccacgcccccgtgagcggcgccgccgccagcaccgtgagccccagcagagagagaaagaagtgcttcctggtgagacaggccagcttcagcggcagccccgagatcagccagggcgaggtgggcatggaccagagcgtgaagcaggagcagctggagcacctgcacgccggcctgagaagcggctggcaccacggcccccccgccgtgctgccccccctgcagcaggaggaccccggcaagcaggtggccggcccctgcccccccctgagcagcggccccctgcacctggcccagccccagatcatgcacatggacagccaggagagcctgagaaaccccctgatccagcccaccagctacatgaccagcaagcacctgcccgagcagccccacctgttcccccaccaggagaccatccccttcagccccatccagaacgccctgttccagttccagtaccccaccgtgtgcatggtgcacctgcccgcccagcagcccccctggtggcaggcccacttcccccaccccttcgcccagcacccccagaagagctacggcaagcccagcttccagaccgagatccacagcagctaccccctggagcacgtggccgagcacaccggcaagaagcccgccgagtacgcccacaccaaggagcagacctacccctgctacagcggcgccagcggcctgcaccccaagaacctgctgcccaagttccccagcgaccagagcagcaagagcaccgagacccccagcgagcaggtgctgcaggaggacttcgccagcgccaacgccggcagcctgcagagcctgcccggcaccgtggtgcccgtgagaatccagacccacgtgcccagctacggcagcgtgatgtacaccagcatcagccagatcctgggccagaacagccccgccatcgtgatctgcaaggtggacgagaacatgacccagagaaccctggtgaccaacgccgccatgcagggcatcggcttcaacatcgcccaggtgctgggccagcacgccggcctggagaagtaccccatctggaaggccccccagaccctgcccctgggcctggagagcagcatccccctgtgcctgcccagcaccagcgacagcgtggccaccctgggcggcagcaagagaatgctgagccccgccagcagcctggagctgttcatggagaccaagcagcagaagagagtgaaggaggagaagatgtacggccagatcgtggaggagctgagcgccgtggagctgaccaacagcgacatcaagaaggacctgagcagaccccagaagccccagctggtgagacagggctgcgccagcgagcccaaggacggcctgcagagcggcagcagcagcttcagcagcctgagccccagcagcagccaggactaccccagcgtgagccccagcagcagagagcccttcctgcccagcaaggagatgctgagcggcagcagagcccccctgcccggccagaagagcagcggccccagcgagagcaaggagagcagcgacgagctggacatcgacgagaccgccagcgacatgagcatgagcccccagagcagcagcctgcccgccggcgacggccagctggaggaggagggcaagggccacaagagacccgtgggcatgctggtgagaatggccagcgcccccagcggcaacgtggccgacagcaccctgctgctgaccgacatggccgacttccagcagatcctgcagttccccagcctgagaaccaccaccaccgtgagctggtgcttcctgaactacaccaagcccaactacgtgcagcaggccaccttcaagagcagcgtgtacgccagctggtgcatcagcagctgcaaccccaaccccagcggcctgaacaccaagaccaccctggccctgctgagaagcaagcagaagatcaccgccgagatctacaccctggccgccatgcacagacccggcaccggcaagctgaccagcagcagcgcctggaagcagttcacccagatgaagcccgacgccagcttcctgttcggcagcaagctggagagaaagctggtgggcaacatcctgaaggagagaggcaagggcgacatccacggcgacaaggacatcggcagcaagcagaccgagcccatcagaatcaagatcttcgagggcggctacaagagcaacgaggactacgtgtacgtgagaggcagaggcagaggcaagtacatctgcgaggagtgcggcatcagatgcaagaagcccagcatgctgaagaagcacatcagaacccacaccgacgtgagaccctacgtgtgcaagctgtgcaacttcgccttcaagaccaagggcaacctgaccaagcacatgaagagcaaggcccacatgaagaagtgcctggagctgggcgtgagcatgaccagcgtggacgacaccgagaccgaggaggccgagaacctggaggacctgcacaaggccgccgagaagcacagcatgagcagcatcagcaccgaccaccagttcagcgacgccgaggagagcgacggcgaggacggcgacgacaacgacgacgacgacgaggacgaggacgacttcgacgaccagggcgacctgacccccaagaccagaagcagaagcaccagcccccagccccccagattcagcagcctgcccgtgaacgtgggcgccgtgccccacggcgtgcccagcgacagcagcctgggccacagcagcctgatcagctacctggtgaccctgcccagcatcagagtgacccagctgatgacccccagcgacagctgcgaggacacccagatgaccgagtaccagagactgttccagagcaagagcaccgacagcgagcccgacaaggacagactggacatccccagctgcatggacgaggagtgcatgctgcccagcgagcccagcagcagccccagagacttcagccccagcagccaccacagcagccccggctacgacagcagcccctgcagagacaacagccccaagagatacctgatccccaagggcgacctgagccccagaagacacctgagccccagaagagacctgagccccatgagacacctgagccccagaaaggaggccgccctgagaagagagatgagccagagagacgtgagccccagaagacacctgagccccagaagacccgtgagccccggcaaggacatcaccgccagaagagacctgagccccagaagagagagaagatacatgaccaccatcagagcccccagccccagaagagccctgtaccacaacccccccctgagcatgggccagtacctgcaggccgagcccatcgtgctgggcccccccaacctgagaagaggcctgccccaggtgccctacttcagcctgtacggcgaccaggagggcgcctacgagcaccccggcagcagcctgttccccgagggccccaacgactacgtgttcagccacctgcccctgcacagccagcagcaggtgagagcccccatccccatggtgcccgtgggcggcatccagatggtgcacagcatgccccccgccctgagcagcctgcaccccagccccaccctgcccctgcccatggagggcttcgaggagaagaagggcgccagcggcgagagcttcagcaaggacccctacgtgctgagcaagcagcacgagaagagaggcccccacgccctgcagagcagcggcccccccagcacccccagcagccccagactgctgatgaagcagagcaccagcgaggacagcctgaacgccaccgagagagagcaggaggagaacatccagacctgcaccaaggccatcgccagcctgagaatcgccaccgaggaggccgccctgctgggccccgaccagcccgccagagtgcaggagccccaccagaaccccctgggcagcgcccacgtgagcatcagacacttcagcagacccgagcccggccagccctgcaccagcgccacccaccccgacctgcacgacggcgagaaggacaacttcggcaccagccagacccccctggcccacagcaccttctacagcaagagctgcgtggacgacaagcagctggacttccacagcagcaaggagctgagcagcagcaccgaggagagcaaggaccccagcagcgagaagagccagctgcactag

SEQ ID NO: 167464 - protein, 376 aa, Artificial Sequence
  derived and/or modified sequence
MNYEFEREIGFINSQPSLAECLTSFPPVADTFQSSSIKTSTLSHSTLIPPPFEQTIPSLNPGSHPRHGAGGRPKPSPAGSRGSPVPAGALQPPEYPWMKEKKAAKKTALLPAAAAAATAAATGPACLSHKESLEIADGSGGGSRRLRTAYTNTQLLELEKEFHFNKYLCRPRRVEIAALLDLTERQVKVWFQNRRMKHKRQTQCKENQNSEGKCKSLEDSEKVEEDEEEKTLFEQALSVSGALLEREGYTFQQNALSQQQAPNGHNGDSQSFPVSPLTSNEKNLKHFQHQSPTVPNCLSTMGQNCGAGLNNDSPEALEVPSLQDFSVFSTDSCLQLSDAVSPSLPGSLDSPVDISADSLDFFTDTLTTIDLQHLNY

SEQ ID NO: 167465 - DNA, 1791 bp, Artificial Sequence
  derived and/or modified sequence
tcttttgattaaagcccaaattgtcattgggcagaagcaatcatgtgacagccaattcggtccaatttcaaccttgtctccatgaattcaatagtttaatagtagcgcggtccccatacggctgtaatcagtgaattagaaaaaaaacaccctagcagcgatattctatgatagattttttttcctctgcgctcgcctttttcctaggccttgcccccccaaagcccctccaaaagagggaactttttctctgagggggctccaaggagaaggccatgaattacgaatttgagcgagagattggttttatcaatagccagccgtcgctcgctgagtgcctgacatcttttccccctgtcgctgatacatttcaaagttcatcaatcaagacctcgacgctttcacactcgacactgattcctcctccttttgagcagaccattcccagcctgaaccccggcagtcaccctcgccacggcgctggcggccgccccaagccgagccccgcgggcagccgcggcagcccggtgcccgccggcgccctgcagccgcccgagtacccctggatgaaggagaagaaggcggccaagaaaaccgcacttctgccggccgccgccgccgccgccaccgccgcagccaccggccctgcttgcctcagccacaaagaatccctggaaatcgccgatggcagcggcgggggatcgcggcgcctgagaactgcttacaccaacacacagcttctagagctggaaaaagaatttcatttcaacaagtacctttgcagaccccgaagggtggagattgcagcgctgctggatttgactgagagacaagtgaaagtgtggtttcagaaccggaggatgaagcacaagaggcagacccagtgcaaggaaaaccaaaacagcgaagggaaatgtaaaagccttgaggactccgagaaagtagaggaggacgaggaagagaagacgctctttgagcaagcccttagcgtctctggggcccttctggagagggaaggctacacttttcagcaaaatgccctctctcagcagcaggctcccaatggacacaatggcgactcccaaagtttcccagtctcgcctttaaccagcaatgagaaaaatctgaaacattttcagcaccagtcacccactgttcccaactgcttgtcaacaatgggccagaactgtggagctggcctaaacaatgacagtcctgaggcccttgaggtcccctctttgcaggactttagcgttttctccacagattcctgcctgcagctttcagatgcagtttcacccagtttgccaggttccctcgacagtcccgtagatatttcagctgacagcttagacttttttacagacacactcaccacaatcgacttgcagcatctgaattactaaaaacattaaagcaaaacaaagcatcaccaaacaaaaactcctttgaccaggtggttttgccttcttttatttgggagtttattttttattttcttcttgacctaccccttccctcctttaagtgttgaggattttctgtttagtgattccctgacccagtttcaaacagagccatcttttacagattattttggagttttagttgttttaaacctaactcaacaaccctttatgtgattcctgagagcagtatgaggcctgcaagaaagtgatcatataattgtatcttcactttctttttatttttgtattacattgggatgcattgtcatgcatattttttgtagaataaattctcctttgctataagtaaaaaaaaaaaaaa

SEQ ID NO: 167466 - DNA, 285 bp, Artificial Sequence
  derived and/or modified sequence
atgcaacacagcctcgtgttcttctttgccgtaatactgcatctttctcacttgttacatctggatgcgagcattcatcccttccgcctccctttctcgagcaaaccattcttacttatccccatgtcaaataccacccttccgcacaccgcttggccgctgtcttttctacaccaaaccgtttcgaccctgaaagctgtcgctgtcacacatagcctgtggcatctccagatccctgtagactgccaggcttgcaacagaaaatcaaaaaagatctactgctag

SEQ ID NO: 167467 - DNA, 1131 bp, Artificial Sequence
  derived and/or modified sequence
atgaactacgaattcgaaagagagattgggttcatcaactcacagccatccttagcggagtgcttgacctcttttccaccagtggcagatacattccaaagctcatcaataaagacctctactctgtctcacagtacccttatcccaccccccttcgagcagacaattccatctctgaaccctgggagccatccaagacacggggccgggggcagacccaaaccaagtccagccggttcgcgggggagtcctgtccccgccggcgccctccagccacctgagtacccttggatgaaagagaagaaagctgcaaagaagacagcccttctgccagcagctgccgccgctgcaacagccgcggctactggacccgcttgccttagtcacaaggagtcactggagatagccgatgggtccgggggcggaagccggagactgagaacagcatatacgaatactcagctgttagaactggagaaagagtttcatttcaataagtatttatgccggccacgaagggtggagatagccgcactcctagatctcactgaacggcaggtgaaggtgtggtttcagaataggagaatgaagcataagcgccaaacccaatgtaaggagaaccaaaattcagagggcaaatgtaaatctttggaagactccgagaaagttgaagaagacgaggaagaaaaaactctgttcgagcaggccttgagcgtgtccggcgcactgctggagcgcgagggatatacgtttcaacaaaatgccctgtcccagcagcaggctcctaatggacataatggggatagccagtctttccctgtttcgccattaacatccaacgagaaaaacctcaagcatttccagcaccagtcgcccaccgtgcccaactgtttgagcaccatggggcagaattgtggggccggtcttaacaacgactcgcctgaggccctggaagtgccaagcctgcaggatttttctgtcttctccacagactcatgtctccagctgtctgatgcagttagccccagtcttcccggatctctggatagccctgtggacatcagtgccgattctttggattttttcaccgacaccctgacgacaatcgacttacagcatcttaactactag

SEQ ID NO: 167468 - DNA, 2066 bp, Artificial Sequence
  derived and/or modified sequence
cccgacttttttggatcaatcaaacagacagtggcttcttttgattaaagcccaaattgtcattgggcagaagcaatcatgtgacagccaattcggtccaatttcaaccttgtctccatgaattcaatagtttaatagtagcgcggtccccatacggctgtaatcagtgaattagaaaaaaaacaccctagcagcgatattctatgatagattttttttcctctgcgctcgcctttttcctaggccttgcccccccaaagcccctccaaaagagggaactttttctctgagggggctccaaggagaaggccatgaattacgaatttgagcgagagattggttttatcaatagccagccgtcgctcgctgagtgcctgacatcttttccccctgtcgctgatacatttcaaagttcatcaatcaagacctcgacgctttcacactcgacactgattcctcctccttttgagcagaccattcccagcctgaaccccggcagtcaccctcgccacggcgctggcggccgccccaagccgagccccgcgggcagccgcggcagcccggtgcccgccggcgccctgcagccgcccgagtacccctggatgaaggagaagaaggcggccaagaaaaccgcacttctgccggccgccgccgccgccgccaccgccgcagccaccggccctgcttgcctcagccacaaagaatccctggaaatcgccgatggcagcggcgggggatcgcggcgcctgagaactgcttacaccaacacacagcttctagagctggaaaaagaatttcatttcaacaagtacctttgcagaccccgaagggtggagattgcagcgctgctggatttgactgagagacaagtgaaagtgtggtttcagaaccggaggatgaagcacaagaggcagacccagtgcaaggaaaaccaaaacagcgaagggaaatgtaaaagccttgaggactccgagaaagtagaggaggacgaggaagagaagacgctctttgagcaagcccttagcgtctctggggcccttctggagagggaaggctacacttttcagcaaaatgccctctctcagcagcaggctcccaatggacacaatggcgactcccaaagtttcccagtctcgcctttaaccagcaatgagaaaaatctgaaacattttcagcaccagtcacccactgttcccaactgcttgtcaacaatgggccagaactgtggagctggcctaaacaatgacagtcctgaggcccttgaggtcccctctttgcaggactttagcgttttctccacagattcctgcctgcagctttcagatgcagtttcacccagtttgccaggttccctcgacagtcccgtagatatttcagctgacagcttagacttttttacagacacactcaccacaatcgacttgcagcatctgaattactaaaaacattaaagcaaaacaaagcatcaccaaacaaaaactcctttgaccaggtggttttgccttcttttatttgggagtttattttttattttcttcttgacctaccccttccctcctttaagtgttgaggattttctgtttagtgattccctgacccagtttcaaacagagccatcttttacagattattttggagttttagttgttttaaacctaactcaacaaccctttatgtgattcctgagagcagtatgaggcctgcaagaaagtgatcatataattgtatcttcactttctttttatttttgtattacattgggatgcattgtcatgcatattttttgtagaataaattctcctttgctataagtagcttatttttctccccctcttttttcaaggctcataacgggttctttttcttcttttagtctaacttcgtaaataaaattcgtcacaatttatcctcttttttcaattttaatacatttattaaggcggcatgttcaaagtcttcaatggacagcaacaaaacagaaagccaaaaaatgactagggcttctaataagtgttttttctttcttttttgcttcttcttctcctctttctttttaaaggatttga

SEQ ID NO: 167469 - DNA, 1131 bp, Artificial Sequence
  derived and/or modified sequence
atgaactatgaatttgagcgggagatcggcttcatcaacagccagcccagcctggccgagtgcctgaccagcttcccccctgtggccgacaccttccagagcagcagcatcaagaccagcaccctgagccacagcaccctcatccccccaccatttgagcagaccatccccagcctgaaccctggcagccaccccaggcatggagctgggggccggcccaagcccagccctgctggcagccggggcagccctgtgcctgctggggccctgcagcccccagagtacccctggatgaaggagaagaaggccgccaagaagacagccctgctgcctgctgctgctgctgctgccacagctgctgccaccggccctgcctgcctgagccacaaggagagcctggagattgctgatggcagcggcggcggcagccggcggctgaggacagcctacaccaacacccagctgctggagctggagaaggagttccacttcaacaagtacctgtgccggccccggcgggtggagattgctgccctgctggacctgacagagcggcaggtgaaggtgtggttccagaacagaaggatgaagcacaagaggcagacccagtgcaaggagaaccagaacagcgagggcaagtgcaagagcctggaggacagcgagaaggtggaggaggatgaggaggagaagaccctgtttgagcaggccctgtctgtgtctggggccctgctggagcgggagggctacaccttccagcagaatgccctgagccagcagcaggccccaaatggccacaacggggacagccagagcttccctgtgagccccctgaccagcaatgagaagaacctgaagcacttccagcaccagagccccaccgtgcccaactgcctgagcaccatgggccagaactgtggggccggcctgaacaatgacagccctgaggccctggaggtgcccagcctgcaggacttcagcgtcttcagcacagacagctgcctgcagctgagtgatgctgtgagccccagcctgcccggcagcctggacagccctgtggacatctctgctgacagcctggacttcttcacagacaccctgaccaccatcgacctgcagcacctgaactactag

SEQ ID NO: 167470 - DNA, 1131 bp, Artificial Sequence
  derived and/or modified sequence
atgaactacgagttcgagcgggagatcggcttcatcaacagccagcccagtctggccgagtgtctgacatccttcccacccgtagctgacacattccaatctagctctatcaaaacctctacgctcagtcattcgacgctgatccctccaccattcgaacagaccatcccttcactaaaccccggaagccatcccaggcacggtgctgggggcagacccaaaccctcgcctgccggcagccggggaagcccggttcctgcaggcgccttacagccgccggagtacccttggatgaaagaaaaaaaagccgcgaagaaaacagctctactcccagccgccgctgctgcagccaccgccgccgccacagggcccgcctgcctaagtcacaaggaaagccttgaaatcgcagacggctcaggcggcgggtcccgcagactccgcaccgcgtatactaatactcagttgttggagttagaaaaggagttccattttaacaagtacttatgtcggccacggcgggtggagattgccgctctcctggatctgaccgagcgacaagtgaaggtctggtttcagaacaggcgtatgaagcataagaggcaaactcaatgcaaggaaaaccagaattctgaggggaaatgtaaaagcctggaagactcagaaaaggtggaagaagatgaagaggagaagactttattcgaacaggccctgagtgtcagtggtgccctgctggagagggaaggatacacattccagcagaacgccctgagtcaacagcaagctccaaacgggcacaacggggactcccaaagttttcccgtgagtcccctgacctccaatgaaaaaaatttaaagcatttccaacatcagtcaccaacggtcccgaactgcctttctactatgggccaaaactgtggtgccggcctgaacaatgatagtcctgaggccctcgaggtgcctagcctccaggatttctctgtgttctcaacagactcttgtctgcaactgagtgacgccgtcagtcccagcctacccgggtcactggattctccggtggacataagcgccgattcactggacttctttacggatacgctgacgactatcgacctccaacacctgaattattag

SEQ ID NO: 167471 - DNA, 1131 bp, Artificial Sequence
  derived and/or modified sequence
atgaattacgaatttgagcgcgagatcggattcatcaattcccagccctcactggccgagtgtttgacaagctttccacccgtggccgatactttccagtcatcttctataaaaacctctacacttagccacagcacattaatccctccccctttcgaacaaactattccgagcttgaatccaggttctcacccacgccatggtgccggaggacggccaaagccaagccccgcaggttcccgaggatcgcccgtgccagctggcgcactccaaccacccgaatatccatggatgaaagagaaaaaggctgctaagaaaacagctctgctgccagcagcagccgctgctgcgacagcagctgcaacgggtccagcctgcctcagccacaaagaatccctggagattgctgacggatctgggggaggctccaggcggttacggacggcgtatacaaatacacagctgctggagctcgaaaaggagtttcattttaataaatacctgtgtaggccacggagagtggaaattgccgctctcttagacttgactgagcgacaggtcaaggtgtggttccaaaacaggcgaatgaagcataagcggcagacccagtgcaaggagaatcagaactctgaggggaagtgtaagagcttggaggactcggaaaaggttgaagaagatgaagaggagaagacattgttcgaacaggctctgagtgtatccggggcattgctggagcgggaggggtacactttccagcagaatgccctgtcgcaacaacaggcccctaatggccataacggcgattctcaaagttttcccgtgtcccctttgaccagcaatgagaagaaccttaaacactttcagcaccagtcccccactgtgccgaactgcctcagtacaatgggtcagaattgcggtgccggattgaataacgattccccagaagccctggaggtgcctagtctgcaagatttcagcgtgttttccaccgacagttgcctccagcttagcgacgcagtgtcgcccagcctgcccggatccctagactcccctgtggatatctctgccgacagcctagactttttcaccgacacactgaccacaattgatctgcaacacttaaattattag

SEQ ID NO: 167472 - DNA, 1131 bp, Artificial Sequence
  derived and/or modified sequence
atgaactacgagttcgagagagagatcggcttcatcaacagccagcccagcctggccgagtgcctgaccagcttcccccccgtggccgacaccttccagagcagcagcatcaagaccagcaccctgagccacagcaccctgatccccccccccttcgagcagaccatccccagcctgaaccccggcagccaccccagacacggcgccggcggcagacccaagcccagccccgccggcagcagaggcagccccgtgcccgccggcgccctgcagccccccgagtacccctggatgaaggagaagaaggccgccaagaagaccgccctgctgcccgccgccgccgccgccgccaccgccgccgccaccggccccgcctgcctgagccacaaggagagcctggagatcgccgacggcagcggcggcggcagcagaagactgagaaccgcctacaccaacacccagctgctggagctggagaaggagttccacttcaacaagtacctgtgcagacccagaagagtggagatcgccgccctgctggacctgaccgagagacaggtgaaggtgtggttccagaacagaagaatgaagcacaagagacagacccagtgcaaggagaaccagaacagcgagggcaagtgcaagagcctggaggacagcgagaaggtggaggaggacgaggaggagaagaccctgttcgagcaggccctgagcgtgagcggcgccctgctggagagagagggctacaccttccagcagaacgccctgagccagcagcaggcccccaacggccacaacggcgacagccagagcttccccgtgagccccctgaccagcaacgagaagaacctgaagcacttccagcaccagagccccaccgtgcccaactgcctgagcaccatgggccagaactgcggcgccggcctgaacaacgacagccccgaggccctggaggtgcccagcctgcaggacttcagcgtgttcagcaccgacagctgcctgcagctgagcgacgccgtgagccccagcctgcccggcagcctggacagccccgtggacatcagcgccgacagcctggacttcttcaccgacaccctgaccaccatcgacctgcagcacctgaactactag

SEQ ID NO: 167473 - RNA, 285 nt, Artificial Sequence
  derived and/or modified sequence
augcaacacagccucguguucuucuuugccguaauacugcaucuuucucacuuguuacaucuggaugcgagcauucaucccuuccgccucccuuucucgagcaaaccauucuuacuuauccccaugucaaauaccacccuuccgcacaccgcuuggccgcugucuuuucuacaccaaaccguuucgacccugaaagcugucgcugucacacauagccuguggcaucuccagaucccuguagacugccaggcuugcaacagaaaaucaaaaaagaucuacugcuag

SEQ ID NO: 167474 - protein, 324 aa, Artificial Sequence
  derived and/or modified sequence
MASYYEILDVPRSASADDIKKAYRRKALQWHPDKNPDNKEFAEKKFKEVAEAYEVLSDKHKREIYDRYGREGLTGTGTGPSRAEAGSGGPGFTFTFRSPEEVFREFFGSGDPFAELFDDLGPFSELQNRGSRHSGPFFTFSSSFPGHSDFSSSSFSFSPGAGAFRSVSTSTTFVQGRRITTRRIMENGQERVEVEEDGQLKSVTINGVPDDLALGLELSRREQQPSVTSRSGGTQVQQTPASCPLDSDLSEDEDLQLAMAYSLSEMEAAGKKPAGGREAQHRRQGRPKAQHQDPGLGGTQEGARGEATKRSPSPEEKASRCLIL

SEQ ID NO: 167475 - protein, 228 aa, Artificial Sequence
  derived and/or modified sequence
MASYYEILDVPRSASADDIKKAYRRKALQWHPDKNPDNKEFAEKKFKEVAEAYEVLSDKHKREIYDRYGREGLTGTGTGPSRAEAGSGGPGFTFTFRSPEEVFREFFGSGDPFAELFDDLGPFSELQNRGSRHSGPFFTFSSSFPGHSDFSSSSFSFSPGAGAFRSVSTSTTFVQGRRITTRRIMENGQERVEVEEDGQLKSVTINGVPDDLALGLELSRREQQPSVT

SEQ ID NO: 167476 - protein, 148 aa, Artificial Sequence
  derived and/or modified sequence
MASYYEILDVPRSASADDIKKAYRRKALQWHPDKNPDNKEFAEKKFKEVAEAYEVLSDKHKREIYDRYGREGLTGTGTGPSRAEAGSGGPGFTFTFRSPEEVFREFFGSGDPFAELFDDLGPFSELQNRGSRHSGPFFTFSSSFPGHS

SEQ ID NO: 167477 - protein, 122 aa, Artificial Sequence
  derived and/or modified sequence
MASYYEILDVPRSASADDIKKAYRRKALQWHPDKNPDNKEFAEKKFKEVAEAYEVLSDKHKREIYDRYGREGLTGTGTGPSRAEAGSGGPGFTFTFRSPEEVFREFFGSGDPFAELFDDLGP

SEQ ID NO: 167478 - DNA, 975 bp, Artificial Sequence
  derived and/or modified sequence
atggcttcttattacgaaattctggacgttcctcgctcggcttcagccgacgatatcaagaaggcatacagaaggaaagccctgcaatggcaccccgataagaatcccgataacaaagaatttgcggagaagaagttcaaagaggtggcagaggcctacgaggtactttcagacaaacacaaaagagagatttatgacagatatggccgggaggggttaacaggcaccggaacgggtccttcgcgcgccgaggcaggttcagggggtccaggctttacctttaccttccggagcccagaggaggtatttcgggaattcttcgggtctggggatcccttcgcagagctttttgatgacttgggaccattttctgagctgcagaatagggggagcaggcacagtggccccttttttaccttcagcagttccttccccggtcactctgactttagcagcagctccttctctttcagccctggagctggggcctttagaagcgtctccactagcaccactttcgtgcaagggcggaggatcactactcggaggatcatggagaacggtcaagaaagggtggaagttgaagaggacggccagttgaagtcagtaacaatcaacggcgtccccgacgacctggctctgggactggaactgtctcggcgcgaacagcagcccagtgttacctcccggtctggcggaactcaggtccagcaaacacccgcttcttgtccgctcgactccgatttatctgaggacgaggatctccagctcgcaatggcctactctctctcagagatggaagccgctggcaagaagccagcaggtggccgggaagcacagcataggaggcagggaagacccaaagcccaacaccaggatccaggcctcggcgggactcaggagggcgcccggggggaggccactaagcgatctcccagccctgaggagaaagccagcaggtgcctgatcctgtag

SEQ ID NO: 167479 - DNA, 975 bp, Artificial Sequence
  derived and/or modified sequence
atggccagctactatgagatcctggatgtgcccaggtctgccagcgcagatgacatcaagaaggcctacagaaggaaggccctgcagtggcacccagacaagaacccagacaacaaggagtttgctgagaagaagttcaaggaggtggccgaggcctatgaggtgctgagtgacaagcacaagcgggagatctatgacagatatggccgggagggcctgaccggcaccggcaccggccccagcagagctgaggccggcagcggcggccctggcttcaccttcaccttccgcagccctgaggaggtgttccgggagttctttggaagtggggacccctttgctgagctgtttgatgacctgggccccttcagcgagctgcagaacagaggcagccgccacagcggccccttcttcaccttcagcagcagcttccctggccacagcgacttcagcagcagcagcttctccttcagccctggagctggggccttccgctctgtgtccaccagcaccacctttgtgcagggccgccgcatcaccacccggcgcatcatggagaatggccaggagcgggtggaggtggaggaggatggccagctgaagtctgtgaccatcaacggggtgcctgatgacctggccctgggcctggagctgagccggcgggagcagcagcccagcgtgaccagccgcagcggcggcacccaggtgcagcagaccccagccagctgccccctggacagcgacctgtctgaagatgaggacctgcagctggccatggcctacagcctgtctgagatggaggccgccggcaagaagccagctgggggccgggaggcccagcaccggcggcagggccggcccaaggcccagcaccaggaccccggcctgggcggcacccaggagggcgcccggggggaggccaccaagaggagccccagccctgaggagaaggccagccgctgcctgatcctgtag

SEQ ID NO: 167480 - DNA, 975 bp, Artificial Sequence
  derived and/or modified sequence
atggccagctactacgagatcctggacgtgccccggagcgccagcgcagacgatattaaaaaagcatatcggcggaaggcccttcagtggcaccccgataaaaaccctgacaacaaggaattcgccgaaaagaagtttaaggaggtggccgaagcttatgaggtgctctctgataagcacaaacgggaaatctatgaccgctatggccgtgaaggcctgactgggactggaacagggcctagcagagcagaggcagggtccggcggacctggattcaccttcaccttccgaagcccagaggaggtgttcagggaattttttggaagcggagatccttttgcagagctctttgatgatctgggccccttttccgagctgcaaaataggggctctcgccattcagggccctttttcaccttctcttccagctttcctgggcactctgattttagctccagttcattctccttctcaccgggcgccggagccttcaggtcagtctccacttcaactactttcgtacagggcagaagaatcacaactcggaggatcatggaaaacggccaggagcgcgtggaagtggaggaagatggccagcttaagtcagttactataaatggagtgccagatgatctggccttgggtctagagttgtccaggcgcgaacagcagccttcagtgacgtctagatcaggagggacacaggtccagcagacacctgcctcttgcccgctggatagcgatctgtctgaagacgaggatctccagctagccatggcgtactctttgtcagagatggaggccgcaggcaagaaacccgcaggcgggagagaggcccaacacagacggcaggggcgacctaaagcccagcaccaggaccctggactggggggcactcaggagggcgctcgaggggaggccacaaaacgatcaccatcgccggaggagaaagcctcgagatgcctgatcctatag

SEQ ID NO: 167481 - DNA, 975 bp, Artificial Sequence
  derived and/or modified sequence
atggccagctattatgaaatactcgatgtacccaggtcagcgtctgcagatgatatcaaaaaagcgtatcggagaaaagctctgcaatggcacccagataagaaccccgataacaaggagttcgcggagaagaaatttaaagaagtcgctgaagcatatgaggtgctgtccgacaaacacaaacgcgagatatatgacagatacggccgagaaggcctgaccggtacggggactggaccaagccgggcagaggctggtagcggcggaccgggattcacattcactttccggtctcccgaggaagtgttcagagaattcttcgggagtggcgaccctttcgctgaactgttcgatgacctcggcccattctccgagctgcagaaccgcggtagcagacatagtggcccattctttacattttccagctcctttccagggcactcagatttcagcagctcttctttttccttctcgcctggggcaggtgcattcagaagtgtgtcaaccagtacaacttttgtccaggggagaaggatcaccaccaggcgcattatggaaaatggacaggagagggtggaggtggaagaggacggccagctcaaatctgtgaccatcaatggggtgcctgatgaccttgctttgggccttgagcttagtcggagagaacagcagccaagcgtaacgagcagaagcgggggaacacaggtgcagcagacaccagcatcctgccctctcgacagcgacctatcagaagatgaggacctgcagcttgcgatggcatactctctgagcgagatggaggctgccggaaaaaaacccgcaggaggacgcgaagctcagcatcgccgacagggaaggcccaaggctcagcatcaggaccccggactcggcggaacacaggaaggcgcaagaggggaagccactaagcggagtccaagcccggaggagaaggctagccgctgtctcattttgtag

SEQ ID NO: 167482 - DNA, 975 bp, Artificial Sequence
  derived and/or modified sequence
atggccagctactacgagatcctggacgtgcccagaagcgccagcgccgacgacatcaagaaggcctacagaagaaaggccctgcagtggcaccccgacaagaaccccgacaacaaggagttcgccgagaagaagttcaaggaggtggccgaggcctacgaggtgctgagcgacaagcacaagagagagatctacgacagatacggcagagagggcctgaccggcaccggcaccggccccagcagagccgaggccggcagcggcggccccggcttcaccttcaccttcagaagccccgaggaggtgttcagagagttcttcggcagcggcgaccccttcgccgagctgttcgacgacctgggccccttcagcgagctgcagaacagaggcagcagacacagcggccccttcttcaccttcagcagcagcttccccggccacagcgacttcagcagcagcagcttcagcttcagccccggcgccggcgccttcagaagcgtgagcaccagcaccaccttcgtgcagggcagaagaatcaccaccagaagaatcatggagaacggccaggagagagtggaggtggaggaggacggccagctgaagagcgtgaccatcaacggcgtgcccgacgacctggccctgggcctggagctgagcagaagagagcagcagcccagcgtgaccagcagaagcggcggcacccaggtgcagcagacccccgccagctgccccctggacagcgacctgagcgaggacgaggacctgcagctggccatggcctacagcctgagcgagatggaggccgccggcaagaagcccgccggcggcagagaggcccagcacagaagacagggcagacccaaggcccagcaccaggaccccggcctgggcggcacccaggagggcgccagaggcgaggccaccaagagaagccccagccccgaggagaaggccagcagatgcctgatcctgtag

SEQ ID NO: 167483 - DNA, 3176 bp, Artificial Sequence
  derived and/or modified sequence
gtgtgcccaaaatagccggctccgccctcttctcccggcagcccctgcaggcccccacccccccaggggacaggcggagccggccttctccccgtctctagtagtttccgcaccgctgacgcatgcctgcgcgcacagctgggccgggcgcgtcctacgcagcagccgcgagccgggctgcgggtgccagacggttcccggcggggggcaggggcggggcgccgcaggaggccgggactcctggcggaggagccccaaggaggcccgcctgacgactgaccagttgccatggcatcctactacgagatcctagacgtgccgcgaagtgcgtccgctgatgacatcaagaaggcgtatcggcgcaaggctctccagtggcacccagacaaaaacccagataataaagagtttgctgagaagaaatttaaggaggtggccgaggcatatgaagtgctgtctgacaagcacaagcgggagatttacgaccgctatggccgggaagggctgacagggacaggaactggcccatctcgggcagaagctggcagtggtgggcctggcttcaccttcaccttccgcagccccgaggaggtcttccgggaattctttgggagtggagacccttttgcagagctctttgatgacctgggccccttctcagagcttcagaaccggggttcccgacactcaggccccttctttaccttctcttcctccttccctgggcactccgatttctcctcctcatctttctccttcagtcctggggctggtgcttttcgctctgtttctacatctaccacctttgtccaaggacgccgcatcaccacacgcagaatcatggagaacgggcaggagcgggtggaagtggaggaggatgggcagctgaagtcagtcacaatcaatggtgtcccagatgacctggcactgggcttggagctgagccgtcgcgagcagcagccgtcagtcacttccaggtctgggggcactcaggtccagcagacccctgcctcatgccccttggacagcgacctctctgaggatgaggacctgcagctggccatggcctacagcctgtcagagatggaggcagctgggaagaaacccgcaggtgggcgggaggcacagcaccgacggcaggggcggcccaaggcccagcaccaagatccaggcttgggggggacccaggagggtgcgaggggtgaagcaaccaaacgcagtccatccccagaggagaaggcctctcgctgcctcatcctctgaacaccgggcccaacctgatctgatccagatcttgactggggggtctgactcactgtgggaagagaagaggggagtatcctgagttgtaggaactgctttccaactccaagctccctccacaagtttccctcccaggccccccacaccccagtgtggacttgggatttgctgtgctcagcccagggctgataggtccctggtgaagcccagggtggggggtgtcagggcagtggaggggcccgaggagccaggttgcatttattggatggggagctccaaggggcattagtggtttgggctgggccttttgtgccctggtactctgccacctgtgttgctgatggtgtcaaggaaggaggacttggcctagggttgtctgagccggagccggcagctccactggagagcagtgcaggcagagtggagcctcctgctctcctggaccagctgcagacccccaaccctggtttctgtgccatgttgcgctctgaccgtctctgttgcttctcttctggtgttgcttctcctccctcccattctctctgcaactccctgcgggccgcatcgcttgctttcactgccgtctggctaggactcccttcttccttccttccccgagaaggcctcaatgtggcgaggaagatgctggggccggtagggctgtgagatcttctggggaggctagccgggtggggcgggagcctctcagctgtccagattcagaactggagcccactcctcctccctctcgttgcctcagcctgccctcaccctcaggactaggcagaggtgaggctggctcaccctgaagaggtgggataggaccgggggaccccagagggaggcctaggaggggactgcacccatactgcttccctaccacaaatcagggctcagggagaggccatgcggccagcccaggtctgcatgctgagccccatcctccacagcttgccgctgacgctctctcctgtcaccccgcccctgctctctccccagatgtgttctgagctggatgccgggttccagaatcgctgcacagttccaacaggacagcgccttcccccatgcgctgggaggggaccctccatttctccccctcacccatgctgagtgtagagccggggcctgggtggcgggtgggggccgggtgggaggtggcagtagtcttagcctgtgcactctcttccttgggtgtttggtgctggctcctggggactacaaatcccagagtgcggtgtgcccggcctcatttctgatagatcccgcttgggggaggtggtgtatggttacggagctgtgcatcttgggacatgtagtagcccaggtcggcttgtcactcgctgtgagatggggagattttgtcttttgatttatccctgtagggctggcagggttgtagatgaagggggaatgatctgagccttggttcccctgacacgtcttgctagccccagggttagagtgggcagggcagagccgcgcagcacctgggagcggtacctttcccttgggcagcctggggtcccaggaacaagccagggcgagtggcatgtctgcctgagcagggtgtggccccagaaagctgaggagtgtgggctggcagagagcttcgagggcaaggccacccgcgggggcgtgtgtgtggtggggcttggcatgtgatggcagctccaggcatgccgctgcttgtatggctttctttggcctctgaccctgctgcccattctttccaacatcacagatgaactgcctctcctcctccctgcctggggagcccagtggccagggaggggagtggtggagccagtcgctgtaacactgagcctcagagacgaaccaaaaccagctgggctgagctcagatccagggggaaatgctggaagtcaataaaactgagttttgagagcttg

SEQ ID NO: 167484 - protein, 455 aa, Artificial Sequence
  derived and/or modified sequence
MSLTVVSMACVGFFLLQGAWPLMGGQDKPFLSARPSTVVPRGGHVALQCHYRRGFNNFMLYKEDRSHVPIFHGRIFQESFIMGPVTPAHAGTYRCRGSRPHSLTGWSAPSNPLVIMVTGNHRKPSLLAHPGPLLKSGETVILQCWSDVMFEHFFLHREGISEDPSRLVGQIHDGVSKANFSIGPLMPVLAGTYRCYGSVPHSPYQLSAPSDPLDIVITGLYEKPSLSAQPGPTVQAGENVTLSCSSWSSYDIYHLSREGEAHERRLRAVPKVNRTFQADFPLGPATHGGTYRCFGSFRALPCVWSNSSDPLLVSVTGNPSSSWPSPTEPSSKSGICRHLHVLIGTSVVIFLFILLLFFLLYRWCSNKKNAAVMDQEPAGDRTVNRQDSDEQDPQEVTYAQLDHCVFIQRKISRPSQRPKTPLTDTSVYTELPNAEPRSKVVSCPRAPQSGLEGVF

SEQ ID NO: 167485 - DNA, 1368 bp, Artificial Sequence
  derived and/or modified sequence
atgtctctgactgtggtcagcatggcttgtgtgggcttcttcctccttcaaggtgcctggcctctgatggggggccaagacaaacctttcttatcagctcgcccatctacggtcgtgccgagagggggacatgtcgctctccagtgccattaccgcagaggctttaataatttcatgctgtacaaggaggataggtcccacgtgcctattttccacgggaggatcttccaggaatccttcatcatgggacccgtcaccccagcccatgcagggacgtatcggtgtcgggggtccagacctcattcccttactggctggagcgccccctccaatccccttgtgattatggtaacggggaaccaccgaaagccatccctcctggcccacccaggccccctgcttaaatctggtgagacggtgatactgcagtgctggagtgacgtaatgttcgagcacttctttcttcaccgcgaaggcatctcagaagacccttcccgtttggtggggcagattcacgacggcgtgtccaaagccaatttctctatcggacccctcatgcccgtgctagcaggcacttaccggtgctacggatctgtgcctcattccccctatcagttgtccgctccctccgatccacttgatatcgtgatcactgggctctacgagaaaccatcgctgagcgcccagcccgggccaacagtgcaagctggggaaaacgtaacactatcatgctctagctggagttcgtatgatatctaccacctgtccagagagggagaggcgcacgagcgacggctgcgcgctgtgccaaaagtgaacagaaccttccaggccgatttccctctcgggccggccactcatgggggcacataccggtgtttcggttcatttcgggcgcttccttgtgtgtggagtaattcaagcgatcctctgctggttagtgtgactggcaaccccagctcctcctggccctcacctacagagccgtcctccaaatcgggaatttgccggcacctccacgttctgattggtacctccgtagtcatctttctgtttattctgctgctcttcttcctgctgtaccggtggtgttccaataaaaagaacgccgcagtcatggatcaagagcctgctggcgaccgcacagtgaatcgccaggattctgacgagcaagacccacaggaggttacatatgcacagctggaccattgcgtgttcattcaacgtaaaatctcccgcccctctcagcgacctaagacacccctaaccgacacttccgtttataccgaactgccgaacgccgagcctcgaagcaaggtggtctcctgcccgagagccccacagtctggacttgaaggtgttttttag

SEQ ID NO: 167486 - DNA, 1877 bp, Artificial Sequence
  derived and/or modified sequence
ggggcgcggcctcctgtctgcaccggcagcaccatgtcgctcacggtcgtcagcatggcgtgcgttgggttcttcttgctgcagggggcctggccactcatgggtggtcaggacaaacccttcctgtctgcccggcccagcactgtggtgcctcgaggaggacacgtggctcttcagtgtcactatcgtcgtgggtttaacaatttcatgctgtacaaagaagacagaagccacgttcccatcttccacggcagaatattccaggagagcttcatcatgggccctgtgaccccagcacatgcagggacctacagatgtcggggttcacgcccacactccctcactgggtggtcggcacccagcaaccccctggtgatcatggtcacaggaaaccacagaaaaccttccctcctggcccacccagggcccctgctgaaatcaggagagacagtcatcctgcaatgttggtcagatgtcatgtttgagcacttctttctgcacagagaggggatctctgaggacccctcacgcctcgttggacagatccatgatggggtctccaaggccaacttctccatcggtcccttgatgcctgtccttgcaggaacctacagatgttatggttctgttcctcactccccctatcagttgtcagctcccagtgaccccctggacatcgtgatcacaggtctatatgagaaaccttctctctcagcccagccgggccccacggttcaggcaggagagaacgtgaccttgtcctgtagctcctggagctcctatgacatctaccatctgtccagggaaggggaggcccatgaacgtaggctccgtgcagtgcccaaggtcaacagaacattccaggcagactttcctctgggccctgccacccacggagggacctacagatgcttcggctctttccgtgccctgccctgcgtgtggtcaaactcaagtgacccactgcttgtttctgtcacaggaaacccttcaagtagttggccttcacccacagaaccaagctccaaatctggtatctgcagacacctgcatgttctgattgggacctcagtggtcatcttcctcttcatcctcctcctcttctttctcctttatcgctggtgctccaacaaaaagaatgctgctgtaatggaccaagagcctgcgggggacagaacagtgaataggcaggactctgatgaacaagaccctcaggaggtgacgtacgcacagttggatcactgcgttttcatacagagaaaaatcagtcgcccttctcagaggcccaagacacccctaacagataccagcgtgtacacggaacttccaaatgctgagcccagatccaaagttgtctcctgcccacgagcaccacagtcaggtcttgagggggttttctagggagacaacagccctgtctcaaaaccaggttgccagatccaatgaaccagcagctggaatctgaaggcatcagtctgcatcttaggggatcgctcttcctcacaccacgaatctgaacatgcctctctcttgcttacaaatgcctaaggtcgccactgcctgctgcagagaaaacacactcctttgcttagcccacaagtatctatttcacttgacccctgcccacctctccaacctaactggcttacttcctagtcctacttgaggctgcaatcacactgaggaactcacaattccaaacatacaagaggctccctcttaacacggcacttacacacttgctgttccaccttccctcatgctgttccacctcccctcagactatctttcagccttctgtcatcagtaaaatttataaattttttttataacttcagtgtagctctctcctcttcaaataaacatgtctgccctca

SEQ ID NO: 167487 - DNA, 1368 bp, Artificial Sequence
  derived and/or modified sequence
atgagcctgactgtggtgtccatggcctgtgtgggcttcttcctgctgcagggcgcctggcccctgatgggcggccaggacaagcccttcctgagcgcccggcccagcacagtggtgccccggggcggccacgtggccctgcagtgccactaccgccggggcttcaacaacttcatgctgtacaaggaggacaggagccacgtgcccatcttccacggccgcatcttccaggagagcttcatcatgggccctgtgaccccagcccacgccggcacctaccgctgccggggcagccggccccacagcctgaccggctggagcgcccccagcaaccccctggtgatcatggtgacaggcaaccacaggaagcccagcctgctggcccaccctggccccctgctgaagagcggggagaccgtcatcctgcagtgctggagcgatgtgatgtttgagcacttcttcctgcaccgggagggcatcagcgaggaccccagccggctggtgggccagatccatgatggagtgtccaaggccaacttcagcatcggccccctgatgcctgtgctggccggcacctaccgctgctacggctctgtgccccacagcccctaccagctgagcgcccccagcgaccccctggacatcgtcatcaccggcctgtatgagaagcccagcctgagcgcccagcccggccccaccgtgcaggccggggagaatgtgaccctgagctgcagctcctggagcagctatgacatctaccacctgagccgggagggggaggcccacgagcggcggctgcgggctgtgcccaaggtgaacagaaccttccaggccgacttccccctgggccctgccacccatggaggcacctaccgctgcttcggcagcttccgggccctgccctgtgtgtggagcaacagcagtgaccccctgctggtgtctgtgacaggcaaccccagcagctcctggcccagccccacagagcccagcagcaagagcggcatctgccgccacctgcacgtgctgattggcacctctgtggtgatcttcctgttcatcctgctgctcttcttcctgctgtaccgctggtgcagcaacaagaagaatgctgctgtgatggaccaggagcctgctggggacagaacagtgaaccggcaggacagtgatgagcaggacccccaggaggtgacctacgcccagctggaccactgtgtgttcatccagaggaagatcagccggcccagccagaggcccaagacccccctgacagacacctctgtgtacacagagctgcccaatgctgagcccaggagcaaggtggtgtcctgcccccgggccccccagagcggcctggagggcgtcttctag

SEQ ID NO: 167488 - DNA, 1368 bp, Artificial Sequence
  derived and/or modified sequence
atgagcctgaccgtggtgagcatggcctgcgtgggcttcttcctgttgcagggggcctggcctctcatgggtggccaagataagccctttctcagcgcacgaccaagtaccgtagtcccaagaggagggcacgtcgcactccagtgccactaccggcgcgggtttaataactttatgctttacaaggaggaccgctctcatgtcccaatcttccacggacggatctttcaggaaagttttataatgggccccgtgaccccagcacatgccgggacctatagatgtcgagggtctcgtccccatagcctcaccggatggtccgctccaagcaaccccctggttattatggttactgggaaccatcgcaaaccgtcccttctggctcaccccggcccactactcaaatctggcgaaactgtgattctgcagtgctggtccgatgtgatgttcgagcatttcttcctccatagagaaggcatctcagaggacccgagtcgtcttgtaggccagatacacgacggtgtttctaaggcgaacttttctattgggccgctgatgcctgtactggcaggcacatatagatgttacggctccgtccctcatagcccatatcagctgagcgcaccatcagacccgctggatatcgtgatcactggactgtatgagaagccttcgctgagtgcacagcccggtcctaccgtccaggctggagagaatgtaacgctcagttgtagttcctggagttcctatgacatctatcatttatcaagagaaggggaagctcatgagcgacgcttgcgcgcggtgccaaaggtgaatcggacttttcaagctgatttccctcttgggcctgcaactcacgggggtacatatcgatgttttggtagctttagggccctgccctgtgtttggagcaactcctcagatcctctgctggtatcagtgactggcaacccgtccagctcttggccaagtcccacagagccctcctcaaaaagtggaatctgtcgtcatctgcacgtgctgatcggcacaagcgtcgttatttttctcttcatactgttactgtttttcctgctgtaccggtggtgctccaacaagaaaaacgcagccgtgatggaccaggagcctgcaggcgaccggaccgtaaaccggcaggacagcgatgagcaggacccacaagaggtaacctatgctcagttagatcattgcgttttcatccaacgcaaaatctcgcggccctctcagcgtccaaagacccccctgaccgatacctccgtatacacagaattgccaaatgctgagccacgctccaaggtagtcagctgccccagagctccacagtctggcctcgagggtgtcttctag

SEQ ID NO: 167489 - DNA, 1368 bp, Artificial Sequence
  derived and/or modified sequence
atgtccctcacagttgtgagcatggcctgtgtgggcttctttctcttacaaggagcctggccacttatgggcggacaggataagccgtttttatccgcccgaccatccacagtggtgcctcggggtgggcacgttgcgctacagtgtcactacagacgcggttttaacaactttatgctctacaaagaggacagatcccatgtgcccatcttccatgggcgaatttttcaggaaagtttcattatgggccctgtgacccctgcccatgccggtacctatcggtgcagaggctccaggcctcacagcctgaccgggtggtcagccccttctaaccccttggtaattatggtgactggcaaccataggaagcctagcttgctcgcacacccgggaccgcttttaaaatctggagagacggttatcttacagtgctggtccgatgtaatgttcgagcatttttttctccatcgcgaaggcatctcagaggatccctcccgactcgtcgggcagatccacgatggagtgagcaaagccaatttctctatcggacccttgatgcccgtgctcgcaggaacgtaccgttgttatggcagcgtacctcacagcccatatcagttatcagccccaagtgatccgctcgacattgtcattactggactctacgagaagcccagtttgagtgcccaaccaggacctactgtgcaggccggagaaaacgtgactttgagctgcagtagctggtcctcatatgatatctatcatctgagccgggaaggggaggcccacgaaaggcggttacgcgctgtgcctaaggtgaatcgaactttccaggcagactttcccctggggccagcaacacacggcggaacctatcgatgcttcggctcttttcgggcattgccatgcgtgtggtccaatagctcggacccactgttagtgtcagttactggcaatccttcctcttcttggccctcgccgaccgaaccctcctctaaatctgggatttgccggcatctccacgtcctgatcggcacatccgtggtgatcttcctattcatcctacttctattcttcttattataccgttggtgttctaataaaaagaacgctgcagttatggatcaggagcccgctggggaccggacagtgaaccggcaggactccgatgagcaggaccctcaggaggtgacctatgcccaactagatcactgcgttttcatccagcggaagatttcaagaccgtcacaaaggccgaagactcctctgacagatacgtctgtttacaccgagctccccaacgcggaacccaggtccaaggtggttagttgtcctagggctccccagagcggcctcgaaggagtcttttag

SEQ ID NO: 167490 - DNA, 1368 bp, Artificial Sequence
  derived and/or modified sequence
atgagcctgaccgtggtgagcatggcctgcgtgggcttcttcctgctgcagggcgcctggcccctgatgggcggccaggacaagcccttcctgagcgccagacccagcaccgtggtgcccagaggcggccacgtggccctgcagtgccactacagaagaggcttcaacaacttcatgctgtacaaggaggacagaagccacgtgcccatcttccacggcagaatcttccaggagagcttcatcatgggccccgtgacccccgcccacgccggcacctacagatgcagaggcagcagaccccacagcctgaccggctggagcgcccccagcaaccccctggtgatcatggtgaccggcaaccacagaaagcccagcctgctggcccaccccggccccctgctgaagagcggcgagaccgtgatcctgcagtgctggagcgacgtgatgttcgagcacttcttcctgcacagagagggcatcagcgaggaccccagcagactggtgggccagatccacgacggcgtgagcaaggccaacttcagcatcggccccctgatgcccgtgctggccggcacctacagatgctacggcagcgtgccccacagcccctaccagctgagcgcccccagcgaccccctggacatcgtgatcaccggcctgtacgagaagcccagcctgagcgcccagcccggccccaccgtgcaggccggcgagaacgtgaccctgagctgcagcagctggagcagctacgacatctaccacctgagcagagagggcgaggcccacgagagaagactgagagccgtgcccaaggtgaacagaaccttccaggccgacttccccctgggccccgccacccacggcggcacctacagatgcttcggcagcttcagagccctgccctgcgtgtggagcaacagcagcgaccccctgctggtgagcgtgaccggcaaccccagcagcagctggcccagccccaccgagcccagcagcaagagcggcatctgcagacacctgcacgtgctgatcggcaccagcgtggtgatcttcctgttcatcctgctgctgttcttcctgctgtacagatggtgcagcaacaagaagaacgccgccgtgatggaccaggagcccgccggcgacagaaccgtgaacagacaggacagcgacgagcaggacccccaggaggtgacctacgcccagctggaccactgcgtgttcatccagagaaagatcagcagacccagccagagacccaagacccccctgaccgacaccagcgtgtacaccgagctgcccaacgccgagcccagaagcaaggtggtgagctgccccagagccccccagagcggcctggagggcgtgttctag

SEQ ID NO: 167491 - DNA, 1885 bp, Artificial Sequence
  derived and/or modified sequence
ggggcgcggcctcctgtctgcaccggcagcaccatgtcgctcacggtcgtcagcatggcgtgcgttgggttcttcttgctgcagggggcctggccactcatgggtggtcaggacaaacccttcctgtctgcccggcccagcactgtggtgcctcgaggaggacacgtggctcttcagtgtcactatcgtcgtgggtttaacaatttcatgctgtacaaagaagacagaagccacgttcccatcttccacggcagaatattccaggagagcttcatcatgggccctgtgaccccagcacatgcagggacctacagatgtcggggttcacgcccacactccctcactgggtggtcggcacccagcaaccccctggtgatcatggtcacaggaaaccacagaaaaccttccctcctggcccacccagggcccctgctgaaatcaggagagacagtcatcctgcaatgttggtcagatgtcatgtttgagcacttctttctgcacagagaggggatctctgaggacccctcacgcctcgttggacagatccatgatggggtctccaaggccaacttctccatcggtcccttgatgcctgtccttgcaggaacctacagatgttatggttctgttcctcactccccctatcagttgtcagctcccagtgaccccctggacatcgtgatcacaggtctatatgagaaaccttctctctcagcccagccgggccccacggttcaggcaggagagaacgtgaccttgtcctgtagctcctggagctcctatgacatctaccatctgtccagggaaggggaggcccatgaacgtaggctccgtgcagtgcccaaggtcaacagaacattccaggcagactttcctctgggccctgccacccacggagggacctacagatgcttcggctctttccgtgccctgccctgcgtgtggtcaaactcaagtgacccactgcttgtttctgtcacaggaaacccttcaagtagttggccttcacccacagaaccaagctccaaatctggtatctgcagacacctgcatgttctgattgggacctcagtggtcatcttcctcttcatcctcctcctcttctttctcctttatcgctggtgctccaacaaaaagaatgctgctgtaatggaccaagagcctgcgggggacagaacagtgaataggcaggactctgatgaacaagaccctcaggaggtgacgtacgcacagttggatcactgcgttttcatacagagaaaaatcagtcgcccttctcagaggcccaagacacccctaacagataccagcgtgtacacggaacttccaaatgctgagcccagatccaaagttgtctcctgcccacgagcaccacagtcaggtcttgagggggttttctagggagacaacagccctgtctcaaaaccaggttgccagatccaatgaaccagcagctggaatctgaaggcatcagtctgcatcttaggggatcgctcttcctcacaccacgaatctgaacatgcctctctcttgcttacaaatgcctaaggtcgccactgcctgctgcagagaaaacacactcctttgcttagcccacaagtatctatttcacttgacccctgcccacctctccaacctaactggcttacttcctagtcctacttgaggctgcaatcacactgaggaactcacaattccaaacatacaagaggctccctcttaacacggcacttacacacttgctgttccaccttccctcatgctgttccacctcccctcagactatctttcagccttctgtcatcagtaaaatttataaattttttttataacttcagtgtagctctctcctcttcaaataaacatgtctgccctcatggtttcg

SEQ ID NO: 167492 - protein, 2817 aa, Artificial Sequence
  derived and/or modified sequence
MKLNPQQAPLYGDCVVTVLLAEEDKAEDDVVFYLVFLGSTLRHCTSTRKVSSDTLETIAPGHDCCETVKVQLCASKEGLPVFVVAEEDFHFVQDEAYDAAQFLATSAGNQQALNFTRFLDQSGPPSGDVNSLDKKLVLAFRHLKLPTEWNVLGTDQSLHDAGPRETLMHFAVRLGLLRLTWFLLQKPGGRGALSIHNQEGATPVSLALERGYHKLHQLLTEENAGEPDSWSSLSYEIPYGDCSVRHHRELDIYTLTSESDSHHEHPFPGDGCTGPIFKLMNIQQQLMKTNLKQMDSLMPLMMTAQDPSSAPETDGQFLPCAPEPTDPQRLSSSEETESTQCCPGSPVAQTESPCDLSSIVEEENTDRSCRKKNKGVERKGEEVEPAPIVDSGTVSDQDSCLQSLPDCGVKGTEGLSSCGNRNEETGTKSSGMPTDQESLSSGDAVLQRDLVMEPGTAQYSSGGELGGISTTNVSTPDTAGEMEHGLMNPDATVWKNVLQGGESTKERFENSNIGTAGASDVHVTSKPVDKISVPNCAPAASSLDGNKPAESSLAFSNEETSTEKTAETETSRSREESADAPVDQNSVVIPAAAKDKISDGLEPYTLLAAGIGEAMSPSDLALLGLEEDVMPHQNSETNSSHAQSQKGKSSPICSTTGDDKLCADSACQQNTVTSSGDLVAKLCDNIVSESESTTARQPSSQDPPDASHCEDPQAHTVTSDPVRDTQERADFCPFKVVDNKGQRKDVKLDKPLTNMLEVVSHPHPVVPKMEKELVPDQAVISDSTFSLANSPGSESVTKDDALSFVPSQKEKGTATPELHTATDYRDGPDGNSNEPDTRPLEDRAVGLSTSSTAAELQHGMGNTSLTGLGGEHEGPAPPAIPEALNIKGNTDSSLQSVGKATLALDSVLTEEGKLLVVSESSAAQEQDKDKAVTCSSIKENALSSGTLQEEQRTPPPGQDTQQFHEKSISADCAKDKALQLSNSPGASSAFLKAETEHNKEVAPQVSLLTQGGAAQSLVPPGASLATESRQEALGAEHNSSALLPCLLPDGSDGSDALNCSQPSPLDVGVKNTQSQGKTSACEVSGDVTVDVTGVNALQGMAEPRRENISHNTQDILIPNVLLSQEKNAVLGLPVALQDKAVTDPQGVGTPEMIPLDWEKGKLEGADHSCTMGDAEEAQIDDEAHPVLLQPVAKELPTDMELSAHDDGAPAGVREVMRAPPSGRERSTPSLPCMVSAQDAPLPKGADLIEEAASRIVDAVIEQVKAAGALLTEGEACHMSLSSPELGPLTKGLESAFTEKVSTFPPGESLPMGSTPEEATGSLAGCFAGREEPEKIILPVQGPEPAAEMPDVKAEDEVDFRASSISEEVAVGSIAATLKMKQGPMTQAINRENWCTIEPCPDAASLLASKQSPECENFLDVGLGRECTSKQGVLKRESGSDSDLFHSPSDDMDSIIFPKPEEEHLACDITGSSSSTDDTASLDRHSSHGSDVSLSQILKPNRSRDRQSLDGFYSHGMGAEGRESESEPADPGDVEEEEMDSITEVPANCSVLRSSMRSLSPFRRHSWGPGKNAASDAEMNHRSMSWCPSGVQYSAGLSADFNYRSFSLEGLTGGAGVGNKPSSSLEVSSANAEELRHPFSGEERVDSLVSLSEEDLESDQREHRMFDQQICHRSKQQGFNYCTSAISSPLTKSISLMTISHPGLDNSRPFHSTFHNTSANLTESITEENYNFLPHSPSKKDSEWKSGTKVSRTFSYIKNKMSSSKKSKEKEKEKDKIKEKEKDSKDKEKDKKTVNGHTFSSIPVVGPISCSQCMKPFTNKDAYTCANCSAFVHKGCRESLASCAKVKMKQPKGSLQAHDTSSLPTVIMRNKPSQPKERPRSAVLLVDETATTPIFANRRSQQSVSLSKSVSIQNITGVGNDENMSNTWKFLSHSTDSLNKISKVNESTESLTDEGVGTDMNEGQLLGDFEIESKQLEAESWSRIIDSKFLKQQKKDVVKRQEVIYELMQTEFHHVRTLKIMSGVYSQGMMADLLFEQQMVEKLFPCLDELISIHSQFFQRILERKKESLVDKSEKNFLIKRIGDVLVNQFSGENAERLKKTYGKFCGQHNQSVNYFKDLYAKDKRFQAFVKKKMSSSVVRRLGIPECILLVTQRITKYPVLFQRILQCTKDNEVEQEDLAQSLSLVKDVIGAVDSKVASYEKKVRLNEIYTKTDSKSIMRMKSGQMFAKEDLKRKKLVRDGSVFLKNAAGRLKEVQAVLLTDILVFLQEKDQKYIFASLDQKSTVISLKKLIVREVAHEEKGLFLISMGMTDPEMVEVHASSKEERNSWIQIIQDTINTLNRDEDEGIPSENEEEKKMLDTRARELKEQLHQKDQKILLLLEEKEMIFRDMAECSTPLPEDCSPTHSPRVLFRSNTEEALKGGPLMKSAINEVEILQGLVSGNLGGTLGPTVSSPIEQDVVGPVSLPRRAETFGGFDSHQMNASKGGEKEEGDDGQDLRRTESDSGLKKGGNANLVFMLKRNSEQVVQSVVHLYELLSALQGVVLQQDSYIEDQKLVLSERALTRSLSRPSSLIEQEKQRSLEKQRQDLANLQKQQAQYLEEKRRREREWEARERELREREALLAQREEEVQQGQQDLEKEREELQQKKGTYQYDLERLRAAQKQLEREQEQLRREAERLSQRQTERDLCQVSHPHTKLMRIPSFFPSPEEPPSPSAPSIAKSGSLDSELSVSPKRNSISRTHKDKGPFHILSSTSQTNKGPEGQSQAPASTSASTRLFGLTKPKEKKEKKKKNKTSRSQPGDGPASEVSAEGEEIFC

SEQ ID NO: 167493 - protein, 1058 aa, Artificial Sequence
  derived and/or modified sequence
MSSSKKSKEKEKEKDKIKEKEKDSKDKEKDKKTVNGHTFSSIPVVGPISCSQCMKPFTNKDAYTCANCSAFVHKGCRESLASCAKVKMKQPKGSLQAHDTSSLPTVIMRNKPSQPKERPRSAVLLVDETATTPIFANRRSQQSVSLSKSVSIQNITGVGNDENMSNTWKFLSHSTDSLNKISKVNESTESLTDEGVGTDMNEGQLLGDFEIESKQLEAESWSRIIDSKFLKQQKKDVVKRQEVIYELMQTEFHHVRTLKIMSGVYSQGMMADLLFEQQMVEKLFPCLDELISIHSQFFQRILERKKESLVDKSEKNFLIKRIGDVLVNQFSGENAERLKKTYGKFCGQHNQSVNYFKDLYAKDKRFQAFVKKKMSSSVVRRLGIPECILLVTQRITKYPVLFQRILQCTKDNEVEQEDLAQSLSLVKDVIGAVDSKVASYEKKVRLNEIYTKTDSKSIMRMKSGQMFAKEDLKRKKLVRDGSVFLKNAAGRLKEVQAVLLTDILVFLQEKDQKYIFASLDQKSTVISLKKLIVREVAHEEKGLFLISMGMTDPEMVEVHASSKEERNSWIQIIQDTINTLNRDEDEGIPSENEEEKKMLDTRARELKEQLHQKDQKILLLLEEKEMIFRDMAECSTPLPEDCSPTHSPRVLFRSNTEEALKGGPLMKSAINEVEILQGLVSGNLGGTLGPTVSSPIEQDVVGPVSLPRRAETFGGFDSHQMNASKGGEKEEGDDGQDLRRTESDSGLKKGGNANLVFMLKRNSEQVVQSVVHLYELLSALQGVVLQQDSYIEDQKLVLSERALTRSLSRPSSLIEQEKQRSLEKQRQDLANLQKQQAQYLEEKRRREREWEARERELREREALLAQREEEVQQGQQDLEKEREELQQKKGTYQYDLERLRAAQKQLEREQEQLRREAERLSQRQTERDLCQVSHPHTKLMRIPSFFPSPEEPPSPSAPSIAKSGSLDSELSVSPKRNSISRTHKDKGPFHILSSTSQTNKGPEGQSQAPASTSASTRLFGLTKPKEKKEKKKKNKTSRSQPGDGPASEVSAEGEEIFC

SEQ ID NO: 167494 - protein, 2816 aa, Artificial Sequence
  derived and/or modified sequence
KLLEKQPPIEGDCVVTVLLAEEDKAEDDVVFYLVFLGSTLRHCTSTRKVSSDTLETIAPGHDCCETVKVQLCASKEGLPVFVVAEEDFHFVQDEAYDAAQFLATSAGNQQALNFTRFLDQSGPPSGDVNSLDKKLVLAFRHLKLPTEWNVLGTDQSLHDAGPRETLMHFAVRLGLLRLTWFLLQKPGGRGALSIHNQEGATPVSLALERGYHKLHQLLTEENAGEPDSWSSLSYEIPYGDCSVRHHRELDIYTLTSESDSHHEHPFPGDGCTGPIFKLMNIQQQLMKTNLKQMDSLMPLMMTAQDPSSAPETDGQFLPCAPEPTDPQRLSSSEETESTQCCPGSPVAQTESPCDLSSIVEEENTDRSCRKKNKGVERKGEEVEPAPIVDSGTVSDQDSCLQSLPDCGVKGTEGLSSCGNRNEETGTKSSGMPTDQESLSSGDAVLQRDLVMEPGTAQYSSGGELGGISTTNVSTPDTAGEMEHGLMNPDATVWKNVLQGGESTKERFENSNIGTAGASDVHVTSKPVDKISVPNCAPAASSLDGNKPAESSLAFSNEETSTEKTAETETSRSREESADAPVDQNSVVIPAAAKDKISDGLEPYTLLAAGIGEAMSPSDLALLGLEEDVMPHQNSETNSSHAQSQKGKSSPICSTTGDDKLCADSACQQNTVTSSGDLVAKLCDNIVSESESTTARQPSSQDPPDASHCEDPQAHTVTSDPVRDTQERADFCPFKVVDNKGQRKDVKLDKPLTNMLEVVSHPHPVVPKMEKELVPDQAVISDSTFSLANSPGSESVTKDDALSFVPSQKEKGTATPELHTATDYRDGPDGNSNEPDTRPLEDRAVGLSTSSTAAELQHGMGNTSLTGLGGEHEGPAPPAIPEALNIKGNTDSSLQSVGKATLALDSVLTEEGKLLVVSESSAAQEQDKDKAVTCSSIKENALSSGTLQEEQRTPPPGQDTQQFHEKSISADCAKDKALQLSNSPGASSAFLKAETEHNKEVAPQVSLLTQGGAAQSLVPPGASLATESRQEALGAEHNSSALLPCLLPDGSDGSDALNCSQPSPLDVGVKNTQSQGKTSACEVSGDVTVDVTGVNALQGMAEPRRENISHNTQDILIPNVLLSQEKNAVLGLPVALQDKAVTDPQGVGTPEMIPLDWEKGKLEGADHSCTMGDAEEAQIDDEAHPVLLQPVAKELPTDMELSAHDDGAPAGVREVMRAPPSGRERSTPSLPCMVSAQDAPLPKGADLIEEAASRIVDAVIEQVKAAGALLTEGEACHMSLSSPELGPLTKGLESAFTEKVSTFPPGESLPMGSTPEEATGSLAGCFAGREEPEKIILPVQGPEPAAEMPDVKAEDEVDFRASSISEEVAVGSIAATLKMKQGPMTQAINRENWCTIEPCPDAASLLASKQSPECENFLDVGLGRECTSKQGVLKRESGSDSDLFHSPSDDMDSIIFPKPEEEHLACDITGSSSSTDDTASLDRHSSHGSDVSLSQILKPNRSRDRQSLDGFYSHGMGAEGRESESEPADPGDVEEEEMDSITEVPANCSVLRSSMRSLSPFRRHSWGPGKNAASDAEMNHRSMSWCPSGVQYSAGLSADFNYRSFSLEGLTGGAGVGNKPSSSLEVSSANAEELRHPFSGEERVDSLVSLSEEDLESDQREHRMFDQQICHRSKQQGFNYCTSAISSPLTKSISLMTISHPGLDNSRPFHSTFHNTSANLTESITEENYNFLPHSPSKKDSEWKSGTKVSRTFSYIKNKMSSSKKSKEKEKEKDKIKEKEKDSKDKEKDKKTVNGHTFSSIPVVGPISCSQCMKPFTNKDAYTCANCSAFVHKGCRESLASCAKVKMKQPKGSLQAHDTSSLPTVIMRNKPSQPKERPRSAVLLVDETATTPIFANRRSQQSVSLSKSVSIQNITGVGNDENMSNTWKFLSHSTDSLNKISKVNESTESLTDEGVGTDMNEGQLLGDFEIESKQLEAESWSRIIDSKFLKQQKKDVVKRQEVIYELMQTEFHHVRTLKIMSGVYSQGMMADLLFEQQMVEKLFPCLDELISIHSQFFQRILERKKESLVDKSEKNFLIKRIGDVLVNQFSGENAERLKKTYGKFCGQHNQSVNYFKDLYAKDKRFQAFVKKKMSSSVVRRLGIPECILLVTQRITKYPVLFQRILQCTKDNEVEQEDLAQSLSLVKDVIGAVDSKVASYEKKVRLNEIYTKTDSKSIMRMKSGQMFAKEDLKRKKLVRDGSVFLKNAAGRLKEVQAVLLTDILVFLQEKDQKYIFASLDQKSTVISLKKLIVREVAHEEKGLFLISMGMTDPEMVEVHASSKEERNSWIQIIQDTINTLNRDEDEGIPSENEEEKKMLDTRARELKEQLHQKDQKILLLLEEKEMIFRDMAECSTPLPEDCSPTHSPRVLFRSNTEEALKGGPLMKSAINEVEILQGLVSGNLGGTLGPTVSSPIEQDVVGPVSLPRRAETFGGFDSHQMNASKGGEKEEGDDGQDLRRTESDSGLKKGGNANLVFMLKRNSEQVVQSVVHLYELLSALQGVVLQQDSYIEDQKLVLSERALTRSLSRPSSLIEQEKQRSLEKQRQDLANLQKQQAQYLEEKRRREREWEARERELREREALLAQREEEVQQGQQDLEKEREELQQKKGTYQYDLERLRAAQKQLEREQEQLRREAERLSQRQTERDLCQVSHPHTKLMRIPSFFPSPEEPPSPSAPSIAKSGSLDSELSVSPKRNSISRTHKDKGPFHILSSTSQTNKGPEGQSQAPASTSASTRLFGLTKPKEKKEKKKKNKTSRSQPGDGPASEVSAEGEEIFC

SEQ ID NO: 167495 - protein, 414 aa, Artificial Sequence
  derived and/or modified sequence
MSNTWKFLSHSTDSLNKISKVNESTESLTDEGTDMNEGQLLGDFEIESKQLEAESWSRIIDSKFLKQQKKDVVKRQEVIYELMQTEFHHVRTLKIMSGVYSQGMMADLLFEQQMVEKLFPCLDELISIHSQFFQRILERKKESLVDKSEKNFLIKRIGDVLVNQFSGENAERLKKTYGKFCGQHNQSVNYFKDLYAKDKRFQAFVKKKMSSSVVRRLGIPECILLVTQRITKYPVLFQRILQCTKDNEVEQEDLAQSLSLVKDVIGAVDSKVASYEKKVRLNEIYTKTDSKSIMRMKSGQMFAKEDLKRKKLVRDGSVFLKNAAGRLKEVQAVLLTDILVFLQEKDQKYIFASLDQKSTVISLKKLIVREVAHEEKGLFLISMGMTDPEMVEVHASSKEERNSWIQIIQDTINT

SEQ ID NO: 167496 - protein, 2792 aa, Artificial Sequence
  derived and/or modified sequence
KLLEKQPPIEGDCVVTVLLAEEDKAEDDVVFYLVFLGSTLRHCTSTRKVSSDTLETIAPGHDCCETVKVQLCASKEGLPVFVVAEEDFHFVQDEAYDAAQFLATSAGNQQALNFTRFLDQSGPPSGDVNSLDKKLVLAFRHLKLPTEWNVLGTDQSLHDAGPRETLMHFAVRLGLLRLTWFLLQKPGGRGALSIHNQEGATPVSLALERGYHKLHQLLTEENAGEPDSWSSLSYEIPYGDCSVRHHRELDIYTLTSESDSHHEHPFPGDGCTGPIFKLMNIQQQLMKTNLKQMDSLMPLMMTAQDPSSAPETDGQFLPCAPEPTDPQRLSSSEETESTQCCPGSPVAQTESPCDLSSIVEEENTDRSCRKKNKGVERKGEEVEPAPIVDSGTVSDQDSCLQSLPDCGVKGTEGLSSCGNRNEETGTKSSGMPTDQESLSSGDAVLQRDLVMEPGTAQYSSGGELGGISTTNVSTPDTAGEMEHGLMNPDATVWKNVLQGGESTKERFENSNIGTAGASDVHVTSKPVDKISVPNCAPAASSLDGNKPAESSLAFSNEETSTEKTAETETSRSREESADAPVDQNSVVIPAAAKDKISDGLEPYTLLAAGIGEAMSPSDLALLGLEEDVMPHQNSETNSSHAQSQKGKSSPICSTTGDDKLCADSACQQNTVTSSGDLVAKLCDNIVSESESTTARQPSSQDPPDASHCEDPQAHTVTSDPVRDTQERADFCPFKVVDNKGQRKDVKLDKPLTNMLEVVSHPHPVVPKMEKELVPDQAVISDSTFSLANSPGSESVTKDDALSFVPSQKEKGTATPELHTATDYRDGPDGNSNEPDTRPLEDRAVGLSTSSTAAELQHGMGNTSLTGLGGEHEGPAPPAIPEALNIKGNTDSSLQSVGKATLALDSVLTEEGKLLVVSESSAAQEQDKDKAVTCSSIKENALSSGTLQEEQRTPPPGQDTQQFHEKSISADCAKDKALQLSNSPGASSAFLKAETEHNKEVAPQVSLLTQGGAAQSLVPPGASLATESRQEALGAEHNSSALLPCLLPDGSDGSDALNCSQPSPLDVGVKNTQSQGKTSACEVSGDVTVDVTGVNALQGMAEPRRENISHNTQDILIPNVLLSQEKNAVLGLPVALQDKAVTDPQGVGTPEMIPLDWEKGKLEGADHSCTMGDAEEAQIDDEAHPVLLQPVAKELPTDMELSAHDDGAPAGVREVMRAPPSGRERSTPSLPCMVSAQDAPLPKGADLIEEAASRIVDAVIEQVKAAGALLTEGEACHMSLSSPELGPLTKGLESAFTEKVSTFPPGESLPMGSTPEEATGSLAGCFAGREEPEKIILPVQGPEPAAEMPDVKAEDEVDFRASSISEEVAVGSIAATLKMKQGPMTQAINRENWCTIEPCPDAASLLASKQSPECENFLDVGLGRECTSKQGVLKRESGSDSDLFHSPSDDMDSIIFPKPEEEHLACDITGSSSSTDDTASLDRHSSHGSDVSLSQILKPNRSRDRQSLDGFYSHGMGAEGRESESEPADPGDVEEEEMDSITEVPANCSVLRSSMRSLSPFRRHSWGPGKNAASDAEMNHRSFSLEGLTGGAGVGNKPSSSLEVSSANAEELRHPFSGEERVDSLVSLSEEDLESDQREHRMFDQQICHRSKQQGFNYCTSAISSPLTKSISLMTISHPGLDNSRPFHSTFHNTSANLTESITEENYNFLPHSPSKKDSEWKSGTKVSRTFSYIKNKMSSSKKSKEKEKEKDKIKEKEKDSKDKEKDKKTVNGHTFSSIPVVGPISCSQCMKPFTNKDAYTCANCSAFVHKGCRESLASCAKVKMKQPKGSLQAHDTSSLPTVIMRNKPSQPKERPRSAVLLVDETATTPIFANRRSQQSVSLSKSVSIQNITGVGNDENMSNTWKFLSHSTDSLNKISKVNESTESLTDEGTDMNEGQLLGDFEIESKQLEAESWSRIIDSKFLKQQKKDVVKRQEVIYELMQTEFHHVRTLKIMSGVYSQGMMADLLFEQQMVEKLFPCLDELISIHSQFFQRILERKKESLVDKSEKNFLIKRIGDVLVNQFSGENAERLKKTYGKFCGQHNQSVNYFKDLYAKDKRFQAFVKKKMSSSVVRRLGIPECILLVTQRITKYPVLFQRILQCTKDNEVEQEDLAQSLSLVKDVIGAVDSKVASYEKKVRLNEIYTKTDSKSIMRMKSGQMFAKEDLKRKKLVRDGSVFLKNAAGRLKEVQAVLLTDILVFLQEKDQKYIFASLDQKSTVISLKKLIVREVAHEEKGLFLISMGMTDPEMVEVHASSKEERNSWIQIIQDTINTLNRDEDEGIPSENEEEKKMLDTRARELKEQLHQKDQKILLLLEEKEMIFRDMAECSTPLPEDCSPTHSPRVLFRSNTEEALKGGPLMKSAINEVEILQGLVSGNLGGTLGPTVSSPIEQDVVGPVSLPRRAETFGGFDSHQMNASKGGEKEEGDDGQDLRRTESDSGLKKGGNANLVFMLKRNSEQVVQSVVHLYELLSALQGVVLQQDSYIEDQKLVLSERALTRSLSRPSSLIEQEKQRSLEKQRQDLANLQKQQAQYLEEKRRREREWEARERELREREALLAQREEEVQQGQQDLEKEREELQQKKGTYQYDLERLRAAQKQLEREQEQLRREAERLSQRQTERDLCQVSHPHTKLMRIPSFFPSPEEPPSPSAPSIAKSGSLDSELSVSPKRNSISRTHKDKGPFHILSSTSQTNKGPEGQSQAPASTSASTRLFGLTKPKEKKEKKKKNKTSRSQPGDGPASEVSAEGEEIFC

SEQ ID NO: 167497 - protein, 275 aa, Artificial Sequence
  derived and/or modified sequence
PSDDMDSIIFPKPEEEHLACDITGSSSSTDDTASLDRHSSHGSDVSLSQILKPNRSRDRQSLDGFYSHGMGAEGRESESEPADPGDVEEEEMDSITEVPANCSVLRSSMRSLSPFRRHSWGPGKNAASDAEMNHRSSMRVLGDVVRRPPIHRRSMSWCPSGVQYSAGLSADFNYRSFSLEGLTGGAGVGNKPSSSLEVSSANAEELRHPFSGEERVDSLVSLSEEDLESDQREHRMFDQQICHRSKQQGFNYCTSAISSPLTKSISLMTISHPGL

SEQ ID NO: 167498 - DNA, 8454 bp, Artificial Sequence
  derived and/or modified sequence
atgaaacttaaccctcagcaagccccactttatggcgattgtgtagtaacggtgctgctggccgaagaggacaaagctgaggatgacgtggtcttctatcttgtcttcctaggttcaaccctaagacattgcacatccactagaaaagtttctagtgataccctcgagacaattgctcctggccatgactgttgcgaaactgttaaggttcaactgtgcgctagtaaggagggcttgccagtttttgtggtggcggaagaagattttcatttcgtgcaggatgaagcctacgacgctgctcaattccttgccacttcagcaggcaatcagcaagcgctcaacttcactcgcttccttgaccagagcggacctccgtccggtgatgtgaacagcctggataagaaactggttctggcctttagacatttgaaacttcccaccgagtggaacgtgctggggacagaccagagtttgcacgatgccgggccacgggagaccctcatgcacttcgcagtgcggttaggcctgctaaggcttacttggtttttactccagaagcccggaggacgcggggctctgtcaatccataaccaggaaggggcaactcccgttagtcttgcgttggagcgcggctaccataaactccatcagctattgacagaagaaaatgctggggagcccgattcatggagcagtctgtcgtacgaaattccatacggagactgttctgttcgccatcaccgggaattggacatctacacacttacttcggaatctgattcacaccatgagcacccctttcccggggacggctgtactggccctatttttaaactgatgaacatccagcagcagttgatgaaaaccaatctgaagcagatggattcgctcatgcctctcatgatgacagcccaagatccgtccagtgcgcccgaaactgatggccagtttctcccttgcgcccctgagccgacggaccctcagcggctatcatcgtccgaggagacagagtctacacagtgctgtcccggctcaccagttgcccagacggaatctccttgcgacctctcttcaatagtagaggaggagaacactgaccggagctgccggaaaaaaaataagggtgtcgaacggaaaggcgaagaggtcgagcctgcacctatcgtggacagtgggactgtttctgaccaggactcttgcttacagtcccttcctgattgtggggtaaagggcacggagggactatcgagctgcgggaacagaaacgaggaaactggtaccaagtcttctggcatgcctaccgaccaagagagtctgagctctggcgacgcagttcttcagcgagacctggtgatggagccggggactgcacagtactcctcagggggcgagttagggggtatctcgaccacgaacgtttctacacccgatacagcgggcgaaatggagcatggccttatgaatcccgacgccactgtttggaaaaatgtgctacagggcggggagtccacaaaggaaagatttgagaattcgaacatcggaacagcaggagcttcagatgtgcacgtcacctccaaacccgtcgacaaaattagtgtgcccaactgtgctcccgcggcatcttcgctggatggcaacaagcccgctgagtcgtcattagcgttctcaaatgaagaaaccagtaccgaaaagacagccgaaaccgagacatctcgtagccgggaggagtctgccgacgcccccgtggaccaaaattccgttgtgattcccgccgccgcaaaagacaaaatctccgatggcctggaaccatatacactgctggcagctggaatcggagaagccatgtctccatccgacctcgcccttctggggctggaggaagatgtcatgccccaccagaatagcgaaacgaactctagccacgcccagagccagaagggcaaatccagcccaatctgcagcaccactggtgatgacaaactatgcgcagacagcgcctgccagcagaatactgtgaccagttcaggcgacctggtcgcaaaactttgtgacaacatcgtctctgaaagtgaaagcactaccgctaggcaaccttcctcacaggaccctcctgacgcctctcattgtgaggacccgcaggcccacaccgtcaccagcgatccagtcagagatacacaagagagagctgatttttgccctttcaaagtggtggataataaaggccagcggaaggacgtgaagcttgacaaacccctgacaaacatgcttgaagtagtctcccatcctcatccagtggtccccaagatggagaaagagctggttccagaccaagcagtgatctcagatagcacattttctttagccaatagtcccggttccgagagcgtgactaaagatgacgcgctcagtttcgtcccctcacaaaaagagaaaggcacagctactccagagctccacacggccacagactacagagacggccctgacggcaacagcaacgagccagatacacggcctcttgaagatcgagctgtcggactgtccacaagcagcacagccgccgagcttcagcacggaatggggaacacatcccttacaggcttgggcggagagcacgagggccccgctccgccagccatacctgaggccctgaatattaaaggcaacaccgatagcagcctgcaaagcgtgggaaaggctacgctcgcgcttgacagcgtgctgacagaggaaggcaaactgctggtcgtatcggagagctcagctgctcaagagcaggataaagacaaggccgtaacgtgctcatctattaaagaaaatgctctcagtagcggcaccctccaggaagagcagcggacaccccctcctgggcaggatacgcagcaattccatgagaagagcatctctgccgattgtgccaaggacaaggctctgcagctgagtaactcacctggggctagttctgcttttctcaaagctgagaccgagcataacaaagaggtggcccctcaggtgtccttattaacccagggaggcgctgcccaaagtttggtgccccccggggcaagcctggcaactgaatcacggcaggaagcccttggggctgagcataacagttctgccctgttgccgtgcctcctgcctgacgggagtgatggtagtgacgccctgaactgttcacaaccctcgcctctggatgtgggagttaagaacacccaaagtcagggcaagacgtccgcatgcgaggtttctggcgacgtcaccgttgatgtcacgggcgttaatgctctgcagggtatggcagaacccagacgggagaacatttcccacaacacccaggacattcttataccgaatgttctgctgtcccaggaaaaaaacgcggtcctgggcttaccggtggcgctgcaggataaagccgtcaccgatccacagggagtgggaacccctgagatgatccctctggattgggagaaaggaaaacttgagggagctgaccactcatgtacaatgggagatgccgaggaagcgcagatagacgatgaagctcaccccgtgctacttcagccagtagcaaaggaactcccaaccgacatggagctgagtgcccacgatgatggggcccccgcgggggtgagggaagtgatgcgggcccctccctccggaagggaacgctccaccccatctctgccttgtatggtctccgcccaagacgcccctctgccaaagggcgcagatctgatcgaggaagcagcatccaggatcgtagacgctgtcatcgagcaggtcaaagccgccggcgccttgctaaccgagggcgaagcttgtcacatgtcattgagctcaccagaactgggccccctcactaaaggactggaatctgcgtttaccgaaaaagtcagcaccttcccacccggcgaaagcctcccaatgggatccactcctgaggaagcaacaggttccttggccggatgcttcgctggacgagaggagcctgagaagattatcctgcctgtgcaggggcccgagccagccgccgagatgccagacgtgaaagctgaagacgaggtcgactttagagccagctctatttctgaggaagtggctgtcggctccatagccgctacactaaaaatgaagcagggtcccatgactcaggccatcaatcgtgaaaactggtgtacaatcgaaccctgtccagacgctgcatcgctgctagcctctaagcaatccccagagtgcgagaattttctggatgtcgggctgggaagggaatgcacatctaagcaaggcgtcttaaaacgggagagcggcagtgacagcgacctgttccacagtccatctgatgacatggactctatcatcttcccaaagcccgaagaggaacaccttgcctgtgatattaccgggtcctcctcttcaaccgacgacactgcctcacttgatcgacactccagccacggatccgatgtctcactctcacagatcctgaaacccaacaggtcgcgggatcgccagagccttgatggtttctacagccacggaatgggtgcagaaggtcgggaatccgagagtgagccagctgacccaggcgacgtggaagaagaagaaatggattccataacagaagtccctgccaactgtagcgttttgagaagttcaatgcggtccctctctccttttagaaggcattcttggggacccggcaagaatgccgcttccgatgccgagatgaatcatcgatccatgagttggtgtccaagcggagtccagtacagtgctggactgtccgcagactttaactataggagtttctctctcgaaggcctgactgggggtgccggggtgggcaacaaacctagcagctcattagaagtttcctccgcgaacgccgaggagcttcgccaccctttcagtggcgaagaaagggtcgatagtctggtgtccctcagcgaagaagacctggagtccgatcagcgagaacatcggatgtttgatcaacaaatctgccacagatcaaaacagcaggggttcaactactgtacatctgctatctcttcaccattaaccaagtcgattagtctgatgacaatttctcacccaggcctggataacagccgacctttccactctaccttccataatactagcgcaaatctgaccgagtcaataaccgaggagaactacaactttctcccacactcgccatctaaaaaggattccgagtggaaatcaggcacaaaagtctctagaacattctcctatatcaagaataagatgtccagcagcaagaagtccaaagagaaggagaaggaaaaggataagattaaggaaaaagagaaagactccaaggacaaagagaaggacaaaaaaaccgtgaatggacacacttttagctctattcctgtcgtcggtcctatcagctgctctcagtgcatgaagcccttcaccaataaggacgcgtacacctgcgctaactgctctgccttcgtgcataaggggtgccgggaatccctggcttcttgcgcgaaggtgaaaatgaagcagccaaagggatccctgcaagcacacgatacgagctccctgcccacagtgattatgcggaacaagccttcccagccaaaagagaggccgagatccgccgtcctgcttgtggatgaaaccgctactacaccaatcttcgccaatagacgttctcagcagtcagtcagtctaagtaagtcagtttcaatacagaacatcacaggtgtcgggaacgatgagaatatgtctaacacttggaagttcctgtcccacagtacagactcactcaataagatcagcaaagtaaacgagagtacagagagcttaacagatgagggagtcgggaccgacatgaatgagggccagctccttggagattttgagatcgagtcaaaacaactagaggctgaatcgtggtctcggatcatagactccaagttcctgaaacagcaaaaaaaggatgtagtgaaaagacaggaagtcatctacgagctgatgcaaaccgaatttcatcacgttcgcaccctcaagattatgagtggagtgtatagccagggtatgatggccgatctgctgtttgaacagcagatggtggaaaaactctttccatgcctggatgagctcattagcatacattcccaattttttcagcggattctggagcgtaagaaagaaagcctggtggacaaatcagagaaaaatttcttgatcaagcgtattggcgatgtgctagtcaaccagttcagtggagaaaatgctgagcgcctgaagaaaacttacggaaagttctgcggacagcataaccaatcagtaaactacttcaaggacttgtacgccaaagataaacgctttcaggcttttgtgaagaagaagatgtcctcttccgtcgtgcggcggctggggattcctgagtgcatactcttagttacgcaaaggatcacaaaatatccagtgctgttccaacggattctgcaatgcaccaaggataacgaggtcgagcaagaggatttagcccagtctctttccctagtcaaggacgtgataggggccgttgatagcaaggttgctagttacgaaaagaaggtgaggctgaatgagatctatactaagaccgacagtaaatcgattatgaggatgaaatctgggcagatgttcgcaaaggaggatcttaagcgcaagaagctcgttcgcgacggttccgtctttttaaagaatgccgccggccgcctgaaggaggtccaggctgttctccttaccgacatcctggtgttcctccaggaaaaagatcaaaagtacatcttcgcctcccttgatcagaaatctacggttattagtctgaaaaaactaatcgtccgcgaagtggctcacgaggagaagggtctattcctgatttccatggggatgactgatccggagatggtggaggttcacgcgtcatccaaggaggagcgaaatagctggatccagatcatacaggacaccatcaacactctgaacagagacgaggacgaggggattccctctgagaatgaagaggaaaaaaaaatgctggatactagagcgcgggaactgaaggagcagctgcaccagaaagatcagaaaatcttgctccttcttgaagagaaggagatgattttcagggatatggcagaatgctcaaccccactacccgaagattgctctcctacccatagtccacgcgttctgttccggagcaataccgaagaggctcttaaaggtggccccttgatgaagagcgctatcaacgaggtggagattctgcaggggctcgtatcaggaaacctcggaggcaccttggggcccactgtgagttcgccaatcgagcaggatgtcgtgggccccgtttctctcccacggagggccgagacatttggcggttttgattcccatcagatgaacgcttctaaaggtggggagaaggaagagggagatgacgggcaagatctccggaggactgaaagcgactcgggactcaagaaagggggcaatgccaacctcgtgttcatgctgaagagaaacagcgaacaggtggtccagtccgtggtgcatctgtatgaattgctgagcgctctgcagggcgtggtgctgcaacaggactcttatattgaagatcagaaactggtcctctcggagagagcattgacaaggtctctgtccagaccctcctcgctgattgagcaggagaagcagaggtccctggaaaagcagagacaggatctcgccaacctgcagaaacagcaagcccagtacttagaagagaaacgcagaagagaacgagagtgggaggcacgcgagagagaactgcgggaaagggaggcactgctggcccagcgggaggaagaggtccagcagggccagcaagaccttgagaaggagcgcgaagaactccagcagaagaagggcacctaccagtatgatctcgaaagactcagagcagcccaaaagcagctggaaagggagcaggaacaactgaggagggaggcagaacgcctaagccagaggcaaactgagagggatctgtgccaagtctctcacccccataccaaactcatgcgcattccctcatttttccccagccccgaagagccaccgagtccctcggcacctagtatcgctaaatccgggagcctagactctgagttgtctgtgagtccaaagaggaacagcatctctcggacgcacaaggataaaggaccttttcacatcctgtcttctacatctcaaactaacaaaggccccgaggggcagtctcaggctcccgcttcgacctctgccagtactcgcctcttcgggctcacaaaaccaaaggaaaaaaaggagaagaaaaaaaagaacaaaacctctcgtagccagcccggggatggacccgcttcagaggtttcagccgaaggggaggagatattctgttag

SEQ ID NO: 167499 - DNA, 8451 bp, Artificial Sequence
  derived and/or modified sequence
aagctgctcgaaaagcagcctcccattgagggggattgcgtcgttaccgttttgctcgccgaggaggacaaggcagaagatgatgtcgtgttttatttggtcttcctgggctctactctgcgccactgtacatccaccagaaaagtgtcatccgacactttagaaacaatcgctcctgggcatgactgctgcgagacagtgaaggtgcaactgtgcgcttcaaaggaaggattgccagtcttcgtggtggcagaggaagattttcactttgtgcaggacgaggcctatgatgctgctcagtttctggcaacctccgccggtaaccagcaagctctgaactttaccagatttctggatcagagcgggccacctagcggcgatgtgaactccctggacaaaaagctggtgctagctttccgtcatcttaagctcccaaccgagtggaacgttctggggaccgatcaatcattgcacgatgcagggccacgagagacgctcatgcatttcgccgtaagactcggcttgctccgtctgacctggtttctgttgcagaagcccggcggcaggggagctctttccatacacaatcaggaaggggcaacaccggtttctctggctttggaacgggggtatcacaaactccatcagctgcttacagaagagaatgctggcgagccagacagttggagtagccttagttacgaaattccatatggggactgttctgtcagacatcacagggaattggatatctatactctgacatcagaatccgactcacaccatgaacacccttttccgggggacggatgcactgggcccatcttcaagttaatgaatattcaacagcagcttatgaagaccaacttgaaacagatggattcacttatgcccctgatgatgacagcgcaggatccgtcctctgcccctgagactgacgggcaatttctgccttgcgcacccgagcctacggaccctcaacgcctttccagcagtgaagaaaccgagagtactcagtgctgccccggcagtccagtcgctcagacggaaagcccttgtgatctcagttccattgtggaggaggaaaatacagatcgcagttgtagaaaaaagaataagggggtggagagaaaaggtgaagaggttgagcccgcccccatcgtggactccggaaccgtcagcgaccaggacagttgccttcaatccttacccgattgcggagtcaagggtaccgagggactctcaagctgcgggaatcgcaatgaggaaacaggtacgaaatcttctggcatgccaacagaccaggagtcactgagttcaggggacgcagttttacagcgcgacctggtcatggaaccaggcactgcccagtattcaagtggtggcgagcttggcggcatcagtacaaccaatgtgagtacccccgacaccgcaggtgagatggaacacggattgatgaaccccgatgccaccgtgtggaagaacgtacttcagggaggggagagtaccaaagagcgatttgaaaactcaaatattggcaccgccggggcttcggacgtgcatgttacttcaaagccagtcgataaaatttcggtgcctaattgcgccccagcagcaagcagcctggatggaaataaaccggccgaatccagtctagccttttcaaatgaggagacttctactgagaagaccgctgagactgaaacatctcgatccagggaagagtcagccgacgcaccggttgatcagaatagcgttgtgataccagccgccgcaaaagacaaaatcagtgatggtctggagccctacactctgttagcagccggaattggcgaggctatgagccctagcgatcttgcactgctggggctggaagaagacgtgatgccgcatcagaactctgaaaccaactcaagtcatgcccagtcacagaaaggaaagtcaagtccaatttgttcaacaaccggcgatgataagctttgcgcagacagcgcctgtcagcaaaacacagtcacctcctcgggagatctggttgccaagctctgtgacaatattgtgtctgaatcagagtcgacaaccgcaagacagccctcttcccaggatcctccagacgcctcccactgtgaagatccgcaggcacacaccgtgacttctgatcccgttagggatacccaggagagggcagacttttgtccattcaaggttgtagacaacaagggccagcgcaaagatgtcaagctggacaagcccctgacaaatatgctggaggttgtatcacacccacacccagttgtgcccaaaatggaaaaggaactggtgccggatcaggcggtgatttcagactctacatttagtctcgctaactcacctggatctgagtccgtgacaaaggacgatgccttgtctttcgtaccatcccagaaagagaaaggaaccgcaacccccgagcttcatactgcgacggactaccgcgatggtcctgatggaaacagcaacgagccagataccaggcccttggaagacagggctgtgggcttgtcaacaagctcgaccgcagccgagctgcagcacggtatggggaataccagcctgactggtctcggtggcgagcatgagggcccggcaccaccagccattcctgaagccctgaatatcaaaggaaatacagacagcagcttgcagtcggtcggtaaagcaacattggccctggatagtgttctgactgaagaaggaaagctcctggttgtctccgagtcctctgcggcccaggagcaggataaagacaaggccgtgacttgtagctcgattaaagagaatgctctaagctcaggaacattgcaggaggagcagaggacgccgccccctggacaggatacacagcagtttcacgaaaagagcatttccgcagattgcgccaaggataaagcacttcagctctcaaacagtcccggcgcctcctccgcttttctgaaggcagagacagagcacaacaaggaggtcgcccctcaagttagtctactgacgcagggcggagccgctcagtcacttgttcctccaggagccagcctggccacagagagcagacaagaggccctgggtgccgagcacaattctagcgcactgctgccctgcctgctccccgacggatcagacggaagcgacgcactgaactgctcacagcccagtccactcgatgtcggcgtcaagaacacccaatcccaaggtaagacctcagcctgtgaggtcagcggtgacgtcactgtggacgtgacaggcgtgaatgctctccaggggatggcggagcctcgccgcgagaacatcagtcacaacacccaggacatcctaatcccaaatgtccttctctcccaagaaaaaaacgccgtgctggggttaccggtcgcgcttcaggacaaggcagtgaccgaccctcagggcgtgggcacacccgagatgatacctctggattgggaaaaggggaaactggagggcgctgaccatagctgcacgatgggagacgccgaagaggcccagatcgacgatgaggcccaccccgtgttgctccaaccagtggccaaggagcttccaacggatatggagttatcagcccatgatgacggggcaccggccggtgtgcgcgaggtgatgcgcgctcccccaagcggaagagagaggtctactcccagtctgccctgcatggtgagcgcccaggacgcccccctgccgaaaggcgccgaccttatcgaggaagctgccagcaggatcgtagacgccgtgatagagcaagtaaaagccgctggtgcacttctcacagagggagaggcctgtcatatgagtctctcctcccctgagcttggccccctaaccaaaggactcgaatcagcctttaccgaaaaagtctctacctttccccctggcgaaagcttgccaatgggttcgaccccagaggaggcgacgggatccttggccggatgttttgcaggaagggaggaaccagaaaaaataattcttcctgtgcagggaccagagcctgccgcagagatgcccgatgtgaaggccgaggatgaggtggatttccgcgccagctccatcagtgaggaggttgcagtcggctcaatagccgccaccttaaaaatgaaacaggggcctatgacccaggccatcaaccgggagaattggtgtacaattgaaccctgcccagatgccgcaagcctgctagcttctaagcagtcacccgaatgcgagaatttccttgatgttggcctcgggcgcgagtgtacatccaaacagggcgtcttaaagagggaatctggtagcgactcagatcttttccactcaccaagcgacgacatggactcaataattttccccaagcccgaggaagagcacttggcctgtgacatcaccggttccagctcctctacagacgacacagccagtttggacaggcacagctcccatgggtcagatgttagtctgtcgcagatactgaaacccaacagaagtagggatcggcaatccctcgacggcttctactcgcatggtatgggagcagaggggcgggagtctgagtccgagcccgccgatcctggtgatgtcgaagaggaagagatggactccatcaccgaagtccctgccaattgctcagtgctccggtcctcgatgcgcagccttagcccatttcggcggcacagctggggcccagggaagaatgccgcctcagatgccgagatgaatcaccggtccatgtcctggtgccctagtggagtgcaatactctgctgggctctctgcggacttcaactaccggtccttctcactggagggattgaccgggggggccggcgtgggaaacaagccatcatcgagcttggaagtgtcttcagccaacgccgaggagctgcgccacccttttagtggggaggagcgagttgattccctggtgtcccttagtgaggaggacctggaaagcgaccaacgcgagcataggatgttcgaccagcagatttgtcacagatccaagcaacagggcttcaactattgcacctcagccatctctagcccacttacaaagtctatcagcctgatgacaatctcccacccaggtcttgataattccagacctttccatagcacctttcacaatacgagcgccaacctaacagaaagcatcaccgaagaaaattacaactttctcccgcattccccgagcaaaaaggattctgagtggaagtcaggcaccaaagtaagccgtaccttttcttatatcaaaaataagatgagttcctctaaaaagtccaaggagaaggagaaagagaaggacaaaattaaggaaaaggagaaggactccaaggataaggaaaaggataagaaaactgtgaatggccataccttttctagcatacccgtggttggtcctatttcctgcagccagtgcatgaaaccatttacaaacaaggacgcttacacatgtgctaattgctctgccttcgtacataagggatgtcgtgaatctctcgcaagttgcgccaaagttaaaatgaaacagcctaaagggtctctccaagcccacgatacaagctctttgcccaccgtgataatgaggaacaaacctagtcagcctaaggagcgccctagaagtgccgttttactggtggatgaaaccgccacgacaccaatctttgcgaatcgacggagccaacagtccgtgtcactgtccaagtcagtgagcatccagaatataaccggtgtgggcaacgacgagaatatgagcaatacgtggaagtttttgagccactctacagacagcttaaataagataagtaaagtgaacgaatcaaccgaatctcttacggacgagggagttggtacagacatgaacgaagggcaactgcttggggatttcgaaattgagtccaaacagttggaggccgaatcctggtctcggatcatagactctaagttcctgaagcaacagaaaaaggacgtggtcaagcgccaggaggtgatctacgagctgatgcaaaccgagttccatcacgtgcggacacttaaaatcatgtccggcgtctacagccaaggtatgatggccgatttgctattcgagcagcagatggtggagaaactgtttccttgcctggatgaactgatctccattcactctcagttcttccagagaattctggaaagaaagaaagagtccctggtcgataagagcgagaaaaattttctgattaagcgtatcggggatgtgctggtgaatcagttttccggagaaaacgccgagcggctcaaaaaaacctacgggaagttctgtggccagcataatcagtcagtaaattattttaaagatctgtatgccaaggataaacgcttccaggcattcgtcaaaaaaaagatgagctctagcgtcgtgcgcagactagggatcccggagtgcattctcctcgttacccagcgcataacaaagtaccccgtgctattccagaggatcctccaatgcaccaaggacaacgaagtggaacaggaggacctggctcaatctctgtcactggtgaaggacgtgatcggtgcggtcgacagcaaggtcgcctcctacgagaagaaagtgcgcctcaacgaaatctacacgaaaaccgacagtaaatcgatcatgagaatgaagtccggccaaatgttcgctaaagaggatctgaaaaggaaaaagctggtcagggatgggagcgtgtttctaaaaaacgctgctggaaggctgaaggaagtgcaggcagtcctacttaccgatatcttagtgttcctccaggagaaagatcagaaatacatatttgcctctctggatcagaagagtaccgtgatatctttaaaaaaactgatcgtgcgcgaagttgcgcatgaggaaaagggtctgtttcttatttcaatgggaatgaccgaccctgagatggtggaggtacatgcctcttctaaggaagagcggaacagttggattcagattatccaagacacaattaatacactgaaccgggatgaggatgaaggcatacccagtgaaaacgaagaagagaaaaaaatgctggatactagagcacgcgagctaaaagagcaactacatcagaaggaccagaagatcctcctcctgctcgaggaaaaagagatgatatttcgggatatggccgaatgcagcactcccctgccggaggactgtagcccgactcacagccccagagttctgtttaggtctaacacagaggaggcactgaaaggcggtcctctgatgaagagcgccatcaatgaagttgagatccttcaaggcctggtgagcggcaatctcggcggcaccctcggacccaccgtgtcgtctcctatcgagcaagacgttgtcggcccggtgtccctgccccgcagagctgagactttcggcggctttgatagtcatcagatgaacgcttccaaggggggggagaaagaggaaggcgacgacggacaagacctgcggcgtactgagtcggactcaggccttaaaaaagggggtaacgccaacctggtattcatgttaaaaagaaacagcgaacaggtggttcagagcgtcgtgcacctgtacgagcttctctcagccttgcagggagttgtgcttcagcaggactcctacattgaggatcaaaagcttgtgttatcggagcgagccttgaccaggtctttgagccgacctagctctctcatcgagcaggagaagcagcgttccctcgaaaagcagaggcaggacctggccaacctgcagaaacagcaggctcaatatcttgaggaaaagcgcagacgggagcgggaatgggaggcaagggagcgcgagctgcgggagcgggaagccttactggctcagcgggaagaggaggttcaacagggacagcaggacctagaaaaggaaagggaggagctgcagcagaagaaaggaacctaccagtacgaccttgaacggctgcgcgccgcacagaaacagctggaaagggagcaggaacagctcagacgcgaagccgagcgcctcagccagagacaaaccgagagggatctttgtcaggtgagtcatcctcatactaaattgatgcggattccgtcatttttcccctcacccgaggagcctccaagtccctctgctcctagcattgcaaaatctggctccctggacagcgagctatccgtgtcacctaagaggaactccatcagccggacacataaagacaaaggcccctttcacattttgtccagcacgagccagacgaataaagggcctgaagggcagtcgcaggcaccagcaagcacatccgcctccacaagattgttcggcctgaccaagcctaaggagaagaaagaaaaaaagaagaagaataagacctctagaagccagccaggcgatgggccagctagtgaggtgtccgccgagggtgaggaaatcttctgctag

SEQ ID NO: 167500 - DNA, 828 bp, Artificial Sequence
  derived and/or modified sequence
ccatccgatgacatggacagcataatcttccctaagcccgaggaggagcatcttgcatgtgatattacaggcagcagcagctctactgatgataccgccagtctcgatcgacattcttcccacggatccgatgtttccctctctcagatccttaagcctaaccgctcgcgcgatagacagtctctggatggcttctactcccacgggatgggcgccgaaggccgggaatccgaaagcgaaccggcggaccctggagacgtggaagaggaggaaatggactcgattacagaggtgccagcaaattgctctgtgctgagatccagcatgcggtctctttctcctttccgaaggcattcttggggacccggaaaaaacgctgcatcagacgccgagatgaatcaccggagtagcatgagagtgctgggagatgtggtcaggcggcctccgatccacagaaggagcatgtcatggtgtccatctggagtgcagtactccgcagggctgtccgcagactttaattataggtccttctccctggagggacttactggtggggcgggcgttgggaacaagccatcctccagcctcgaggtatcaagtgcaaacgcagaagagctccgccacccgttctcaggcgaggaacgcgtggacagccttgtttctttgtccgaagaggatctggagagtgatcagcgggaacatcgcatgtttgaccagcagatttgccatagatctaagcagcagggatttaactactgtacttccgccatctcttcccccctgactaagtcgatctcactcatgacgataagccaccctgggttatag

SEQ ID NO: 167501 - DNA, 117 bp, Artificial Sequence
  derived and/or modified sequence
atgaagctcaatcctcagcaagcccctttatacggcgattgcgtcgtaactgtgttgctggccgaagaagataaagccgaggatgacgtggttttttatctggtctttctgggatag

SEQ ID NO: 167502 - DNA, 540 bp, Artificial Sequence
  derived and/or modified sequence
atgaagctaaatccacaacaggcgcctctgtatggcgattgcgtagtgacagtgctgctagccgaagaggataaggctgaggacgacgttgtgttttatttggtgtttctggggagcacgctgcgacactgtacctctacaagaaaagtcagcagtgacacactggaaaccattgcaccgggtcacgactgttgcgaaaccgtgaaagtacagctgtgcgcctccaaggagggtctgccagtgttcgtcgtcgccgaggaggactttcacttcgtgcaggacgaggcttacgatgcggcccaatttttagctacctcggctggaaaccagcaagcgctcaacttcactcgatttctcgaccagagcggtcccccatcaggcgacgtgaacagcctcgacaagaaacttgtactggcttttaggcacctcaagttgcctaccgagtggaacgtgctgggtactgatcagagcctgcatggcgagaatctgtacgacctccagacacacttcaagttcgtgatatttctcttgttcttctag

SEQ ID NO: 167503 - DNA, 8454 bp, Artificial Sequence
  derived and/or modified sequence
atgaagctgaacccccagcaggcccccctgtatggagactgtgtggtgacagtgctgctggccgaggaggacaaggcagaagatgatgtggtgttctacctggtgttcctgggcagcaccctgcggcactgcaccagcaccaggaaggtgtccagtgacaccctggagaccatcgcccctggccatgactgctgtgaaacagtgaaggtgcagctgtgtgccagcaaggagggcctgcctgtgtttgtggtggccgaggaggacttccactttgtgcaggatgaggcctatgatgctgcccagttcctggccaccagcgctggcaaccagcaggccctgaacttcacccgcttcctggaccagagcggcccccccagcggagatgtgaacagcctggacaagaagctggtgctggccttccgccacctgaagctgcccacagagtggaatgtgctgggcacagaccagagcctgcatgatgctggcccccgggagaccctgatgcactttgctgtgcggctgggcctgctgcggctgacctggttcctgctgcagaagccaggcggccgcggggccctgagcatccacaaccaggagggcgccacccctgtgtccctggccctggagcggggctaccacaagctgcaccagctgctgacagaggagaatgctggggagccagacagctggagcagcctgtcctatgagatcccctatggagactgcagcgtgcgccaccaccgggagctggacatctacaccctgaccagcgagagtgacagccaccacgagcaccccttccctggagatggctgcaccggccccatcttcaagctgatgaacatccagcagcagctgatgaagaccaacctgaagcagatggacagcctgatgcccctgatgatgacagcccaggaccccagcagcgcccctgagacagatggccagttcctgccctgtgcccctgagcccacagacccccagaggctgagcagcagcgaggagacagagagcacccagtgctgccccggcagccctgtggcccagacagagagcccctgtgacctgagcagcatcgtggaggaggagaacacagacaggagctgcaggaagaagaacaagggcgtggagaggaaaggagaggaggtggagcccgcccccatcgtggacagcggcaccgtgtctgaccaggacagctgcctgcagagcctgcctgactgtggggtgaagggcacagagggcctgagcagctgtggcaacagaaatgaggagaccggcaccaagagcagcggcatgcccacagaccaggagagcctgagcagtggagatgctgtgctgcagagggacctggtgatggagcccggcacagcccagtacagcagtggaggagagctgggcggcatcagcaccaccaacgtgtccaccccagacacagctggggagatggagcacggcctgatgaacccagatgccaccgtgtggaagaatgtgctgcagggcggggagagcaccaaggagagatttgagaacagcaacattggaacagctggggccagtgatgtgcacgtgaccagcaagcctgtggacaagatctctgtgcccaactgtgccccagctgccagcagcctggatggcaacaagccagctgagagcagcctggccttcagcaatgaggagaccagcacagagaagacagctgagacagagaccagccgcagccgggaggagagcgcagatgcccctgtggaccagaacagcgtggtgatcccagctgctgccaaggacaagatcagtgatggcctggagccctacaccctgctggccgccggcattggagaggccatgagccccagcgacctggccctgctgggcctggaggaggatgtgatgccccaccagaacagcgagaccaacagcagccacgcccagagccagaagggcaagagcagccccatctgcagcaccactggagatgacaagctgtgtgccgacagcgcctgccagcagaacacagtgaccagcagcggggacctggtggccaagctgtgtgacaacatcgtgtctgagagcgagagcaccacagcccggcagcccagcagccaggaccccccagatgccagccactgtgaggacccccaggcccacacagtgaccagtgaccctgtgcgggacacccaggagagagctgacttctgccccttcaaggtggtggacaacaagggccagaggaaggatgtgaagctggacaagcccctgaccaacatgctggaggtggtgagccacccccaccctgtggtgcccaagatggagaaggagctggtgcctgaccaggccgtcatcagtgacagcaccttcagcctggccaacagccctggcagcgagagcgtgaccaaggatgatgccctgagctttgtgcccagccagaaggagaagggcacagccaccccagagctgcacacagccacagactacagagatggcccagatggcaacagcaatgaaccagacacccggcccctggaggacagagctgtgggcctgagcaccagcagcacagctgctgagctgcagcacggcatgggcaacaccagcctgaccggcctgggcggggagcacgagggccctgcccccccagccatccctgaggccctgaacatcaagggcaacacagacagcagcctgcagagcgtgggcaaggccaccctggccctggacagcgtgctgacagaggagggcaagctgctggtggtgtctgagagcagcgctgcccaggagcaggacaaggacaaggctgtgacctgcagcagcatcaaggaaaatgccctgagcagcggcaccctgcaggaggagcagaggaccccacctcctggccaggacacccagcagttccacgagaagagcatctctgctgactgtgccaaggacaaggccctgcagctgagcaacagccctggggccagcagcgccttcctgaaggccgagacagagcacaacaaggaggtggccccccaggtgtccctgctgacccagggcggggccgcccagagcctggtgcccccaggggccagcctggccacagagagccggcaggaggccctgggcgctgagcacaacagcagcgccctgctgccctgcctgctgcctgatggcagtgatggcagtgatgccctgaactgcagccagcccagccccctggatgtgggcgtgaagaacacccagagccagggcaagaccagcgcctgtgaggtgtctggagatgtgacagtggatgtgactggagtgaatgccctgcagggcatggccgagccccggcgggagaacatcagccacaacacccaggacatcctgatccccaacgtgctgctgagccaggagaagaatgctgtgctgggcctgcctgtggccctgcaggacaaggctgtgacagacccccagggcgtgggcaccccagagatgatccccctggactgggagaagggcaagctggagggcgctgaccacagctgcaccatgggagatgctgaggaggcccagattgatgatgaggcccaccctgtgctgctgcagcctgtggccaaggagctgcccacagacatggagctgagcgcccatgatgatggagccccagctggggtgcgggaggtgatgagggcccctccttctggccgggagaggagcacccccagcctgccctgcatggtgtctgcccaggatgcccccctgcccaagggagctgacctgattgaggaggccgccagcagaattgtggatgctgtgattgagcaggtgaaggccgccggggccctgctgacagaaggagaggcctgccacatgagcctgagcagccctgagctgggccccctgaccaagggcctggagagcgccttcacagagaaggtgtccaccttccccccaggagagagcctgcccatgggcagcaccccagaggaggccaccggcagcctggccggctgctttgctggccgggaggagcctgagaagatcatcctgcctgtgcagggccctgagcctgctgctgagatgccagatgtgaaggccgaggatgaggtggacttccgggccagcagcatcagcgaggaggtggccgtgggcagcattgctgccaccctgaagatgaagcagggccccatgacccaggccatcaaccgggagaactggtgcaccatcgagccctgcccagatgctgccagcctgctggccagcaagcagagcccagaatgtgagaacttcctggatgtgggcctgggcagagaatgtaccagcaagcagggcgtgctgaagcgggagagcggcagtgacagcgacctcttccacagccccagtgatgacatggacagcatcatcttccccaagccagaggaggagcacctggcctgtgacatcaccggcagcagcagcagcacagatgacacagccagcctggacagacacagcagccacggcagtgatgtgtccctgagccagatcctgaagcccaacagaagccgggaccggcagagcctggatggcttctacagccacggcatgggcgctgagggccgggagagcgagagcgagcctgctgaccctggagatgtggaggaggaggagatggacagcatcacagaggtgcctgccaactgcagcgtgctgcggagctccatgaggagcctgagccccttccgccgccacagctggggccctgggaagaatgctgccagtgatgctgagatgaaccaccgctccatgtcctggtgccccagcggcgtgcagtacagcgctggcctgtctgctgacttcaactaccgctccttcagcctggagggcctgactggaggagctggggtgggcaacaagcccagcagcagcctggaggtgagcagcgccaatgctgaggagctgcggcaccccttctctggagaggagcgggtggacagcctggtgtccctgtctgaggaggacctggagagtgaccagcgggagcacaggatgtttgaccagcagatctgccacaggagcaagcagcagggcttcaactactgcaccagcgccatcagcagccccctgaccaagagcatcagcctgatgaccatcagccaccctggcctggacaacagccggcccttccacagcaccttccacaacaccagcgccaacctgacagagagcatcacagaggagaactacaacttcctgccccacagccccagcaagaaggacagcgagtggaagagcggcaccaaggtgtccaggaccttctcctacatcaagaacaagatgagcagcagcaagaagagcaaggagaaggagaaggagaaggacaagatcaaggagaaggagaaggacagcaaggacaaggagaaggacaagaagacagtgaatggccacaccttcagcagcatccctgtggtgggccccatcagctgcagccagtgcatgaagcccttcaccaacaaggatgcctacacctgtgccaactgcagcgcctttgtgcacaagggctgccgggagagcctggccagctgtgccaaggtgaagatgaagcagcccaagggcagcctgcaggcccatgacaccagcagcctgcccaccgtcatcatgaggaacaagcccagccagcccaaggagcggcccaggtctgctgtgctgctggtggatgaaacagccaccacccccatctttgccaacagaagaagccagcagagcgtgtccctgagcaagtctgtgtccatccagaacatcactggagtgggcaatgatgagaacatgagcaacacctggaagttcctgagccacagcacagacagcctgaacaagatcagcaaggtgaatgaaagcacagagagcctgacagatgagggcgtgggcacagacatgaatgaaggccagctgctgggggactttgaaattgagagcaagcagctggaggccgagagctggagccgcatcatcgacagcaagttcctgaagcagcagaagaaggatgtggtgaagaggcaggaggtgatctatgagctgatgcagacagagttccaccacgtgaggaccctgaagatcatgtctggagtgtacagccagggcatgatggctgacctgctgtttgagcagcagatggtggagaagctgttcccctgcctggatgagctgatcagcatccacagccagttcttccagaggatcctggagaggaagaaggagagcctggtggacaagtctgagaagaacttcctgatcaagagaattggagatgtgctggtgaaccagttcagcggggagaatgctgagcggctgaagaagacctacggcaagttctgtggccagcacaaccagagcgtgaactacttcaaggacctgtatgccaaggacaagcgcttccaggcctttgtgaagaagaagatgagcagctctgtggtgcggcggctgggcatccctgagtgcatcctgctggtgacccagaggatcaccaagtaccctgtgctcttccagaggatcctgcagtgcaccaaggacaatgaggtggagcaggaggacctggcccagagcctgagcctggtgaaggatgtgattggagctgtggacagcaaggtggccagctatgagaagaaggtgcggctgaatgagatctacaccaagacagacagcaagagcatcatgaggatgaagagcggccagatgtttgccaaggaggacctgaagaggaagaagctggtgagagatggctctgtgttcctgaagaatgctgctggccgcctgaaggaggtgcaggccgtgctgctgacagacatcctggtgttcctgcaggagaaggaccagaagtacatctttgccagcctggaccagaagagcaccgtcatcagcctgaagaagctgattgtgcgggaggtggcccacgaggagaagggcctcttcctgatctccatgggcatgacagatcctgagatggtggaggtgcacgccagcagcaaggaggagagaaattcctggatccagatcatccaggacaccatcaacaccctgaacagagatgaagatgagggcatccccagtgaaaatgaggaggagaagaagatgctggacacccgggcccgggagctgaaggagcagctgcaccagaaggaccagaagatcctgctgctgctggaggagaaggagatgatcttccgggacatggccgagtgcagcacccccctgcctgaggactgcagccccacccacagcccccgggtgctcttccgcagcaacacagaggaggccctgaagggcggccccctgatgaagagcgccatcaatgaggtggagatcctgcagggcctggtgtctggcaacctgggcggcaccctgggccccaccgtgagcagccccatcgagcaggatgtggtgggccctgtgtccctgcccaggagagctgagaccttcggcggctttgacagccaccagatgaatgccagcaagggcggggagaaggaggagggagatgatggccaggacctgcggaggacagaaagtgacagcggcctgaagaagggcggcaatgccaacctggtgttcatgctgaagaggaacagcgagcaggtggtgcagagcgtggtgcacctgtatgagctgctgagcgccctgcagggcgtggtgctgcagcaggacagctacatcgaggaccagaagctggtgctgtctgagcgggccctgaccaggagcctgagccggcccagcagcctgattgagcaggagaagcagaggagcctggagaagcagaggcaggacctggccaacctgcagaagcagcaggcccagtacctggaggagaagagaagaagagagcgggagtgggaggcccgggagcgggagctgcgggagcgggaggccctgctggcccagcgggaggaggaggtgcagcagggccagcaggacctggagaaggagcgggaggagctgcagcagaagaagggcacctaccagtatgacctggagcggctgcgggccgcccagaagcagctggagcgggagcaggagcagctgcggcgggaggccgagcggctgagccagaggcagacagagcgggacctgtgccaggtgagccacccccacaccaagctgatgaggatccccagcttcttccccagccctgaggagccccccagccccagcgcccccagcatcgccaagagcggcagcctggacagcgagctgtctgtgagccccaagagaaattccatcagcaggacccacaaggacaagggccccttccacatcctgagcagcaccagccagaccaacaagggccctgagggccagagccaggccccagccagcaccagcgccagcacccggctgtttggcctgaccaagcccaaggagaagaaggagaagaagaagaagaacaagaccagccgcagccagcctggagatggccctgccagcgaggtgtctgctgagggggaggagatcttctgctag

SEQ ID NO: 167504 - DNA, 8451 bp, Artificial Sequence
  derived and/or modified sequence
aagctgctggagaagcagccccccattgaaggagactgtgtggtgacagtgctgctggccgaggaggacaaggccgaggatgatgtggtgttctacctggtgttcctgggcagcaccctgcggcactgcaccagcaccaggaaggtgtccagtgacaccctggagaccatcgcccctggccatgactgctgtgagaccgtgaaggtgcagctgtgtgccagcaaggagggcctgcctgtgtttgtggtggccgaggaggacttccactttgtgcaggatgaggcctatgatgctgcccagttcctggccaccagcgctggcaaccagcaggccctgaacttcacccgcttcctggaccagagcggccccccatctggagatgtgaacagcctggacaagaagctggtgctggccttccgccacctgaagctgcccacagagtggaatgtgctgggcacagaccagagcctgcatgatgctggcccccgggagaccctgatgcactttgctgtgcggctgggcctgctgcggctgacctggttcctgctgcagaagccaggcggccgcggggccctgagcatccacaaccaggagggcgccacccctgtgtccctggccctggagcggggctaccacaagctgcaccagctgctgacagaagaaaatgctggggagccagacagctggagcagcctgtcctatgagatcccctacggggactgcagcgtgcgccaccaccgggagctggacatctacaccctgaccagcgagagtgacagccaccacgagcaccccttccctggagatggctgcaccggccccatcttcaagctgatgaacatccagcagcagctgatgaagaccaacctgaagcagatggacagcctgatgcccctgatgatgacagcccaggaccccagcagcgcccctgagacagatggccagttcctgccctgtgcccctgagcccacagacccccagaggctgagcagcagcgaggagacagagagcacccagtgctgccccggcagccctgtggcccagacagagagcccctgtgacctgagcagcatcgtggaggaggagaacacagacaggagctgcaggaagaagaacaagggcgtggagaggaagggggaggaggtggagcccgcccccatcgtggacagcggcaccgtgtctgaccaggacagctgcctgcagagcctgcctgactgtggggtgaagggcacagagggcctgagcagctgtggcaacagaaatgaggagaccggcaccaagagcagcggcatgcccacagaccaggagagcctgagcagtggagatgctgtgctgcagagggacctggtgatggagcctggaacagcccagtacagcagcggcggggagctgggcggcatcagcaccaccaacgtgtccaccccagacacagctggggagatggagcacggcctgatgaacccagatgccaccgtgtggaagaatgtgctgcagggcggggagagcaccaaggagagatttgagaacagcaacatcggcacagctggggccagtgatgtgcacgtgaccagcaagcctgtggacaagatctctgtgcccaactgtgccccagctgccagcagcctggatggcaacaagccagctgagagcagcctggccttcagcaatgaggagaccagcacagagaagacagctgagacagagaccagccgcagccgggaggagagcgcagatgcccctgtggaccagaacagcgtggtgatcccagctgctgccaaggacaagatcagtgatggcctggagccctacaccctgctggccgccggcatcggggaggccatgagccccagcgacctggccctgctgggcctggaggaggatgtgatgccccaccagaacagcgagaccaacagcagccacgcccagagccagaagggcaagagcagccccatctgcagcaccactggagatgacaagctgtgtgccgacagcgcctgccagcagaacacagtgaccagcagcggggacctggtggccaagctgtgtgacaacatcgtgtctgagagcgagagcaccacagcccggcagcccagcagccaggaccccccagatgccagccactgtgaggacccccaggcccacacagtgaccagtgaccctgtgcgggacacccaggagagagctgacttctgccccttcaaggtggtggacaacaagggccagaggaaggatgtgaagctggacaagcccctgaccaacatgctggaggtggtgagccacccccaccctgtggtgcccaagatggagaaggagctggtgcctgaccaggccgtcatcagtgacagcaccttcagcctggccaacagccctggcagcgagagcgtgaccaaggatgatgccctgagctttgtgcccagccagaaggagaagggcacagccaccccagagctgcacacagccacagactacagagatggcccagatggcaacagcaatgaaccagacacccggcccctggaggacagagctgtgggcctgagcaccagcagcacagctgctgagctgcagcacggcatgggcaacaccagcctgaccggcctgggcggggagcacgagggccctgcccccccagccatccctgaggccctgaacatcaagggcaacacagacagcagcctgcagagcgtgggcaaggccaccctggccctggacagcgtgctgacagaggagggcaagctgctggtggtgtctgagagcagcgctgcccaggagcaggacaaggacaaggctgtgacctgcagcagcatcaaggaaaatgccctgagcagcggcaccctgcaggaggagcagaggaccccacctcctggccaggacacccagcagttccacgagaagagcatctctgctgactgtgccaaggacaaggccctgcagctgagcaacagccctggggccagcagcgccttcctgaaggccgagacagagcacaacaaggaggtggccccccaggtgtccctgctgacccagggcggggccgcccagagcctggtgcccccaggggccagcctggccacagagagccggcaggaggccctgggcgctgagcacaacagcagcgccctgctgccctgcctgctgcctgatggcagtgatggcagtgatgccctgaactgcagccagcccagccccctggatgtgggcgtgaagaacacccagagccagggcaagaccagcgcctgtgaggtgtctggagatgtgacagtggatgtgactggagtgaatgccctgcagggcatggccgagccccggcgggagaacatcagccacaacacccaggacatcctgatccccaacgtgctgctgagccaggagaagaatgctgtgctgggcctgcctgtggccctgcaggacaaggctgtgacagacccccagggcgtgggcaccccagagatgatccccctggactgggagaagggcaagctggagggcgctgaccacagctgcaccatgggagatgctgaggaggcccagattgatgatgaggcccaccctgtgctgctgcagcctgtggccaaggagctgcccacagacatggagctgagcgcccatgatgatggagccccagctggggtgcgggaggtgatgagggccccacccagcggccgggagaggagcacccccagcctgccctgcatggtgtctgcccaggatgcccccctgcccaagggagctgacctgattgaggaggccgccagccgcatcgtggatgctgtgattgagcaggtgaaggctgctggggccctgctgacagaaggagaggcctgccacatgagcctgagcagccctgagctgggccccctgaccaagggcctggagagcgccttcacagagaaggtgtccaccttccccccaggagagagcctgcccatgggcagcaccccagaggaggccaccggcagcctggccggctgctttgctggccgggaggagcctgagaagatcatcctgcctgtgcagggccctgagcctgctgctgagatgccagatgtgaaggcagaagatgaggtggacttccgggccagcagcatcagcgaggaggtggccgtgggcagcattgctgccaccctgaagatgaagcagggccccatgacccaggccatcaaccgggagaactggtgcaccatcgagccctgcccagatgctgccagcctgctggccagcaagcagagcccagaatgtgagaacttcctggatgtgggcctgggccgggagtgcaccagcaagcagggcgtgctgaagcgggagagcggcagtgacagcgacctcttccacagccccagtgatgacatggacagcatcatcttccccaagccagaggaggagcacctggcctgtgacatcaccggcagcagcagcagcacagatgacacagccagcctggacagacacagcagccacggcagtgatgtgtccctgagccagatcctgaagcccaacagaagccgggaccggcagagcctggatggcttctacagccacggcatgggcgctgagggccgggagagcgagagcgagcctgctgaccctggagatgtggaggaggaggagatggacagcatcacagaggtgcctgccaactgcagcgtgctgcggagctccatgaggagcctgagccccttcagaagacacagctggggccctgggaagaatgctgccagtgatgctgagatgaaccaccgctccatgtcctggtgccccagcggcgtgcagtacagcgctggcctgtctgctgacttcaactaccgctccttcagcctggagggcctgaccggcggggccggcgtgggcaacaagcccagcagcagcctggaggtgtcctctgccaatgctgaggagctgcggcaccccttcagcggggaggagcgggtggacagcctggtgtccctgtctgaggaggacctggagagtgaccagcgggagcacaggatgtttgaccagcagatctgccacaggagcaagcagcagggcttcaactactgcaccagcgccatcagcagccccctgaccaagagcatcagcctgatgaccatcagccaccctggcctggacaacagccggcccttccacagcaccttccacaacaccagcgccaacctgacagagagcatcacagaggagaactacaacttcctgccccacagccccagcaagaaggacagcgagtggaagagcggcaccaaggtgtccaggaccttctcctacatcaagaacaagatgagcagcagcaagaagagcaaggagaaggagaaggagaaggacaagatcaaggagaaggagaaggacagcaaggacaaggagaaggacaagaagacagtgaatggccacaccttcagcagcatccctgtggtgggccccatcagctgcagccagtgcatgaagcccttcaccaacaaggatgcctacacctgtgccaactgcagcgcctttgtgcacaagggctgccgggagagcctggccagctgtgccaaggtgaagatgaagcagcccaagggcagcctgcaggcccatgacaccagcagcctgcccaccgtcatcatgaggaacaagcccagccagcccaaggagcggcccaggtctgctgtgctgctggtggatgaaacagccaccacccccatctttgccaacagaagaagccagcagagcgtgtccctgagcaagtctgtgtccatccagaacatcaccggggtgggcaatgatgagaacatgagcaacacctggaagttcctgagccacagcacagacagcctgaacaagatcagcaaggtgaatgaaagcacagagagcctgacagatgaaggagtgggcacagacatgaatgaaggccagctgctgggggactttgaaattgagagcaagcagctggaggccgagagctggagccgcatcatcgacagcaagttcctgaagcagcagaagaaggatgtggtgaagaggcaggaggtgatctatgagctgatgcagacagagttccaccacgtgaggaccctgaagatcatgtctggagtgtacagccagggcatgatggctgacctgctgtttgagcagcagatggtggagaagctgttcccctgcctggatgagctgatcagcatccacagccagttcttccagaggatcctggagaggaagaaggagagcctggtggacaagtctgagaagaacttcctgatcaagagaattggagatgtgctggtgaaccagttctctggagaaaatgctgagcggctgaagaagacctacggcaagttctgtggccagcacaaccagagcgtgaactacttcaaggacctgtatgccaaggacaagcgcttccaggcctttgtgaagaagaagatgagcagctctgtggtgcggcggctgggcatccctgagtgcatcctgctggtgacccagaggatcaccaagtaccctgtgctcttccagaggatcctgcagtgcaccaaggacaatgaggtggagcaggaggacctggcccagagcctgagcctggtgaaggatgtgattggagctgtggacagcaaggtggccagctatgagaagaaggtgcggctgaatgagatctacaccaagacagacagcaagagcatcatgaggatgaagagcggccagatgtttgccaaggaggacctgaagaggaagaagctggtgagagatggcagcgtcttcctgaagaatgctgctggccgcctgaaggaggtgcaggccgtgctgctgacagacatcctggtgttcctgcaggagaaggaccagaagtacatctttgccagcctggaccagaagagcaccgtcatcagcctgaagaagctgattgtgcgggaggtggcccacgaggagaagggcctcttcctgatctccatgggcatgacagatcctgagatggtggaggtgcacgccagcagcaaggaggagaggaacagctggatccagatcatccaggacaccatcaacaccctgaacagagatgaagatgagggcatccccagtgaaaatgaggaggagaagaagatgctggacacccgggcccgggagctgaaggagcagctgcaccagaaggaccagaagatcctgctgctgctggaggagaaggagatgatcttccgggacatggctgaatgttccacccccctgcctgaggactgcagccccacccacagcccccgggtgctcttccgcagcaacacagaggaggccctgaagggcggccccctgatgaagagcgccatcaatgaggtggagatcctgcagggcctggtgtctggcaacctgggcggcaccctgggccccaccgtgagcagccccatcgagcaggatgtggtgggccctgtgtccctgccccggcgggcagagacctttggaggctttgacagccaccagatgaatgccagcaaaggaggagagaaggaggagggagatgatggccaggacctgcggaggacagaaagtgacagcggcctgaagaagggcggcaatgccaacctggtgttcatgctgaagagaaattctgagcaggtggtgcagagcgtggtgcacctgtatgagctgctgagcgccctgcagggcgtggtgctgcagcaggacagctacatcgaggaccagaagctggtgctgtctgagcgggccctgaccaggagcctgagccggcccagcagcctcatcgagcaggagaagcagaggagcctggagaagcagaggcaggacctggccaacctgcagaagcagcaggcccagtacctggaggagaagagaagaagagagcgggagtgggaggcccgggagcgggagctgcgggagcgggaggccctgctggcccagcgggaggaggaggtgcagcagggccagcaggacctggagaaggagcgggaggagctgcagcagaagaagggcacctaccagtatgacctggagcggctgcgggccgcccagaagcagctggagcgggagcaggagcagctgcggcgggaggccgagcggctgagccagaggcagacagagcgggacctgtgccaggtgagccacccccacaccaagctgatgaggatccccagcttcttccccagccctgaggagccccccagccccagcgcccccagcatcgccaagagcggcagcctggacagcgagctgtctgtgagccccaagaggaacagcatcagcaggacccacaaggacaagggccccttccacatcctgagcagcaccagccagaccaacaagggccctgagggccagagccaggccccagccagcaccagcgccagcacccggctgtttggcctgaccaagcccaaggagaagaaggagaagaagaagaagaacaagaccagccgcagccagcctggagatggccctgccagcgaggtgtctgctgagggggaggagatcttctgctag

SEQ ID NO: 167505 - DNA, 828 bp, Artificial Sequence
  derived and/or modified sequence
cccagtgatgacatggacagcatcatcttccccaagccagaggaggagcacctggcctgtgacatcaccggcagcagcagcagcacagatgacacagccagcctggacagacacagcagccacggcagtgatgtgtccctgagccagatcctgaagcccaacagaagccgggaccggcagagcctggatggcttctacagccacggcatgggcgctgagggccgggagagcgagagcgagcctgctgaccctggagatgtggaggaggaggagatggacagcatcacagaggtgcctgccaactgcagcgtgctgcggagctccatgaggagcctgagccccttccgccgccacagctggggccctgggaagaatgctgccagtgatgctgagatgaaccacaggagctccatgagggtgctgggagatgtggtgcggcggccccccatccaccggcgctccatgtcctggtgccccagcggcgtgcagtacagcgctggcctgtctgctgacttcaactaccgctccttcagcctggagggcctgactggaggagctggggtgggcaacaagcccagcagcagcctggaggtgagcagcgccaatgctgaggagctgcggcaccccttctctggagaggagcgggtggacagcctggtgtccctgtctgaggaggacctggagagtgaccagcgggagcacaggatgtttgaccagcagatctgccacaggagcaagcagcagggcttcaactactgcaccagcgccatcagcagccccctgaccaagagcatcagcctgatgaccatcagccaccctggcctgtag

SEQ ID NO: 167506 - DNA, 117 bp, Artificial Sequence
  derived and/or modified sequence
atgaagctgaacccccagcaggcccccctgtatggagactgtgtggtgacagtgctgctggccgaggaggacaaggcagaagatgatgtggtgttctacctggtgttcctgggctag

SEQ ID NO: 167507 - DNA, 540 bp, Artificial Sequence
  derived and/or modified sequence
atgaagctgaacccccagcaggcccccctgtatggagactgtgtggtgacagtgctgctggccgaggaggacaaggcagaagatgatgtggtgttctacctggtgttcctgggcagcaccctgcggcactgcaccagcaccaggaaggtgtccagtgacaccctggagaccatcgcccctggccatgactgctgtgaaacagtgaaggtgcagctgtgtgccagcaaggagggcctgcctgtgtttgtggtggccgaggaggacttccactttgtgcaggatgaggcctatgatgctgcccagttcctggccaccagcgctggcaaccagcaggccctgaacttcacccgcttcctggaccagagcggcccccccagcggagatgtgaacagcctggacaagaagctggtgctggccttccgccacctgaagctgcccacagagtggaatgtgctgggcacagaccagagcctgcatggagagaacctgtatgacctgcagacccacttcaagtttgtgatcttcctgctcttcttctag

SEQ ID NO: 167508 - DNA, 8454 bp, Artificial Sequence
  derived and/or modified sequence
atgaagctgaacccccagcaggcccccctgtacggcgactgcgtggtgaccgtcttactcgctgaggaagataaggctgaggacgatgtggttttctatctcgtgtttctgggaagcacgttgagacactgcacatctactcgaaaggtcagctctgatactttggagactatcgcccctggacacgactgctgcgagacagtcaaagtccagctctgcgcctctaaagaaggactgcctgtgttcgtcgtcgccgaagaggatttccatttcgtacaggacgaagcatatgacgcggcgcagtttctggcgaccagcgccggaaatcagcaggccctgaattttactcggttcctggatcagagtgggcctccgtccggggatgttaattccctggacaagaaattggtgctggccttcaggcaccttaagcttccgactgagtggaatgtgctgggtactgatcagtccctgcacgatgcgggaccacgggagaccttaatgcattttgcggtgaggctgggtttgctccgcctgacatggttcctgctgcagaaaccaggggggcgcggggcactctctattcacaaccaggagggggcgacaccagtttcactggccctggaaagaggataccacaagctgcaccagctccttacggaggagaacgcaggcgaacctgatagttggagcagcctctcttatgaaattccatatggtgattgctctgtgcgtcaccatcgggaactggacatctatactctgacaagcgaatcagatagccaccatgaacatcctttccccggcgatggatgtactgggccgatctttaaacttatgaacatccaacagcagttgatgaaaaccaacctgaagcaaatggattctttgatgccccttatgatgacagcccaggacccatcttcagcccccgaaaccgatgggcaatttctcccctgcgccccagagcctaccgatccacagcgcctgtcaagcagcgaagagacagagagcacgcagtgttgcccaggctcacccgtcgcccagacagagagcccttgcgatctgtcttcaatcgtcgaggaagaaaacactgatcgatcttgcaggaagaagaacaagggagtggaacgcaaaggagaggaagtggaacccgccccaattgtggacagcgggactgtaagcgatcaggactcatgtcttcaatctctgcctgactgcggagttaaggggacagaaggtttgtcaagttgtggcaaccggaacgaagagaccggcacaaaatcgtcggggatgcctactgatcaggagagcctgtcaagcggcgacgcggtgttacagcgggatttggtaatggagccgggcaccgctcaatatagctctggaggcgagcttggaggtatcagtaccacaaacgtgtccacccctgacaccgccggcgagatggaacatggcttaatgaatcccgacgctacagtttggaaaaatgttcttcaggggggagagagcaccaaagagcgatttgaaaacagcaatattgggaccgcaggagccagcgatgttcacgtgacatcaaaacccgtggataaaattagcgtgcccaattgtgcccccgccgcctcttcgctggacggaaacaaaccagccgaaagcagtttggctttctcaaacgaggaaacgtctaccgagaagactgcagagactgagacttcacgtagcagagaggaaagcgccgacgctccggtcgatcagaacagcgttgtgatcccagcagctgctaaagacaagatttctgatgggctggagccctatacattgttggccgctggtattggagaagcgatgagcccaagcgatttggccctgctcggcctggaagaagatgtcatgcctcaccagaattccgaaacgaactcgtcccacgctcagagccagaaaggcaagtcgtctccaatctgctctacgacaggtgatgataaactttgcgcagactccgcatgccagcaaaatacagtgaccagttcaggagatctcgtggcgaaactctgcgataatatagtgtctgaatctgagagtactactgcccgccaacccagctcacaggatccgcccgatgcaagccattgtgaagacccccaggcccacactgtgacatcggatcctgtaagagacactcaggagcgcgcagacttctgcccctttaaagtcgtggataacaaggggcaacgtaaggacgtgaagctggacaagccactcactaacatgcttgaggtcgtgagccatccgcaccccgtagtaccaaaaatggagaaagagctagtacctgatcaggctgtgatcagtgattctactttttccctggcaaacagcccaggcagtgaatcagttaccaaggacgacgcactttcctttgtgccctcacagaaggagaagggaacagccacacccgagctccataccgcaacagactacagggacgggcctgacgggaattctaatgagccagatacacggccactggaggatcgagccgtcggattgtcaacatccagcacagccgccgaactgcagcatggcatgggaaatacttcgcttactgggctcggaggcgagcacgagggaccggcgccccctgccatcccagaggccctcaacatcaaagggaatacagactccagcttacagagcgtgggtaaagctactctagctctagattcggtgctgacagaggaaggtaagctgctggtggtgtctgaatcatctgcggcccaggagcaggataaagacaaggctgtgacttgctccagtatcaaagagaacgccctttcttcaggcaccttgcaggaagagcagcgcacgcctcccccgggccaggacacccagcagttccacgagaaatctatcagtgctgactgcgccaaggataaggccctccagctatcaaacagcccaggagcctcttcggcctttttaaaagccgaaaccgaacacaataaggaggtggctcctcaagtttcactcttgactcaggggggagccgctcaaagcttggtgccacccggtgccagcctggccacagaatcccggcaagaggccctgggggccgaacacaattctagcgcgctccttccatgcctgttgcccgatggtagcgatggttcagacgccttgaattgctcgcagccttctcctctcgacgtcggcgtgaaaaatacacagtcgcagggcaaaaccagcgcctgcgaagtaagtggcgacgtgaccgttgatgtgacaggcgttaatgcgttacagggaatggctgagccacgcagggagaatattagccacaacacccaggatatattgatccctaatgtgctgctgagtcaggaaaagaacgccgtcctcgggctgcccgtagctctgcaggacaaggcggttaccgatccgcagggcgtgggcacacctgaaatgattcccttggattgggagaagggaaaactcgagggagctgaccattcctgcactatgggtgacgcagaggaagcccagatcgatgatgaggctcacccagtcctgctccaaccggttgccaaagagttgcctacagacatggaactttctgcccacgatgatggggctcccgccggggttcgggaagtgatgcgcgcgcccccctctggacgggagcgcagtactccctcccttccgtgtatggtgtcagcccaggacgcgccccttccaaaaggagccgatttaatcgaagaagccgcctcaagaatagtcgacgccgtgattgaacaggtgaaggctgctggtgccctcttgaccgagggagaggcatgtcatatgtccctgtctagtccagagttgggtcccctgaccaagggactcgagtctgcatttacagagaaggtatcaacatttcctccaggcgaaagtttgcccatgggctccacacctgaggaggctaccggctccctcgctggctgtttcgccggccgagaggaaccagagaagatcattttgcctgtccaggggcctgaacctgctgctgagatgcctgacgtgaaggcagaggatgaggttgacttccgggcctcttccatctctgaagaggtcgccgtgggctctatcgctgccactctgaaaatgaagcaaggccccatgacccaagccataaaccgcgaaaactggtgtactatcgaaccttgccccgacgcagcttctcttttggcatccaaacagagtcccgaatgtgagaatttcctggacgtggggcttggccgcgaatgcactagtaaacagggcgtgctcaagcgggaatcagggtcagacagcgacttatttcactcaccctcagatgatatggattccatcatctttcctaaaccagaagaagagcatcttgcctgcgatatcactggatcttcgagctctactgatgacactgcatccttggatagacatagttcccacggtagtgatgtaagcctgagccagattcttaaacctaacaggtctcgggatcgacagtcactggacggattttattcgcacgggatgggagccgagggtagagagtctgaatcagaacccgcggatcccggagacgtcgaggaagaagaaatggattcaatcactgaggtgcccgccaattgctcagtacttagatcctctatgaggtcgttgtccccttttcgccgacactcttgggggcccggaaaaaacgcagccagcgacgcagaaatgaaccataggtcaatgtcatggtgtccatctggcgtgcaatacagcgcagggctgtccgcggacttcaactaccgatcattcagcttggaaggtctgacaggaggtgctggcgtgggcaataagccttctagtagcctggaagtttctagtgcaaacgccgaagagctgagacatcccttcagtggagaggagcgagttgatagtctcgtatctctatcggaagaagacctggagtccgatcaacgcgaacatcgcatgttcgatcagcagatctgtcacagaagcaagcaacagggctttaactattgcacttcagccatttcaagtccattgacaaaatctataagccttatgactattagccatccgggtcttgacaacagtcgcccctttcattcaacatttcacaacactagcgctaacctgacagagtctatcacagaggagaactacaattttctgccacacagcccctcgaagaaggatagtgagtggaagtccggcactaaggtttcaaggaccttttcatacattaaaaacaagatgtcgtcttctaaaaaatcaaaagagaaggaaaaggagaaggataaaatcaaggagaaagaaaaggattcaaaggacaaagaaaaggacaaaaaaaccgttaatggacacacattctctagtattcctgtggtgggccctatcagttgttctcagtgcatgaagccttttaccaataaggatgcctacacttgcgctaactgtagcgcttttgtgcacaagggctgcagggagtctctggcttcttgcgcaaaagtaaagatgaagcagccaaaagggtccctgcaggcgcacgacaccagctccctaccaactgtcataatgcggaacaaaccttcacagcctaaggaacgacctcgctcagccgttctgttggtggacgagaccgccactactccaatattcgcgaatcggagatctcagcagtcggtttcactcagcaagtccgtatcaatccaaaacatcaccggcgtaggcaatgacgaaaacatgagcaacacatggaagttcctttcccattcaaccgattctctgaataagattagtaaagtgaatgaaagtaccgaatcactgacagatgagggggtgggaacagacatgaacgagggtcagctgctgggggactttgaaattgagagcaagcaactcgaggcggaatcatggtccagaatcatcgactccaagttcctcaaacagcagaagaaagatgtcgtaaagcgacaggaagtgatatatgaactgatgcagacagaatttcaccacgtgcgtacactcaaaatcatgtccggagtctatagtcaaggtatgatggctgaccttctgtttgaacagcagatggtggaaaagctttttccttgtctggatgagctgatttcaattcacagccagttctttcagagaatcctcgagcgtaagaaagagtcactggtggacaagtcagagaaaaattttctgatcaagcgtattggggatgtgttagtcaatcagttcagcggagagaacgctgagcggcttaagaaaacgtacggcaagttctgcggacagcataaccagagtgtgaattatttcaaggacctgtacgccaaggataagagattccaggcctttgtgaagaaaaaaatgtccagctccgtggttcgtcgcctcggcattcctgagtgcatcttattggtgacccagagaatcacgaagtacccggtgctttttcagcggatcctgcagtgcacgaaagataatgaggtggagcaggaggacctggctcagagcctgtctttggtgaaagacgttattggggcggtcgattcaaaggttgccagttatgaaaaaaaggtgagattaaatgagatctacacaaagaccgacagtaagagcatcatgaggatgaagtcaggacagatgttcgccaaagaggacctgaagcgcaagaaattggtgcgagacggctccgtgtttctcaaaaatgcagctggccgcctcaaggaggtccaggctgtgctcctcactgacattctcgtcttccttcaggaaaaggaccagaagtacatctttgcgtctctagaccagaaaagcactgtgataagtttgaagaagctgattgtcagggaagtggcgcatgaggaaaaaggcttgtttcttatcagtatgggcatgaccgatccagaaatggttgaggtgcatgcctcgagtaaggaggaaagaaatagctggatacaaatcattcaggataccataaatactctgaatagagatgaagacgaggggatcccttcagagaatgaggaggaaaagaagatgttggatacacgggccagagaactgaaggagcagctgcatcaaaaagatcagaagattctgctgctactggaggaaaaagaaatgatcttcagagatatggcagagtgcagtacccctttaccagaagactgctctccaacacactccccacgggttctgtttcggagcaacaccgaggaggccctgaagggaggccctctgatgaagagcgcaatcaatgaagtcgaaatcctccaagggctggttagtggtaatctcgggggaaccctgggcccgactgtatcatcccctatcgagcaggatgtcgttggtccagtaagcctgccccggcgggccgagaccttcggcggctttgactcccatcagatgaacgctagcaaaggcggcgagaaagaggaaggcgacgacggccaggatttgcggcggaccgaatccgactctgggctgaagaaaggggggaatgccaacttggtgtttatgctgaaacggaatagcgagcaggtcgtccaatctgtagtgcacctgtacgaattgctgtctgccctccagggggtagtcttgcagcaagattcatacatcgaagaccagaaattagtgctgtcggagcgcgccctgacccgcagcctctcacggccctcctcccttattgaacaagaaaaacaaagaagcctggaaaagcagcgccaggacctggctaatctgcagaagcagcaggcccaatacctcgaagaaaaaagaagaagagagcgagaatgggaggctcgtgaacgagaactgagggagcgagaggccctcctggcacagcgcgaggaagaagtacaacaagggcagcaggacttagagaaggagagggaagagctccagcagaagaaagggacttatcagtatgacctcgagagactgcgggcagcacagaagcaacttgagcgagagcaggagcagctccgacgggaagctgagcgcctgtcacagcgccaaaccgaacgggacctatgccaagtgtcccatccacacacaaagctgatgagaattccctccttcttcccttcgcctgaggagcctccaagcccgagtgccccctctatagccaaatctggaagtctcgatagtgaattgagtgtctcgcctaagcgaaattccatcagcaggacccacaaggacaagggccccttccatatcctgtcctcaacgtctcagaccaataaagggcctgaaggccagtcccaggctcccgccagtacaagcgctagcaccagactgttcggtttgacaaaacccaaagagaaaaaagaaaagaagaaaaagaataagacatctcgctcccaacctggagatggtccagcaagcgaggtgagtgctgaaggcgaggagattttctgttag

SEQ ID NO: 167509 - DNA, 8451 bp, Artificial Sequence
  derived and/or modified sequence
aagctgctggagaagcagccccccatcgagggcgactgcgtggtgactgtgctactagctgaagaggacaaggcagaagacgacgtggtgttctacttggtttttctgggcagcactctccggcattgcacgagcacaaggaaagtgtctagcgatacactggaaacaattgctcctgggcacgactgctgtgagacagtaaaggtgcaactgtgtgcaagtaaagaaggcttgcccgtctttgtggtggccgaggaagacttccattttgtgcaggacgaggcttatgacgccgcccaattcctggccacaagcgctgggaatcaacaggccctaaacttcacaaggttccttgaccagtcagggccacctagtggggatgtgaattctctggataaaaaactggtgttggcgtttcggcacctcaagctccccaccgaatggaacgttttaggaactgaccagagcttacacgacgctgggcccagagagaccttgatgcattttgccgttcggctaggcctgctgagactaacttggttcctgttacagaagcctggcggaagaggggcactgtccattcacaaccaagagggtgcaactcccgttagcttggctctagagcgaggataccacaaacttcaccagctgctgaccgaagagaacgctggagagccggattcctggtcatctctgtcctacgagatcccatatggcgactgctctgtgcgccaccaccgagaactggacatttacactttgacgtcagaatctgattctcaccatgaacaccccttccctggagacggttgcacaggcccaatcttcaaattaatgaacatacagcagcagctgatgaagaccaatttgaaacaaatggactccctgatgccactgatgatgacagcccaggacccttcttctgcacctgaaacagatggccagtttttaccctgcgctcctgaaccgacagaccctcaacgtttgagtagctcagaagagactgagtccacacagtgctgtccaggatcgccggtcgcgcagacggagtccccttgcgacctgtccagcatcgtggaggaggagaataccgatcgctcctgccgcaagaagaacaagggagtcgagcggaaaggcgaagaagtcgaacctgccccgatcgtggacagcggcaccgtatcggaccaggactcatgccttcagagcttgcccgactgtggtgtgaaaggcaccgaaggtctctcttcctgcggaaaccggaatgaagagaccggcacaaaaagcagtggtatgccaaccgatcaggaaagtctatcatcgggcgacgccgtgcttcagagggatctggtgatggaacctggtaccgctcagtatagtagtggcggcgagctgggaggaatttctacaacaaatgtatccacgcccgatacagctggggaaatggaacacggcctcatgaatccagacgctacagtgtggaagaatgtactacagggcggcgagtctactaaagaacggttcgaaaacagtaatatcggcaccgctggcgcttcggatgtccacgttacgtcaaagccagttgataagatcagcgtccccaattgcgcccccgcggcttcatctttagacggaaataagcctgcggaatctagcttagcattttctaatgaggagacttctacggagaagaccgcagagacagagacttccagaagcagggaggaatccgccgacgcccctgtggatcaaaactcagtggttatcccagctgccgccaaagacaagatctccgatggcctagagccttacactttgctggctgccggaatcggagaagctatgtctccttcagatctggcactgctagggctagaagaggacgtcatgccgcatcagaattccgaaaccaacagcagccatgcccagagtcagaagggcaaatccagccctatttgttctaccactggagatgataagttatgcgccgattctgcttgtcagcagaataccgtcacctcgtctggggacctggttgcgaaactgtgcgacaatatcgtgtctgagtctgaaagcaccacggcacgccagccttcatcccaggatcccccagacgcctcccactgcgaagacccccaggcccataccgttactagcgatccagtgcgcgacacgcaagaaagggcggacttttgtcctttcaaagtagtggacaacaaaggtcagcgcaaggatgtcaaactggataagcccctcactaatatgcttgaggtggtctcacatccacatccagtggtgccaaagatggagaaggagctggtccccgaccaggccgtcatttccgactcaactttcagtctcgcgaacagccctgggtccgagtccgtcaccaaggatgacgcgctgtctttcgtaccatcccagaaagagaaaggaaccgctaccccagaattacacacagcaactgattacagggatgggcctgacgggaatagtaatgagcctgacacccggccccttgaggacagagcagtgggtctgtctaccagttcaacagccgctgagcttcaacatgggatgggcaacacctccctgacgggactgggcggtgagcacgaggggccagcccctccagccatcccggaggccttgaacattaagggaaacacggactcttctttgcagagtgtgggcaaggccacactggcgttagactccgtgctgaccgaagaaggtaagctactggtcgtctcagaatcctccgccgcccaggaacaagataaggacaaggcagtgacttgtagttccatcaaggagaatgctctgagttcaggcaccttgcaagaagaacagaggacacctccccccggacaggacacacagcaattccacgagaagtcaatcagcgcagactgcgccaaggataaagctctgcagctgtcaaactcacccggggcctcgagtgcctttctgaaggctgaaaccgaacataacaaggaagtggccccgcaggtcagtctcttgactcaggggggcgccgctcagagcttggtccccccaggtgctagcctggccaccgaatcccggcaggaagctcttggcgcagagcacaactcatccgctctgcttccttgtcttcttccagatggcagcgacggttctgacgccttgaactgttcacaaccttccccgttagacgttggtgtgaagaacactcagagccaagggaagacaagcgcctgcgaggtgtccggcgacgtcacagtggacgtcactggggtgaatgcacttcagggaatggctgagcctagacgcgaaaacatcagccataatacacaggacattctcattccaaacgtgctcttgtcccaggaaaaaaatgcagtattagggttgcccgttgccctccaggataaggctgtcaccgacccacaaggggtgggcacccctgaaatgatccccctcgactgggagaaagggaaactagaaggagcagaccattcttgcacgatgggtgatgccgaagaagcccagattgatgacgaggcccacccagtgctcttgcagcctgtcgctaaggagctaccaaccgacatggagctttccgctcatgacgacggggcacccgccggggtgagggaggtgatgagagccccacctagcggaagagagaggtccaccccttccctcccttgtatggtgtccgcacaggacgctcctctcccgaaaggtgcagatcttattgaagaagcggcctctagaatcgtcgacgccgtcattgagcaggtgaaggccgccggcgccctgctgacggagggcgaggcgtgccacatgtcgctgagcagcccagaactgggccccctgaccaagggactggaatcagcatttactgagaaagttagtacctttccccctggagagtccctcccaatgggcagcactccggaagaggcaaccgggagtctggcgggctgcttcgctggccgtgaagagcccgaaaagattattctgcctgtacaggggcctgagccagccgcggagatgcctgacgtcaaggctgaggacgaagttgatttccgtgcctcatcgatcagcgaggaggtggcggtggggtctatcgccgccacgctgaagatgaaacagggacctatgacgcaagccatcaatcgcgagaattggtgtaccattgagccctgcccagacgccgcatctctcctggcctcaaagcagtcccccgagtgcgagaacttcctcgatgtgggtttgggcagagaatgcacttccaagcagggagtcctcaagcgggaatctggctctgacagcgatctctttcactctccatcagatgatatggacagcataatctttcccaagcctgaggaggaacacctggcatgcgatatcacggggtcgtccagtagtaccgacgacaccgcctctctcgacagacactcatcccacggctccgacgtgtctctttctcagatcctgaaaccaaatcgcagccgcgacaggcagtccctggacggcttttactcacatggaatgggggctgagggccgcgaatcagagagcgaaccggccgatcccggcgacgtcgaggaagaggagatggattctataacagaggttccagctaactgttctgtgcttagaagcagcatgcggagcctatcccctttccgacgacacagttggggccccggtaagaatgccgcatccgacgctgagatgaatcaccgctcaatgtcctggtgccctagtggcgtgcaatactccgctggactctccgccgacttcaattatcgctccttctcactggaaggcctgaccggaggcgcaggtgttgggaacaaaccgagttctagcctggaggtaagctcagcgaatgcagaggagttgcgccacccattcagcggcgaagaacgcgtagactccctggtaagcctctctgaagaggacttggagtcggaccagagagagcatcgcatgtttgaccagcagatttgccaccgttctaagcagcagggattcaactattgcacctccgcaatcagctcacctttaaccaaaagcattagcctgatgaccatctcccaccccggactcgacaatagccgccctttccattccactttccacaacacaagtgctaacttgaccgaaagcattacagaagaaaactataattttcttcctcactccccgagtaagaaagatagcgaatggaaatctggaaccaaggtgagccgtacgttctcctacataaaaaacaaaatgagttccagcaagaaaagtaaagaaaaagaaaaggagaaggataagattaaagagaaggagaaggactccaaagacaaagaaaaggataagaaaaccgtgaatggtcatacctttagtagcatccccgtggtgggccccatctcctgctcccagtgtatgaaaccatttaccaacaaagacgcctatacatgtgccaactgttcagcatttgttcacaaaggctgtcgtgagtcactcgcatcatgtgctaaggtgaaaatgaaacaaccaaaaggcagcctgcaggcccacgacaccagttctctgcctaccgtcattatgcggaacaaacccagtcagcccaaggagagaccccgctctgcagtcctgctagtggacgaaacagccacaacaccgatattcgccaaccgccgctctcagcagtctgtgagcctgtctaaaagcgtgagtattcaaaatatcaccggcgtggggaacgacgagaatatgtctaatacatggaagtttttgtcgcactcaactgactctcttaataagatcagcaaggttaatgaaagtaccgaatccttgactgacgagggcgtgggcactgatatgaatgagggccagctactgggcgacttcgaaatcgaatccaaacagctggaggccgaaagctggtcacgcattattgacagcaaatttctcaaacagcagaaaaaagatgttgtgaagaggcaggaagtaatctacgaactaatgcagacggaattccaccacgtgagaactctcaagattatgtctggggtatacagccagggaatgatggccgatctgctcttcgaacagcaaatggttgaaaagctgttcccttgtctggatgaactcatcagcattcactcacaattctttcagcgaatcttggaacgaaagaaagaaagcctggtcgacaaaagtgagaagaacttccttatcaaaagaattggcgacgtgttggtaaaccaatttagtggagaaaatgctgaaagactgaagaagacttatggcaagttttgtggacagcacaaccagtcggtcaattatttcaaagatctgtatgcaaaagacaagaggttccaggcttttgttaaaaagaaaatgagctcttccgtggtccgaaggttaggcattcccgagtgcattctactcgtgactcaacgcattacaaagtatcccgtgctgtttcagaggattttgcaatgtacgaaggacaatgaggtcgaacaggaagatttagcccagtctctgtcccttgttaaggacgtgataggtgcagtggacagcaaggtggcctcttatgagaagaaagttagattgaatgaaatatatacaaagaccgattctaagtccattatgaggatgaagtccggccagatgttcgccaaagaggatcttaagagaaagaaattagtgagggacggcagtgtttttttaaaaaatgccgcaggacggctcaaggaagtgcaggcagtgctcctgaccgatattctggtgttcctgcaggaaaaagaccagaagtacatatttgcatccctggaccagaagtcaaccgtgatatcattgaaaaagctgatagtccgcgaagtggctcacgaagagaaaggcctgttcctcatctcgatgggcatgaccgatccggagatggtcgaggtgcacgcatctagcaaagaggagagaaatagttggatccagatcatccaagatacaattaatactctcaaccgcgacgaggatgaggggattcctagtgaaaacgaagaggaaaaaaagatgctcgacacacgggctcgcgaactaaaagagcagctgcaccaaaaggatcagaagattctgctgctgctcgaagagaaggaaatgatatttcgagatatggccgagtgcagcacaccgcttcctgaggattgctcccctacgcatagcccgagagtgctgttcagatccaacaccgaagaagccctgaaagggggaccactgatgaaatccgccattaatgaagtggaaattttgcagggcctggtttctggcaacctgggagggactctgggacccactgttagttctccaattgaacaggatgtggtggggcccgtgtctctgccccggagagcagagacctttggcggtttcgactcgcatcagatgaacgctagtaaaggcggcgaaaaggaggaaggcgacgatggtcaagatctgcgtcgaacagaaagcgacagtggcctaaagaaagggggcaacgctaatctggtgtttatgctgaagcggaacagtgagcaagtggtccaatctgttgtacacttatacgaactcctgtctgcattgcaaggggtagtcctacagcaggattcttatatagaggaccagaaactcgtactttcggaaagagcacttaccagatcgctgtctagaccctccagcctgatagagcaggagaagcaacggagtttggaaaaacaacgtcaagaccttgccaacctgcaaaagcaacaggcccagtaccttgaagagaagaggcgtagagaacgggaatgggaggctcgcgaacgcgagctaagagagagagaagcattactggcacaaagagaggaagaggtgcaacagggacagcaagacttggaaaaggaacgggaggagctgcagcaaaagaaggggacgtatcagtatgacctggaacggctgagagctgcacagaagcaacttgaacgcgaacaagagcagctgagaagggaagctgagcggctctcccagcgtcagactgagcgcgatctgtgccaggtctcccacccacacaccaaattgatgcgtataccctccttcttcccctcacccgaggagcccccgtcccccagcgccccgtctatcgcgaagtccggctcactggacagcgaactaagcgtgtcacctaaaaggaattcaataagcaggacgcacaaagataagggcccatttcacatcctgtcttctactagccagacaaacaaggggcctgaaggtcagagtcaagcccccgctagtacatcagcgtctactcgcttattcggtttgactaagcctaaggagaaaaaagagaagaagaaaaagaacaagactagccgctctcagccaggtgacggcccggcgagcgaagtttctgctgagggcgaagagatcttttgttag

SEQ ID NO: 167510 - DNA, 828 bp, Artificial Sequence
  derived and/or modified sequence
cccagcgacgacatggacagcatcatcttccccaagcccgaggaggagcatttagcttgtgacatcacaggatcctcaagcagcacggatgacacggcttctttggacagacattcttctcacggttctgacgtgagtctgagccagattcttaagcctaataggtcaagagacagacaatccttagatggcttttactctcatggaatgggagcagaagggcgggagtccgaatctgaacccgcagatcccggcgatgtggaagaagaggagatggactctattactgaggttcccgccaactgtagcgtcctcagatcctccatgcggtccctgagccccttccggagacacagctgggggcctgggaagaacgctgcctctgacgccgagatgaatcatcgaagctctatgagggtgctcggagacgtggtacggcgcccccccatccataggcgcagcatgtcttggtgtccctctggagtgcagtattcagccggcttgagcgctgacttcaactatcggtcattttccctagaagggctgacaggcggggcgggcgttggaaataaaccaagtagttccctcgaggtaagctcagccaatgcagaggaactccgacatcccttctccggggaagaacgtgtggatagcctggtgtctttgagcgaggaggatctggagtcggaccaacgtgagcaccggatgttcgaccagcagatctgtcaccgctcgaagcagcaaggcttcaactactgcacctccgccatctcatcaccgttaactaaatccattagcctcatgaccatcagtcacccaggcctctag

SEQ ID NO: 167511 - DNA, 117 bp, Artificial Sequence
  derived and/or modified sequence
atgaagctgaacccccagcaggcccccctgtacggcgactgcgtggttaccgtcttgttagcagaagaggataaggccgaagacgatgtggtgttctatctggtgttcctgggctag

SEQ ID NO: 167512 - DNA, 540 bp, Artificial Sequence
  derived and/or modified sequence
atgaagctgaacccccagcaggcccccctgtacggcgactgcgtggttacggtgttgctcgctgaagaagataaggccgaagatgatgtggttttctacttggtttttctgggatcaacacttcgacattgcactagcaccagaaaagtgtcctcggatacattagagactatcgctccaggtcatgattgctgcgagacggttaaggttcagctgtgcgcctctaaggaaggacttccggtttttgtggtagctgaagaagactttcactttgttcaggacgaagcttatgatgcggcccagtttctggcaacctctgctggcaaccagcaggctctgaactttacccgatttttggaccagtcaggaccaccgagcggagatgtgaacagtttggataagaaactagttcttgcttttagacatttgaagctccccaccgagtggaatgtgctcgggacggaccaatccctgcatggcgaaaatttatatgacctgcagacccatttcaagtttgtcatctttctcctgttcttttag

SEQ ID NO: 167513 - DNA, 8453 bp, Artificial Sequence
  derived and/or modified sequence
atgaagctgaatccccagcaagcaccactgtatggcgattgtgtcgtgacagtgctgctcgcggaagaggacaaggctgaggacgacgtggtgttctacctggtgttcctaggatcaacactgagacattgcacttcaacgcgtaaagtgtccagtgacacgttggagaccatcgctccaggccacgattgctgtgaaaccgtgaaggttcagctgtgtgcctccaaggagggactcccggtgtttgtcgttgctgaggaggatttccatttcgtgcaggatgaggcatatgacgcagcccagttcctggccacgtccgccggtaaccagcaagccctaaactttactaggttcctggaccagagtgggccaccgtctggtgacgttaactctctcgataagaaacttgtcctggcgttcagacacctgaagctgccaaccgaatggaacgtccttggtaccgatcagagcctccatgacgccggtccgagggagactctaatgcacttcgcagttaggcttgggttacttcggttgacctggttcctgctgcagaagcctggaggccgaggggctcttagtatccataaccaggagggtgcaacacctgtgtcactggcactcgagcgagggtaccataagctccatcagctccttaccgaggaaaatgcaggagaacccgacagctggtcctcactgtcatacgagatcccctatggggactgctcagtcagacatcatcgagagttagacatctatacattgacttccgagagtgactcccaccacgaacacccattcccaggggatggctgcaccggcccaatttttaaactgatgaatatccagcaacagcttatgaaaaccaatcttaagcagatggactcgctgatgcctttgatgatgacggcccaggacccatcatccgcgccagagacagacggacagttccttccctgcgctcctgagcctacagaccctcagcgtttgtcgagcagcgaggagaccgaatctactcagtgctgcccaggatcccccgttgctcaaacagagagcccatgtgatcttagcagtattgtggaagaggaaaatacggacaggtcttgcagaaagaaaaataagggggtagagcgaaagggtgaggaagttgaaccagccccaattgtggactctggcacagttagtgatcaggacagctgcctccagtctctgcccgattgtggagtcaaggggaccgagggactgagcagctgcggcaatcgaaacgaggagaccggcaccaagtcttcaggcatgcctacggaccaagaatcattgtcctctggtgatgccgtcttacagcgcgacctagtgatggaacctggcactgcccagtacagcagcggtggagagttaggaggaatctctaccacaaatgtgtccacaccagatactgcaggtgagatggaacacgggttgatgaatccagacgccacagtgtggaagaacgttctacaggggggtgagagcaccaaagaacggttcgagaactccaacatcggtacagcgggagccagtgacgtgcacgtgacctccaagcctgttgataaaatcagtgtgcccaattgtgctccggctgctagctctctggatggaaataaacctgccgaatcaagcctggcttttagcaacgaggaaacgtccaccgagaaaaccgcagagacggagacaagtcgttctagagaagagagtgccgatgcacccgtggaccagaatagcgtcgtgatacctgcagcagctaaggacaaaatatctgacggccttgagccctacactctacttgctgcgggaatcggcgaggcgatgtcgcctagtgacctggctctgcttgggcttgaggaggacgtcatgccacaccagaattcagagacgaacagcagtcatgcacagagtcaaaaagggaaatcttcacctatctgtagcaccaccggcgacgacaagctctgcgccgattccgcttgtcagcagaatactgtaacaagttccggagatctggtcgccaagttatgcgacaacatcgtctcagagagcgaaagcacaactgccagacagccttcgtctcaggatcctcctgatgcttcacactgcgaggatccgcaggcacacactgtaaccagcgatccagttcgggatacccaagaacgcgctgacttttgccctttcaaggttgtagacaataaggggcaaaggaaggacgtgaaactggataaacctctgacaaatatgctcgaagtggtgtcccacccccatcccgtcgtgcccaaaatggaaaaggagctggttcccgaccaagcagtgatttcagatagtacattttcgctggcgaattcgcctggatcagagtctgttaccaaggacgatgccctgtccttcgtgccatctcagaaggaaaaagggactgccacccccgagctccatactgccacggattacagggacggtcccgacggtaatagcaacgagcctgataccaggccactagaggaccgcgctgtgggccttagcacatcctccaccgccgcagaactccagcatggcatgggaaacactagtcttacaggcctgggcggagagcatgaaggtcccgctcctccggcaataccagaggctcttaacattaagggaaacactgactcatcgctgcagagtgtaggaaaagctactcttgccctggactccgtgctcactgaggagggcaagctgttagtggtgagcgaaagcagcgctgcccaagagcaggataaagataaggcggtgacctgttccagtataaaggaaaacgccctgagttccggaaccttgcaggaagagcaaagaactccaccacctggacaggatacccagcaattccatgagaaaagcatttcagcagattgtgccaaggacaaggccctccagctgagcaacagccctggagcctcatccgctttcctgaaagccgagaccgagcacaataaagaggtcgctccacaggtctccttattgacacagggaggtgccgctcagagtctcgtccccccaggcgctagcttggcaacggaatctcggcaggaagcactcggtgccgaacacaatagtagcgcactcctgccttgcctgctgccagacggcagcgacgggtccgatgctctcaattgttcacagccttctccattagatgtgggcgtgaaaaacacacaaagtcaagggaaaacctccgcatgcgaggtttccggtgacgtcacagtcgacgttaccggagtgaatgcattgcagggaatggcagaacccaggagggaaaatatttcccacaacactcaggacattctgatcccaaacgtgctcctgtcacaggagaagaacgccgtgctggggctgccagttgctctgcaggacaaggctgtgacagacccccaaggcgttggcacacccgagatgatccctttggattgggaaaagggcaaattagaaggggcagatcactcctgtacaatgggcgacgcagaggaggcacagatcgacgacgaggcccaccccgtcctgcttcagcccgtggccaaggagctgccaacagatatggaactgtctgctcatgacgacggcgctcccgctggtgtgcgcgaggtgatgagggccccaccgtctgggagggagcgcagcactccgtctctgccgtgcatggtgagtgctcaggacgcacccctaccaaagggtgccgacctaatcgaagaagccgcttcgcggatcgtggacgcggtgattgagcaagtcaaggcggcaggggctttgttgacagaaggagaagcttgtcacatgtcactatcctcccccgagctcggacctttgacaaagggtctggagtctgcctttactgagaaagtgtcaacttttcctcctggcgaatccctgcctatgggctccaccccggaagaggccacaggatctctggctggttgtttcgccggaagagaggagccagaaaaaatcatccttcccgtccagggacctgaacctgctgccgagatgcctgacgtgaaggcggaggacgaggtcgactttcgggcatcatctatttcggaggaagtcgcagttgggagtatagctgcaaccctgaagatgaagcagggcccaatgactcaggctatcaatagagagaattggtgcaccatcgaaccatgtcctgatgcagcctcccttctagcttccaagcagagcccagaatgcgaaaatttcctggacgttggacttggcagggagtgcacatcaaagcagggagtgctgaaacgggaatctggttctgattcggatctattccactcccccagcgacgatatggattctatcatcttccccaaacccgaagaggagcatttggcctgtgacatcaccgggagctcctcctccactgatgacacagcttcactagataggcacagttctcacgggtcagacgtgagcctttcacaaatactaaagccaaatcggtccagggatagacagagcctggacgggttctacagccacgggatgggagccgaaggacgggaaagcgaaagcgaacccgctgatcctggagatgttgaggaggaggagatggatagcatcacggaggtgccagcaaactgcagcgtgctaaggtcttccatgagatccctgtctccatttagacgtcacagttggggccctggaaaaaatgccgcttcggatgccgagatgaaccacagatcaatgtcctggtgccctagtggcgtgcagtacagcgcagggctttcagcagattttaactataggtctttcagtctcgaaggtttgaccggaggcgctggtgttggtaataaaccatccagctctctcgaagttagtagcgcaaacgccgaagagctgcggcatcctttctccggcgaggagagagtcgactccctggtgagcctttctgaagaagatttggagtccgaccaacgagaacatcgaatgttcgatcagcaaatatgccacagaagcaaacagcagggattcaattactgcacctctgctatctccagccccctgacgaagtcaatttcgcttatgacaatctcccatcccggactcgataacagcagaccctttcactcgacgtttcacaatacctccgcgaacctcaccgagtccatcaccgaggagaattataattttctgccacactctccatctaaaaaggatagtgagtggaagtccggaaccaaagtatcccgaacctttagttacattaagaacaaaatgtcctctagtaagaaatcgaaagaaaaagagaaagagaaagacaagattaaggagaaggagaaggactccaaggacaaagaaaaggacaagaagactgttaacggacacaccttcagctcaatcccagtagttggcccaatttcctgctctcagtgtatgaagccattcacaaataaggacgcatatacatgcgccaactgttcagcctttgtgcacaaggggtgcagggagagtctggcctcatgtgctaaggtgaaaatgaagcagcctaagggatcgctccaggcccatgacaccagtagccttcccaccgtgattatgaggaacaaaccctcacagccgaaagagaggcctcggagtgccgtgttgctcgttgacgaaactgccacaacacccatctttgccaatcggaggagccagcagtctgtctctctttccaagagcgtgagtattcagaacatcactggagtagggaacgacgaaaatatgagtaatacctggaaatttctgtctcactccacagattctctgaataagatctcaaaagtaaacgagtctacagaaagtctgaccgacgaaggcgtcggaactgatatgaacgaaggacagctcctgggcgactttgaaatcgagtccaaacaactggaagcagaatcttggtccagaatcatcgatagtaagttcctgaaacaacagaaaaaagacgtggtgaaaagacaagaagttatctatgagctgatgcaaactgagtttcaccatgtacgcacgctgaagatcatgtccggagtctactctcaggggatgatggctgatttattgttcgagcagcaaatggtcgaaaagctgttcccatgccttgatgaacttatctctatacacagtcagtttttccagagaatcctggaaaggaaaaaagagtcattagtggacaagagtgaaaaaaatttcttgattaagcgcattggggacgtgctcgtgaatcagttttctggtgagaatgccgagaggcttaagaagacctatgggaagttctgtggccagcacaatcagagtgtgaactattttaaggatctctacgccaaagacaagcgcttccaggcctttgttaaaaagaagatgtcgagctccgtcgtgcgccgacttggcatacctgagtgcatcctccttgtgacacagagaattaccaaatacccagttctctttcagagaattcttcagtgcacaaaggacaatgaggttgagcaagaggacctggctcagtcactttcactggtgaaggacgtgatcggagcggtcgattctaaggtggcgagctatgagaagaaggtgagactcaacgagatctatacaaagactgattccaaatcgattatgaggatgaaatcagggcaaatgttcgcaaaggaagatctgaagagaaagaaactggtgagggatggctccgttttcctcaagaatgccgcaggacgcctgaaagaggtgcaggctgtgttactgacagatattctggtgttcctgcaggagaaggaccagaaatacatattcgcctcactggatcagaagtccacggtaatttccctgaagaaacttatcgtccgcgaggtagcccacgaggagaaaggcctgtttttaataagcatgggaatgaccgatccagaaatggtcgaagtacacgcatctagtaaggaggagcgcaacagctggatccagatcatccaggacacaatcaacacactgaaccgcgacgaggatgagggaataccttccgagaacgaggaggaaaagaagatgctggatacgcgcgctcgagaattgaaagagcagctgcatcagaaagaccagaaaattctgctccttctggaggagaaagagatgatatttagagatatggccgagtgcagcactcccttgccagaagattgctcgcctacgcattctccccgagtactttttcgatctaacaccgaggaggctctgaagggaggccctctcatgaagagtgcaattaatgaggtggagattctgcagggtctggtgtctgggaaccttggcggaacgctcggacccaccgtgtcaagccctatagaacaggatgtggttggcccagtgagcctcccacgtagggccgagaccttcggcggattcgacagtcatcaaatgaacgcttcaaagggaggagagaaggaggagggggacgacggccaggacttacggcgaacagaaagcgattctgggttgaaaaaaggcggtaacgcaaacctcgtctttatgctgaagcggaatagcgagcaggttgttcagagtgttgtacacctgtacgagctgctgtcagctctccagggagtcgtgctacaacaggactcatatattgaagaccagaaactggtcttgagcgagcgggctttgacacgctccctgagtagaccctcctcccttattgagcaggagaagcagaggtctctcgagaagcaaagacaggacctggccaatctccagaaacagcaagcccagtacctcgaagagaagcggcgtcgcgaaagagaatgggaagcgcgagagagagagctgcgtgagcgcgaggccctgttggctcagagagaagaggaagtgcagcaaggccagcaggacctggagaaggaacgggaagagctccagcaaaaaaaaggaacataccaatatgacttggaacggctcagggccgcacagaaacagctcgagcgcgagcaggagcagcttaggcgagaagccgagcggttaagtcagcgacaaaccgagcgagatctgtgccaggtgtcacatccccacacaaagctcatgcgaatccccagttttttcccaagccccgaggaaccgcctagcccctcagcaccctcaattgccaagtcaggttccctcgacagtgaattatctgtgtctcctaagagaaacagcatatccagaactcataaggacaaaggccctttccacatactgagttctactagccaaaccaacaaaggcccagagggtcaatcccaggccccagcctctacatctgcctccactagactatttggactgactaagccaaaagagaagaaggagaagaaaaagaaaaacaaaactagtcggtcccagccaggcgatggtcccgcttctgaggtttctgctgaaggtgaggaaattttttgcta

SEQ ID NO: 167514 - DNA, 8450 bp, Artificial Sequence
  derived and/or modified sequence
aaactgcttgaaaagcagcccccaatcgagggcgattgcgtagtgacagtacttctcgctgaggaggacaaagctgaagatgacgtcgtgttctatttggtgtttctcgggagcactctccgccattgtacctccacacggaaggtttccagcgataccctcgaaacaatcgctccaggccacgactgctgtgaaactgtcaaggtccaattgtgtgcctcaaaagagggcctccctgtgtttgttgtcgcagaagaggatttccattttgtccaggacgaggcgtatgacgccgctcagtttctagcaacttccgcagggaaccaacaggcacttaactttacacggtttctagaccagtctgggccaccttcgggagatgtaaactcattggataagaagttggtcctggccttccgccatcttaaactccccactgagtggaacgtgttgggtaccgaccaatccttgcacgacgccggtccaagggaaactctgatgcatttcgctgtaaggctgggactcctcaggcttacctggttcctgctgcagaagccaggtggcagaggtgcactatccatacataaccaagaaggggcaacgcctgttagccttgcgctggaacgcggataccacaaattgcaccagctgctcactgaagaaaacgcgggagagcctgactcttggtccagtctgagctacgagatcccatacggcgattgttctgtgcggcatcaccgcgagttggatatttacacgctcacatcagaatccgattcccaccacgagcacccattccccggtgacggctgtaccggccctattttcaagctgatgaatattcaacagcagcttatgaagacaaacttaaaacagatggattctctcatgcccctaatgatgaccgctcaggacccctctagcgcccctgagaccgacggccaatttctgccatgtgcccctgagcctaccgacccacagaggcttagctcttccgaggagacagagtctacacagtgttgcccaggatctcctgtggcacagacagagagtccctgcgacttgagcagcattgtggaggaggagaacaccgatcggtcatgtaggaaaaagaataagggtgtcgagcggaaaggcgaggaggtagaaccagcgccaattgtggattctgggaccgtgtccgaccaggatagctgcctgcaaagtctgccagattgtggagtcaagggcactgaaggcctttcctcctgcgggaacaggaacgaagaaacgggtacaaagtccagcggaatgcctacagatcaggaatcccttagcagcggggatgcagtcctgcagcgtgacctggtgatggagcccggaaccgcacaatattccagcgggggagagctgggaggaatttcaaccaccaacgtcagcactcctgatacggccggtgagatggagcatgggttaatgaacccagacgctactgtttggaagaacgtgttacaggggggtgaatctacgaaggagcgcttcgagaattctaacatcggaactgccggagcgagtgatgtgcacgtcacctcaaagccagttgataaaatctctgtgcccaactgtgcaccggctgcttcaagcctcgacggcaacaaaccagcggaatcctccctcgcgttcagcaacgaggagacgtctactgagaaaactgctgagaccgagacgtctcgctcaagagaggagtcagctgatgcccctgttgaccagaactcagtggttatacccgcagctgctaaagataaaatttcagatgggctcgaaccttataccttactggccgcaggcattggggaagccatgagtccctcggatctggccctgctaggcctggaggaagatgtaatgcctcaccaaaattccgagacgaacagctctcacgctcagtctcaaaagggcaaatcctcacccatctgttccacaactggcgatgacaagttgtgcgccgactccgcgtgccagcagaacactgtcactagcagcggagatctggtggccaaactctgcgataatatcgtctcggaaagcgagtccacaacagccagacagccgtcatcacaggatccccctgacgcttctcactgcgaggatcctcaggcacataccgtaacaagtgaccccgttcgcgatacccaggagagggccgatttctgtcccttcaaggttgtggacaacaagggtcagagaaaggacgttaaactggataaaccattgaccaatatgcttgaggtcgtatctcatccacatcctgtggttccgaaaatggagaaagagctcgtgccagaccaggcagtaatatccgatagcacgttttccctagcgaattccccaggcagcgaaagtgtgacaaaagatgatgcactgtcttttgtgcccagccaaaaagaaaaaggaaccgcaacccctgagctgcatactgccaccgattatcgggacggacccgacgggaactctaatgaacccgataccaggcccctggaggacagagccgtgggcttaagtaccagttccaccgccgcagaactgcagcacggaatgggaaacacttccctgaccggactgggcggtgagcatgaaggaccagcacctcctgccattccagaggcgctaaacattaagggtaataccgactcaagcttacagtcagtgggcaaagccactctcgctctcgactctgtgctcacagaagagggcaaactgctggtcgtcagcgagtcctctgcagcccaggaacaggataaagataaagccgttacttgttcatcaatcaaagagaacgccctatccagcggaaccttacaggaggaacagcggaccccaccccctggtcaggatactcagcagttccatgagaaatccatttcagccgattgtgctaaggataaggctctccagctgagcaatagtccaggcgcaagttctgcattcctgaaggcagagactgaacacaacaaagaagtggcccctcaagtgagcctgcttacccagggcggagcagcccagtccttggtgcctcctggcgctagcctcgctactgagagccgacaggaagctctgggagcggagcataactcctctgctctgctaccctgcctgcttcctgatggttctgatggaagcgacgcccttaactgctcccagccttcccccctggacgtgggcgttaagaacactcagtcccagggcaaaacaagtgcttgcgaggtgtccggggatgtcactgtggatgtgaccggcgttaacgcacttcaggggatggccgagcccagacgggagaacatttctcataatacccaggatattttaatacccaatgttctactgagccaggagaagaatgcagtgctggggctgcctgttgcattgcaggacaaagcagttaccgatcctcagggggtgggtacccccgagatgattccactcgactgggaaaagggaaaacttgagggcgctgatcactcttgtaccatgggcgatgcagaggaggcccaaattgacgatgaggcacacccagttttgctccagcctgtggctaaagagctccccaccgacatggagctcagcgcccacgatgacggagcccctgctggcgtgcgagaggttatgagggcccctccatccggaagagaaaggagcaccccttccctcccgtgtatggtctcagcccaggatgctccgctgccaaaaggggcagatctcatcgaagaagctgcctctcgcatcgtggacgcagtcatagagcaagttaaggctgccggtgcactgctcacggagggggaagcgtgtcacatgtctctatctagcccagaactgggcccattgacaaaagggctggagtccgccttcaccgaaaaggtgtcaacttttccacccggagagtctctccccatgggctccacccctgaggaagcgaccggctcactggccggttgttttgccggtcgcgaagaaccagagaagatcatcctgccggtccagggacccgaacccgctgctgagatgcctgacgtgaaggccgaggatgaagtggacttcagggccagcagtattagcgaggaggtggctgtgggatccatagcagccaccctcaagatgaaacaggggccaatgacacaggctataaacagggaaaattggtgcaccatagagccatgccccgacgctgcttctttactggcttctaagcagagccccgagtgtgaaaatttcctggacgttggcctgggccgagagtgcacgtcaaaacagggggtacttaagagagaatctggttctgactccgatctgttccactcgccatccgatgatatggattccataattttccctaagccggaagaggagcacctggcctgtgatatcacaggcagctcttcgtccacggatgacaccgccagcctggataggcacagttcgcacgggtctgatgtttcactgtcccagatcttgaaaccaaatcggagtcgggataggcagtctctagatggtttctattcccatggcatgggcgcagagggtcgggagtctgaaagtgagcctgcagacccgggtgatgtggaagaagaagagatggacagcatcacagaggtgccggcaaattgctcagttctgaggtccagtatgcggtcattgtcccctttcaggcgacactcatggggccctggcaagaatgcggcttctgatgcggaaatgaatcaccgaagcatgtcatggtgtccatctggggtgcagtactccgccggactttccgccgactttaattatcggtctttcagccttgagggcctgacagggggagccggagtcggtaacaagcctagctccagccttgaagtttcgagtgccaacgcagaggaactgcgccacccgttctccggagaggagagggtagattcactggttagtcttagcgaagaagatttagagtcggaccagagagagcacaggatgttcgatcagcagatttgccatagatccaaacagcagggatttaattactgtacgagtgctatctcttccccgctcacaaagagtatatccctgatgaccattagtcacccagggttagataactctaggccttttcatagtacattccacaatacatccgctaatctaactgagtctatcactgaagagaactataattttttgccccactctccttccaagaaagattctgaatggaaaagtggaaccaaggtatcaagaactttcagctatatcaagaacaagatgagctcctcgaaaaagtccaaggaaaaggaaaaagagaaagataaaataaaggaaaaagaaaaggattccaaggacaaggagaaggacaagaagacggttaatggccacacattctccagcatcccagtggtcggtcctatcagttgtagtcagtgtatgaagcctttcaccaataaagacgcttatacatgcgctaactgttccgcctttgttcacaagggctgtagagagagcctcgcatcctgcgcaaaagtcaagatgaagcagcccaaggggtctctgcaggcccatgacacgtcctctctgcctacggttattatgcgaaataaaccatctcagccaaaagagcggccaaggtccgccgttctgcttgtggatgaaacagccaccacgccaattttcgctaataggcgctcccagcagtcagttagcctaagcaagtcggtgagcattcagaacataaccggagttggtaacgacgaaaatatgtcgaacacctggaagttcctttcacacagtactgacagcctgaataagattagcaaggtaaacgagtctacggagtccctgactgacgaaggcgttgggaccgatatgaacgagggacagcttttgggggacttcgaaattgaaagcaagcagttggaagcagaatcatggtctcggattatcgactccaaattccttaagcaacagaagaaggacgttgttaagcgccaggaagtcatatatgaactgatgcagacagaattccatcacgtgaggactctgaagatcatgagtggagtgtattctcagggtatgatggcagacctgctgtttgagcagcagatggttgagaagctctttccttgcttggacgaactaatatccatccactcacagttctttcagcgcatcctggaacgcaagaaggaaagcttagtggacaagagtgagaaaaactttcttataaaacgaatcggggacgtgttagtgaaccagttctctggggaaaatgctgagcgcctgaaaaagacatacgggaagttttgcggccagcataatcagtccgtgaactattttaaagatctttatgctaaagacaaacggttccaagcttttgtgaagaaaaaaatgagttcttcggtggtccgaagattggggatacccgagtgcatcttgctggtaactcagcggatcacaaaatatccagtccttttccagagaatcctacagtgtacaaaggacaacgaagtggagcaggaggacctcgctcagagtctcagcctcgtgaaagacgtgattggggcagttgattccaaggttgccagctatgagaagaaagtccggctgaatgagatctacaccaaaacggacagcaagagcattatgaggatgaagtctggccagatgttcgcgaaggaggatctcaaaaggaaaaagttggtacgtgatgggagcgtcttcttaaaaaatgccgctggcagactgaaggaggtgcaggctgtgctgctgaccgacatactcgtgtttctccaagagaaggatcagaagtatatatttgcttccctcgaccaaaaatcgaccgtcatcagcctgaagaaactaattgtgcgagaagtcgcacacgaagagaagggtctcttcctcatcagtatgggtatgactgaccccgagatggttgaagttcacgccagctcaaaggaagaaaggaactcgtggatccagatcatccaggatacaatcaacacactgaaccgtgacgaagacgaaggtattccttccgaaaatgaggaggagaagaaaatgctggacactagagcacgtgaactgaaggaacaacttcatcaaaaggaccagaagatattgcttctgctggaggagaaagaaatgattttcagagacatggccgagtgttctacccctttgcccgaggattgttcacccacacactctccacgcgtgctgttccggtctaacactgaggaagcgctgaaggggggaccacttatgaagtcagccattaatgaggtagaaatcctccagggactggtctccgggaatctaggcggtactcttggccctacggtatcgtcaccaattgagcaggatgtcgttggtccagtgtctctcccacgccgagccgaaaccttcggaggttttgactcgcaccagatgaatgcaagtaaaggtggggagaaagaggagggagatgatgggcaggatctccggcgaacagagtcagattccggattgaagaagggagggaatgccaatctggtgtttatgttaaagcggaatagcgaacaggtggtgcagtctgttgtacacttgtatgaacttctgagcgccctgcagggcgtggtcctgcagcaggattcttacattgaagaccagaaactggttctgtcggaaagagccttgacgagatctttgtctcgcccttcaagcttgatcgagcaggagaagcagcgaagcttggagaagcagcgccaggacctggccaatctacagaagcaacaagcgcagtatctggaggaaaagaggcgcagagaacgtgagtgggaggcgcgagaaagagagttaagagaaagagaagcgcttctggctcagagagaggaggaggttcagcaggggcagcaagacctggagaaggagcgggaagagctgcaacagaagaaaggcacctaccagtacgaccttgagaggctccgagcggctcagaagcagcttgaaagggagcaggagcagcttcgaagagaggccgaacgcctgtcccaaagacaaactgagcgcgacctgtgccaggtgtcccatccccacaccaagttaatgcgcattccgtctttctttccaagccctgaggaacctccatccccctccgcaccttcaattgctaagagtgggtctctggactctgaactgtcagtgtcacctaaaaggaactcgatctcaagaacccataaggacaagggcccattccacattttatcaagcactagccaaaccaataaggggcctgaaggccagtcgcaagcacctgcttccaccagtgcctctaccaggctgtttggcctaacaaaacccaaagagaaaaaagagaaaaagaagaagaataagaccagtaggtcccagcctggagatggacctgcctcagaagtctcagccgagggcgaggagatcttttgtta

SEQ ID NO: 167515 - DNA, 828 bp, Artificial Sequence
  derived and/or modified sequence
ccatcagacgatatggactcaattatctttccgaagcccgaggaggagcatctggcctgcgacatcacggggtcttcatcttccactgacgacaccgcttccctggaccgccacagtagtcacggcagcgatgtgagcttatcacagattttgaaaccgaacaggagcagagatcgccagtccctagacggattttactctcatgggatgggggctgaggggcgagaatccgagtctgaaccagccgacccaggcgacgtcgaagaggaggaaatggattccatcaccgaagtacctgcaaattgcagcgttttgaggagctccatgcggtcccttagcccctttcgcaggcacagctgggggcctgggaaaaacgccgcttctgacgccgagatgaaccatcgaagctcaatgagggtcttgggggacgtagttagacgacccccaatccatcggcgtagcatgagctggtgccctagcggcgttcaatatagcgctggactatccgctgactttaactacaggtccttttctctcgaaggcctgacaggcggagccggtgttgggaataagccctcgtcaagcttggaggtgagttccgcgaatgccgaagagctgcggcacccctttagtggagaagaacgggtagacagcttggtctcattaagtgaagaggacctagaatccgatcagcgggagcatcggatgttcgaccagcagatttgccatcgttctaaacaacagggatttaattactgcacctcggcaatctctagtccactgaccaagagtatctctctgatgaccatctcccacccaggattgtag

SEQ ID NO: 167516 - DNA, 117 bp, Artificial Sequence
  derived and/or modified sequence
atgaagctaaatccacagcaggcacctctgtatggtgactgcgtagttactgtcctgctcgccgaagaggataaggccgaagatgacgtggtattctacctggtgtttctcgggtag

SEQ ID NO: 167517 - DNA, 540 bp, Artificial Sequence
  derived and/or modified sequence
atgaagctgaacccccagcaagcgcctttatacggggactgcgtggtcacagtactactggctgaagaggacaaggccgaagatgatgtcgtcttttaccttgttttcctaggctctacactgcggcattgcacttccacacggaaggtgtctagcgacaccctcgaaactatagcccctgggcacgactgctgcgagacggtgaaggtccaattatgcgccagtaaagaaggactgccagtcttcgtggtggccgaggaagattttcatttcgtgcaggatgaagcatatgacgctgcacagttcctggcaacgtccgccggtaatcaacaggcactgaacttcactcgttttctggaccaatcgggaccccctagcggcgatgtgaatagcctcgacaaaaaactcgtgctggcattccgccaccttaagttgcccaccgaatggaatgtcctcgggaccgaccagagcttacatggagagaacttgtatgatctgcagacgcatttcaaattcgtcattttcctgctgttcttttag

SEQ ID NO: 167518 - DNA, 9468 bp, Artificial Sequence
  derived and/or modified sequence
tgtctttctccgcggcgaaggtgaagagttgtcccagctcggcccgcgggggagccccgggagccgcacgtgtcctgggtcatgaaacttaatccacagcaagctcccttatatggtgattgtgttgttacagtgctgcttgctgaagaggacaaagctgaagatgatgtagtgttttacttggtatttttgggttccaccctccgtcactgtacaagtactcggaaggtcagttctgatacattggagaccattgctcctggtcatgattgttgtgaaacagtgaaggtgcagctctgtgcttccaaagagggccttcccgtgtttgtggtggctgaagaagactttcatttcgtccaggatgaagcgtatgatgcagctcaattcctagcaaccagtgctggaaatcagcaggctttgaactttacccgttttcttgaccagtcaggacccccatctggggatgtgaattcccttgataagaagttggtgctggcattcaggcacctgaagctgcccacggagtggaatgtattggggacagatcagagtttgcatgatgctggcccgcgagagacattgatgcattttgctgtgcggctgggactgctgaggttgacgtggttcctgttgcagaagccaggtggccgcggagctctcagtatccacaaccaggaaggggcgacgcctgtgagcttggccttggagcgaggctatcacaagctgcaccagcttctaaccgaggagaatgctggagaaccagactcctggagcagtttatcctatgaaataccgtatggagactgttctgtgaggcatcatcgagagttggacatctatacattaacctctgagtctgattcacatcatgaacacccatttcctggagacggttgcactggaccaatttttaaacttatgaacatccaacagcaactaatgaaaacaaacctcaagcagatggacagtcttatgcccttaatgatgacagcacaggatccttccagtgccccagagacagatggccagtttcttccctgtgcaccggagcccacggaccctcagcgactttcttcttctgaagagactgagagcactcagtgctgcccagggagccctgttgcacagactgaaagtccctgtgatttgtcaagcatagttgaggaggagaatacagaccgttcctgtaggaagaaaaataaaggcgtggaaagaaaaggggaagaggtggagccagcacctattgtggactctggaactgtatctgatcaagacagctgccttcagagcttgcctgattgtggagtaaagggcacggaaggcctttcgtcctgtggaaacagaaatgaagaaactggaacaaaatcttctggaatgcccacagaccaggagtccctgagcagtggagatgctgtgcttcagagagacttggtcatggagccaggcacagcccagtattcctctggaggtgaactgggaggcatttcaacaacaaatgtcagtaccccagacactgcaggggaaatggaacatgggctcatgaacccagatgccactgtttggaagaatgtgcttcagggaggggaaagtacaaaggaaagatttgagaactctaatattggcacagctggagcctctgacgtgcacgtcacaagtaagcctgtggataaaatcagtgttccaaactgtgcccctgctgccagttccctggatggtaacaaacctgctgagtcttcacttgcatttagtaatgaagaaacctccactgaaaaaacagcagaaacggaaacttcacgaagtcgtgaggagagtgctgatgctccagtagatcagaattctgtggtgattccagctgctgcaaaagacaagatttcagatggattagaaccttatactctcttagcagcaggcataggtgaggcaatgtcaccctcagatttagcccttcttgggctggaagaagatgtaatgccacaccagaactcagaaacaaattcatctcatgctcaaagccaaaagggcaaatcctcacccatttgttctacaactggagacgataaactttgtgcagactctgcatgtcaacagaacacagtgacttctagtggcgatttggttgcaaaactgtgtgataacatagttagcgagtccgaaagcaccacagcaaggcaacccagctcacaagatccacccgatgcctcccactgtgaagacccacaggctcatacagtcacctctgaccctgtaagggatacccaggaacgtgcggatttttgtcctttcaaagtggtggataacaaaggccaacgaaaagatgtgaaactagataaacctttaacaaatatgcttgaggtggtttcacatccacatccagttgtccctaaaatggagaaagaactggtgccagaccaggcagtaatatcagacagtactttctctctggcaaacagtccaggcagtgaatcagtaaccaaggatgacgcactttcttttgtcccctcccagaaagaaaagggaacagcaactcctgaactacatacagctacagattatagagatggcccagatggaaattcgaatgagcctgatacgcggccactagaagacagggcagtaggcctgtccacatcctccactgctgcagagcttcagcacgggatggggaataccagtctcacaggacttggtggagagcatgagggtcccgcccctccagcaatcccagaagctctgaatatcaaggggaacactgactcttccctgcaaagtgtgggtaaggccactttggctttagattcagttttgactgaagaaggaaaacttctggtggtttcagaaagctctgcagctcaggaacaagataaggataaagcggtgacctgttcctctattaaggaaaatgctctctcttcaggaactttgcaggaagagcagagaacaccacctcctggacaagatactcaacaatttcatgaaaaatcaatctcagctgactgtgccaaggacaaagcacttcagctaagtaattcaccgggtgcatcctctgcctttcttaaggcagaaactgaacataacaaggaagtggccccacaagtctcactgctgactcaaggtggggctgcccagagcctggtgccaccaggagcaagtctggccacagagtcaaggcaggaagccttgggggcagagcacaacagctccgctctgttgccatgtctgttgccagatgggtctgatgggtccgatgctcttaactgcagtcagccttctcctctggatgttggagtgaagaacactcaatcccagggaaaaactagtgcctgtgaggtgagtggagatgtgacggtggatgttacaggggttaatgctctacaaggtatggctgagcccagaagagagaatatatcacacaacacccaagacatcctgattccaaacgtcttgttgagccaagagaagaatgccgttctaggtttgccagtggctctacaggacaaagctgtgactgacccacagggagttggaaccccagagatgatacctcttgattgggagaaagggaagctggagggagcagaccacagctgtaccatgggtgacgctgaggaagcccaaatagacgatgaagcacatcctgtcctactgcagcctgttgccaaggagctccccacagacatggagctctcagcccatgatgatggggccccagctggtgtgagggaagtcatgcgagccccgccttcaggcagggaaaggagcactccctctctaccttgcatggtctctgcccaggacgcacctctgcctaagggggcagacttgatagaggaggctgccagccgtatagtggatgctgtcatcgaacaagtcaaggccgctggagcactgcttactgagggggaggcctgtcacatgtcactgtccagccctgagttgggtcctctcactaaaggactagagagtgcttttacagaaaaagtgagtactttcccacctggggagagcctaccaatgggcagtactcctgaggaagccacggggagccttgcaggatgttttgctggaagggaggagccagagaagatcattttacctgtccaggggcctgagccagcagcagaaatgccagacgtgaaagctgaagatgaagtggattttagagcaagttcaatttctgaagaagtggctgtagggagcatagctgctacactgaagatgaagcaaggcccaatgacccaggcgataaaccgagaaaactggtgtacaatagagccatgccctgatgcagcatctcttctggcttccaagcagagcccagaatgtgagaacttcctggatgttggactgggcagagagtgtacctcaaaacaaggtgtacttaaaagagaatctgggagtgattctgacctctttcactcacccagtgatgacatggacagcatcatcttcccaaagccagaggaagagcatttggcctgtgatatcaccggatccagttcatccaccgatgacacggcttcactggaccgacattcttctcatggcagtgatgtgtctctctcccagattttaaagccaaacaggtcaagagatcggcaaagccttgatggattctacagccatgggatgggagctgagggtcgagaaagtgagagtgagcctgctgacccaggcgacgtggaggaggaggagatggacagtatcactgaagtgcctgcaaactgctctgtcctaaggagctccatgcgctctctttctcccttccggaggcacagctgggggcctgggaaaaatgcagccagcgatgcagaaatgaaccaccggagtatgagctggtgcccctctggtgtgcagtactctgctggcctgagtgctgactttaattacagaagtttcagtctagaaggcttgacaggaggagctggtgtcggaaacaagccatcctcatctctagaagtaagctctgcaaatgccgaagagctcagacacccattcagtggtgaggaacgggttgactctttggtgtcactttcagaagaggatctggagtcagaccagagagaacataggatgtttgatcagcagatatgtcacagatctaagcagcagggatttaattactgtacatcagccatttcctctccattgacaaaatccatctcattaatgacaatcagccatcctggattggacaattcacggcccttccacagtaccttccacaataccagtgctaatctgactgagagtataacagaagagaactataatttcctgccacatagcccctccaagaaagattctgaatggaagagtggaacaaaagtcagtcgtacattcagctacatcaagaataaaatgtctagcagcaagaagagcaaagaaaaggaaaaagaaaaagataagattaaggagaaggagaaagattctaaagacaaggagaaagataagaagactgtcaacgggcacactttcagttccattcctgttgtgggtcccatcagctgtagccagtgtatgaagcccttcaccaacaaagatgcctatacttgtgcaaattgcagtgcttttgtccacaaaggctgccgagaaagtctagcctcctgtgcaaaggtcaaaatgaagcagcccaaagggagccttcaggcacatgacacatcatcactgcccacggtcattatgagaaacaagccctcacagcccaaggagcgtcctcggtccgcagtcctcctggtggatgaaaccgctaccaccccaatatttgccaatagacgatcccagcagagtgtctcgctctccaaaagtgtctccatacagaacattactggagttggcaatgatgagaacatgtcaaacacctggaaattcctgtctcattcaacagactcactaaataaaatcagcaaggtcaatgagtcaacagaatcacttactgatgagggagtaggtacagacatgaatgaaggacaactactgggagactttgagattgagtccaaacagctggaagcagagtcttggagtcggataatagacagcaagtttctaaaacagcaaaagaaagatgtggtcaaacggcaagaagtaatatatgagttgatgcagacagagtttcatcatgtccgcactctcaagatcatgagtggtgtgtacagccaggggatgatggcggatctgctttttgagcagcagatggtagaaaagctgttcccctgtttggatgagctgatcagtatccatagccaattcttccagaggattctggagcggaagaaggagtctctggtggataaaagtgaaaagaactttctcatcaagaggataggggatgtgcttgtaaatcagttttcaggtgagaatgcagaacgtttaaagaagacatatggcaagttttgtgggcaacataaccagtctgtaaactacttcaaagacctttatgccaaggataagcgttttcaagcctttgtaaagaagaagatgagcagttcagttgttagaaggcttggaattccagagtgcatattgcttgtaactcagcggattaccaagtacccagttttattccaaagaatattgcagtgtaccaaagacaatgaagtggagcaggaagatctagcacagtccttgagcctggtgaaggatgtgattggagctgtagacagcaaagtggcaagttatgaaaagaaagtgcgtctcaatgagatttatacaaagacagatagcaagtcaatcatgaggatgaagagtggtcagatgtttgccaaggaagatttgaaacggaagaagcttgtacgtgatgggagtgtgtttctgaagaatgcagcaggaaggttgaaagaggttcaagcagttcttctcactgacattttagttttccttcaagaaaaagaccagaagtacatctttgcatcattggaccagaagtcaacagtgatctctttaaagaagctgattgtgagagaagtggcacatgaggagaaaggtttattcctgatcagcatggggatgacagatccagagatggtagaagtccatgccagctccaaagaggaacgaaacagctggattcagatcattcaggacacaatcaacaccctgaacagagatgaagatgaaggaattcctagtgagaatgaggaagaaaagaaaatgttggacaccagagcccgagaattaaaagaacaacttcaccagaaggaccaaaaaatcctactcttgttggaagagaaggagatgattttccgggacatggctgagtgcagcacccctctcccagaggattgctccccaacacatagccctagagttctcttccgctccaacacagaagaggctctcaaaggaggacctttaatgaaaagtgcaataaatgaggtggagatccttcagggtttggtgagtggaaatctgggaggcacacttgggccgactgtcagcagccccattgagcaagatgtggtcggtcccgtttccctgccccggagagcagagacctttggaggatttgacagccatcagatgaatgcttcaaaaggaggcgagaaggaagagggagatgatggccaagatcttaggagaacggaatcagatagtggcctaaaaaagggtggaaatgctaacctggtatttatgcttaaaagaaacagtgagcaggttgtccagagcgttgttcatctctacgagctcctcagcgctctgcagggtgtggtgctgcagcaggacagctacattgaggaccagaaactggtgctgagcgagagggcgctcactcgcagcttgtcccgcccgagctccctcattgagcaggagaagcagcgcagcctggagaagcagcgccaggacctggccaacctgcagaagcagcaggcccagtacctcgaggagaagcgcaggcgcgagcgtgagtgggaagctcgtgagagggagctgcgggagcgggaggccctcctggcccagcgcgaggaggaggtgcagcaggggcagcaggacctggaaaaggagcgggaggagctccagcagaagaagggcacataccagtatgacctggagcgactgcgtgctgcccagaaacagcttgagagggaacaggagcagctgcgccgggaggcagagcggctcagccagcggcagacagaacgggacctgtgtcaggtttcccatccacataccaagctgatgaggatcccatcgttcttccccagtcctgaggagcccccctcgccatctgcaccttccatagccaaatcagggtcattggactcagaactttcagtgtccccaaaaaggaacagcatctctcggacacacaaagataaggggccttttcacatactgagttcaaccagccagacaaacaaaggaccagaagggcagagccaggcccctgcgtccacctctgcctctacccgcctgtttgggttaacaaagccaaaggaaaagaaggagaaaaaaaagaagaacaaaaccagccgctctcagcccggtgatggtcccgcgtcagaagtatcagcagagggtgaagagatcttctgctgaccctcttcctctctgctgaggcagctgcctcctgatcctggccagcccacctctcctgctgtccccgcgtgcacaagtctcttacactggacgcccactgctcctcagcgtccagtcctcctgggcggccccaggtcctggacaataagcaacagatgatattgagtgtcgggtggggaaggaggcccagactctgcttcggccatgatttgtgactgcccaggactctcaggttgggctggccctactcaggattacactgaaagtaatggcctcgtaagtacaggtgatggttttggacacgtcaggaattcctaaaggctgaaagagtgtatccaagtaaggtctgaacctccgaatgccttttatttgggggaacacaaaaccaaacagcagatgttttggacttgatctgtgtacgtacatggggacctgtctgcatatacacacggggaatgccagaagaaggcccagtctgcaccaggcgtctggtcaacttagcacaagggcagtgcctggacggacccggagcccccgcatatcagcagttcacccagtactcctcagagactggtttccctctaaacccatcccgggcacataccacccgtgttttgcatgtatttctcatttcattttagggatgacaaacatttgtgaaaccagtgagagaaggcttgatgtgtataaaagacgtgatgtgcaccacctcgatctcggtgtttcaggcactaaagcaacaaaacaacccatagtatctcattctgtcatcagatccagaagaaatatcctggttttccagcatgtttacccacatgttttggccatggataaagtgaagaggcctactcaccattatccctgcagcgtgacaccttttgattgtcactgaccactcagaaggggccacggcctcctggctgtgttcctgag

SEQ ID NO: 167519 - DNA, 13129 bp, Artificial Sequence
  derived and/or modified sequence
aaattattagaaaagcagcctcctattgaaggtgattgtgttgttacagtgctgcttgctgaagaggacaaagctgaagatgatgtagtgttttacttggtatttttgggttccaccctccgtcactgtacaagtactcggaaggtcagttctgatacattggagaccattgctcctggtcatgattgttgtgaaacagtgaaggtgcagctctgtgcttccaaagagggccttcccgtgtttgtggtggctgaagaagactttcatttcgtccaggatgaagcgtatgatgcagctcaattcctagcaaccagtgctggaaatcagcaggctttgaactttacccgttttcttgaccagtcaggacccccatctggggatgtgaattcccttgataagaagttggtgctggcattcaggcacctgaagctgcccacggagtggaatgtattggggacagatcagagtttgcatgatgctggcccgcgagagacattgatgcattttgctgtgcggctgggactgctgaggttgacgtggttcctgttgcagaagccaggtggccgcggagctctcagtatccacaaccaggaaggggcgacgcctgtgagcttggccttggagcgaggctatcacaagctgcaccagcttctaaccgaggagaatgctggagaaccagactcctggagcagtttatcctatgaaataccgtatggagactgttctgtgaggcatcatcgagagttggacatctatacattaacctctgagtctgattcacatcatgaacacccatttcctggagacggttgcactggaccaatttttaaacttatgaacatccaacagcaactaatgaaaacaaacctcaagcagatggacagtcttatgcccttaatgatgacagcacaggatccttccagtgccccagagacagatggccagtttcttccctgtgcaccggagcccacggaccctcagcgactttcttcttctgaagagactgagagcactcagtgctgcccagggagccctgttgcacagactgaaagtccctgtgatttgtcaagcatagttgaggaggagaatacagaccgttcctgtaggaagaaaaataaaggcgtggaaagaaaaggggaagaggtggagccagcacctattgtggactctggaactgtatctgatcaagacagctgccttcagagcttgcctgattgtggagtaaagggcacggaaggcctttcgtcctgtggaaacagaaatgaagaaactggaacaaaatcttctggaatgcccacagaccaggagtccctgagcagtggagatgctgtgcttcagagagacttggtcatggagccaggcacagcccagtattcctctggaggtgaactgggaggcatttcaacaacaaatgtcagtaccccagacactgcaggggaaatggaacatgggctcatgaacccagatgccactgtttggaagaatgtgcttcagggaggggaaagtacaaaggaaagatttgagaactctaatattggcacagctggagcctctgacgtgcacgtcacaagtaagcctgtggataaaatcagtgttccaaactgtgcccctgctgccagttccctggatggtaacaaacctgctgagtcttcacttgcatttagtaatgaagaaacctccactgaaaaaacagcagaaacggaaacttcacgaagtcgtgaggagagtgctgatgctccagtagatcagaattctgtggtgattccagctgctgcaaaagacaagatttcagatggattagaaccttatactctcttagcagcaggcataggtgaggcaatgtcaccctcagatttagcccttcttgggctggaagaagatgtaatgccacaccagaactcagaaacaaattcatctcatgctcaaagccaaaagggcaaatcctcacccatttgttctacaactggagacgataaactttgtgcagactctgcatgtcaacagaacacagtgacttctagtggcgatttggttgcaaaactgtgtgataacatagttagcgagtccgaaagcaccacagcaaggcaacccagctcacaagatccacccgatgcctcccactgtgaagacccacaggctcatacagtcacctctgaccctgtaagggatacccaggaacgtgcggatttttgtcctttcaaagtggtggataacaaaggccaacgaaaagatgtgaaactagataaacctttaacaaatatgcttgaggtggtttcacatccacatccagttgtccctaaaatggagaaagaactggtgccagaccaggcagtaatatcagacagtactttctctctggcaaacagtccaggcagtgaatcagtaaccaaggatgacgcactttcttttgtcccctcccagaaagaaaagggaacagcaactcctgaactacatacagctacagattatagagatggcccagatggaaattcgaatgagcctgatacgcggccactagaagacagggcagtaggcctgtccacatcctccactgctgcagagcttcagcacgggatggggaataccagtctcacaggacttggtggagagcatgagggtcccgcccctccagcaatcccagaagctctgaatatcaaggggaacactgactcttccctgcaaagtgtgggtaaggccactttggctttagattcagttttgactgaagaaggaaaacttctggtggtttcagaaagctctgcagctcaggaacaagataaggataaagcggtgacctgttcctctattaaggaaaatgctctctcttcaggaactttgcaggaagagcagagaacaccacctcctggacaagatactcaacaatttcatgaaaaatcaatctcagctgactgtgccaaggacaaagcacttcagctaagtaattcaccgggtgcatcctctgcctttcttaaggcagaaactgaacataacaaggaagtggccccacaagtctcactgctgactcaaggtggggctgcccagagcctggtgccaccaggagcaagtctggccacagagtcaaggcaggaagccttgggggcagagcacaacagctccgctctgttgccatgtctgttgccagatgggtctgatgggtccgatgctcttaactgcagtcagccttctcctctggatgttggagtgaagaacactcaatcccagggaaaaactagtgcctgtgaggtgagtggagatgtgacggtggatgttacaggggttaatgctctacaaggtatggctgagcccagaagagagaatatatcacacaacacccaagacatcctgattccaaacgtcttgttgagccaagagaagaatgccgttctaggtttgccagtggctctacaggacaaagctgtgactgacccacagggagttggaaccccagagatgatacctcttgattgggagaaagggaagctggagggagcagaccacagctgtaccatgggtgacgctgaggaagcccaaatagacgatgaagcacatcctgtcctactgcagcctgttgccaaggagctccccacagacatggagctctcagcccatgatgatggggccccagctggtgtgagggaagtcatgcgagccccgccttcaggcagggaaaggagcactccctctctaccttgcatggtctctgcccaggacgcacctctgcctaagggggcagacttgatagaggaggctgccagccgtatagtggatgctgtcatcgaacaagtcaaggccgctggagcactgcttactgagggggaggcctgtcacatgtcactgtccagccctgagttgggtcctctcactaaaggactagagagtgcttttacagaaaaagtgagtactttcccacctggggagagcctaccaatgggcagtactcctgaggaagccacggggagccttgcaggatgttttgctggaagggaggagccagagaagatcattttacctgtccaggggcctgagccagcagcagaaatgccagacgtgaaagctgaagatgaagtggattttagagcaagttcaatttctgaagaagtggctgtagggagcatagctgctacactgaagatgaagcaaggcccaatgacccaggcgataaaccgagaaaactggtgtacaatagagccatgccctgatgcagcatctcttctggcttccaagcagagcccagaatgtgagaacttcctggatgttggactgggcagagagtgtacctcaaaacaaggtgtacttaaaagagaatctgggagtgattctgacctctttcactcacccagtgatgacatggacagcatcatcttcccaaagccagaggaagagcatttggcctgtgatatcaccggatccagttcatccaccgatgacacggcttcactggaccgacattcttctcatggcagtgatgtgtctctctcccagattttaaagccaaacaggtcaagagatcggcaaagccttgatggattctacagccatgggatgggagctgagggtcgagaaagtgagagtgagcctgctgacccaggcgacgtggaggaggaggagatggacagtatcactgaagtgcctgcaaactgctctgtcctaaggagctccatgcgctctctttctcccttccggaggcacagctgggggcctgggaaaaatgcagccagcgatgcagaaatgaaccaccggagtatgagctggtgcccctctggtgtgcagtactctgctggcctgagtgctgactttaattacagaagtttcagtctagaaggcttgacaggaggagctggtgtcggaaacaagccatcctcatctctagaagtaagctctgcaaatgccgaagagctcagacacccattcagtggtgaggaacgggttgactctttggtgtcactttcagaagaggatctggagtcagaccagagagaacataggatgtttgatcagcagatatgtcacagatctaagcagcagggatttaattactgtacatcagccatttcctctccattgacaaaatccatctcattaatgacaatcagccatcctggattggacaattcacggcccttccacagtaccttccacaataccagtgctaatctgactgagagtataacagaagagaactataatttcctgccacatagcccctccaagaaagattctgaatggaagagtggaacaaaagtcagtcgtacattcagctacatcaagaataaaatgtctagcagcaagaagagcaaagaaaaggaaaaagaaaaagataagattaaggagaaggagaaagattctaaagacaaggagaaagataagaagactgtcaacgggcacactttcagttccattcctgttgtgggtcccatcagctgtagccagtgtatgaagcccttcaccaacaaagatgcctatacttgtgcaaattgcagtgcttttgtccacaaaggctgccgagaaagtctagcctcctgtgcaaaggtcaaaatgaagcagcccaaagggagccttcaggcacatgacacatcatcactgcccacggtcattatgagaaacaagccctcacagcccaaggagcgtcctcggtccgcagtcctcctggtggatgaaaccgctaccaccccaatatttgccaatagacgatcccagcagagtgtctcgctctccaaaagtgtctccatacagaacattactggagttggcaatgatgagaacatgtcaaacacctggaaattcctgtctcattcaacagactcactaaataaaatcagcaaggtcaatgagtcaacagaatcacttactgatgagggagtaggtacagacatgaatgaaggacaactactgggagactttgagattgagtccaaacagctggaagcagagtcttggagtcggataatagacagcaagtttctaaaacagcaaaagaaagatgtggtcaaacggcaagaagtaatatatgagttgatgcagacagagtttcatcatgtccgcactctcaagatcatgagtggtgtgtacagccaggggatgatggcggatctgctttttgagcagcagatggtagaaaagctgttcccctgtttggatgagctgatcagtatccatagccaattcttccagaggattctggagcggaagaaggagtctctggtggataaaagtgaaaagaactttctcatcaagaggataggggatgtgcttgtaaatcagttttcaggtgagaatgcagaacgtttaaagaagacatatggcaagttttgtgggcaacataaccagtctgtaaactacttcaaagacctttatgccaaggataagcgttttcaagcctttgtaaagaagaagatgagcagttcagttgttagaaggcttggaattccagagtgcatattgcttgtaactcagcggattaccaagtacccagttttattccaaagaatattgcagtgtaccaaagacaatgaagtggagcaggaagatctagcacagtccttgagcctggtgaaggatgtgattggagctgtagacagcaaagtggcaagttatgaaaagaaagtgcgtctcaatgagatttatacaaagacagatagcaagtcaatcatgaggatgaagagtggtcagatgtttgccaaggaagatttgaaacggaagaagcttgtacgtgatgggagtgtgtttctgaagaatgcagcaggaaggttgaaagaggttcaagcagttcttctcactgacattttagttttccttcaagaaaaagaccagaagtacatctttgcatcattggaccagaagtcaacagtgatctctttaaagaagctgattgtgagagaagtggcacatgaggagaaaggtttattcctgatcagcatggggatgacagatccagagatggtagaagtccatgccagctccaaagaggaacgaaacagctggattcagatcattcaggacacaatcaacaccctgaacagagatgaagatgaaggaattcctagtgagaatgaggaagaaaagaaaatgttggacaccagagcccgagaattaaaagaacaacttcaccagaaggaccaaaaaatcctactcttgttggaagagaaggagatgattttccgggacatggctgagtgcagcacccctctcccagaggattgctccccaacacatagccctagagttctcttccgctccaacacagaagaggctctcaaaggaggacctttaatgaaaagtgcaataaatgaggtggagatccttcagggtttggtgagtggaaatctgggaggcacacttgggccgactgtcagcagccccattgagcaagatgtggtcggtcccgtttccctgccccggagagcagagacctttggaggatttgacagccatcagatgaatgcttcaaaaggaggcgagaaggaagagggagatgatggccaagatcttaggagaacggaatcagatagtggcctaaaaaagggtggaaatgctaacctggtatttatgcttaaaagaaacagtgagcaggttgtccagagcgttgttcatctctacgagctcctcagcgctctgcagggtgtggtgctgcagcaggacagctacattgaggaccagaaactggtgctgagcgagagggcgctcactcgcagcttgtcccgcccgagctccctcattgagcaggagaagcagcgcagcctggagaagcagcgccaggacctggccaacctgcagaagcagcaggcccagtacctcgaggagaagcgcaggcgcgagcgtgagtgggaagctcgtgagagggagctgcgggagcgggaggccctcctggcccagcgcgaggaggaggtgcagcaggggcagcaggacctggaaaaggagcgggaggagctccagcagaagaagggcacataccagtatgacctggagcgactgcgtgctgcccagaaacagcttgagagggaacaggagcagctgcgccgggaggcagagcggctcagccagcggcagacagaacgggacctgtgtcaggtttcccatccacataccaagctgatgaggatcccatcgttcttccccagtcctgaggagcccccctcgccatctgcaccttccatagccaaatcagggtcattggactcagaactttcagtgtccccaaaaaggaacagcatctctcggacacacaaagataaggggccttttcacatactgagttcaaccagccagacaaacaaaggaccagaagggcagagccaggcccctgcgtccacctctgcctctacccgcctgtttgggttaacaaagccaaaggaaaagaaggagaaaaaaaagaagaacaaaaccagccgctctcagcccggtgatggtcccgcgtcagaagtatcagcagagggtgaagagatcttctgctgaccctcttcctctctgctgaggcagctgcctcctgatcctggccagcccacctctcctgctgtccccgcgtgcacaagtctcttacactggacgcccactgctcctcagcgtccagtcctcctgggcggccccaggtcctggacaataagcaacagatgatattgagtgtcgggtggggaaggaggcccagactctgcttcggccatgatttgtgactgcccaggactctcaggttgggctggccctactcaggattacactgaaagtaatggcctcgtaagtacaggtgatggttttggacacgtcaggaattcctaaaggctgaaagagtgtatccaagtaaggtctgaacctccgaatgccttttatttgggggaacacaaaaccaaacagcagatgttttggacttgatctgtgtacgtacatggggacctgtctgcatatacacacggggaatgccagaagaaggcccagtctgcaccaggcgtctggtcaacttagcacaagggcagtgcctggacggacccggagcccccgcatatcagcagttcacccagtactcctcagagactggtttccctctaaacccatcccgggcacataccacccgtgttttgcatgtatttctcatttcattttagggatgacaaacatttgtgaaaccagtgagagaaggcttgatgtgtataaaagacgtgatgtgcaccacctcgatctcggtgtttcaggcactaaagcaacaaaacaacccatagtatctcattctgtcatcagatccagaagaaatatcctggttttccagcatgtttacccacatgttttggccatggataaagtgaagaggcctactcaccattatccctgcagcgtgacaccttttgattgtcactgaccactcagaaggggccacggcctcctggctgtgttcctgagcccccgtcgtgcctctcccagacagcagctgtctggcccttgctgggtgagggcacaccactgccaggggtcagcctcgcacccaggccaggcagaagctgtgctctgaagctaggacagctggctgagaagtgggttcaggcgaagggtgaagccatgtgtagcagttcctgccagtgcagatctggagaggagctggcccggaaggcgtggttgtgaaagcgcccttcttatgttaggaggccttggcaaaattggatttcttcaaaaatacatgtaaaggtctgttgttgaattgtactctgcccctggaagcagatacagatggctgcctgctgctcggctttgcttttgcttttcccaccgtgttttcatctttgttcacttgaggctttccccagctggtgtgtgcaggacagttcatggtaatgttgccctctgaggccccgtacaccagaagggaggccctggaaaattttgtgcttccaacgtggccttcaattcttgcttttttgcccctcggaagcatggggcttttgagcacacttaaaaaaagaaaaatctgtaacttggtgcttattgatgaattgcaagctggccttgcagatggagatatttatctttcagtttatttgaaagaggtctggtttaaaatttgtagcctacatttgttttatttattgtatttgtgtgtttgtgtttgtttttttttaagggtgagccaggtctagcccaacagtctaaactatccagtcaataccgagtgaagtggcagccagcactgttcactctgtgtcttttgaagtgccttgaaggcccagatgaaattttaaagggagggggtccatgtccttccctcccccaccccgcctcattctttaatcaaaggatgtcttctcccttgtttgagaatgaagaaactcgccacctctgacctacctttgcctttttctgtcatggagaatactcacccttcagaaacagaccaaaggccaaaacctgctgatttttctattgaaaatatgtccccttgcaaagaccctaaacaaaaagttaagtttctttctttcacctatttgtacaactccaagttacagctgaatctgtcgtgactttcctgagatctacccggggcttggctgtctgttctgggcactggctccgagttcccctcctgggatttgcaggagggcagtactgaacctgcattcttctccttgtaaatgtaggccgggtgcccctgttctccgggtttggaacaatacgaggttggtgctgatgggatttacttgcgtacgtgctcttcacaaaaacaccgtggatgctgaagttagagcacgtcgccacagagcttgacatcaatgttagagggtctcttactccccgcccagctgtgatgtttcatctgctttggttgttttggtggtcttttttaaaaatagagatttcacatctgcccagaccccactcaaaacgatttggtcaggttctggttggacaagtttaaaatcaaagtagtgcccggaattccctcaaaccacccaacttcatccaggaatacagtctgcagtgcagcaacagaaccgcttaccaagaactgtgcttacatacctttgtcatctctcttccccccttggaagttgtcctcagggggatttgttcctgtcctggggatttacctgggatggtggctgcctgtgcttttgctcatggccttgacagtgctctagttgctggatctaatggcctgtcttggtttctatcacatgagaaggggttgtttttttggggtgactcggactgaattccccatactgtttccacgccgggacaccatgttctccatcaagctaaagaaatcacgtgcctgaaactgtgcttaagttttgggggaaagatggagttcctatccagagcccccagatttccagaatcgagtgagcttcctggaaggagactgcgtcttctctcaattccagtcatctcagtcgttgtcgttaggtgacatgtgcactttaaatgctctcatcggttggcttcattttcaagacaatcaaatgtattgactgtgttttcttcttagaaaatggagagggttaaaaacatgcaaactgccactttcaacctttgccagtattccctctacccccgtgagagctatctggggggaagaatccttaccaaggtttttttggaaaggtacgaatcttaacttttttccccttctgtgtctcagggtaatactattcagagtcgcccctttgctcattttctcccgtatttgttaccttcctgaggcctcagtattagtcgtgagcacaaagttttgagacctttggcgttgtttcttgatgtgggaggggaggtgttagtgcatgcaagggttgaactagatagaccctgccttagtagagggtgggactataaccttagaggccagaacttgatccagaagttgctgtccacagaagtgctttctatttcatcatttttgtttctagggctctttttctgtagccaggtcttcccaaggattttagtatttgcattggagttgaggtttactctaatgatggtggcccagctgtgcccagaggacagccaggcaggccctgggagggagtttagaaagacagtcctggtgaatgggcttcaagtggtcacaaagagggtggctgtgaggtgaccccagacactgcagaacgatgtgcaccctctgcgttttggatgtccttggaatgtgggagcctagaaataaccctgtggatggaattggggcagcggctgctggagatctgtgtgccttgccttccttcagcaggaccgtctaggtgcgcagccacctatggatgcgtcccagccagccccgtcgctctcgtccatcctcagagacaaagaagagggcagggagtttgggcttggttttgaactttcctttcaatgtagcaaagcattcctagttaaccagagccttggaatctactgcctgctggccaggctttaaaatgaaaagtgttttaatgctgccataaaagggaggcgggggggaggaagggaaaataaaggcatctttccaagtactcatctaatttaattgtcaaaagattgataggccatgaattacttctccatctcactaagggttaaaggcgtgcaaccccccactggctgtgtcccctgccaccgaagtgagtgacctgccctacaaccaggtgggaccacctgtgctgcagtccggaggggcttctgcaggaagcactcaccccccacaccttccccggcctgagcttcccctacctttcgtcaccacctgagggcatgagcacaggccatggggcgtgcctggtgagtctgcctgtggttcaggcttagcctgtggtctcctgtgtgctgctgcccgcatgggatgcgcaggggaggcgtggggatccgcaggagggtggttgggatacaccggatacctctgctctcattgcttgtttgcaaatgctctatggacatttgtgtgctaaatcctattaaataaaaaagacgggttaaaacccagatgctgtatattcatttgtaattatgtataaagtgaagcagttttaaactgtaaagatttttttcagtgtgttttctcgaattttgccacaacatactggcttcgtattttatttatctttctttctagttaccagcttcagacccttgtaaagtctccctcagccctttcaaaaaataataaatttcctgtgaagtt

SEQ ID NO: 167520 - DNA, 827 bp, Artificial Sequence
  derived and/or modified sequence
cccagtgatgacatggacagcatcatcttcccaaagccagaggaagagcatttggcctgtgatatcaccggatccagttcatccaccgatgacacggcttcactggaccgacattcttctcatggcagtgatgtgtctctctcccagattttaaagccaaacaggtcaagagatcggcaaagccttgatggattctacagccatgggatgggagctgagggtcgagaaagtgagagtgagcctgctgacccaggcgacgtggaggaggaggagatggacagtatcactgaagtgcctgcaaactgctctgtcctaaggagctccatgcgctctctttctcccttccggaggcacagctgggggcctgggaaaaatgcagccagcgatgcagaaatgaaccaccggagttcaatgcgagttcttggggatgttgtcaggagacctcccattcataggagaagtatgagctggtgcccctctggtgtgcagtactctgctggcctgagtgctgactttaattacagaagtttcagtctagaaggcttgacaggaggagctggtgtcggaaacaagccatcctcatctctagaagtaagctctgcaaatgccgaagagctcagacacccattcagtggtgaggaacgggttgactctttggtgtcactttcagaagaggatctggagtcagaccagagagaacataggatgtttgatcagcagatatgtcacagatctaagcagcagggatttaattactgtacatcagccatttcctctccattgacaaaatccatctcattaatgacaatcagccatcctggattgga

SEQ ID NO: 167521 - DNA, 8454 bp, Artificial Sequence
  derived and/or modified sequence
atgaagctgaacccccagcaggcccccctgtacggcgactgcgtggtgaccgtgctgctggccgaggaggacaaggccgaggacgacgtggtgttctacctggtgttcctgggcagcaccctgagacactgcaccagcaccagaaaggtgagcagcgacaccctggagaccatcgcccccggccacgactgctgcgagaccgtgaaggtgcagctgtgcgccagcaaggagggcctgcccgtgttcgtggtggccgaggaggacttccacttcgtgcaggacgaggcctacgacgccgcccagttcctggccaccagcgccggcaaccagcaggccctgaacttcaccagattcctggaccagagcggcccccccagcggcgacgtgaacagcctggacaagaagctggtgctggccttcagacacctgaagctgcccaccgagtggaacgtgctgggcaccgaccagagcctgcacgacgccggccccagagagaccctgatgcacttcgccgtgagactgggcctgctgagactgacctggttcctgctgcagaagcccggcggcagaggcgccctgagcatccacaaccaggagggcgccacccccgtgagcctggccctggagagaggctaccacaagctgcaccagctgctgaccgaggagaacgccggcgagcccgacagctggagcagcctgagctacgagatcccctacggcgactgcagcgtgagacaccacagagagctggacatctacaccctgaccagcgagagcgacagccaccacgagcaccccttccccggcgacggctgcaccggccccatcttcaagctgatgaacatccagcagcagctgatgaagaccaacctgaagcagatggacagcctgatgcccctgatgatgaccgcccaggaccccagcagcgcccccgagaccgacggccagttcctgccctgcgcccccgagcccaccgacccccagagactgagcagcagcgaggagaccgagagcacccagtgctgccccggcagccccgtggcccagaccgagagcccctgcgacctgagcagcatcgtggaggaggagaacaccgacagaagctgcagaaagaagaacaagggcgtggagagaaagggcgaggaggtggagcccgcccccatcgtggacagcggcaccgtgagcgaccaggacagctgcctgcagagcctgcccgactgcggcgtgaagggcaccgagggcctgagcagctgcggcaacagaaacgaggagaccggcaccaagagcagcggcatgcccaccgaccaggagagcctgagcagcggcgacgccgtgctgcagagagacctggtgatggagcccggcaccgcccagtacagcagcggcggcgagctgggcggcatcagcaccaccaacgtgagcacccccgacaccgccggcgagatggagcacggcctgatgaaccccgacgccaccgtgtggaagaacgtgctgcagggcggcgagagcaccaaggagagattcgagaacagcaacatcggcaccgccggcgccagcgacgtgcacgtgaccagcaagcccgtggacaagatcagcgtgcccaactgcgcccccgccgccagcagcctggacggcaacaagcccgccgagagcagcctggccttcagcaacgaggagaccagcaccgagaagaccgccgagaccgagaccagcagaagcagagaggagagcgccgacgcccccgtggaccagaacagcgtggtgatccccgccgccgccaaggacaagatcagcgacggcctggagccctacaccctgctggccgccggcatcggcgaggccatgagccccagcgacctggccctgctgggcctggaggaggacgtgatgccccaccagaacagcgagaccaacagcagccacgcccagagccagaagggcaagagcagccccatctgcagcaccaccggcgacgacaagctgtgcgccgacagcgcctgccagcagaacaccgtgaccagcagcggcgacctggtggccaagctgtgcgacaacatcgtgagcgagagcgagagcaccaccgccagacagcccagcagccaggacccccccgacgccagccactgcgaggacccccaggcccacaccgtgaccagcgaccccgtgagagacacccaggagagagccgacttctgccccttcaaggtggtggacaacaagggccagagaaaggacgtgaagctggacaagcccctgaccaacatgctggaggtggtgagccacccccaccccgtggtgcccaagatggagaaggagctggtgcccgaccaggccgtgatcagcgacagcaccttcagcctggccaacagccccggcagcgagagcgtgaccaaggacgacgccctgagcttcgtgcccagccagaaggagaagggcaccgccacccccgagctgcacaccgccaccgactacagagacggccccgacggcaacagcaacgagcccgacaccagacccctggaggacagagccgtgggcctgagcaccagcagcaccgccgccgagctgcagcacggcatgggcaacaccagcctgaccggcctgggcggcgagcacgagggccccgccccccccgccatccccgaggccctgaacatcaagggcaacaccgacagcagcctgcagagcgtgggcaaggccaccctggccctggacagcgtgctgaccgaggagggcaagctgctggtggtgagcgagagcagcgccgcccaggagcaggacaaggacaaggccgtgacctgcagcagcatcaaggagaacgccctgagcagcggcaccctgcaggaggagcagagaacccccccccccggccaggacacccagcagttccacgagaagagcatcagcgccgactgcgccaaggacaaggccctgcagctgagcaacagccccggcgccagcagcgccttcctgaaggccgagaccgagcacaacaaggaggtggccccccaggtgagcctgctgacccagggcggcgccgcccagagcctggtgccccccggcgccagcctggccaccgagagcagacaggaggccctgggcgccgagcacaacagcagcgccctgctgccctgcctgctgcccgacggcagcgacggcagcgacgccctgaactgcagccagcccagccccctggacgtgggcgtgaagaacacccagagccagggcaagaccagcgcctgcgaggtgagcggcgacgtgaccgtggacgtgaccggcgtgaacgccctgcagggcatggccgagcccagaagagagaacatcagccacaacacccaggacatcctgatccccaacgtgctgctgagccaggagaagaacgccgtgctgggcctgcccgtggccctgcaggacaaggccgtgaccgacccccagggcgtgggcacccccgagatgatccccctggactgggagaagggcaagctggagggcgccgaccacagctgcaccatgggcgacgccgaggaggcccagatcgacgacgaggcccaccccgtgctgctgcagcccgtggccaaggagctgcccaccgacatggagctgagcgcccacgacgacggcgcccccgccggcgtgagagaggtgatgagagccccccccagcggcagagagagaagcacccccagcctgccctgcatggtgagcgcccaggacgcccccctgcccaagggcgccgacctgatcgaggaggccgccagcagaatcgtggacgccgtgatcgagcaggtgaaggccgccggcgccctgctgaccgagggcgaggcctgccacatgagcctgagcagccccgagctgggccccctgaccaagggcctggagagcgccttcaccgagaaggtgagcaccttcccccccggcgagagcctgcccatgggcagcacccccgaggaggccaccggcagcctggccggctgcttcgccggcagagaggagcccgagaagatcatcctgcccgtgcagggccccgagcccgccgccgagatgcccgacgtgaaggccgaggacgaggtggacttcagagccagcagcatcagcgaggaggtggccgtgggcagcatcgccgccaccctgaagatgaagcagggccccatgacccaggccatcaacagagagaactggtgcaccatcgagccctgccccgacgccgccagcctgctggccagcaagcagagccccgagtgcgagaacttcctggacgtgggcctgggcagagagtgcaccagcaagcagggcgtgctgaagagagagagcggcagcgacagcgacctgttccacagccccagcgacgacatggacagcatcatcttccccaagcccgaggaggagcacctggcctgcgacatcaccggcagcagcagcagcaccgacgacaccgccagcctggacagacacagcagccacggcagcgacgtgagcctgagccagatcctgaagcccaacagaagcagagacagacagagcctggacggcttctacagccacggcatgggcgccgagggcagagagagcgagagcgagcccgccgaccccggcgacgtggaggaggaggagatggacagcatcaccgaggtgcccgccaactgcagcgtgctgagaagcagcatgagaagcctgagccccttcagaagacacagctggggccccggcaagaacgccgccagcgacgccgagatgaaccacagaagcatgagctggtgccccagcggcgtgcagtacagcgccggcctgagcgccgacttcaactacagaagcttcagcctggagggcctgaccggcggcgccggcgtgggcaacaagcccagcagcagcctggaggtgagcagcgccaacgccgaggagctgagacaccccttcagcggcgaggagagagtggacagcctggtgagcctgagcgaggaggacctggagagcgaccagagagagcacagaatgttcgaccagcagatctgccacagaagcaagcagcagggcttcaactactgcaccagcgccatcagcagccccctgaccaagagcatcagcctgatgaccatcagccaccccggcctggacaacagcagacccttccacagcaccttccacaacaccagcgccaacctgaccgagagcatcaccgaggagaactacaacttcctgccccacagccccagcaagaaggacagcgagtggaagagcggcaccaaggtgagcagaaccttcagctacatcaagaacaagatgagcagcagcaagaagagcaaggagaaggagaaggagaaggacaagatcaaggagaaggagaaggacagcaaggacaaggagaaggacaagaagaccgtgaacggccacaccttcagcagcatccccgtggtgggccccatcagctgcagccagtgcatgaagcccttcaccaacaaggacgcctacacctgcgccaactgcagcgccttcgtgcacaagggctgcagagagagcctggccagctgcgccaaggtgaagatgaagcagcccaagggcagcctgcaggcccacgacaccagcagcctgcccaccgtgatcatgagaaacaagcccagccagcccaaggagagacccagaagcgccgtgctgctggtggacgagaccgccaccacccccatcttcgccaacagaagaagccagcagagcgtgagcctgagcaagagcgtgagcatccagaacatcaccggcgtgggcaacgacgagaacatgagcaacacctggaagttcctgagccacagcaccgacagcctgaacaagatcagcaaggtgaacgagagcaccgagagcctgaccgacgagggcgtgggcaccgacatgaacgagggccagctgctgggcgacttcgagatcgagagcaagcagctggaggccgagagctggagcagaatcatcgacagcaagttcctgaagcagcagaagaaggacgtggtgaagagacaggaggtgatctacgagctgatgcagaccgagttccaccacgtgagaaccctgaagatcatgagcggcgtgtacagccagggcatgatggccgacctgctgttcgagcagcagatggtggagaagctgttcccctgcctggacgagctgatcagcatccacagccagttcttccagagaatcctggagagaaagaaggagagcctggtggacaagagcgagaagaacttcctgatcaagagaatcggcgacgtgctggtgaaccagttcagcggcgagaacgccgagagactgaagaagacctacggcaagttctgcggccagcacaaccagagcgtgaactacttcaaggacctgtacgccaaggacaagagattccaggccttcgtgaagaagaagatgagcagcagcgtggtgagaagactgggcatccccgagtgcatcctgctggtgacccagagaatcaccaagtaccccgtgctgttccagagaatcctgcagtgcaccaaggacaacgaggtggagcaggaggacctggcccagagcctgagcctggtgaaggacgtgatcggcgccgtggacagcaaggtggccagctacgagaagaaggtgagactgaacgagatctacaccaagaccgacagcaagagcatcatgagaatgaagagcggccagatgttcgccaaggaggacctgaagagaaagaagctggtgagagacggcagcgtgttcctgaagaacgccgccggcagactgaaggaggtgcaggccgtgctgctgaccgacatcctggtgttcctgcaggagaaggaccagaagtacatcttcgccagcctggaccagaagagcaccgtgatcagcctgaagaagctgatcgtgagagaggtggcccacgaggagaagggcctgttcctgatcagcatgggcatgaccgaccccgagatggtggaggtgcacgccagcagcaaggaggagagaaacagctggatccagatcatccaggacaccatcaacaccctgaacagagacgaggacgagggcatccccagcgagaacgaggaggagaagaagatgctggacaccagagccagagagctgaaggagcagctgcaccagaaggaccagaagatcctgctgctgctggaggagaaggagatgatcttcagagacatggccgagtgcagcacccccctgcccgaggactgcagccccacccacagccccagagtgctgttcagaagcaacaccgaggaggccctgaagggcggccccctgatgaagagcgccatcaacgaggtggagatcctgcagggcctggtgagcggcaacctgggcggcaccctgggccccaccgtgagcagccccatcgagcaggacgtggtgggccccgtgagcctgcccagaagagccgagaccttcggcggcttcgacagccaccagatgaacgccagcaagggcggcgagaaggaggagggcgacgacggccaggacctgagaagaaccgagagcgacagcggcctgaagaagggcggcaacgccaacctggtgttcatgctgaagagaaacagcgagcaggtggtgcagagcgtggtgcacctgtacgagctgctgagcgccctgcagggcgtggtgctgcagcaggacagctacatcgaggaccagaagctggtgctgagcgagagagccctgaccagaagcctgagcagacccagcagcctgatcgagcaggagaagcagagaagcctggagaagcagagacaggacctggccaacctgcagaagcagcaggcccagtacctggaggagaagagaagaagagagagagagtgggaggccagagagagagagctgagagagagagaggccctgctggcccagagagaggaggaggtgcagcagggccagcaggacctggagaaggagagagaggagctgcagcagaagaagggcacctaccagtacgacctggagagactgagagccgcccagaagcagctggagagagagcaggagcagctgagaagagaggccgagagactgagccagagacagaccgagagagacctgtgccaggtgagccacccccacaccaagctgatgagaatccccagcttcttccccagccccgaggagccccccagccccagcgcccccagcatcgccaagagcggcagcctggacagcgagctgagcgtgagccccaagagaaacagcatcagcagaacccacaaggacaagggccccttccacatcctgagcagcaccagccagaccaacaagggccccgagggccagagccaggcccccgccagcaccagcgccagcaccagactgttcggcctgaccaagcccaaggagaagaaggagaagaagaagaagaacaagaccagcagaagccagcccggcgacggccccgccagcgaggtgagcgccgagggcgaggagatcttctgctag

SEQ ID NO: 167522 - DNA, 8451 bp, Artificial Sequence
  derived and/or modified sequence
aagctgctggagaagcagccccccatcgagggcgactgcgtggtgaccgtgctgctggccgaggaggacaaggccgaggacgacgtggtgttctacctggtgttcctgggcagcaccctgagacactgcaccagcaccagaaaggtgagcagcgacaccctggagaccatcgcccccggccacgactgctgcgagaccgtgaaggtgcagctgtgcgccagcaaggagggcctgcccgtgttcgtggtggccgaggaggacttccacttcgtgcaggacgaggcctacgacgccgcccagttcctggccaccagcgccggcaaccagcaggccctgaacttcaccagattcctggaccagagcggcccccccagcggcgacgtgaacagcctggacaagaagctggtgctggccttcagacacctgaagctgcccaccgagtggaacgtgctgggcaccgaccagagcctgcacgacgccggccccagagagaccctgatgcacttcgccgtgagactgggcctgctgagactgacctggttcctgctgcagaagcccggcggcagaggcgccctgagcatccacaaccaggagggcgccacccccgtgagcctggccctggagagaggctaccacaagctgcaccagctgctgaccgaggagaacgccggcgagcccgacagctggagcagcctgagctacgagatcccctacggcgactgcagcgtgagacaccacagagagctggacatctacaccctgaccagcgagagcgacagccaccacgagcaccccttccccggcgacggctgcaccggccccatcttcaagctgatgaacatccagcagcagctgatgaagaccaacctgaagcagatggacagcctgatgcccctgatgatgaccgcccaggaccccagcagcgcccccgagaccgacggccagttcctgccctgcgcccccgagcccaccgacccccagagactgagcagcagcgaggagaccgagagcacccagtgctgccccggcagccccgtggcccagaccgagagcccctgcgacctgagcagcatcgtggaggaggagaacaccgacagaagctgcagaaagaagaacaagggcgtggagagaaagggcgaggaggtggagcccgcccccatcgtggacagcggcaccgtgagcgaccaggacagctgcctgcagagcctgcccgactgcggcgtgaagggcaccgagggcctgagcagctgcggcaacagaaacgaggagaccggcaccaagagcagcggcatgcccaccgaccaggagagcctgagcagcggcgacgccgtgctgcagagagacctggtgatggagcccggcaccgcccagtacagcagcggcggcgagctgggcggcatcagcaccaccaacgtgagcacccccgacaccgccggcgagatggagcacggcctgatgaaccccgacgccaccgtgtggaagaacgtgctgcagggcggcgagagcaccaaggagagattcgagaacagcaacatcggcaccgccggcgccagcgacgtgcacgtgaccagcaagcccgtggacaagatcagcgtgcccaactgcgcccccgccgccagcagcctggacggcaacaagcccgccgagagcagcctggccttcagcaacgaggagaccagcaccgagaagaccgccgagaccgagaccagcagaagcagagaggagagcgccgacgcccccgtggaccagaacagcgtggtgatccccgccgccgccaaggacaagatcagcgacggcctggagccctacaccctgctggccgccggcatcggcgaggccatgagccccagcgacctggccctgctgggcctggaggaggacgtgatgccccaccagaacagcgagaccaacagcagccacgcccagagccagaagggcaagagcagccccatctgcagcaccaccggcgacgacaagctgtgcgccgacagcgcctgccagcagaacaccgtgaccagcagcggcgacctggtggccaagctgtgcgacaacatcgtgagcgagagcgagagcaccaccgccagacagcccagcagccaggacccccccgacgccagccactgcgaggacccccaggcccacaccgtgaccagcgaccccgtgagagacacccaggagagagccgacttctgccccttcaaggtggtggacaacaagggccagagaaaggacgtgaagctggacaagcccctgaccaacatgctggaggtggtgagccacccccaccccgtggtgcccaagatggagaaggagctggtgcccgaccaggccgtgatcagcgacagcaccttcagcctggccaacagccccggcagcgagagcgtgaccaaggacgacgccctgagcttcgtgcccagccagaaggagaagggcaccgccacccccgagctgcacaccgccaccgactacagagacggccccgacggcaacagcaacgagcccgacaccagacccctggaggacagagccgtgggcctgagcaccagcagcaccgccgccgagctgcagcacggcatgggcaacaccagcctgaccggcctgggcggcgagcacgagggccccgccccccccgccatccccgaggccctgaacatcaagggcaacaccgacagcagcctgcagagcgtgggcaaggccaccctggccctggacagcgtgctgaccgaggagggcaagctgctggtggtgagcgagagcagcgccgcccaggagcaggacaaggacaaggccgtgacctgcagcagcatcaaggagaacgccctgagcagcggcaccctgcaggaggagcagagaacccccccccccggccaggacacccagcagttccacgagaagagcatcagcgccgactgcgccaaggacaaggccctgcagctgagcaacagccccggcgccagcagcgccttcctgaaggccgagaccgagcacaacaaggaggtggccccccaggtgagcctgctgacccagggcggcgccgcccagagcctggtgccccccggcgccagcctggccaccgagagcagacaggaggccctgggcgccgagcacaacagcagcgccctgctgccctgcctgctgcccgacggcagcgacggcagcgacgccctgaactgcagccagcccagccccctggacgtgggcgtgaagaacacccagagccagggcaagaccagcgcctgcgaggtgagcggcgacgtgaccgtggacgtgaccggcgtgaacgccctgcagggcatggccgagcccagaagagagaacatcagccacaacacccaggacatcctgatccccaacgtgctgctgagccaggagaagaacgccgtgctgggcctgcccgtggccctgcaggacaaggccgtgaccgacccccagggcgtgggcacccccgagatgatccccctggactgggagaagggcaagctggagggcgccgaccacagctgcaccatgggcgacgccgaggaggcccagatcgacgacgaggcccaccccgtgctgctgcagcccgtggccaaggagctgcccaccgacatggagctgagcgcccacgacgacggcgcccccgccggcgtgagagaggtgatgagagccccccccagcggcagagagagaagcacccccagcctgccctgcatggtgagcgcccaggacgcccccctgcccaagggcgccgacctgatcgaggaggccgccagcagaatcgtggacgccgtgatcgagcaggtgaaggccgccggcgccctgctgaccgagggcgaggcctgccacatgagcctgagcagccccgagctgggccccctgaccaagggcctggagagcgccttcaccgagaaggtgagcaccttcccccccggcgagagcctgcccatgggcagcacccccgaggaggccaccggcagcctggccggctgcttcgccggcagagaggagcccgagaagatcatcctgcccgtgcagggccccgagcccgccgccgagatgcccgacgtgaaggccgaggacgaggtggacttcagagccagcagcatcagcgaggaggtggccgtgggcagcatcgccgccaccctgaagatgaagcagggccccatgacccaggccatcaacagagagaactggtgcaccatcgagccctgccccgacgccgccagcctgctggccagcaagcagagccccgagtgcgagaacttcctggacgtgggcctgggcagagagtgcaccagcaagcagggcgtgctgaagagagagagcggcagcgacagcgacctgttccacagccccagcgacgacatggacagcatcatcttccccaagcccgaggaggagcacctggcctgcgacatcaccggcagcagcagcagcaccgacgacaccgccagcctggacagacacagcagccacggcagcgacgtgagcctgagccagatcctgaagcccaacagaagcagagacagacagagcctggacggcttctacagccacggcatgggcgccgagggcagagagagcgagagcgagcccgccgaccccggcgacgtggaggaggaggagatggacagcatcaccgaggtgcccgccaactgcagcgtgctgagaagcagcatgagaagcctgagccccttcagaagacacagctggggccccggcaagaacgccgccagcgacgccgagatgaaccacagaagcatgagctggtgccccagcggcgtgcagtacagcgccggcctgagcgccgacttcaactacagaagcttcagcctggagggcctgaccggcggcgccggcgtgggcaacaagcccagcagcagcctggaggtgagcagcgccaacgccgaggagctgagacaccccttcagcggcgaggagagagtggacagcctggtgagcctgagcgaggaggacctggagagcgaccagagagagcacagaatgttcgaccagcagatctgccacagaagcaagcagcagggcttcaactactgcaccagcgccatcagcagccccctgaccaagagcatcagcctgatgaccatcagccaccccggcctggacaacagcagacccttccacagcaccttccacaacaccagcgccaacctgaccgagagcatcaccgaggagaactacaacttcctgccccacagccccagcaagaaggacagcgagtggaagagcggcaccaaggtgagcagaaccttcagctacatcaagaacaagatgagcagcagcaagaagagcaaggagaaggagaaggagaaggacaagatcaaggagaaggagaaggacagcaaggacaaggagaaggacaagaagaccgtgaacggccacaccttcagcagcatccccgtggtgggccccatcagctgcagccagtgcatgaagcccttcaccaacaaggacgcctacacctgcgccaactgcagcgccttcgtgcacaagggctgcagagagagcctggccagctgcgccaaggtgaagatgaagcagcccaagggcagcctgcaggcccacgacaccagcagcctgcccaccgtgatcatgagaaacaagcccagccagcccaaggagagacccagaagcgccgtgctgctggtggacgagaccgccaccacccccatcttcgccaacagaagaagccagcagagcgtgagcctgagcaagagcgtgagcatccagaacatcaccggcgtgggcaacgacgagaacatgagcaacacctggaagttcctgagccacagcaccgacagcctgaacaagatcagcaaggtgaacgagagcaccgagagcctgaccgacgagggcgtgggcaccgacatgaacgagggccagctgctgggcgacttcgagatcgagagcaagcagctggaggccgagagctggagcagaatcatcgacagcaagttcctgaagcagcagaagaaggacgtggtgaagagacaggaggtgatctacgagctgatgcagaccgagttccaccacgtgagaaccctgaagatcatgagcggcgtgtacagccagggcatgatggccgacctgctgttcgagcagcagatggtggagaagctgttcccctgcctggacgagctgatcagcatccacagccagttcttccagagaatcctggagagaaagaaggagagcctggtggacaagagcgagaagaacttcctgatcaagagaatcggcgacgtgctggtgaaccagttcagcggcgagaacgccgagagactgaagaagacctacggcaagttctgcggccagcacaaccagagcgtgaactacttcaaggacctgtacgccaaggacaagagattccaggccttcgtgaagaagaagatgagcagcagcgtggtgagaagactgggcatccccgagtgcatcctgctggtgacccagagaatcaccaagtaccccgtgctgttccagagaatcctgcagtgcaccaaggacaacgaggtggagcaggaggacctggcccagagcctgagcctggtgaaggacgtgatcggcgccgtggacagcaaggtggccagctacgagaagaaggtgagactgaacgagatctacaccaagaccgacagcaagagcatcatgagaatgaagagcggccagatgttcgccaaggaggacctgaagagaaagaagctggtgagagacggcagcgtgttcctgaagaacgccgccggcagactgaaggaggtgcaggccgtgctgctgaccgacatcctggtgttcctgcaggagaaggaccagaagtacatcttcgccagcctggaccagaagagcaccgtgatcagcctgaagaagctgatcgtgagagaggtggcccacgaggagaagggcctgttcctgatcagcatgggcatgaccgaccccgagatggtggaggtgcacgccagcagcaaggaggagagaaacagctggatccagatcatccaggacaccatcaacaccctgaacagagacgaggacgagggcatccccagcgagaacgaggaggagaagaagatgctggacaccagagccagagagctgaaggagcagctgcaccagaaggaccagaagatcctgctgctgctggaggagaaggagatgatcttcagagacatggccgagtgcagcacccccctgcccgaggactgcagccccacccacagccccagagtgctgttcagaagcaacaccgaggaggccctgaagggcggccccctgatgaagagcgccatcaacgaggtggagatcctgcagggcctggtgagcggcaacctgggcggcaccctgggccccaccgtgagcagccccatcgagcaggacgtggtgggccccgtgagcctgcccagaagagccgagaccttcggcggcttcgacagccaccagatgaacgccagcaagggcggcgagaaggaggagggcgacgacggccaggacctgagaagaaccgagagcgacagcggcctgaagaagggcggcaacgccaacctggtgttcatgctgaagagaaacagcgagcaggtggtgcagagcgtggtgcacctgtacgagctgctgagcgccctgcagggcgtggtgctgcagcaggacagctacatcgaggaccagaagctggtgctgagcgagagagccctgaccagaagcctgagcagacccagcagcctgatcgagcaggagaagcagagaagcctggagaagcagagacaggacctggccaacctgcagaagcagcaggcccagtacctggaggagaagagaagaagagagagagagtgggaggccagagagagagagctgagagagagagaggccctgctggcccagagagaggaggaggtgcagcagggccagcaggacctggagaaggagagagaggagctgcagcagaagaagggcacctaccagtacgacctggagagactgagagccgcccagaagcagctggagagagagcaggagcagctgagaagagaggccgagagactgagccagagacagaccgagagagacctgtgccaggtgagccacccccacaccaagctgatgagaatccccagcttcttccccagccccgaggagccccccagccccagcgcccccagcatcgccaagagcggcagcctggacagcgagctgagcgtgagccccaagagaaacagcatcagcagaacccacaaggacaagggccccttccacatcctgagcagcaccagccagaccaacaagggccccgagggccagagccaggcccccgccagcaccagcgccagcaccagactgttcggcctgaccaagcccaaggagaagaaggagaagaagaagaagaacaagaccagcagaagccagcccggcgacggccccgccagcgaggtgagcgccgagggcgaggagatcttctgctag

SEQ ID NO: 167523 - DNA, 828 bp, Artificial Sequence
  derived and/or modified sequence
cccagcgacgacatggacagcatcatcttccccaagcccgaggaggagcacctggcctgcgacatcaccggcagcagcagcagcaccgacgacaccgccagcctggacagacacagcagccacggcagcgacgtgagcctgagccagatcctgaagcccaacagaagcagagacagacagagcctggacggcttctacagccacggcatgggcgccgagggcagagagagcgagagcgagcccgccgaccccggcgacgtggaggaggaggagatggacagcatcaccgaggtgcccgccaactgcagcgtgctgagaagcagcatgagaagcctgagccccttcagaagacacagctggggccccggcaagaacgccgccagcgacgccgagatgaaccacagaagcagcatgagagtgctgggcgacgtggtgagaagaccccccatccacagaagaagcatgagctggtgccccagcggcgtgcagtacagcgccggcctgagcgccgacttcaactacagaagcttcagcctggagggcctgaccggcggcgccggcgtgggcaacaagcccagcagcagcctggaggtgagcagcgccaacgccgaggagctgagacaccccttcagcggcgaggagagagtggacagcctggtgagcctgagcgaggaggacctggagagcgaccagagagagcacagaatgttcgaccagcagatctgccacagaagcaagcagcagggcttcaactactgcaccagcgccatcagcagccccctgaccaagagcatcagcctgatgaccatcagccaccccggcctgtag

SEQ ID NO: 167524 - DNA, 117 bp, Artificial Sequence
  derived and/or modified sequence
atgaagctgaacccccagcaggcccccctgtacggcgactgcgtggtgaccgtgctgctggccgaggaggacaaggccgaggacgacgtggtgttctacctggtgttcctgggctag

SEQ ID NO: 167525 - DNA, 540 bp, Artificial Sequence
  derived and/or modified sequence
atgaagctgaacccccagcaggcccccctgtacggcgactgcgtggtgaccgtgctgctggccgaggaggacaaggccgaggacgacgtggtgttctacctggtgttcctgggcagcaccctgagacactgcaccagcaccagaaaggtgagcagcgacaccctggagaccatcgcccccggccacgactgctgcgagaccgtgaaggtgcagctgtgcgccagcaaggagggcctgcccgtgttcgtggtggccgaggaggacttccacttcgtgcaggacgaggcctacgacgccgcccagttcctggccaccagcgccggcaaccagcaggccctgaacttcaccagattcctggaccagagcggcccccccagcggcgacgtgaacagcctggacaagaagctggtgctggccttcagacacctgaagctgcccaccgagtggaacgtgctgggcaccgaccagagcctgcacggcgagaacctgtacgacctgcagacccacttcaagttcgtgatcttcctgctgttcttctag

SEQ ID NO: 167526 - protein, 734 aa, Artificial Sequence
  derived and/or modified sequence
MSGFDDPGIFYSDSFGGDAQADEGQARKSQLQRRFKEFLRQYRVGTDRTGFTFKYRDELKRHYNLGEYWIEVEMEDLASFDEDLADYLYKQPAEHLQLLEEAAKEVADEVTRPRPSGEEVLQDIQVMLKSDASPSSIRSLKSDMMSHLVKIPGIIIAASAVRAKATRISIQCRSCRNTLTNIAMRPGLEGYALPRKCNTDQAGRPKCPLDPYFIMPDKCKCVDFQTLKLQELPDAVPHGEMPRHMQLYCDRYLCDKVVPGNRVTIMGIYSIKKFGLTTSRGRDRVGVGIRSSYIRVLGIQVDTDGSGRSFAGAVSPQEEEEFRRLAALPNVYEVISKSIAPSIFGGTDMKKAIACLLFGGSRKRLPDGLTRRGDINLLMLGDPGTAKSQLLKFVEKCSPIGVYTSGKGSSAAGLTASVMRDPSSRNFIMEGGAMVLADGGVVCIDEFDKMREDDRVAIHEAMEQQTISIAKAGITTTLNSRCSVLAAANSVFGRWDETKGEDNIDFMPTILSRFDMIFIVKDEHNEERDVMLAKHVITLHVSALTQTQAVEGEIDLAKLKKFIAYCRVKCGPRLSAEAAEKLKNRYIIMRSGARQHERDSDRRSSIPITVRQLEAIVRIAEALSKMKLQPFATEADVEEALRLFQVSTLDAALSGTLSGVEGFTSQEDQEMLSRIEKQLKRRFAIGSQVSEHSIIKDFTKQKYPEHAIHKVLQLMLRRGEIQHRMQRKVLYRLK

SEQ ID NO: 167527 - protein, 691 aa, Artificial Sequence
  derived and/or modified sequence
MSGFDDPGIFYSDSFGGDAQADEGQARKSQLQRRFKEFLRQYRVGTDRTGFTFKYRDELKRHYNLGEYWIEVEMEDLASFDEDLADYLYKQPAEHLQLSDMMSHLVKIPGIIIAASAVRAKATRISIQCRSCRNTLTNIAMRPGLEGYALPRKCNTDQAGRPKCPLDPYFIMPDKCKCVDFQTLKLQELPDAVPHGEMPRHMQLYCDRYLCDKVVPGNRVTIMGIYSIKKFGLTTSRGRDRVGVGIRSSYIRVLGIQVDTDGSGRSFAGAVSPQEEEEFRRLAALPNVYEVISKSIAPSIFGGTDMKKAIACLLFGGSRKRLPDGLTRRGDINLLMLGDPGTAKSQLLKFVEKCSPIGVYTSGKGSSAAGLTASVMRDPSSRNFIMEGGAMVLADGGVVCIDEFDKMREDDRVAIHEAMEQQTISIAKAGITTTLNSRCSVLAAANSVFGRWDETKGEDNIDFMPTILSRFDMIFIVKDEHNEERDVMLAKHVITLHVSALTQTQAVEGEIDLAKLKKFIAYCRVKCGPRLSAEAAEKLKNRYIIMRSGARQHERDSDRRSSIPITVRQLEAIVRIAEALSKMKLQPFATEADVEEALRLFQVSTLDAALSGTLSGVEGFTSQEDQEMLSRIEKQLKRRFAIGSQVSEHSIIKDFTKQKYPEHAIHKVLQLMLRRGEIQHRMQRKVLYRLK

SEQ ID NO: 167528 - DNA, 2076 bp, Artificial Sequence
  derived and/or modified sequence
atgagcggcttcgacgaccccggcatcttctacagcgacagcttcggcggcgacgcccaggccgacgagggccaggccagaaagagccagctgcagagaagattcaaggagttcctgagacagtacagagtgggcaccgacagaaccggcttcaccttcaagtacagagacgagctgaagagacactacaacctgggcgagtactggatcgaggtggagatggaggacctggccagcttcgacgaggacctggccgactacctgtacaagcagcccgccgagcacctgcagctgagcgacatgatgagccacctggtgaagatccccggcatcatcatcgccgccagcgccgtgagagccaaggccaccagaatcagcatccagtgcagaagctgcagaaacaccctgaccaacatcgccatgagacccggcctggagggctacgccctgcccagaaagtgcaacaccgaccaggccggcagacccaagtgccccctggacccctacttcatcatgcccgacaagtgcaagtgcgtggacttccagaccctgaagctgcaggagctgcccgacgccgtgccccacggcgagatgcccagacacatgcagctgtactgcgacagatacctgtgcgacaaggtggtgcccggcaacagagtgaccatcatgggcatctacagcatcaagaagttcggcctgaccaccagcagaggcagagacagagtgggcgtgggcatcagaagcagctacatcagagtgctgggcatccaggtggacaccgacggcagcggcagaagcttcgccggcgccgtgagcccccaggaggaggaggagttcagaagactggccgccctgcccaacgtgtacgaggtgatcagcaagagcatcgcccccagcatcttcggcggcaccgacatgaagaaggccatcgcctgcctgctgttcggcggcagcagaaagagactgcccgacggcctgaccagaagaggcgacatcaacctgctgatgctgggcgaccccggcaccgccaagagccagctgctgaagttcgtggagaagtgcagccccatcggcgtgtacaccagcggcaagggcagcagcgccgccggcctgaccgccagcgtgatgagagaccccagcagcagaaacttcatcatggagggcggcgccatggtgctggccgacggcggcgtggtgtgcatcgacgagttcgacaagatgagagaggacgacagagtggccatccacgaggccatggagcagcagaccatcagcatcgccaaggccggcatcaccaccaccctgaacagcagatgcagcgtgctggccgccgccaacagcgtgttcggcagatgggacgagaccaagggcgaggacaacatcgacttcatgcccaccatcctgagcagattcgacatgatcttcatcgtgaaggacgagcacaacgaggagagagacgtgatgctggccaagcacgtgatcaccctgcacgtgagcgccctgacccagacccaggccgtggagggcgagatcgacctggccaagctgaagaagttcatcgcctactgcagagtgaagtgcggccccagactgagcgccgaggccgccgagaagctgaagaacagatacatcatcatgagaagcggcgccagacagcacgagagagacagcgacagaagaagcagcatccccatcaccgtgagacagctggaggccatcgtgagaatcgccgaggccctgagcaagatgaagctgcagcccttcgccaccgaggccgacgtggaggaggccctgagactgttccaggtgagcaccctggacgccgccctgagcggcaccctgagcggcgtggagggcttcaccagccaggaggaccaggagatgctgagcagaatcgagaagcagctgaagagaagattcgccatcggcagccaggtgagcgagcacagcatcatcaaggacttcaccaagcagaagtaccccgagcacgccatccacaaggtgctgcagctgatgctgagaagaggcgagatccagcacagaatgcagagaaaggtgctgtacagactgaagtag

SEQ ID NO: 167529 - DNA, 2076 bp, Artificial Sequence
  derived and/or modified sequence
atgagtgggtttgatgaccctggaatcttctactctgacagcttcggaggagatgcccaggctgatgaagggcaggcaagaaaatcccaactgcagcgccggttcaaggagttcctccggcaataccgcgtgggaacggatcggaccgggttcacatttaagtacagggatgaattaaaacggcactataacctcggagaatactggattgaagtggaaatggaggatttggccagcttcgacgaggatctggcagattacctctacaaacagcctgcggagcatttacagctctccgacatgatgtcccaccttgtgaagatccccgggataatcatcgctgccagcgctgtaagggccaaggctactagaattagcatccagtgcaggtcatgtcggaatacacttactaacattgccatgaggcccggactcgaaggctacgccctgccccgcaaatgtaatacagatcaagccggccgacccaaatgtcctctggatccctactttatcatgcccgataagtgtaaatgtgtggattttcaaaccctcaaactacaggaactgcctgacgcagtcccccacggggagatgccccggcacatgcaactgtactgtgatcgttacctttgcgataaagtggtgcccggtaaccgcgtgacaattatggggatatacagtattaagaaatttggcttgactactagtagagggcgggacagagtcggcgtgggaatccgcagtagctatattcgcgtactcggaatccaggtcgatacagacggcagcggcagaagttttgctggcgccgtgagccctcaggaggaagaagagttccgccgtcttgcagccctccccaatgtgtacgaagtaataagcaagagcatcgcaccctccattttcggcgggaccgatatgaagaaagcaatagcctgtctgctctttggtggctcccggaagcgcctgccagacggactgactaggcggggcgatattaatctgctgatgctgggtgacccgggaaccgccaaatcccagttgttgaaatttgtggaaaaatgtagtccaatcggagtctacacgtcaggtaaaggctcatctgctgccgggctgacagcgagcgtcatgcgcgatccatccagccgaaactttataatggaaggaggcgccatggtactggctgatggaggggttgtttgcatcgacgaatttgataaaatgcgggaagatgacagggttgcgatccacgaggccatggagcagcagactattagcatcgccaaggccggcataacgaccaccctgaactcccggtgcagcgtcctcgccgcagccaatagcgtatttggacgatgggacgaaaccaagggagaagataacatcgactttatgcctacaattttatctcggttcgatatgatattcatcgtcaaggacgagcacaacgaggaacgtgacgtaatgctggcaaagcatgtaattacattacacgtttcagccctgactcaaacgcaggccgttgagggagagattgatttagcaaagctgaaaaaattcatcgcgtactgtcgcgtcaagtgtgggccccggctgagcgcagaggccgccgagaaattgaagaacaggtacatcattatgcgctctggcgctcgtcaacacgaacgagattccgacagacgatcatccatccccatcacggtccggcagctggaggccatcgtacgtatcgcagaggccctgagtaagatgaaactgcagccttttgccaccgaagccgacgtggaggaggccctgcgtttatttcaagtgagtacgttagacgctgcattatctggaacactttcaggagtggaggggttcacttcccaggaggaccaagagatgttatcgcgcattgaaaagcagctcaagagacgttttgctatcggcagtcaggtctcagaacactcaattataaaggactttacaaaacaaaaatacccggaacacgctattcataaggtgctccagctcatgctgaggaggggagaaatccagcacagaatgcagagaaaagtactctatcgacttaaatag

SEQ ID NO: 167530 - DNA, 2076 bp, Artificial Sequence
  derived and/or modified sequence
atgagcggctttgatgatcctggcatcttctacagcgacagctttggaggagatgcccaggctgatgagggccaggccaggaagagccagctgcagaggcgcttcaaggagttcctgcggcagtacagagtgggcacagacagaacaggcttcaccttcaagtacagagatgagctgaagaggcactacaacctgggggagtactggattgaggtggagatggaggacctggccagctttgatgaggacctggccgactacctgtacaagcagcctgctgagcacctgcagctgagtgacatgatgagccacctggtgaagatccctggcatcatcatcgccgccagcgctgtgcgggccaaggccacccgcatcagcatccagtgccgcagctgcaggaacaccctgaccaacatcgccatgaggcctggcctggagggctacgccctgcccaggaagtgcaacacagaccaggccggccggcccaagtgccccctggacccctacttcatcatgccagacaagtgcaagtgtgtggacttccagaccctgaagctgcaggagctgcctgatgctgtgccccatggagagatgcccaggcacatgcagctgtactgtgaccgctacctgtgtgacaaggtggtgcccggcaacagagtgaccatcatgggcatctacagcatcaagaagtttggcctgaccaccagccggggccgggacagagtgggcgtgggcatccgcagcagctacatccgggtgctgggcatccaggtggacacagatggcagcggccgcagctttgctggagctgtgagcccccaggaggaggaggagttccggcggctggccgccctgcccaacgtgtatgaagtcatcagcaagagcatcgcccccagcatctttggaggaacagacatgaagaaggccatcgcctgcctgctgtttggaggcagcaggaagaggctgcctgatggcctgacccggcggggggacatcaacctgctgatgctgggggaccccggcacagccaagagccagctgctgaagtttgtggagaagtgcagccccatcggcgtgtacaccagcggcaagggcagcagcgctgctggcctgacagcctctgtgatgagggaccccagcagcaggaacttcatcatggagggcggggccatggtgctggctgatggaggagtggtgtgcattgatgaatttgacaagatgagagaagatgacagagtggccatccacgaggccatggagcagcagaccatcagcatcgccaaggccggcatcaccaccaccctgaacagccgctgcagcgtgctggccgccgccaacagcgtgtttggccgctgggatgagaccaagggggaggacaacatcgacttcatgcccaccatcctgagcagatttgacatgatcttcatcgtgaaggatgagcacaatgaggagagagatgtgatgctggccaagcacgtgatcaccctgcacgtgtctgccctgacccagacccaggccgtggagggggagattgacctggccaagctgaagaagttcatcgcctactgccgggtgaagtgtggcccccggctgtctgctgaggccgctgagaagctgaagaaccgctacatcatcatgaggtctggggcccggcagcacgagcgggacagcgacagaagaagcagcatccccatcaccgtgcggcagctggaggccatcgtgagaattgctgaggccctgagcaagatgaagctgcagccctttgccacagaagcagatgtggaggaggccctgcggctcttccaggtgtccaccctggatgctgccctgagcggcaccctgtctggagtggagggcttcaccagccaggaggaccaggagatgctgagccgcatcgagaagcagctgaagagaagatttgccatcggcagccaggtgtctgagcacagcatcatcaaggacttcaccaagcagaagtacccagagcacgccatccacaaggtgctgcagctgatgctgcggcggggggagatccagcacaggatgcagaggaaggtgctgtaccgcctgaagtag

SEQ ID NO: 167531 - DNA, 2606 bp, Artificial Sequence
  derived and/or modified sequence
aatcgctggccgcgaggctccggcgaaccaatgggagcgcagcggctgcggcgtccgaacaccgcctcttgtttttcccgcgaaactcggcggctgagcgtggaggttcttgtctcccctggtttgtgaagtgcggaaaaccagaggcgcagtcatgtcgggattcgacgatcctggcattttctacagcgacagcttcgggggcgacgcccaggccgacgaggggcaggcccgcaaatcgcagctgcagaggcgcttcaaggagttcctgcggcagtaccgagtgggcaccgaccgcacgggcttcaccttcaaatacagggatgaactcaagcggcattacaacctgggggagtactggattgaggtggagatggaggatctggccagctttgatgaggacctggccgactacttgtacaagcagccagccgagcacctgcagctgctggaggaagctgccaaggaggtagctgatgaggtgacccggccccggccttctggggaggaggtgctccaggacatccaggtcatgctcaagtcggacgccagcccttccagcattcgtagcctgaagtcggacatgatgtcacacctggtgaagatccctggcatcatcatcgcggcctctgcggtccgtgccaaggccacccgcatctctatccagtgccgcagctgccgcaacaccctcaccaacattgccatgcgccctggcctcgagggctatgccctgcccaggaagtgcaacacagatcaggctgggcgccccaaatgcccattggacccgtacttcatcatgcccgacaaatgcaaatgcgtggacttccagaccctgaagctgcaggagctgcctgatgcagtcccccacggggagatgcccagacacatgcagctctactgcgacaggtacctgtgtgacaaggtcgtccctgggaacagggttaccatcatgggcatctactccatcaagaagtttggcctgactaccagcaggggccgtgacagggtgggcgtgggcatccgaagctcctacatccgtgtcctgggcatccaggtggacacagatggctctggccgcagctttgctggggccgtgagcccccaggaggaggaggagttccgtcgcctggctgccctcccaaatgtctatgaggtcatctccaagagcatcgccccctccatctttgggggcacagacatgaagaaggccattgcctgcctgctctttgggggctcccgaaagaggctccctgatggacttactcgccgaggagacatcaacctgctgatgctaggggaccctgggacagccaagtcccagcttctgaagtttgtggagaagtgttctcccattggggtatacacgtctgggaaaggcagcagcgcagctggactgacagcctcggtgatgagggacccttcgtcccggaatttcatcatggagggcggagccatggtcctggccgatggtggggtcgtctgtattgacgagtttgacaagatgcgagaagatgaccgtgtggcaatccacgaagccatggagcagcagaccatctctatcgccaaggctgggatcaccaccaccctgaactcccgctgctccgtcctggctgctgccaactcagtgttcggccgctgggatgagacgaagggggaggacaacattgacttcatgcccaccatcttgtcgcgcttcgacatgatcttcatcgtcaaggatgagcacaatgaggagagggatgtgatgctggccaagcatgtcatcactctgcacgtgagcgcactgacacagacacaggctgtggagggcgagattgacctggccaagctgaagaagtttattgcctactgccgagtgaagtgtggcccccggctgtcagcagaggctgcagagaaactgaagaaccgctacatcatcatgcggagcggggcccgtcagcacgagagggacagtgaccgccgctccagcatccccatcactgtgcggcagctggaggccattgtgcgcatcgcggaagccctcagcaagatgaagctgcagcccttcgccacagaggcagatgtggaggaggccctgcggctcttccaagtgtccacgttggatgctgccttgtccggtaccctgtcaggggtggagggcttcaccagccaggaggaccaggagatgctgagccgcatcgagaagcagctcaagcgccgctttgccattggctcccaggtgtctgagcacagcatcatcaaggacttcaccaagcagaaatacccggagcacgccatccacaaggtgctgcagctcatgctgcggcgcggcgagatccagcatcgcatgcagcgcaaggttctctaccgcctcaagtgagtcgcgccgcctcactggactcatggactcgcccacgcctcgcccctcctgccgctgcctgccattgacaatgttgctgggacctctgcctccccactgcagccctcgaacttcccaggcaccctcctttctgccccagaggaaggagctgtagtgtcctgctgcctctgggcgcccgcctctagcgcggttctgggaagtgtgcttttggcatccgttaataataaagccacggtgtgttcaggta

SEQ ID NO: 167532 - DNA, 2402 bp, Artificial Sequence
  derived and/or modified sequence
ttcccgcgaaactcggcggctgagcgtggaggttcttgtctcccctggtttgtgaagtgcggaaaaccagaggcgcagtcatgtcgggattcgacgatcctggcattttctacagcgacagcttcgggggcgacgcccaggccgacgaggggcaggcccgcaaatcgcagctgcagaggcgcttcaaggagttcctgcggcagtaccgagtgggcaccgaccgcacgggcttcaccttcaaatacagggatgaactcaagcggcattacaacctgggggagtactggattgaggtggagatggaggatctggccagctttgatgaggacctggccgactacttgtacaagcagccagccgagcacctgcagctgtcggacatgatgtcacacctggtgaagatccctggcatcatcatcgcggcctctgcggtccgtgccaaggccacccgcatctctatccagtgccgcagctgccgcaacaccctcaccaacattgccatgcgccctggcctcgagggctatgccctgcccaggaagtgcaacacagatcaggctgggcgccccaaatgcccattggacccgtacttcatcatgcccgacaaatgcaaatgcgtggacttccagaccctgaagctgcaggagctgcctgatgcagtcccccacggggagatgcccagacacatgcagctctactgcgacaggtacctgtgtgacaaggtcgtccctgggaacagggttaccatcatgggcatctactccatcaagaagtttggcctgactaccagcaggggccgtgacagggtgggcgtgggcatccgaagctcctacatccgtgtcctgggcatccaggtggacacagatggctctggccgcagctttgctggggccgtgagcccccaggaggaggaggagttccgtcgcctggctgccctcccaaatgtctatgaggtcatctccaagagcatcgccccctccatctttgggggcacagacatgaagaaggccattgcctgcctgctctttgggggctcccgaaagaggctccctgatggacttactcgccgaggagacatcaacctgctgatgctaggggaccctgggacagccaagtcccagcttctgaagtttgtggagaagtgttctcccattggggtatacacgtctgggaaaggcagcagcgcagctggactgacagcctcggtgatgagggacccttcgtcccggaatttcatcatggagggcggagccatggtcctggccgatggtggggtcgtctgtattgacgagtttgacaagatgcgagaagatgaccgtgtggcaatccacgaagccatggagcagcagaccatctctatcgccaaggctgggatcaccaccaccctgaactcccgctgctccgtcctggctgctgccaactcagtgttcggccgctgggatgagacgaagggggaggacaacattgacttcatgcccaccatcttgtcgcgcttcgacatgatcttcatcgtcaaggatgagcacaatgaggagagggatgtgatgctggccaagcatgtcatcactctgcacgtgagcgcactgacacagacacaggctgtggagggcgagattgacctggccaagctgaagaagtttattgcctactgccgagtgaagtgtggcccccggctgtcagcagaggctgcagagaaactgaagaaccgctacatcatcatgcggagcggggcccgtcagcacgagagggacagtgaccgccgctccagcatccccatcactgtgcggcagctggaggccattgtgcgcatcgcggaagccctcagcaagatgaagctgcagcccttcgccacagaggcagatgtggaggaggccctgcggctcttccaagtgtccacgttggatgctgccttgtccggtaccctgtcaggggtggagggcttcaccagccaggaggaccaggagatgctgagccgcatcgagaagcagctcaagcgccgctttgccattggctcccaggtgtctgagcacagcatcatcaaggacttcaccaagcagaaatacccggagcacgccatccacaaggtgctgcagctcatgctgcggcgcggcgagatccagcatcgcatgcagcgcaaggttctctaccgcctcaagtgagtcgcgccgcctcactggactcatggactcgcccacgcctcgcccctcctgccgctgcctgccattgacaatgttgctgggacctctgcctccccactgcagccctcgaacttcccaggcaccctcctttctgccccagaggaaggagctgtagtgtcctgctgcctctgggcgcccgcctctagcgcggttctgggaagtgtgcttttggcatccgttaataataaagccacggtgtgttcaggt

SEQ ID NO: 167533 - DNA, 2076 bp, Artificial Sequence
  derived and/or modified sequence
atgagcggcttcgacgaccccggcatcttctacagcgacagcttcggcggtgacgcccaggccgatgagggccaagcccgcaaaagccagcttcagagacgatttaaggaatttctgagacaatacagagtgggcactgatcggaccggctttacattcaaataccgagacgagcttaaaagacattataaccttggggagtattggatagaggtggagatggaagatctggctagctttgacgaagacctggctgactatctatataaacaacccgccgaacatctccagctgtccgatatgatgagccatctggtgaaaatacccgggattattatagccgcctctgccgtgcgcgctaaagccaccagaatctcaatccagtgcagatcatgtagaaacaccctgacaaacatcgcgatgcggcccggtcttgaaggatacgcactcccacgtaaatgtaacactgaccaggctgggaggcccaagtgtcctttagacccatacttcatcatgcccgataagtgcaaatgcgtcgattttcagactctgaaattgcaggagctgccagacgcggtgcctcatggcgagatgccccgtcatatgcagttgtactgcgaccggtatctgtgtgacaaggtcgtgccagggaacagggtgacaattatggggatctattctattaaaaaattcggactgacaacctcaaggggcagggaccgcgtcggcgtcggaattaggagctcttacataagggtgctggggattcaggtcgacacagatggatcggggcggtcatttgctggtgctgtgtccccacaggaggaagaagaattccggcggctcgccgcactgccgaacgtctacgaagtaatctcaaagtccatagccccctctatctttggaggaaccgacatgaagaaggccatcgcatgcctgcttttcggcggcagtaggaagagactccccgacggcctaacgagacgcggcgacatcaacctgctgatgctcggtgacccaggtacagcaaaatcacaattactgaaattcgttgaaaagtgtagtcctatcggagtgtataccagtgggaaggggagttcagctgcaggcctgaccgcaagtgtgatgagggatcctagttctaggaattttattatggagggtggagcaatggttcttgctgacggcggagtagtgtgcattgacgaattcgacaagatgcgcgaagacgaccgcgttgcgatacacgaggccatggagcagcagactatttccatcgctaaagcaggcatcacaacgactttgaattcaaggtgctcggttctcgccgcagctaatagcgtgttcggtcgttgggatgagaccaaaggtgaggataacattgattttatgcccaccattctgtcacggttcgacatgattttcattgtgaaggacgaacacaatgaggagagagatgtgatgctcgcaaaacatgtaatcacacttcacgtgagcgcattgactcagacgcaggcagtcgagggtgagatcgatctggcaaagcttaagaagttcattgcttattgccgcgtgaaatgcggccccagactgtctgcggaagctgcagaaaaactgaaaaacagatatattatcatgcggagcggagctaggcaacatgagcgagatagcgaccggaggagctctatcccaatcaccgtgcgacagctggaagcaattgtccggatcgcagaagctctgagtaaaatgaaactccagcccttcgccacagaggctgatgtggaagaggccctgcgcctgtttcaggtgagcaccctcgacgccgccctgtcggggacactctctggggtggagggtttcacatcccaggaggaccaagagatgttgtcgagaatcgagaaacagctgaagagaagattcgccatcggatcccaggttagtgaacacagcatcattaaggacttcacaaagcagaaatatcctgaacatgccatccataaggttctccagcttatgctgagacgcggggaaattcagcacaggatgcagaggaaggtgctgtatcgcctgaaatag

SEQ ID NO: 167534 - DNA, 2076 bp, Artificial Sequence
  derived and/or modified sequence
atgtccggctttgatgatcctggtatcttttattccgattcttttgggggagacgcacaagccgacgagggccaggcaagaaagtctcaactgcagcggcgatttaaagaatttttacgccagtatcgcgtgggaactgaccggacaggtttcacattcaaataccgggacgaactgaaaagacattacaatcttggcgaatattggatcgaagtcgagatggaagatcttgcttctttcgatgaggacctggcagactacctctataagcagccagccgaacatttacagcttagtgacatgatgtctcacctggtgaagattcctggcatcatcattgccgctagcgctgtgagggcgaaagcaacaaggatctccattcaatgccggtcttgtcgcaatacgctgaccaatatagctatgcgtcctggtcttgagggttatgcattgcccaggaaatgcaatactgatcaggccggtcgcccaaagtgccccctggacccctattttattatgccagacaagtgcaagtgcgtcgacttccagaccctgaaactacaggaacttcctgacgctgtgccacacggcgaaatgccgaggcatatgcagctttattgtgatcgttacttgtgcgataaagtggtgcccggaaacagagtcacgatcatgggaatctactctattaaaaagttcggcttgactacaagcaggggcagagatcgagtgggagttggcatccgaagcagctacatccgggtgttggggattcaggtggatacggatggctctggaagatcctttgcgggagcagtgtcgccgcaggaagaggaagagtttaggcggctggccgcactccctaacgtgtatgaggtgatttcaaaatcaatcgcacctagtattttcggcggtaccgacatgaaaaaggctattgcatgcttgctcttcggtgggagcagaaagcgactacccgacgggctgacacggagaggggacattaacctgctgatgcttggcgaccccggtactgctaaaagtcagctcctgaagtttgtagaaaagtgctcccccataggggtttatacaagcgggaagggcagttcggctgctgggctgactgcatccgttatgagagaccccagctccagaaacttcatcatggaaggaggtgctatggtcctcgctgatgggggagtggtctgcatcgatgagttcgataagatgcgtgaggacgatcgcgtagctattcacgaggcaatggaacagcagacgatctctattgccaaggctggaattacaacaactctgaattcaaggtgttcagttctcgcggctgccaactcagtgttcggacgatgggatgaaaccaaaggagaggataacatcgacttcatgcctaccatactgtctcgttttgacatgatctttatcgtgaaagatgaacacaatgaggaaagagatgtgatgttggctaagcatgtcatcacgctgcatgtgtccgccctgacacaaacccaggccgtcgagggcgaaattgatcttgcaaaattgaagaaattcatcgcgtactgtcgcgtgaaatgtggacccagactgtctgcagaagctgccgaaaagctcaagaaccggtatatcatcatgaggagcggtgctagacagcatgagagagattctgaccggaggtcttcaattcctatcaccgtgcgtcagctggaggctattgtgagaatcgccgaagcactatctaaaatgaaacttcagccctttgccaccgaagccgacgttgaggaagccttaagactcttccaagtcagtactctggatgccgctctttcagggaccctgtcgggagttgaaggctttacatcgcaagaagatcaggaaatgctatccagaattgaaaaacagttaaagcgacgttttgcaataggctctcaggtaagcgaacactcgatcatcaaggatttcactaagcagaagtaccccgaacatgctattcataaagtgttgcagctgatgctacggaggggcgaaatacagcatcgcatgcagaggaaagtgttatacagactgaaatag

SEQ ID NO: 167535 - DNA, 2205 bp, Artificial Sequence
  derived and/or modified sequence
atgtcagggtttgatgacccgggtattttttattccgacagctttggtggagacgcacaggctgatgaaggacaggcgcgaaaaagccagctccaaaggaggttcaaagagtttcttagacaatatagggtgggcaccgatcgaacgggcttcacgtttaagtaccgcgatgagttgaagagacactacaacctgggagaatactggatagaagtcgaaatggaggatctggcatccttcgacgaggacttggccgattatctgtacaaacaaccagccgagcatctacagttacttgaggaggccgctaaagaggtagccgatgaagtgaccaggccacgaccaagtggtgaggaggtgctgcaagacattcaggtgatgctgaaatcagatgcaagcccctctagcatccgcagtctcaagagtgatatgatgtctcatctcgtgaagattccaggcatcattattgcagctagtgctgtcagggcaaaagccactcggatcagtatccagtgccgctcctgtaggaacacactgaccaatatcgccatgcgccccggcctggaggggtacgcattgcctcggaagtgcaatacagatcaggcaggtcggcctaaatgccctctggacccctacttcattatgcctgataagtgcaaatgtgtggacttccagacgctgaagttgcaggagctcccggatgccgttccccacggagaaatgcctaggcatatgcaactgtactgtgaccggtatctatgcgacaaagtcgttcctggcaaccgggtcacgattatgggaatatatagcattaagaagtttggcctgaccacgagtcgcgggagagaccgagttggagtcggtatcagaagctcatatatccgcgtactcggaatccaggtggacacagatgggtctggtcggtcattcgctggggcggtttctccacaagaggaagaggaattcagacggctggcagcattgcctaatgtgtacgaagtaatcagcaaatcgatcgccccctccatctttggaggaaccgacatgaagaaggcaatcgcttgcctcttgttcgggggtagcagaaagcgcctgcccgatgggttaacgcggaggggcgacattaatctgttgatgctgggtgacccagggacggccaagagtcagctgctaaagtttgtggagaaatgtagtccaattggagtttatacctcagggaaaggctctagtgcagccggactgaccgccagtgttatgcgggacccctccagtcggaacttcattatggagggcggagcgatggtgcttgctgacggcggagtggtgtgtatcgatgaatttgacaagatgcgtgaagatgaccgggtggccattcacgaagctatggaacagcagactatcagcattgccaaagccgggatcaccacaacgcttaactcccggtgctcagtgctagccgctgccaattcagtatttggaaggtgggatgagaccaaaggggaggacaacatagacttcatgcccaccattctctcacggtttgatatgatcttcatcgtcaaagacgagcacaatgaagagagggacgtaatgctcgcgaagcatgttataacattacacgtctctgcgttgacacagactcaagcagtggagggcgaaattgacctggccaagttgaaaaaattcatcgcttactgtcgggttaagtgcgggcccagactgtctgcagaggctgcggagaagctgaagaataggtatataatcatgagaagcggagctcgacagcacgagcgggacagtgaccgtaggagctctatccctatcactgtacggcagctcgaagctattgtccgaatcgcggaagccctgtcaaagatgaaactgcagcctttcgccaccgaagctgacgtggaggaagccctgcgactgttccaggtgtcaacacttgacgcagcactgtcgggaaccttaagcggagtagaaggcttcacttcacaggaggaccaggagatgctgagccggatcgagaaacagctgaagcgccgttttgccatcgggagtcaggtgtctgagcattcaatcatcaaagactttaccaagcagaagtaccctgaacacgccatacacaaagtacttcagctgatgcttcggaggggtgaaattcagcatcgcatgcagaggaaggttttgtacagactgaagtag

SEQ ID NO: 167536 - DNA, 2205 bp, Artificial Sequence
  derived and/or modified sequence
atgagcggctttgatgatcctggcatcttctacagcgacagctttggaggagatgcccaggctgatgagggccaggccaggaagagccagctgcagaggcgcttcaaggagttcctgcggcagtacagagtgggcacagacagaacaggcttcaccttcaagtacagagatgagctgaagaggcactacaacctgggggagtactggattgaggtggagatggaggacctggccagctttgatgaggacctggccgactacctgtacaagcagcctgctgagcacctgcagctgctggaggaggccgccaaggaggtggctgatgaggtgacccggccccggcccagcggggaggaggtgctgcaggacatccaggtgatgctgaagagtgatgccagccccagcagcatccgcagcctgaagagtgacatgatgagccacctggtgaagatccctggcatcatcatcgccgccagcgctgtgcgggccaaggccacccgcatcagcatccagtgccgcagctgcaggaacaccctgaccaacatcgccatgaggcctggcctggagggctacgccctgcccaggaagtgcaacacagaccaggccggccggcccaagtgccccctggacccctacttcatcatgccagacaagtgcaagtgtgtggacttccagaccctgaagctgcaggagctgcctgatgctgtgccccacggggagatgcccaggcacatgcagctgtactgtgaccgctacctgtgtgacaaggtggtgcccggcaacagagtgaccatcatgggcatctacagcatcaagaagtttggcctgaccaccagccggggccgggacagagtgggcgtgggcatccgcagcagctacatccgggtgctgggcatccaggtggacacagatggcagcggccgcagctttgctggagctgtgagcccccaggaggaggaggagttccggcggctggccgccctgcccaacgtgtatgaggtgatcagcaagagcatcgcccccagcatctttggaggaacagacatgaagaaggccatcgcctgcctgctgtttggaggcagcaggaagaggctgcctgatggcctgaccaggagaggagacatcaacctgctgatgctgggggaccctggaacagccaagagccagctgctgaagtttgtggagaagtgcagccccatcggcgtgtacaccagcggcaagggcagcagcgctgctggcctgacagcctctgtgatgagggaccccagcagcaggaacttcatcatggagggcggggccatggtgctggctgatggcggcgtggtgtgcattgatgaatttgacaagatgagagaagatgacagagtggccatccacgaggccatggagcagcagaccatcagcatcgccaaggccggcatcaccaccaccctgaacagccgctgcagcgtgctggccgccgccaacagcgtgtttggccgctgggatgagaccaagggggaggacaacatcgacttcatgcccaccatcctgagcagatttgacatgatcttcatcgtgaaggatgagcacaatgaggagagagatgtgatgctggccaagcacgtgatcaccctgcacgtgtctgccctgacccagacccaggccgtggagggggagattgacctggccaagctgaagaagttcatcgcctactgccgggtgaagtgtggcccccggctgtctgctgaggccgctgagaagctgaagaaccgctacatcatcatgaggtctggggcccggcagcacgagcgggacagcgaccggcgcagcagcatccccatcaccgtgcggcagctggaggccatcgtgagaattgctgaggccctgagcaagatgaagctgcagccctttgccacagaagcagatgtggaggaggccctgcggctcttccaggtgtccaccctggatgctgccctgagcggcaccctgagcggcgtggagggcttcaccagccaggaggaccaggagatgctgagcagaattgagaagcagctgaagagaagatttgccatcggcagccaggtgtctgagcacagcatcatcaaggacttcaccaagcagaagtacccagagcacgccatccacaaggtgctgcagctgatgctgcggcggggggagatccagcacaggatgcagaggaaggtgctgtaccgcctgaagtag

SEQ ID NO: 167537 - DNA, 2205 bp, Artificial Sequence
  derived and/or modified sequence
atgagcggcttcgacgaccccggcatcttctacagcgacagcttcggcggagatgcgcaagcagacgagggtcaggcccggaagagtcagctccaacggaggttcaaggagttcctccgtcagtacagagtcggaacggatcgtaccgggtttacctttaagtacagagatgaactcaaacgccactacaacttgggagaatactggattgaggtagaaatggaggacctagccagctttgacgaagatctcgctgactatctgtacaagcagcctgccgagcatctccagttgctggaggaagcagctaaagaagttgccgacgaggtgacacgccctcggccatccggcgaagaagtgttgcaagacatacaggtaatgttgaaatctgatgcttccccaagctccatcagatcccttaagtctgatatgatgtctcacctcgtgaaaatacctggcattattattgccgcgtcagccgttcgcgctaaagcaacaagaattagcatccagtgcagatcctgtcggaatacactgaccaacatcgccatgcgtccaggactggaaggctacgctctgcctcgcaaatgtaacacggaccaggcaggaaggccaaagtgtccactcgatccgtattttatcatgcccgacaagtgcaagtgtgtggactttcagactctgaagttgcaagagctgcctgacgcagtcccacacggggagatgccaaggcatatgcagctttactgtgacaggtacctgtgcgataaagtggtgcccggcaaccgtgtgacgatcatgggaatctactctataaagaaatttgggctgaccacatcaaggggaagagacagggtgggggtgggtattagatcctcatatatccgagttttgggaatccaagtagacaccgatggttccgggcgcagcttcgccggggccgtgagcccacaggaggaggaagaattccgtcggcttgccgccctgcctaacgtctatgaggtaattagtaagtctatcgcccccagcatcttcggaggaacagacatgaaaaaagctattgcctgtctgcttttcggagggtctcgaaagcgactccccgatggcctcacacgccgcggtgatattaatctgcttatgctgggcgatcccggtaccgcaaagtctcaactgctgaaatttgtagagaagtgcagcccgatcggcgtgtatacatccggcaaaggtagctctgcagcaggtttgactgccagtgttatgcgtgacccaagtagccggaactttatcatggagggcggagcgatggtcctggctgatggcggagtggtttgtatagatgaattcgataaaatgcgcgaagacgacagagtagccatacacgaggctatggagcagcagaccattagcattgctaaggccgggattacaacgacattaaatagtcggtgctctgtgctggctgccgctaacagcgtgtttggaagatgggatgaaacaaaaggagaggacaacattgacttcatgcctaccatccttagccgtttcgacatgatatttatcgttaaggatgagcacaatgaggagcgggatgtgatgttggccaagcatgtgattactctccatgtctccgcactgacccaaacacaggcggtggaaggcgagattgacctagccaaactgaagaagtttatagcgtactgccgcgtgaagtgtggtccgcgcttaagcgccgaggcggcggagaagctgaaaaataggtacatcattatgaggtccggcgcccgacagcacgagagagattccgatagacgctccagcattcctataaccgtgcgccagctagaggcgattgtgcgcattgcagaggctctctcgaagatgaagcttcagcccttcgccaccgaggccgacgtggaggaggctttgcggttatttcaggtctctacattggacgccgccttaagcgggaccctctcaggggtggaagggttcacctcacaggaggatcaggagatgttgtcccgaattgagaagcaactgaagagacgattcgcaatcggctctcaggtttcagagcacagtataatcaaagactttacaaagcagaagtaccccgaacatgctatccataaggtccttcagctaatgctgcgacgaggagagatccagcatcggatgcagcgaaaggtgctgtatcgactgaaatag

SEQ ID NO: 167538 - DNA, 2205 bp, Artificial Sequence
  derived and/or modified sequence
atgtctggattcgacgatccagggattttttattctgactcctttggcggtgatgcccaagctgatgaaggccaagcaaggaagtcacagttgcagaggcgatttaaggagtttctccggcagtatagggtcgggaccgaccgaactgggttcaccttcaaatatcgagatgagttgaagcgccattacaacttaggggagtactggatagaagtggaaatggaagacctcgcctcctttgatgaggatctcgctgactacctctacaagcagccagccgagcacctgcagctgcttgaggaggcagcaaaggaagtggcagacgaagtgactaggccgagaccctcaggagaggaagtcctgcaagatatccaggtcatgctgaagtccgatgcatcgccctccagcattagatcactaaaatccgacatgatgtctcatctggtgaagatccccggaatcatcatagccgcatcagctgtcagggccaaggctactagaatttctattcagtgcaggtcttgtaggaataccctcactaatatcgctatgcgccctggtctggaagggtacgcgttacccaggaaatgtaacacggatcaggctgggagaccaaagtgcccccttgatccttacttcatcatgccagacaagtgcaaatgcgtggacttccagacccttaaattgcaagagctcccagatgctgtgccacatggcgaaatgccacggcacatgcagctgtactgtgacagatatctgtgcgacaaggtcgtgcccggaaacagagttactatcatgggcatttactctattaaaaagttcggtttgactacttctcgtggccgagatcgcgtcggggtcgggattcggtcgtcatacattcgcgttctggggatacaggtcgataccgacggctccggacgcagttttgccggagctgtgtccccacaggaggaggaggagttccgtcgattggcggcattaccaaatgtgtacgaagtgattagcaagtctatcgcgccttccatttttggcggaaccgatatgaaaaaagccattgcgtgtctgttgttcggcggatcaaggaagcggctacccgacggcctgaccaggcgaggagacatcaacctgctcatgttgggcgaccccggtactgctaagagtcaactactcaagttcgtggagaagtgcagtcctattggcgtgtatacatccgggaaaggatcttctgccgctggcctgaccgcatccgtaatgcgtgatccctcctccaggaattttattatggaaggcggagcgatggttttagctgatggaggagtcgtttgcatagatgagttcgataagatgagagaagacgacagagtggctatccatgaggccatggaacagcagacaatttctatcgcaaaagccggtatcacaaccactctaaattcccgatgctcagtgttggcggctgccaacagtgtgttcggccgttgggatgagaccaaaggtgaggacaacattgacttcatgcccacaattctctccaggtttgatatgattttcatcgtaaaagatgaacataacgaggagagggacgtgatgctagctaagcatgtaatcacattacatgtgagcgctcttactcaaacacaggccgtggaaggagagatcgatttggctaaacttaagaagtttatcgcatactgtagggtgaagtgtgggccacggctatctgccgaggcagctgaaaaattgaaaaatagatacatcatcatgcgatccggcgctagacagcatgaaagagacagcgacaggagaagctccattcccattactgtgagacagctggaagccattgtccggattgccgaagccttgtccaagatgaaactccaaccctttgcaacagaagctgacgtggaggaggcactccggctgttccaggtctctactctggatgctgcgctttcaggaaccctttcaggcgtggagggctttacatcccaggaggaccaggagatgctcagtaggatcgaaaagcagttgaaacgacgttttgcaattgggtcacaggtgtcggagcactctattatcaaggatttcactaagcagaaatacccagagcatgctattcacaaggtgctacaactgatgctccgcaggggcgagatccagcatcggatgcagagaaaggttctgtaccggctcaagtag

SEQ ID NO: 167539 - DNA, 2205 bp, Artificial Sequence
  derived and/or modified sequence
atgagcggcttcgacgaccccggcatcttctacagcgacagcttcggcggcgacgcccaggccgacgagggccaggccagaaagagccagctgcagagaagattcaaggagttcctgagacagtacagagtgggcaccgacagaaccggcttcaccttcaagtacagagacgagctgaagagacactacaacctgggcgagtactggatcgaggtggagatggaggacctggccagcttcgacgaggacctggccgactacctgtacaagcagcccgccgagcacctgcagctgctggaggaggccgccaaggaggtggccgacgaggtgaccagacccagacccagcggcgaggaggtgctgcaggacatccaggtgatgctgaagagcgacgccagccccagcagcatcagaagcctgaagagcgacatgatgagccacctggtgaagatccccggcatcatcatcgccgccagcgccgtgagagccaaggccaccagaatcagcatccagtgcagaagctgcagaaacaccctgaccaacatcgccatgagacccggcctggagggctacgccctgcccagaaagtgcaacaccgaccaggccggcagacccaagtgccccctggacccctacttcatcatgcccgacaagtgcaagtgcgtggacttccagaccctgaagctgcaggagctgcccgacgccgtgccccacggcgagatgcccagacacatgcagctgtactgcgacagatacctgtgcgacaaggtggtgcccggcaacagagtgaccatcatgggcatctacagcatcaagaagttcggcctgaccaccagcagaggcagagacagagtgggcgtgggcatcagaagcagctacatcagagtgctgggcatccaggtggacaccgacggcagcggcagaagcttcgccggcgccgtgagcccccaggaggaggaggagttcagaagactggccgccctgcccaacgtgtacgaggtgatcagcaagagcatcgcccccagcatcttcggcggcaccgacatgaagaaggccatcgcctgcctgctgttcggcggcagcagaaagagactgcccgacggcctgaccagaagaggcgacatcaacctgctgatgctgggcgaccccggcaccgccaagagccagctgctgaagttcgtggagaagtgcagccccatcggcgtgtacaccagcggcaagggcagcagcgccgccggcctgaccgccagcgtgatgagagaccccagcagcagaaacttcatcatggagggcggcgccatggtgctggccgacggcggcgtggtgtgcatcgacgagttcgacaagatgagagaggacgacagagtggccatccacgaggccatggagcagcagaccatcagcatcgccaaggccggcatcaccaccaccctgaacagcagatgcagcgtgctggccgccgccaacagcgtgttcggcagatgggacgagaccaagggcgaggacaacatcgacttcatgcccaccatcctgagcagattcgacatgatcttcatcgtgaaggacgagcacaacgaggagagagacgtgatgctggccaagcacgtgatcaccctgcacgtgagcgccctgacccagacccaggccgtggagggcgagatcgacctggccaagctgaagaagttcatcgcctactgcagagtgaagtgcggccccagactgagcgccgaggccgccgagaagctgaagaacagatacatcatcatgagaagcggcgccagacagcacgagagagacagcgacagaagaagcagcatccccatcaccgtgagacagctggaggccatcgtgagaatcgccgaggccctgagcaagatgaagctgcagcccttcgccaccgaggccgacgtggaggaggccctgagactgttccaggtgagcaccctggacgccgccctgagcggcaccctgagcggcgtggagggcttcaccagccaggaggaccaggagatgctgagcagaatcgagaagcagctgaagagaagattcgccatcggcagccaggtgagcgagcacagcatcatcaaggacttcaccaagcagaagtaccccgagcacgccatccacaaggtgctgcagctgatgctgagaagaggcgagatccagcacagaatgcagagaaaggtgctgtacagactgaagtag

SEQ ID NO: 167540 - protein, 171 aa, Artificial Sequence
  derived and/or modified sequence
MEQDNSPRKIQFTVPLLEPHLDPEAAEQIRRRRPTPATLVLTSDQSSPEIDEDRIPNPHLKSTLAMSPRQRKKMTRITPTMKELQMMVEHHLGQQQQGEEPEGAAESTETQESRPPGIPDTEVESRLGTSGTAKKTAECIPKTHERGSKEPSTKEPSTHIPPLDSKGANSV

SEQ ID NO: 167541 - DNA, 516 bp, Artificial Sequence
  derived and/or modified sequence
atggagcaggataactcccctaggaagattcaattcacagtacctctgttagagccacacctggatccagaagccgcagaacaaatccgtagacgacggccgaccccagccacgctagtgttaacttctgaccagagctctcctgagatcgacgaagatcgcattcccaatccgcatctaaaaagcactctggcgatgtccccccgtcagcgaaagaaaatgaccagaatcactccaaccatgaaggaactccagatgatggtggagcatcacctgggccagcagcagcagggagaggagccagagggggcggccgaatccaccgaaactcaggagagcaggcctcctggaattcctgacactgaagtagagtcccgactgggaacctctggcaccgccaagaagacagctgagtgcattcccaaaactcacgagagagggtctaaagagccatctaccaaagaaccgtcaacacatatccctccactggatagcaagggagccaattccgtctag

SEQ ID NO: 167542 - DNA, 516 bp, Artificial Sequence
  derived and/or modified sequence
atggagcaggacaacagccccaggaagatccagttcaccgtgcccctgctggagccccacctggaccctgaggccgctgagcagatcagaagaagaagacccaccccagccaccctggtgctgaccagtgaccagagcagccctgagattgatgaggaccgcatccccaacccccacctgaagagcaccctggccatgagcccccggcagaggaagaagatgacccgcatcacccccaccatgaaggagctgcagatgatggtggagcaccacctgggccagcagcagcagggcgaggagcctgagggcgctgctgagagcacagagacccaggagagcaggcctcctggcatcccagacacagaggtggagagccggctgggcaccagcggcacagccaagaagacagctgagtgcatccccaagacccatgagcggggcagcaaggagcccagcaccaaggagcccagcacccacatcccccccctggacagcaagggggccaacagcgtgtag

SEQ ID NO: 167543 - DNA, 516 bp, Artificial Sequence
  derived and/or modified sequence
atggagcaggacaacagcccccggaagatccagttcaccgtgcccttgctggagcctcacctggaccctgaggcggcagaacagatccgcaggaggaggccaaccccggccactcttgtcttgacaagtgatcagtcgagccccgaaattgacgaggaccgcatccctaatcctcatctgaagtccactttagccatgagccctaggcaaagaaaaaagatgactagaatcactcccacaatgaaggaactgcagatgatggtcgaacaccatttgggccagcagcaacagggggaagaacctgaaggagccgctgaatctactgagacacaggagtctcggccaccagggatccctgataccgaggtggaatcaaggctgggaacgtccggaacagccaaaaagactgctgagtgtattcctaagactcacgagcgcggtagcaaagagcccagcactaaggaaccatccacccatataccccctctcgatagcaagggtgcaaatagcgtgtag

SEQ ID NO: 167544 - DNA, 516 bp, Artificial Sequence
  derived and/or modified sequence
atggagcaggataacagcccgaggaagatccagtttacagtacctctactagagccccacctggatcctgaggcggctgaacagatcagacggaggaggcctacaccagccacactggtgctcacttccgaccagtcatcgcccgagatagacgaagacagaatccctaacccacatcttaagagcaccctcgccatgtctccaaggcagcggaagaaaatgactcggatcaccccaacaatgaaggaactgcagatgatggtcgaacatcacttgggacagcaacagcagggcgaggagccagagggcgctgcagaatccaccgagactcaagagtccagacctcccggaatcccagatacagaggtcgagagtagacttgggacaagtggaaccgctaagaagactgccgaatgcattcccaagacccatgagaggggttccaaggagccctctactaaggaaccctctacccacattcctcccctcgatagcaagggagctaattctgtgtag

SEQ ID NO: 167545 - DNA, 1826 bp, Artificial Sequence
  derived and/or modified sequence
agagtccccggagccgcgagctgggagcgctgtgccgggagccgggagccgagcgcgccgggctggggccggggccggagcggagcggagagggagcgcgcccgccccagccccgagtcccgccgccttccctcccgccgcagcgcgggcccaccggccgccgccccagccatggagcaagacaacagcccccgaaagatccagttcacggtcccgctgctggagccgcaccttgaccccgaggcggcggagcagattcggaggcgccgccccacccctgccaccctcgtgctgaccagtgaccagtcatccccagagatagatgaagaccggatccccaacccacatctcaagtccactttggcaatgtctccacggcaacggaagaagatgacaaggatcacacccacaatgaaagagctccagatgatggttgaacatcacctggggcaacagcagcaaggagaggaacctgagggggccgctgagagcacagaaacccaggagtcccgcccacctgggatcccagacacagaagtggagtcaaggctgggcacctctgggacagcaaaaaaaactgcagaatgcatccctaaaactcacgagagaggcagtaaggaacccagcacaaaagaaccctcaacccatataccaccactggattccaagggagccaactcggtctgagagaggaggaggtatcttgggatcaagactgcagtttgggaatgcatggacaccggatttgtttcttattccttcacttttggggaaaatctcttgtttttaaaaagtgataaatttggtgttaggtccttggcactttccttcttttccaactgggagaatcctttctccctgccttcttgccctgccctctctgtagcccccaccctcctgccaagctgcctctgggaaggaagaaacaggagctaggcagaagccttgagcagggaagagttcttcccttagccctgactttacttgctgtgggaagagagatgagggtcagataggtgggaggactaacttccagggtgccaagaaggaagaaaagccccaggttctcttttcttattgaggaacgatccgaccacctcacaggcctgccctgcagctggaagactcggcgctctaaggcctgtgccgtgtccagctgtgactgtgcggtgggctccatctgctggacaaaaggggaactgcaccatggcacttggcccatgggaaagagggtatggtggtgtgccgatacctcctcgcctgccctccaagccccagctgccttccttttggattcccaagcttcaggatgtgttccctcttccagctgtgggaccgctgtcccttatttcaacccgttagcaacaatggatagagaacacagtggctattaatgaagaggcccatgctggagactggaagggttcccttgtcctagacattgaggggcccagataagaccaaaaccaagcataagagaagaaactgtctcagatctcacggccaggcctctctcctgctgctgtttttgattttcccaggtagtgggagagaggaaaggagggaaggcaagattctttccccctccctgctgaagcatgtggtacagaggcaagagcagagcctgagaagcgtcaggtcccacttctgccatgcagctactatgagccctcggggcctcctcctgggcctcagcttgcccagatacatacctaaatatatatatatatatatatgagggagaacgcctcacccagattttatcatgctggaaagagtgtatgtatgtgaagatgcttggtcaacttgtacccagtgaacacaca

SEQ ID NO: 167546 - DNA, 516 bp, Artificial Sequence
  derived and/or modified sequence
atggagcaggacaacagccccagaaagatccagttcaccgtgcccctgctggagccccacctggaccccgaggccgccgagcagatcagaagaagaagacccacccccgccaccctggtgctgaccagcgaccagagcagccccgagatcgacgaggacagaatccccaacccccacctgaagagcaccctggccatgagccccagacagagaaagaagatgaccagaatcacccccaccatgaaggagctgcagatgatggtggagcaccacctgggccagcagcagcagggcgaggagcccgagggcgccgccgagagcaccgagacccaggagagcagaccccccggcatccccgacaccgaggtggagagcagactgggcaccagcggcaccgccaagaagaccgccgagtgcatccccaagacccacgagagaggcagcaaggagcccagcaccaaggagcccagcacccacatcccccccctggacagcaagggcgccaacagcgtgtag

SEQ ID NO: 167547 - protein, 424 aa, Artificial Sequence
  derived and/or modified sequence
MGCGTSKVLPEPPKDVQLDLVKKVEPFSGTKSDVYKHFITEVDSVGPVKAGFPAASQYAHPCPGPPTAGHTEPPSEPPRRARVAKYRAKFDPRVTAKYDIKALIGRGSFSRVVRVEHRATRQPYAIKMIETKYREGREVCESELRVLRRVRHANIIQLVEVFETQERVYMVMELATGGELFDRIIAKGSFTERDATRVLQMVLDGVRYLHALGITHRDLKPENLLYYHPGTDSKIIITDFGLASARKKGDDCLMKTTCGTPEYIAPEVLVRKPYTNSVDMWALGVIAYILLSGTMPFEDDNRTRLYRQILRGKYSYSGEPWPSVSNLAKDFIDRLLTVDPGARMTALQALRHPWVVSMAASSSMKNLHRSISQNLLKRASSRCQSTKSAQSTRSSRSTRSNKSRRVRERELRELNLRYQQQYNG

SEQ ID NO: 167548 - DNA, 1275 bp, Artificial Sequence
  derived and/or modified sequence
atggggtgcggcacatcaaaggtgttgcccgaaccacccaaggatgtgcagctcgacttggtaaaaaaggtggaaccattctctggcaccaagtctgatgtgtacaaacacttcatcacagaggtcgatagtgtggggccagtcaaggccggcttcccagcagcttcccaatatgcacacccttgcccagggccccccacggcgggccataccgagccaccatctgaaccccctagacgagcccgtgtcgctaaatacagagccaaattcgaccctcgagtcactgcaaagtacgatataaaggctttgatcgggaggggtagttttagccgagttgtccgggtggagcatagagctaccaggcagccatacgctatcaaaatgatagaaactaagtatcgagagggccgcgaagtgtgcgagagcgaactgcgagtgctgaggcgtgtccggcacgctaatattatacagctcgttgaggtgtttgagacacaggagcgggtgtacatggtcatggaactggctacgggaggcgaactattcgaccggataattgccaaggggtcattcaccgaacgggatgctacccgggtacttcagatggtcctggatggcgtaagatacctgcacgccctgggtatcactcacagggaccttaagcctgaaaatttgttgtattaccatccaggcactgattcaaagatcattatcactgattttggactggcatccgctcggaagaagggtgatgattgtctcatgaagacaacatgtgggacccccgagtacatagcaccagaggtgctcgtacgtaagccttatactaactctgtcgacatgtgggccctgggtgtgatagcctatatactcctctctggcacaatgccctttgaggacgataatcgcacccgtctctacagacagatcctcaggggcaaatacagctatagtggggaaccttggccctctgtcagtaacttggccaaggactttatcgatcgattgttaacggtggacccaggggcccgaatgaccgcacttcaggcactgaggcacccttgggtggtgagtatggccgcgtcctcctccatgaaaaatcttcatcggtctattagtcagaacctacttaaaagagctagttccagatgccaatccacaaagagcgcccagagcacaaggtcatcgcggtctacacgctcaaacaaaagtcgaagggtaagagaaagagaactgcgcgaattgaatctgagataccagcagcagtataatggctag

SEQ ID NO: 167549 - DNA, 1275 bp, Artificial Sequence
  derived and/or modified sequence
atgggctgcggcaccagcaaggtgctgcctgagccccccaaggatgtgcagctggacctggtgaagaaggtggagcccttcagcggcaccaagagtgatgtgtacaagcacttcatcacagaggtggacagcgtgggccctgtgaaggccggcttccctgctgccagccagtatgcccacccctgccccggccccccaacagctggccacacagagcccccatctgagcccccaagaagagcccgggtggccaagtaccgggccaagtttgacccccgggtgacagccaagtatgacatcaaggccctgattggccggggcagcttcagccgggtggtgcgggtggagcaccgggccacccggcagccctatgccatcaagatgattgagaccaagtaccgggagggccgggaggtgtgtgagagcgagctgcgggtgctgcggcgggtgagacatgccaacatcatccagctggtggaggtgtttgagacccaggagcgggtgtacatggtgatggagctggccaccggcggggagctgtttgaccgcatcatcgccaagggcagcttcacagaaagagatgccaccagggtgctgcagatggtgctggatggagtgcgctacctgcacgccctgggcatcacccaccgggacctgaagccagagaacctgctgtactaccaccctggaacagacagcaagatcatcatcacagactttggcctggccagcgccaggaagaagggagatgactgcctgatgaagaccacctgtggcaccccagagtacatcgcccctgaggtgctggtgaggaagccctacaccaacagcgtggacatgtgggccctgggcgtcatcgcctacatcctgctgagcggcaccatgccctttgaagatgacaacagaacccggctgtaccggcagatcctgcggggcaagtacagctacagcggggagccctggcccagcgtgagcaacctggccaaggacttcatcgaccggctgctgactgtggaccccggggccaggatgacagccctgcaggccctgcggcacccctgggtggtgtccatggccgccagcagctccatgaagaacctgcacaggagcatcagccagaacctgctgaagagggccagcagccgctgccagagcaccaagagcgcccagagcaccaggagcagccgcagcaccaggagcaacaagagccggcgggtgcgggagcgggagctgcgggagctgaacctgcgctaccagcagcagtacaatggatag

SEQ ID NO: 167550 - DNA, 1275 bp, Artificial Sequence
  derived and/or modified sequence
atgggctgcggcaccagcaaggtgctgcccgagccccccaaggacgtccaactcgatctggttaaaaaggtagagcctttctctggaaccaagtcagatgtttacaaacatttcatcaccgaggttgactcggtgggaccagtgaaggccggattccccgctgcctcacagtatgcccacccttgcccgggcccacccacagcggggcataccgaaccgcccagtgagccccctcgcagggcccgcgtggccaaataccgggctaaattcgatccccgggtgactgcaaaatacgacatcaaggccctaattggtaggggaagcttttcaagagtcgtgagagtggaacatcgagccacccgtcagccctacgctatcaagatgatcgaaaccaaataccgcgagggaagagaggtgtgcgagtcagagttgcgcgtccttcgaagagtgcggcacgcgaatattatacagctagttgaggtgtttgagacccaggaacgcgtatacatggtaatggagctggccacgggaggcgaattgtttgatagaattatcgcaaaaggcagcttcaccgagcgggacgccacccgggtactgcagatggtccttgacggcgtgagatatctgcacgcattaggcatcacacacagggatctgaaacctgagaacctgctctactatcatccaggaacagatagcaaaattattattactgacttcggccttgcctcggccagaaagaaaggcgacgattgtttgatgaagaccacttgtgggacccctgagtatattgctcctgaggttttggtgaggaagccttatactaatagtgtggacatgtgggccttaggcgtcatcgcatacattcttcttagcggtaccatgccatttgaggatgataataggacaaggctctatcggcagatcctaaggggtaagtacagctacagcggcgagccctggccatctgtgtccaatcttgccaaagattttatcgatcgtttgcttaccgttgaccctggagcaaggatgaccgccctccaggcactgcgccatccctgggtggtttccatggccgcatcatcttctatgaagaacctacacaggagcatctcgcagaatctgttgaaacgggccagtagtaggtgtcagtccacaaagtcagcccagagtactcgatctagcaggtcaacccgatctaataaatctaggcgagtgagggaaagggaacttcgcgagctgaacctcaggtatcagcagcagtacaacggttag

SEQ ID NO: 167551 - DNA, 1275 bp, Artificial Sequence
  derived and/or modified sequence
atgggctgcggcacatcaaaggtactccctgaaccccctaaagacgtgcagcttgacctagtaaaaaaggtggaacccttttccggaactaaatccgacgtgtataagcactttatcactgaagttgactctgtcggacccgttaaggctgggttcccagccgcatcccagtatgcccacccctgccccggaccgccaacggctggacatacagagcctcctagtgagccacccagacgcgcaagagtagcaaagtatcgtgccaaattcgacccaagggtcaccgccaagtacgacataaaggccctcattgggagaggtagttttagtagagtagtaagggtcgagcacagagcaacacgacaaccgtatgcaataaagatgatcgaaaccaagtaccgagaaggccgtgaagtgtgtgagtctgagctccgtgtgctgcgcagggtgcgccacgcaaatatcatacagctggtggaggtcttcgaaacccaggagcgcgtctatatggtgatggagctggcaactggaggggaactctttgataggatcatcgctaagggcagctttactgagcgggatgcaacacgcgtgctgcagatggtgttggatggagtcaggtatcttcacgccctgggcattacccatcgagatctgaagccagagaatctcctgtactaccaccccggaaccgacagcaagattataatcaccgactttggcctggcttcagcacgcaaaaaaggtgatgattgcctgatgaaaacgacctgtgggacaccggaatatattgcgcctgaggtcttggttaggaaaccttacactaacagtgtcgacatgtgggcactgggtgtgatcgcctacatcttactctccggaaccatgccatttgaggacgataaccgaacgcgcctttataggcaaatactgcgtggaaagtattcctattcaggtgaaccgtggccaagcgtatctaatctggcaaaagatttcatcgacaggctgctgacggtcgaccccggtgctcgaatgaccgcactgcaggcgctccgtcacccgtgggtcgtgtcaatggcagcaagcagttcaatgaagaatctacacagatccatcagccagaatctgctcaagcgggcaagctctcgctgtcagagtactaagtcagctcagtcaacaagatcttcccggtcaacacggtcaaataaatctcgtagggtaagggagagggagctgagagagctgaatttgcgatatcaacagcagtataacggctag

SEQ ID NO: 167552 - DNA, 3481 bp, Artificial Sequence
  derived and/or modified sequence
gagaatggcggcggcggcggcggcggcggcggccgctgccattgcccggagatggccggcagagccgccgagacgccgaagagcccgccgcccgcgcgaggtgtagacggggcactgccttcagagcaggtcctgccagcctcgctggagaggatgccctcgtgtccgtgatgggctgtgggacaagcaaggtccttcccgagccacccaaggatgtccagctggatctggtcaagaaggtggagcccttcagtggcactaagagtgacgtgtacaagcacttcatcacagaggtggacagtgttggccctgtcaaagccgggttcccagcagcaagtcagtatgcacacccctgccccggtcccccgactgctggccacacggagcctccctcagaaccaccacgcagggccagggtagctaagtacagggccaagtttgacccacgtgttacagctaagtatgacatcaaggccctaattggccgaggcagcttcagccgagtggtacgtgtagagcaccgggcaacccggcagccgtatgccatcaagatgattgagaccaagtaccgggaggggcgggaggtgtgtgagtcggagctgcgtgtgctgcgtcgggtgcgtcatgccaacatcatccagctggtggaggtgttcgagacacaggagcgggtgtacatggtgatggagctggccactggtggagagctctttgaccgcatcattgccaagggctccttcaccgagcgtgacgccacgcgggtgctgcagatggtgctggatggcgtccggtatctgcatgcactgggcatcacacaccgagacctcaaacctgagaatctgctctactaccatccgggcactgactccaagatcatcatcaccgacttcggcctggccagtgctcgcaagaagggtgatgactgcttgatgaagaccacctgtggcacgcctgagtacattgccccagaagtcctggtccgcaagccatacaccaactcagtggacatgtgggcgctgggcgtcattgcctacatcctactcagtggcaccatgccgtttgaggatgacaaccgtacccggctgtaccggcagatcctcaggggcaagtacagttactctggggagccctggcctagtgtgtccaacctggccaaggacttcattgaccgcctgctgacagtggaccctggagcccgtatgactgcactgcaggccctgaggcacccgtgggtggtgagcatggctgcctcttcatccatgaagaacctgcaccgctccatatcccagaacctccttaaacgtgcctcctcgcgctgccagagcaccaaatctgcccagtccacgcgttccagccgctccacacgctccaataagtcacgccgtgtgcgggaacgggagctgcgggagctcaacctgcgctaccagcagcaatacaatggctgagccgcctggctgtgcacacatgcagcacgacccagcctggccacacactgtggtgccatctgggtccgatgccctctctggagataggcctatgtggcccacagtaggtgaagaatgtctggctccagccctttctctgtgccttcagcagcccctgtcctcaccatgggcctgggccaggtgtgacagagtagaggtagcacagggggctgtgactccccctgaactgggagcctggcctggcactgatacccctcttggtgggcagctgctctggtggagttgggaagggataggacctggccttcactgtctcccttgccctttgacttttccccaatcaaagggaactgcagtgctgggtggagtgtcctgtggcctcaggaccctttgggacagttacttctgggaccccctttcctccacagagcccttctccctggtttcacacattcccatgcatcctgatccttaagattatgctccagtgggagaccctggtaggcacaaagcttgtgccttgactggacccgtagcccctggctaggtcgaaacagccctccacctcccagccaagatctgtcttccttcatggtgcctccagggagccttcctggtcccaggacctctggtggagggccatggcgtggaccttcacccttctggactgtgtggccatgctggtcatcggcttgcccaggctccagcctctccagattctgaggggtctcagcccaccgcccttggtgccttctttgtagagcccaccgctacctccctctccccgttggatgtccattccattccccaggtgcctccttcccaactgggggtggttaaagggagccccactgctgctacctggggaatggggcacctgggggccaaggcagagggaagggggtcctcccgattagggtcgagtgtcagcctgggttctatcctttggtgcagccccattgccttttcccttcaggctctgttgctccctcctctgcagctgcacgaaggcgccatctggtgtctgcatgggtgttggcagcctgggagtgatcactgcacgcccatcgtgcacacctgcccatcgtgcacacccacccatggtgcacacctgtagtcctccatgaggacatgggaaggtaggagttgccgccctgggggagggtcccgggctgctcacctctccccttctgctgagcttctgcgcacccctccctggaacttagccatactgtgtgacctgcctctgaaaccagggtgccaggggcactgccttctcacagctggccttgccccgtccaccctgtgctgcttcccttcacagcattaaccttccagtctgggtcccactgagcctcaagctggaaggagcccctgcgggaggtgggtggggttgggtggctgctttcccagaggcctgagccagaaccatccccatttcttttgtggtatctccccctaccacaaaccaggctggaacccaagccccttcctccacagctgccttcagtgggtagaatggggccagggcccagctttggccttagcttgacggcagggcccctgccattgcaggagggtttggttcccactcagcttctgccggtcggcagcctgggccaggcccttttcctgcatgtgccacctccagtgggaaacaaaactaaagagaccactctgtgccaagtcgactatgccttagacacatcctcctaccgtccccaatgccccctgggcaggaggcagtggagaaccaagccccatggcctcagaatttccccccagttccccaagtgtctctggggacctgaagccctggggcttacgttctctcttgcccagggtgggcctggtcctgagggcaggacagggggtttggagatgtgggcctttgatagacccacttgggccttcatgccatggcctgtggatggagaatgtgcagttatttattatgcgtattcagtttgtaaacgtatcctctgtattcagtaaacaggctgcctctccagggagggctgccattcattccaaca

SEQ ID NO: 167553 - DNA, 1275 bp, Artificial Sequence
  derived and/or modified sequence
atgggctgcggcaccagcaaggtgctgcccgagccccccaaggacgtgcagctggacctggtgaagaaggtggagcccttcagcggcaccaagagcgacgtgtacaagcacttcatcaccgaggtggacagcgtgggccccgtgaaggccggcttccccgccgccagccagtacgcccacccctgccccggcccccccaccgccggccacaccgagccccccagcgagccccccagaagagccagagtggccaagtacagagccaagttcgaccccagagtgaccgccaagtacgacatcaaggccctgatcggcagaggcagcttcagcagagtggtgagagtggagcacagagccaccagacagccctacgccatcaagatgatcgagaccaagtacagagagggcagagaggtgtgcgagagcgagctgagagtgctgagaagagtgagacacgccaacatcatccagctggtggaggtgttcgagacccaggagagagtgtacatggtgatggagctggccaccggcggcgagctgttcgacagaatcatcgccaagggcagcttcaccgagagagacgccaccagagtgctgcagatggtgctggacggcgtgagatacctgcacgccctgggcatcacccacagagacctgaagcccgagaacctgctgtactaccaccccggcaccgacagcaagatcatcatcaccgacttcggcctggccagcgccagaaagaagggcgacgactgcctgatgaagaccacctgcggcacccccgagtacatcgcccccgaggtgctggtgagaaagccctacaccaacagcgtggacatgtgggccctgggcgtgatcgcctacatcctgctgagcggcaccatgcccttcgaggacgacaacagaaccagactgtacagacagatcctgagaggcaagtacagctacagcggcgagccctggcccagcgtgagcaacctggccaaggacttcatcgacagactgctgaccgtggaccccggcgccagaatgaccgccctgcaggccctgagacacccctgggtggtgagcatggccgccagcagcagcatgaagaacctgcacagaagcatcagccagaacctgctgaagagagccagcagcagatgccagagcaccaagagcgcccagagcaccagaagcagcagaagcaccagaagcaacaagagcagaagagtgagagagagagagctgagagagctgaacctgagataccagcagcagtacaacggctag

SEQ ID NO: 167554 - protein, 157 aa, Artificial Sequence
  derived and/or modified sequence
MSSEEGKLFVGGLNFNTDEQALEDHFSSFGPISEVVVVKDRETQRSRGFGFITFTNPEHASVAMRAMNGESLDGRQIRVDHAGKSARGTRGGGFGAHGRGRSYSRGGGDQGYGSGRYYDSRPGGYGYGYGRSRDYNGRNQGGYDRYSGGNYRDNYDN

SEQ ID NO: 167555 - DNA, 474 bp, Artificial Sequence
  derived and/or modified sequence
atgagcagcgaggagggcaagctgttcgtgggcggcctgaacttcaacaccgacgagcaggccctggaggaccacttcagcagcttcggccccatcagcgaggtggtggtggtgaaggacagagagacccagagaagcagaggcttcggcttcatcaccttcaccaaccccgagcacgccagcgtggccatgagagccatgaacggcgagagcctggacggcagacagatcagagtggaccacgccggcaagagcgccagaggcaccagaggcggcggcttcggcgcccacggcagaggcagaagctacagcagaggcggcggcgaccagggctacggcagcggcagatactacgacagcagacccggcggctacggctacggctacggcagaagcagagactacaacggcagaaaccagggcggctacgacagatacagcggcggcaactacagagacaactacgacaactag

SEQ ID NO: 167556 - DNA, 474 bp, Artificial Sequence
  derived and/or modified sequence
atgagtagtgaggagggcaaattgtttgtgggcggcttgaacttcaacacggacgaacaggcccttgaggaccatttcagttcattcggccccatttctgaggtggttgtggtcaaggaccgggaaactcagcgcagtagaggttttggctttatcacctttacaaatcccgagcatgcttcggtggcaatgcgcgcaatgaacggtgagagcctggatgggcggcagattcgggtcgatcatgcagggaagagtgcaagaggtaccagaggcgggggcttcggggctcatggccgcggacgcagctactcccgtgggggaggagaccaaggatatggaagcggccgttactacgatagcaggccaggcggttatggctacggctacggtagatcccgcgattacaatgggcgaaaccagggaggatatgacagatacagtggcggaaactacagagacaattatgacaactag

SEQ ID NO: 167557 - DNA, 474 bp, Artificial Sequence
  derived and/or modified sequence
atgagcagcgaggagggcaagctgtttgtgggcggcctgaacttcaacacagatgagcaggccctggaggaccacttcagcagctttggccccatcagcgaggtggtggtggtgaaggaccgggagacccagaggagccggggcttcggcttcatcaccttcaccaaccctgagcacgcctctgtggccatgagggccatgaatggagagagcctggatggccggcagatccgggtggaccacgccggcaagagcgcccggggcacccggggcggcggctttggagcccacggccggggccgcagctacagccggggcggcggggaccagggctacggcagcggccgctactatgacagcaggcctgggggctacggctacggctacggccgcagccgggactacaacggcaggaaccagggcggctatgaccgctacagcggcggcaactacagagacaactatgacaactag

SEQ ID NO: 167558 - DNA, 474 bp, Artificial Sequence
  derived and/or modified sequence
atgagcagcgaggagggcaagctgttcgtgggcggcctgaacttcaacaccgacgaacaggcccttgaggatcacttctcgtcttttggccccattagcgaagttgttgtagtaaaggaccgggagacccagcgcagccgaggttttggtttcatcacattcacaaatccagaacatgcttccgttgcaatgagggcaatgaacggcgagtctctggatggaaggcaaatccgagtggatcacgcaggaaaaagcgcccgcggaaccaggggagggggtttcggggcacacggtcgagggcggtcctatagcagggggggaggcgaccaaggttacgggagcggtaggtattacgacagcagacccggtggttacggttacggatacggacgatctcgggactacaatggtcgcaaccaagggggctatgaccggtattccggcggcaactaccgggataactatgacaactag

SEQ ID NO: 167559 - DNA, 474 bp, Artificial Sequence
  derived and/or modified sequence
atgtcaagtgaggaaggcaagcttttcgtgggcggtcttaatttcaacaccgatgagcaagctttagaagatcatttctcatcctttggaccaatttcggaggttgtagtcgtgaaagatcgagagacacagcggtccaggggctttgggtttatcactttcacgaaccccgagcatgcatctgtggcaatgagagctatgaatggggaatcactggatggtcgccaaatccgggtggaccatgctggaaaatcagctcggggaaccagaggcggaggatttggggcacacgggagaggcaggtcttacagccggggaggaggtgatcagggctatgggtccggccgatactatgactcacggcctgggggatacgggtatggatatggtcggagccgggactacaacggaagaaatcaaggaggctacgataggtacagcggaggcaattaccgcgacaattacgataactag

SEQ ID NO: 167560 - DNA, 474 bp, Artificial Sequence
  derived and/or modified sequence
atgtcttccgaagagggaaaactgtttgtcggcggtcttaactttaatacagacgaacaagccttggaggaccacttttccagctttggacctattagcgaggtcgtggtggtgaaagatcgcgaaactcagcggagtcgcggctttggcttcataaccttcacaaaccccgagcacgcctcagtggccatgcgggctatgaatggggaaagtttggacggccgccagatccgggtggaccatgcagggaaatctgctcgtggaacaagaggcggcggattcggtgcccacggaagaggccgctcttattcacgcggaggtggagatcaagggtatggtagtggaaggtattacgacagccgaccagggggttacggctatggttatggacggagccgcgattataacggaagaaatcagggagggtatgacaggtattccggcgggaattacagggataattatgataattag

SEQ ID NO: 167561 - DNA, 474 bp, Artificial Sequence
  derived and/or modified sequence
atgagcagcgaggaaggaaaactgttcgttgggggcctgaacttcaacactgatgagcaggcccttgaagaccacttctcctctttcggacccatcagtgaggtcgttgtggtgaaggaccgcgagactcagcgcagcaggggattcggctttattactttcaccaatccagagcacgccagcgttgccatgagggccatgaacggtgagtctttggatggacggcaaattcgagtcgatcacgctgggaaatcggccaggggcaccagggggggcggatttggggcacatggacgagggcggtcttattcgcgcggtggcggagatcaagggtatgggtccggacgctattacgacagtaggcctgggggatacgggtacggctatggaaggtctcgtgactacaacggcaggaaccaagggggctacgatcgttactctggaggcaactatcgggataattatgataattag

SEQ ID NO: 167562 - DNA, 474 bp, Artificial Sequence
  derived and/or modified sequence
atgagcagcgaggagggcaagctgttcgtgggcggcctgaacttcaataccgacgagcaggcgctggaagaccatttttcaagcttcggccctatcagcgaagtggtggtggtcaaggaccgcgagactcaacgtagcagagggttcggttttattacgttcactaatcctgagcacgcatcggtcgccatgagggctatgaacggcgagtcgctggacggccgacagattcgtgtcgaccacgctgggaagtccgctagggggacccgagggggaggattcggagcacacggccgcggccgttcttacagcagaggtggcggcgatcaggggtatggttccggccggtattacgattcccgaccaggcgggtacggctacggctatggacgctctcgcgattacaatggcaggaatcagggaggctacgaccggtactctggcggtaactacagagacaactatgataattag

SEQ ID NO: 167563 - DNA, 474 bp, Artificial Sequence
  derived and/or modified sequence
atgagcagcgaggagggcaagctgttcgtgggcggcctgaacttcaatactgatgaacaagctctggaggaccacttctcatcgttcgggccaattagcgaagtggtggtggtcaaagatagagagactcagcgtagcagaggtttcggtttcattaccttcaccaatccggaacacgcctccgtcgctatgagagcgatgaatggggagagcctagacggccggcagattagggtggaccatgccggcaaaagcgcacgcggcacacgggggggtgggttcggcgcccatggaaggggacgcagctacagtcgcggtgggggagaccagggatacggctccggcaggtactacgattctcgccctgggggttatgggtatggatacggtagatctagggattataacggacgaaatcaggggggttacgatcggtattcgggggggaactatcgcgataattatgacaactag

SEQ ID NO: 167564 - DNA, 474 bp, Artificial Sequence
  derived and/or modified sequence
atgtcctccgaggaaggcaagttatttgtgggaggcttgaactttaacaccgacgaacaggcgctggaggatcacttttcttcattcggacctataagcgaagttgttgtagtgaaggatcgggaaacccaacgctcgcgaggtttcggattcataactttcacaaatccagagcatgcctccgtcgcaatgcgggcaatgaacggcgaatcactggacggccgacagatacgcgtcgaccacgccggaaaaagcgcaaggggcacgagagggggtggcttcggcgctcatggcagaggcaggtcttatagccggggtggtggcgaccagggttacgggtcaggaaggtattatgactctcgaccaggtggttatggctacggatatgggaggtctcgcgactacaatggcaggaaccagggagggtacgataggtatagtggtgggaattatagggacaattatgataactag

SEQ ID NO: 167565 - DNA, 474 bp, Artificial Sequence
  derived and/or modified sequence
atgtcttccgaagagggtaagttattcgtagggggtttaaactttaatacggacgagcaggctttggaagatcatttctcctcattcggacccatcagcgaagttgttgttgtgaaggaccgtgagacccagagatcgcgcggatttggattcatcacctttaccaatccggaacacgctagcgtggccatgagagccatgaatggtgaatcactcgatggacgccaaatcagagttgaccacgctggaaagtccgcccgtgggacccgcggaggaggctttggggcacatgggaggggtcgatcctactcccgcggtggaggggatcagggctatggaagcgggagatactatgattcacgcccaggtgggtacgggtacggctacggtcggtccagagactacaacgggcgaaaccaaggtggatatgaccggtacagtggcggtaactaccgtgacaactatgataactag

SEQ ID NO: 167566 - protein, 199 aa, Artificial Sequence
  derived and/or modified sequence
MNYSKIPAQVDLRRQTERDCRVSSFRVKENFDKARFSGTWYAMAKKDPEGLFLQDNIVAEFSVDETGQMSATAKGRVRLLNNWDVCADMVGTFTDTEDPAKFKMKYWGVASFLQKGNDDHWIVDTDYDTYAVQYSCRLLNLDGTCADSYSFVFSRDPNGLPPEAQKIVRQRQEELCLARQYRLIVHNGYCDGRSERNLL

SEQ ID NO: 167567 - protein, 201 aa, Artificial Sequence
  derived and/or modified sequence
MKWVWALLLLAALGSGRAERDCRVSSFRVKENFDKARFSGTWYAMAKKDPEGLFLQDNIVAEFSVDETGQMSATAKGRVRLLNNWDVCADMVGTFTDTEDPAKFKMKYWGVASFLQKGNDDHWIVDTDYDTYAVQYSCRLLNLDGTCADSYSFVFSRDPNGLPPEAQKIVRQRQEELCLARQYRLIVHNGYCDGRSERNLL

SEQ ID NO: 167568 - protein, 199 aa, Artificial Sequence
  derived and/or modified sequence
MNYSKIPAQVDLRRQAERDCRVSSFRVKENFDKARFSGTWYAMAKKDPEGLFLQDNIVAEFSVDETGQMSATAKGRVRLLNNWDVCADMVGTFTDTEDPAKFKMKYWGVASFLQKGNDDHWIVDTDYDTYAVQYSCRLLNLDGTCADSYSFVFSRDPNGLPPEAQKIVRQRQEELCLARQYRLIVHNGYCDGRSERNLL

SEQ ID NO: 167569 - DNA, 600 bp, Artificial Sequence
  derived and/or modified sequence
atgaactattccaaaatcccagcccaggttgatctgaggcgacagactgaacgtgattgtcgggtgtccagcttcagagtcaaagagaattttgataaggctagattcagtggtacatggtacgccatggccaagaaggacccggaaggcctgttccttcaggacaacatagtggccgaattctccgttgacgagaccggacagatgtctgccaccgctaaaggccgggttcggctgctgaataattgggatgtttgcgcagatatggtcggaacatttactgataccgaagacccggctaaattcaagatgaagtattggggcgtggccagtttcctacagaaaggaaacgatgaccattggattgtggacaccgactacgatacctacgccgtgcagtactcctgtcgcctcctgaatttagacgggacatgcgccgattcctatagtttcgtgttctccagagaccctaatggtctgcccccagaagcacaaaagatcgttaggcagcgacaggaggagctgtgcctggctcggcagtatcgattgatagtgcacaacggatactgcgatggcaggtccgaaagaaacctgctatag

SEQ ID NO: 167570 - DNA, 606 bp, Artificial Sequence
  derived and/or modified sequence
atgaaatgggtgtgggcccttctgttactcgcagctctgggctccggtcgtgccgagagagattgtagagtttccagcttccgcgtaaaagagaactttgataaggcaagatttagcggtacgtggtacgccatggctaaaaaggaccctgagggtctgtttcttcaggataacatcgtagcagaattttctgtggatgagactggacagatgagcgcaactgccaagggtagggttcgtcttttgaacaactgggatgtgtgcgctgacatggtgggaaccttcactgataccgaagatccggcaaaattcaagatgaaatattggggggtggccagttttttgcaaaaaggtaatgatgatcactggattgtggacaccgattacgacacgtacgccgtccagtattcatgtaggcttttaaatctggacggaacgtgtgctgattcctattcttttgtgttttcacgcgatcctaacgggctgcctccagaagcacaaaaaatcgtacggcaacgccaggaggagctgtgtcttgccaggcagtatcgcttgatagtgcataatggatactgtgatggaaggtccgagcggaacctcctctag

SEQ ID NO: 167571 - DNA, 606 bp, Artificial Sequence
  derived and/or modified sequence
atgaaatgggtatgggccctcctgctgctcgcggcactcggcagcggtcgcgctgaaagagattgccgggtctcctccttccgagtcaaggagaactttgacaaggctcgtttctctgggacctggtatgccatggcaaagaaagatcccgagggtttatttcttcaagacaacattgtggccgagttctccgttgatgagacgggccagatgagcgccaccgcgaaaggccgagtgcggcttttgaataactgggatgtgtgcgctgatatggtcggcacattcacagacaccgaggaccctgccaagtttaaaatgaagtactggggcgtggcatcctttctgcagaagggaaatgacgaccattggatcgtggacacagactacgatacctacgctgtgcaatactcctgccgactgctcaacttggatggaacctgcgccgatagctacagcttcgttttctcaagagatccaaatggactgcctcctgaagcccagaagatcgtcaggcagcgacaggaagagctgtgtctcgcgagacaatatcgactgatcgtgcacaacggatactgtgacggcaggtcagaaaggaatctgctgtag

SEQ ID NO: 167572 - DNA, 600 bp, Artificial Sequence
  derived and/or modified sequence
atgaactactctaagatcccagctcaggtcgacctccgcagacaggctgagcgagattgccgcgtgagctcgttccgggtgaaggaaaatttcgacaaagcacgtttctccggaacgtggtacgctatggctaaaaaggacccagagggactgtttttacaagataacatagttgccgagttttctgtagatgaaaccggacagatgagcgccactgctaaggggagagttcggctgctgaataattgggacgtttgtgccgacatggttggcactttcactgatacggaagatcccgcgaagtttaagatgaaatactggggcgtggcaagcttcctgcagaaaggtaacgacgatcattggatcgtcgatacggattacgacacatatgcagttcaatattcatgtagactcctcaacctggatggtacctgtgctgacagttattctttcgtcttttctcgagatccaaacggccttcctcccgaggctcagaaaattgtgaggcagaggcaggaggagctctgtttggctcgtcagtataggctcattgtgcataatgggtactgcgatggccggtctgaacggaatctgctgtag

SEQ ID NO: 167573 - DNA, 600 bp, Artificial Sequence
  derived and/or modified sequence
atgaactacagcaagatcccagcccaggtggacctgcggcggcagacagagcgggactgccgggtgagcagcttccgggtgaaggaaaattttgacaaggcccgcttcagcggcacctggtacgccatggccaagaaggaccctgagggcctcttcctgcaggacaacatcgtggccgagttctctgtggatgagaccggccagatgtctgccacagccaagggccgggtgcggctgctgaacaactgggatgtgtgtgccgacatggtgggcaccttcacagacacagaagatcctgccaagttcaagatgaagtactggggcgtggccagcttcctgcagaagggaaatgatgaccactggatcgtggacacagattatgacacctatgctgtgcagtacagctgccgcctgctgaacctggatggcacctgtgccgacagctacagctttgtgttcagccgggaccccaacggcctgcccccagaggcccagaagatcgtgcggcagaggcaggaggagctgtgcctggcccggcagtaccgcctcatcgtgcacaacggctactgtgatggccgctctgagaggaacctgctgtag

SEQ ID NO: 167574 - DNA, 606 bp, Artificial Sequence
  derived and/or modified sequence
atgaagtgggtgtgggccctgctgctgctggccgccctgggcagcggccgggcagagcgggactgccgggtgagcagcttccgggtgaaggaaaattttgacaaggcccgcttcagcggcacctggtacgccatggccaagaaggaccctgagggcctcttcctgcaggacaacatcgtggccgagttctctgtggatgagaccggccagatgtctgccacagccaagggccgggtgcggctgctgaacaactgggatgtgtgtgccgacatggtgggcaccttcacagacacagaagatcctgccaagttcaagatgaagtactggggcgtggccagcttcctgcagaagggaaatgatgaccactggatcgtggacacagattatgacacctatgctgtgcagtacagctgccgcctgctgaacctggatggcacctgtgccgacagctacagctttgtgttcagccgggaccccaacggcctgcccccagaggcccagaagatcgtgcggcagaggcaggaggagctgtgcctggcccggcagtaccgcctcatcgtgcacaacggctactgtgatggccgctctgagaggaacctgctgtag

SEQ ID NO: 167575 - DNA, 600 bp, Artificial Sequence
  derived and/or modified sequence
atgaactacagcaagatcccagcccaggtggacctgcggcggcaggccgagcgggactgccgggtgagcagcttccgggtgaaggaaaattttgacaaggcccgcttcagcggcacctggtacgccatggccaagaaggaccctgagggcctcttcctgcaggacaacatcgtggccgagttctctgtggatgagaccggccagatgtctgccacagccaagggccgggtgcggctgctgaacaactgggatgtgtgtgccgacatggtgggcaccttcacagacacagaagatcctgccaagttcaagatgaagtactggggcgtggccagcttcctgcagaagggaaatgatgaccactggatcgtggacacagattatgacacctatgctgtgcagtacagctgccgcctgctgaacctggatggcacctgtgccgacagctacagctttgtgttcagccgggaccccaacggcctgcccccagaggcccagaagatcgtgcggcagaggcaggaggagctgtgcctggcccggcagtaccgcctcatcgtgcacaacggctactgtgatggccgctctgagaggaacctgctgtag

SEQ ID NO: 167576 - DNA, 600 bp, Artificial Sequence
  derived and/or modified sequence
atgaactacagcaagatccccgcccaggtggacctgcggcggcagaccgaacgagactgccgtgtgtcttctttccgagtgaaagaaaacttcgacaaggcaagatttagcggcacctggtatgctatggccaaaaaggacccagaaggactgttccttcaggataatatcgtggccgaattttctgtcgatgagacgggacagatgagcgctaccgcgaagggtcgagtcagactccttaataactgggacgtgtgcgcagacatggtggggacctttactgataccgaagatccagcaaagtttaaaatgaaatattggggcgtggcatctttcttgcagaaagggaacgacgaccactggatcgtcgatactgattacgatacctacgcagtccagtacagctgtaggctactcaacctggatgggacttgcgccgatagctattccttcgtcttttcccgggatcccaatggcttaccacccgaggctcagaaaatcgtgcgccaacgccaggaggaactgtgtctggccaggcagtatcgcctgatcgttcacaatggatactgcgatgggaggagcgagcggaacctgctgtag

SEQ ID NO: 167577 - DNA, 606 bp, Artificial Sequence
  derived and/or modified sequence
atgaagtgggtgtgggccctgctgctgctggccgccctgggcagcgggcgggctgagagggactgccgcgtgtcgagtttccgcgtgaaggagaatttcgataaagctagattctctgggacttggtacgctatggccaagaaggaccctgagggcctgttcctgcaggataacattgtggctgagttttctgtagacgagactggtcagatgtctgctaccgccaagggaagagtgcgcttactgaacaattgggacgtctgtgccgacatggtggggacctttactgataccgaggatcctgctaagtttaaaatgaagtactggggagttgcttcgtttctgcagaagggtaatgacgatcattggatcgtggacactgattacgacacatacgccgtgcagtacagttgtaggctcctgaatttggacggcacttgtgccgattcctattcgtttgtcttcagtagggaccccaacggtttgccaccagaggctcagaaaattgtgcgacagcgtcaggaagagctctgtctggctaggcagtacagattgatcgtccataatggatactgcgacggccggagtgagagaaacctgctgtag

SEQ ID NO: 167578 - DNA, 606 bp, Artificial Sequence
  derived and/or modified sequence
atgaagtgggtgtgggccctgctgctgctggccgccctgggcagcggccgcgcggaacgggactgcagggtatcatcatttcgcgtgaaagaaaatttcgataaagcccgcttttcaggtacgtggtatgcaatggccaagaaggacccagaagggcttttcctccaggataatattgtcgccgaattctccgttgacgagactggacaaatgagcgcaaccgcgaaaggaagggtccgtctgctgaacaattgggatgtttgcgcagatatggttggcactttcactgatactgaagaccccgccaaattcaaaatgaagtactggggagtggcttcttttttgcagaaaggcaacgacgaccattggatagttgacactgactacgacacgtacgctgtacaatacagctgtaggctgctcaatttggacggaacttgcgcagattcttactcttttgtcttttccagagatcccaatggactgcctcccgaggcacaaaaaatcgtgcgccagcggcaagaagaattgtgcctggcacggcaatatcgactgatcgtccataacgggtactgtgatggtcggtcagagcgcaacctgctttag

SEQ ID NO: 167579 - DNA, 600 bp, Artificial Sequence
  derived and/or modified sequence
atgaactacagcaagatccccgcccaggtggacctgcggcggcaggccgagagggattgcagagtatcttcgttcagggttaaagagaatttcgacaaggcaagatttagcggcacctggtatgctatggctaagaaagatccagagggactgttcttgcaagataatatagtcgctgagttttccgtggacgagacgggccagatgtccgccactgcaaaaggtagggtgcggcttctgaataattgggacgtctgtgcagatatggtgggaacatttactgatacggaggaccctgccaagttcaaaatgaaatattggggtgtggcatctttcttgcagaaaggtaatgatgaccattggatcgtggataccgattatgacacttatgctgttcagtactcatgtcgcctattgaacctggacgggacctgtgcagatagctatagcttcgttttttcacgggatccgaatggactgcccccagaggctcagaagatcgttcggcagcggcaggaagaactgtgcttggctagacaataccgccttatcgtccataatggttattgtgatggtaggagcgagcggaacctgctgtag

SEQ ID NO: 167580 - DNA, 600 bp, Artificial Sequence
  derived and/or modified sequence
atgaattactccaagatccccgctcaggtggacctgcgcagacagacagagcgggattgtagggtctcgtccttccgggtgaaggagaatttcgacaaagccagattctcagggacttggtacgccatggccaagaaggaccccgagggtctctttcttcaggacaatatcgtagctgagttcagcgtggatgagacaggacagatgagcgctaccgcgaaaggtcgtgtaagacttcttaacaattgggatgtgtgtgccgacatggtcggcactttcaccgacacggaagacccagctaagtttaagatgaagtattggggcgtcgcgagttttctacagaagggcaatgacgatcactggatcgtagacactgactatgatacttatgccgttcaatattcgtgtagacttctaaacctggacgggacctgcgccgatagctactcattcgtgttctctagagatcccaacggactgcctcctgaggcacagaagattgtcagacaacgtcaagaggagctttgtctcgctcggcagtatcgtctgattgttcataacggttattgtgatggcagaagcgagcgaaatctgttgtag

SEQ ID NO: 167581 - DNA, 606 bp, Artificial Sequence
  derived and/or modified sequence
atgaaatgggtctgggccctattactgctagccgcactgggtagcggtcgagcagagagagattgtcgcgtgagttccttccgagttaaggagaattttgataaggctaggttcagcggcacgtggtacgcaatggcgaagaaagaccccgaaggcttattcctgcaggataacatcgtagctgagttctccgtagacgagaccggccagatgtctgccactgctaagggaagggtgcgcctgctgaacaattgggatgtgtgtgccgatatggttggtacgtttaccgacactgaggacccagcaaagttcaaaatgaagtactggggggtcgcctcatttttacaaaaaggaaatgacgatcactggatcgttgacaccgactacgacacatatgccgtccaatattcctgtagattgctgaacctggacggtacttgtgcggattcctactctttcgtattcagtagagacccaaacggcttgccaccggaggcccaaaagatcgtacggcaacggcaggaggagctgtgcctggccaggcagtaccgtctgatcgtgcacaacggatattgcgacggtcgctctgaacggaacctgctgtag

SEQ ID NO: 167582 - DNA, 606 bp, Artificial Sequence
  derived and/or modified sequence
atgaaatgggtatgggcactgctgcttctggccgctcttgggtcgggcagagcagagagggattgtcgggttagctcatttcgggtgaaagaaaatttcgataaagcacggttcagcggcacatggtacgcaatggccaaaaaggacccagaagggctgttcctccaagacaatatagtggccgagttcagtgtggacgagacagggcagatgagtgcgaccgcaaagggcagagtgcgcctgctgaacaattgggatgtgtgcgccgatatggtaggtaccttcacagatacagaagatcccgcaaaatttaaaatgaaatactggggcgttgctagcttcctccagaaaggcaatgacgaccattggattgtcgacacagattacgacacatacgccgtccagtatagttgtcgcctgctgaacctggacggcacctgtgccgatagttactcgttcgtgttttcgcgggaccctaacggtttgccccctgaagcccagaaaatagttcggcagaggcaagaagagctctgtctagctcggcagtatcggctcatcgtccacaatggctattgtgacggtaggtctgagcggaatctgctttag

SEQ ID NO: 167583 - DNA, 600 bp, Artificial Sequence
  derived and/or modified sequence
atgaactacagtaagatcccagctcaggtggacctgcgtcgccaggctgagagagattgcagggtttcttcttttcgggtcaaagaaaactttgataaagcaagattttctggtacttggtatgctatggccaagaaggaccccgagggcctgttcctgcaagataatatcgtggcggagttcagtgttgacgagacaggacagatgtccgccacagccaaaggtagggtccgactcctgaacaactgggacgtgtgcgccgatatggttggtaccttcactgacaccgaggacccagccaagtttaaaatgaagtactggggcgttgcttctttcctccagaaaggaaacgatgatcattggatcgtggataccgattacgatacatatgcggttcaatatagttgccgccttctgaacctcgacggcacttgtgcagacagctattcattcgtgttctctagagacccaaacggtctcccccctgaagcccagaagatcgtccgacagagacaggaagaactgtgcctggcccgtcagtaccgattgatcgttcacaatggttactgtgacgggcgttccgagcgcaaccttctatag

SEQ ID NO: 167584 - DNA, 838 bp, Artificial Sequence
  derived and/or modified sequence
atgaattattccaaaattcctgcacaagtggacctcagaaggcagacggagcgcgactgccgagtgagcagcttccgagtcaaggagaacttcgacaaggctcgcttctctgggacctggtacgccatggccaagaaggaccccgagggcctctttctgcaggacaacatcgtcgcggagttctccgtggacgagaccggccagatgagcgccacagccaagggccgagtccgtcttttgaataactgggacgtgtgcgcagacatggtgggcaccttcacagacaccgaggaccctgccaagttcaagatgaagtactggggcgtagcctcctttctccagaaaggaaatgatgaccactggatcgtcgacacagactacgacacgtatgccgtgcagtactcctgccgcctcctgaacctcgatggcacctgtgctgacagctactccttcgtgttttcccgggaccccaacggcctgcccccagaagcgcagaagattgtaaggcagcggcaggaggagctgtgcctggccaggcagtacaggctgatcgtccacaacggttactgcgatggcagatcagaaagaaaccttttgtagcaatatcaagaatctagtttcatctgagaacttctgattagctctcagtcttcagctctatttatcttaggagtttaatttgcccttctctccccatcttccctcagttcccataaaaccttcattacacataaagatacacgtgggggtcagtgaatctgcttgcctttcctgaaagtttctggggcttaagattccagactctgattcattaaactatagtcacccgtgtcctgtg

SEQ ID NO: 167585 - DNA, 1068 bp, Artificial Sequence
  derived and/or modified sequence
gctccacgcgcgcccggactcggcggccaggcttgcgcgcggttcccctcccggtgggcggattcctgggcaagatgaagtgggtgtgggcgctcttgctgttggcggcgctgggcagcggccgcgcggagcgcgactgccgagtgagcagcttccgagtcaaggagaacttcgacaaggctcgcttctctgggacctggtacgccatggccaagaaggaccccgagggcctctttctgcaggacaacatcgtcgcggagttctccgtggacgagaccggccagatgagcgccacagccaagggccgagtccgtcttttgaataactgggacgtgtgcgcagacatggtgggcaccttcacagacaccgaggaccctgccaagttcaagatgaagtactggggcgtagcctcctttctccagaaaggaaatgatgaccactggatcgtcgacacagactacgacacgtatgccgtgcagtactcctgccgcctcctgaacctcgatggcacctgtgctgacagctactccttcgtgttttcccgggaccccaacggcctgcccccagaagcgcagaagattgtaaggcagcggcaggaggagctgtgcctggccaggcagtacaggctgatcgtccacaacggttactgcgatggcagatcagaaagaaaccttttgtagcaatatcaagaatctagtttcatctgagaacttctgattagctctcagtcttcagctctatttatcttaggagtttaatttgcccttctctccccatcttccctcagttcccataaaaccttcattacacataaagatacacgtgggggtcagtgaatctgcttgcctttcctgaaagtttctggggcttaagattccagactctgattcattaaactatagtcacccgtgtcctgtgattttagttttcatttgtgtttatgtctgtgctgcagacggatgggtggggtgcgcttctttataccaggagcacgtggctctttctgacctttggcctgttctagtgcctaatctccattattaaatactggcttctcccaacttcctg

SEQ ID NO: 167586 - DNA, 1314 bp, Artificial Sequence
  derived and/or modified sequence
gccaatttggcatggccagggcctgggcactcacgcaccagggagcctcgcgggtccgctctcgctctgtgaggccacggtcttcccgccaggttgactcgagcctcctgccagagccactggccccggaggccaccctagaccgcagctggcggccgctggcacgagtgcagggtaactgagccagggccgctggcgcatttggcctggccgaggccaccccgcgcggccgctccactgtgcccgaggctgtcctggaggtgaggccggcccacagggaccctgcccgtgcccgggctccgggcggattcctgggcaagatgaagtgggtgtgggcgctcttgctgttggcggcgctgggcagcggccgcgcggagcgcgactgccgagtgagcagcttccgagtcaaggagaacttcgacaaggctcgcttctctgggacctggtacgccatggccaagaaggaccccgagggcctctttctgcaggacaacatcgtcgcggagttctccgtggacgagaccggccagatgagcgccacagccaagggccgagtccgtcttttgaataactgggacgtgtgcgcagacatggtgggcaccttcacagacaccgaggaccctgccaagttcaagatgaagtactggggcgtagcctcctttctccagaaaggaaatgatgaccactggatcgtcgacacagactacgacacgtatgccgtgcagtactcctgccgcctcctgaacctcgatggcacctgtgctgacagctactccttcgtgttttcccgggaccccaacggcctgcccccagaagcgcagaagattgtaaggcagcggcaggaggagctgtgcctggccaggcagtacaggctgatcgtccacaacggttactgcgatggcagatcagaaagaaaccttttgtagcaatatcaagaatctagtttcatctgagaacttctgattagctctcagtcttcagctctatttatcttaggagtttaatttgcccttctctccccatcttccctcagttcccataaaaccttcattacacataaagatacacgtgggggtcagtgaatctgcttgcctttcctgaaagtttctggggcttaagattccagactctgattcattaaactatagtcacccgtgtcctgtgattttagttttcatttgtgtttatgtctgtgctgcagacggatgggtggggtgcgcttctttataccaggagcacgtggctctttctgacctttggcctgttctagtgcctaatctccattattaaatactggcttctcccaacttcctg

SEQ ID NO: 167587 - DNA, 1016 bp, Artificial Sequence
  derived and/or modified sequence
atcctttataaaatgaaaaactacttggatgaattattccaaaattcctgcacaagtggacctcagaaggcaggcggagcgcgactgccgagtgagcagcttccgagtcaaggagaacttcgacaaggctcgcttctctgggacctggtacgccatggccaagaaggaccccgagggcctctttctgcaggacaacatcgtcgcggagttctccgtggacgagaccggccagatgagcgccacagccaagggccgagtccgtcttttgaataactgggacgtgtgcgcagacatggtgggcaccttcacagacaccgaggaccctgccaagttcaagatgaagtactggggcgtagcctcctttctccagaaaggaaatgatgaccactggatcgtcgacacagactacgacacgtatgccgtgcagtactcctgccgcctcctgaacctcgatggcacctgtgctgacagctactccttcgtgttttcccgggaccccaacggcctgcccccagaagcgcagaagattgtaaggcagcggcaggaggagctgtgcctggccaggcagtacaggctgatcgtccacaacggttactgcgatggcagatcagaaagaaaccttttgtagcaatatcaagaatctagtttcatctgagaacttctgattagctctcagtcttcagctctatttatcttaggagtttaatttgcccttctctccccatcttccctcagttcccataaaaccttcattacacataaagatacacgtgggggtcagtgaatctgcttgcctttcctgaaagtttctggggcttaagattccagactctgattcattaaactatagtcacccgtgtcctgtgattttagttttcatttgtgtttatgtctgtgctgcagacggatgggtggggtgcgcttctttataccaggagcacgtggctctttctgacctttggcctgttctagtgcctaatctccattattaaatactggcttctcccaacttcctg

SEQ ID NO: 167588 - DNA, 600 bp, Artificial Sequence
  derived and/or modified sequence
atgaactacagcaagatccccgcccaggtggacctgagaagacagaccgagagagactgcagagtgagcagcttcagagtgaaggagaacttcgacaaggccagattcagcggcacctggtacgccatggccaagaaggaccccgagggcctgttcctgcaggacaacatcgtggccgagttcagcgtggacgagaccggccagatgagcgccaccgccaagggcagagtgagactgctgaacaactgggacgtgtgcgccgacatggtgggcaccttcaccgacaccgaggaccccgccaagttcaagatgaagtactggggcgtggccagcttcctgcagaagggcaacgacgaccactggatcgtggacaccgactacgacacctacgccgtgcagtacagctgcagactgctgaacctggacggcacctgcgccgacagctacagcttcgtgttcagcagagaccccaacggcctgccccccgaggcccagaagatcgtgagacagagacaggaggagctgtgcctggccagacagtacagactgatcgtgcacaacggctactgcgacggcagaagcgagagaaacctgctgtag

SEQ ID NO: 167589 - DNA, 606 bp, Artificial Sequence
  derived and/or modified sequence
atgaagtgggtgtgggccctgctgctgctggccgccctgggcagcggcagagccgagagagactgcagagtgagcagcttcagagtgaaggagaacttcgacaaggccagattcagcggcacctggtacgccatggccaagaaggaccccgagggcctgttcctgcaggacaacatcgtggccgagttcagcgtggacgagaccggccagatgagcgccaccgccaagggcagagtgagactgctgaacaactgggacgtgtgcgccgacatggtgggcaccttcaccgacaccgaggaccccgccaagttcaagatgaagtactggggcgtggccagcttcctgcagaagggcaacgacgaccactggatcgtggacaccgactacgacacctacgccgtgcagtacagctgcagactgctgaacctggacggcacctgcgccgacagctacagcttcgtgttcagcagagaccccaacggcctgccccccgaggcccagaagatcgtgagacagagacaggaggagctgtgcctggccagacagtacagactgatcgtgcacaacggctactgcgacggcagaagcgagagaaacctgctgtag

SEQ ID NO: 167590 - DNA, 600 bp, Artificial Sequence
  derived and/or modified sequence
atgaactacagcaagatccccgcccaggtggacctgagaagacaggccgagagagactgcagagtgagcagcttcagagtgaaggagaacttcgacaaggccagattcagcggcacctggtacgccatggccaagaaggaccccgagggcctgttcctgcaggacaacatcgtggccgagttcagcgtggacgagaccggccagatgagcgccaccgccaagggcagagtgagactgctgaacaactgggacgtgtgcgccgacatggtgggcaccttcaccgacaccgaggaccccgccaagttcaagatgaagtactggggcgtggccagcttcctgcagaagggcaacgacgaccactggatcgtggacaccgactacgacacctacgccgtgcagtacagctgcagactgctgaacctggacggcacctgcgccgacagctacagcttcgtgttcagcagagaccccaacggcctgccccccgaggcccagaagatcgtgagacagagacaggaggagctgtgcctggccagacagtacagactgatcgtgcacaacggctactgcgacggcagaagcgagagaaacctgctgtag

SEQ ID NO: 167591 - protein, 293 aa, Artificial Sequence
  derived and/or modified sequence
MATNESVSIFSSASLAVEYVDSLLPENPLQEPFKNAWNYMLNNYTKFQIATWGSLIVHEALYFLFCLPGFLFQFIPYMKKYKIQKDKPETWENQWKCFKVLLFNHFCIQLPLICGTYYFTEYFNIPYDWERMPRWYFLLARCFGCAVIEDTWHYFLHRLLHHKRIYKYIHKVHHEFQAPFGMEAEYAHPLETLILGTGFFIGIVLLCDHVILLWAWVTIRLLETIDVHSGYDIPLNPLNLIPFYAGSRHHDFHHMNFIGNYASTFTWWDRIFGTDSQYNAYNEKRKKFEKKTE

SEQ ID NO: 167592 - protein, 162 aa, Artificial Sequence
  derived and/or modified sequence
MPRWYFLLARCFGCAVIEDTWHYFLHRLLHHKRIYKYIHKVHHEFQAPFGMEAEYAHPLETLILGTGFFIGIVLLCDHVILLWAWVTIRLLETIDVHSGYDIPLNPLNLIPFYAGSRHHDFHHMNFIGNYASTFTWWDRIFGTDSQYNAYNEKRKKFEKKTE

SEQ ID NO: 167593 - protein, 85 aa, Artificial Sequence
  derived and/or modified sequence
MATNESVSIFSSASLAVEYVDSLLPENPLQEPFKNAWNYMLNNYTKFQIATWGSLIVHEALYFLFCLPGFLFQFIPYMKKYKIQK

SEQ ID NO: 167594 - protein, 220 aa, Artificial Sequence
  derived and/or modified sequence
MATNESVSIFSSASLAVEYVDSLLPENPLQEPFKNAWNYMLNNYTKFQIATWGSLIVHEALYFLFCLPGFLFQFIPYMKKYKIQKDKPETWENQWKCFKVLLFNHFCIQLPLICGTYYFTEYFNIPYDWERMPRWYFLLARCFGCAVIEDTWHYFLHRLLHHKRIYKYIHKVHHEFQAPFGMEAEYAHPLETLILGTGFFIGIVLLCDHVILLWAWVTIR

SEQ ID NO: 167595 - DNA, 882 bp, Artificial Sequence
  derived and/or modified sequence
atggccaccaacgagagcgtgagcatcttcagcagcgccagcctggccgtggagtacgtggacagcctgctgcccgagaaccccctgcaggagcccttcaagaacgcctggaactacatgctgaacaactacaccaagttccagatcgccacctggggcagcctgatcgtgcacgaggccctgtacttcctgttctgcctgcccggcttcctgttccagttcatcccctacatgaagaagtacaagatccagaaggacaagcccgagacctgggagaaccagtggaagtgcttcaaggtgctgctgttcaaccacttctgcatccagctgcccctgatctgcggcacctactacttcaccgagtacttcaacatcccctacgactgggagagaatgcccagatggtacttcctgctggccagatgcttcggctgcgccgtgatcgaggacacctggcactacttcctgcacagactgctgcaccacaagagaatctacaagtacatccacaaggtgcaccacgagttccaggcccccttcggcatggaggccgagtacgcccaccccctggagaccctgatcctgggcaccggcttcttcatcggcatcgtgctgctgtgcgaccacgtgatcctgctgtgggcctgggtgaccatcagactgctggagaccatcgacgtgcacagcggctacgacatccccctgaaccccctgaacctgatccccttctacgccggcagcagacaccacgacttccaccacatgaacttcatcggcaactacgccagcaccttcacctggtgggacagaatcttcggcaccgacagccagtacaacgcctacaacgagaagagaaagaagttcgagaagaagaccgagtag

SEQ ID NO: 167596 - DNA, 258 bp, Artificial Sequence
  derived and/or modified sequence
atggccaccaacgagagcgtgagcatcttcagcagcgccagcctggccgtggagtacgtggacagcctgctgcccgagaaccccctgcaggagcccttcaagaacgcctggaactacatgctgaacaactacaccaagttccagatcgccacctggggcagcctgatcgtgcacgaggccctgtacttcctgttctgcctgcccggcttcctgttccagttcatcccctacatgaagaagtacaagatccagaagtag

SEQ ID NO: 167597 - DNA, 663 bp, Artificial Sequence
  derived and/or modified sequence
atggccaccaacgagagcgtgagcatcttcagcagcgccagcctggccgtggagtacgtggacagcctgctgcccgagaaccccctgcaggagcccttcaagaacgcctggaactacatgctgaacaactacaccaagttccagatcgccacctggggcagcctgatcgtgcacgaggccctgtacttcctgttctgcctgcccggcttcctgttccagttcatcccctacatgaagaagtacaagatccagaaggacaagcccgagacctgggagaaccagtggaagtgcttcaaggtgctgctgttcaaccacttctgcatccagctgcccctgatctgcggcacctactacttcaccgagtacttcaacatcccctacgactgggagagaatgcccagatggtacttcctgctggccagatgcttcggctgcgccgtgatcgaggacacctggcactacttcctgcacagactgctgcaccacaagagaatctacaagtacatccacaaggtgcaccacgagttccaggcccccttcggcatggaggccgagtacgcccaccccctggagaccctgatcctgggcaccggcttcttcatcggcatcgtgctgctgtgcgaccacgtgatcctgctgtgggcctgggtgaccatcagatag

SEQ ID NO: 167598 - DNA, 882 bp, Artificial Sequence
  derived and/or modified sequence
atggctacaaacgagtctgtgtcaatcttctcctcggccagtctggccgtggagtacgtggattccctactccccgaaaaccccctgcaggaaccgttcaagaatgcctggaattatatgctgaataactatactaaattccagatcgccacttggggctctctcatcgtgcacgaagccctgtactttctgttttgcctaccgggattcctctttcagtttatcccttacatgaagaaatataagatccagaaggacaaaccagaaacctgggagaaccagtggaagtgcttcaaggtcctactttttaatcatttctgtattcagcttcccttaatctgtggcacgtattacttcaccgagtattttaatataccatacgactgggagaggatgcctcgatggtactttttgctggctcggtgctttggatgtgccgtcatcgaggatacctggcactatttccttcacagacttctgcatcataaaagaatctacaaatacatccataaggttcaccacgagtttcaggcaccgtttgggatggaggccgaatacgcgcacccattagaaactttgattttgggaacagggtttttcataggcattgtgctactttgcgaccatgtgatccttttgtgggcttgggtgactatcaggttactggagaccatcgacgttcattccggatacgatatccctttgaacccattgaacctaattcctttttatgccggaagtaggcaccacgactttcaccatatgaattttataggtaattacgccagcacattcacatggtgggaccgcattttcgggacagactcacagtataatgcttataacgaaaaaagaaagaaattcgaaaagaagaccgagtag

SEQ ID NO: 167599 - DNA, 258 bp, Artificial Sequence
  derived and/or modified sequence
atggcaactaatgaatcagtttccatcttcagctctgcttctctggcagttgaatacgtggactccctgcttcccgagaacccattgcaggagccattcaagaatgcctggaactacatgctaaacaactacaccaaattccagattgctacatggggctcacttatcgtgcacgaggctctctactttctgttctgtctaccagggttcctatttcaattcatcccatatatgaagaaatataagattcagaagtag

SEQ ID NO: 167600 - DNA, 663 bp, Artificial Sequence
  derived and/or modified sequence
atggctacaaatgaatctgtctcaatcttttcctctgcgagcttggctgtggagtacgtagattccctactcccagagaatccattacaggaaccattcaaaaacgcctggaactacatgctgaacaattatacaaaatttcaaatcgcgacttgggggagcctgatcgtgcacgaggctctttattttctgttttgtctgcctggcttcctgttccagtttatcccttacatgaaaaagtataagatccagaaagacaaaccagaaacttgggagaaccagtggaaatgctttaaggtcctgctgttcaaccacttctgcattcaattgccactcatctgcggaacctattattttacggagtactttaatattccctatgactgggagagaatgcctaggtggtatttcctgctcgccagatgtttcggctgtgctgtcattgaagacacttggcactactttctacatcggctgctgcaccacaagaggatctacaaatatattcacaaggtccaccatgagtttcaggccccttttgggatggaggccgaatatgctcacccactcgaaacactgatcctcggtactgggttcttcatcgggatcgtcctactttgcgaccatgtgatattgttgtgggcttgggtgacaatccgatag

SEQ ID NO: 167601 - DNA, 882 bp, Artificial Sequence
  derived and/or modified sequence
atggccaccaatgaatctgtgtccatcttcagcagcgccagcctggccgtggagtatgtggacagcctgctgcctgagaaccccctgcaggagcccttcaagaatgcctggaactacatgctgaacaactacaccaagttccagatcgccacctggggcagcctcatcgtgcatgaggccctgtacttcctgttctgcctgcccggcttcctgttccagttcatcccctacatgaagaagtacaagatccagaaggacaagccagagacctgggagaaccagtggaagtgcttcaaggtgctgctcttcaaccacttctgcatccagctgcccctcatctgtggcacctactacttcacagagtacttcaacatcccctatgactgggagaggatgccccgctggtacttcctgctggcccgctgcttcggctgtgctgtgattgaggacacctggcactacttcctgcaccggctgctgcaccacaagaggatctacaagtacatccacaaggtgcaccacgagttccaggcccccttcggcatggaggccgagtatgcccaccccctggagaccctcatcctgggcaccggcttcttcatcggcatcgtgctgctgtgtgaccacgtgatcctgctgtgggcctgggtgaccatccggctgctggagaccattgatgtgcacagcggctatgacatccccctgaaccccctgaacctgatccccttctacgccggcagccgccaccacgacttccaccacatgaacttcatcggcaactatgccagcaccttcacctggtgggaccgcatcttcggcacagacagccagtacaatgcctacaatgagaagaggaagaagtttgagaagaagacagaatag

SEQ ID NO: 167602 - DNA, 258 bp, Artificial Sequence
  derived and/or modified sequence
atggccaccaatgaatctgtgtccatcttcagcagcgccagcctggccgtggagtatgtggacagcctgctgcctgagaaccccctgcaggagcccttcaagaatgcctggaactacatgctgaacaactacaccaagttccagatcgccacctggggcagcctcatcgtgcatgaggccctgtacttcctgttctgcctgcccggcttcctgttccagttcatcccctacatgaagaagtacaagatccagaagtag

SEQ ID NO: 167603 - DNA, 663 bp, Artificial Sequence
  derived and/or modified sequence
atggccaccaatgaatctgtgtccatcttcagcagcgccagcctggccgtggagtatgtggacagcctgctgcctgagaaccccctgcaggagcccttcaagaatgcctggaactacatgctgaacaactacaccaagttccagatcgccacctggggcagcctcatcgtgcatgaggccctgtacttcctgttctgcctgcccggcttcctgttccagttcatcccctacatgaagaagtacaagatccagaaggacaagccagagacctgggagaaccagtggaagtgcttcaaggtgctgctcttcaaccacttctgcatccagctgcccctcatctgtggcacctactacttcacagagtacttcaacatcccctatgactgggagaggatgccccgctggtacttcctgctggcccgctgcttcggctgtgctgtgattgaggacacctggcactacttcctgcaccggctgctgcaccacaagaggatctacaagtacatccacaaggtgcaccacgagttccaggcccccttcggcatggaggccgagtatgcccaccccctggagaccctcatcctgggcaccggcttcttcatcggcatcgtgctgctgtgtgaccacgtgatcctgctgtgggcctgggtgaccatcagatag

SEQ ID NO: 167604 - DNA, 2269 bp, Artificial Sequence
  derived and/or modified sequence
agctctcgcaggccaataacgacaggacgggccgcctggcccacccggctccacccccaagccaggcgaggcaggttccgaggttggaacacctggcgagtcctcggtgtcggtggccggcagtcatctcgcggccgttcagaattataaggctgtctgcagagatttgaaaaatggcaacaaatgaaagtgtcagcatctttagttcagcatccttggctgtggaatatgtagattcacttttacctgagaatcctctgcaagaaccatttaaaaatgcttggaactatatgttgaataattatacaaagttccagattgcaacatggggatcccttatagttcatgaagccctttatttcttattctgtttacctggatttttatttcaatttataccttatatgaaaaaatacaaaattcaaaaggataagccagagacatgggaaaaccaatggaagtgtttcaaagttcttctctttaatcacttctgtatccagctgcctttgatttgtggaacctattattttacagagtatttcaatattccttatgattgggaaagaatgccaagatggtattttcttttggcaagatgctttggttgtgcagtcattgaagatacttggcactattttctgcatagactcttacaccacaaaagaatatacaagtatattcataaagttcatcatgagtttcaggctccatttggaatggaagctgaatatgcacatcctttggagactctaattcttggaactggatttttcattggaatcgtgcttttgtgtgatcatgtaattcttctttgggcatgggtgaccattcgtttattagaaactattgatgtccatagtggttatgatattcctctcaaccctttaaatctgatccctttctatgctggttctcggcatcatgatttccaccacatgaacttcattggaaactatgcttcaacatttacatggtgggatcgaatttttggaacagactctcagtataatgcctataatgaaaagaggaagaagtttgagaaaaagactgaataaatatctcacgtaaaccttcctgaaagataaacgttttcctgaattcagaaactagtagctaacattgcttctggagagcagaaataagcatgtcttctggctactaagtgataaaaagaacattaacaacctttaattaccttcctagtgggaactttttctactttacctacaagttctatatatgtagaaatgaataaatatatatttaagtacagttttcatgaggaagttttaaaagaccatgttcctaagcttccaagaaggttttggatactagaagtattaatctatggcttttctcccagtaaaaccataggcctgaagttcacattgggtctttaaatcttttagatatatactggtcatttcagaaaattcttcatagtggtattggccttatatttaactttttttttattttttttttgagacaaagccacactctgtctccttggctggagtgtggtggcacagtctcagctcactgcaacctctgcctcccagttcaagcaattcttctgcctcagcctcccaagtagctgggattacaggcacccgccaccacgcccagctaatttttgtatttttgtagagatggggtttcacgatgttggccaggctggtctcaaacttctgacctcaagtgatctgcccaccttggcctcccaaagtgctgggattacaggtgtaagccactgcgcccggcctttttaactttaaacatgttttagaattcacctaaagatcaaaatatcatggattgaacctcatcaattgatagcagtgagtgactgaagcttccaaatcaagaaaagccggcaccaagaacttccattctaatctagagctgaccagtttgagctgattctctctttgaagagtccttcttgattgcagtgcagtactggcatttctgaatggatgtaagtggagtattttagtctaaaggcttttcaaattacttgaatttttttaaaaattgaggagctttatttctatttacccttccatttttgtatatcaaatttccattgtcattaaaaactgtatcttgaaactttgtgaactgacttgctgtatttgcactttgagctcttgaaataaatgtgatttttgtgtgattatctggtttccagttttaaacattaactgtcaccttttattcttaaacttgaaagtacagaaatcattaaattattaagttgtacaat

SEQ ID NO: 167605 - DNA, 1789 bp, Artificial Sequence
  derived and/or modified sequence
aggcgaggcaggttccgaggttggaacacctggcgagtcctcggtgtcggtggccggcagtcatctcgcggccgttcaggataagccagagacatgggaaaaccaatggaagtgtttcaaagttcttctctttaatcacttctgtatccagctgcctttgatttgtggaacctattattttacagagtatttcaatattccttatgattgggaaagaatgccaagatggtattttcttttggcaagatgctttggttgtgcagtcattgaagatacttggcactattttctgcatagactcttacaccacaaaagaatatacaagtatattcataaagttcatcatgagtttcaggctccatttggaatggaagctgaatatgcacatcctttggagactctaattcttggaactggatttttcattggaatcgtgcttttgtgtgatcatgtaattcttctttgggcatgggtgaccattcgtttattagaaactattgatgtccatagtggttatgatattcctctcaaccctttaaatctgatccctttctatgctggttctcggcatcatgatttccaccacatgaacttcattggaaactatgcttcaacatttacatggtgggatcgaatttttggaacagactctcagtataatgcctataatgaaaagaggaagaagtttgagaaaaagactgaataaatatctcacgtaaaccttcctgaaagataaacgttttcctgaattcagaaactagtagctaacattgcttctggagagcagaaataagcatgtcttctggctactaagtgataaaaagaacattaacaacctttaattaccttcctagtgggaactttttctactttacctacaagttctatatatgtagaaatgaataaatatatatttaagtacagttttcatgaggaagttttaaaagaccatgttcctaagcttccaagaaggttttggatactagaagtattaatctatggcttttctcccagtaaaaccataggcctgaagttcacattgggtctttaaatcttttagatatatactggtcatttcagaaaattcttcatagtggtattggccttatatttaactttttttttattttttttttgagacaaagccacactctgtctccttggctggagtgtggtggcacagtctcagctcactgcaacctctgcctcccagttcaagcaattcttctgcctcagcctcccaagtagctgggattacaggcacccgccaccacgcccagctaatttttgtatttttgtagagatggggtttcacgatgttggccaggctggtctcaaacttctgacctcaagtgatctgcccaccttggcctcccaaagtgctgggattacaggtgtaagccactgcgcccggcctttttaactttaaacatgttttagaattcacctaaagatcaaaatatcatggattgaacctcatcaattgatagcagtgagtgactgaagcttccaaatcaagaaaagccggcaccaagaacttccattctaatctagagctgaccagtttgagctgattctctctttgaagagtccttcttgattgcagtgcagtactggcatttctgaatggatgtaagtggagtattttagtctaaaggcttttcaaattacttgaatttttttaaaaattgaggagctttatttctatttacccttccatttttgtatatcaaatttccattgtcattaaaaactgtatcttgaaactttgtgaactgacttgctgtat

SEQ ID NO: 167606 - DNA, 482 bp, Artificial Sequence
  derived and/or modified sequence
gaaggtgggcctaggctaaggtacgtgctagaaaggatgaaaacggagtgaaattcttaagtgatggaactaggctagggcatgtttcttgccctttaaaatgtgttgtcttcgggagacaggacgtagaagatagttgcagcacagggtgataggctggcgaaagttatacaaaagcaggaaccactagaaggagaattataaggctgtctgcagagatttgaaaaatggcaacaaatgaaagtgtcagcatctttagttcagcatccttggctgtggaatatgtagattcacttttacctgagaatcctctgcaagaaccatttaaaaatgcttggaactatatgttgaataattatacaaagttccagattgcaacatggggatcccttatagttcatgaagccctttatttcttattctgtttacctggatttttatttcaatttataccttatatgaaaaaatacaaaattcaaaag

SEQ ID NO: 167607 - DNA, 973 bp, Artificial Sequence
  derived and/or modified sequence
ccggctccacccccaagccaggcgaggcaggttccgaggttggaacacctggcgagtcctcggtgtcggtggccggcagtcatctcgcggccgttcaggtgagggggttggaggagtggctcatgagcgaggaagggggagcaggcgggctcccacccggtgctccgtgagatcgaggggagcgggttctgggtgcggatgcacgcgctgggcgggacgctggcagtggtacccgagacggggcggaaggagactggagtgaaggtgggcctaggctaagaattataaggctgtctgcagagatttgaaaaatggcaacaaatgaaagtgtcagcatctttagttcagcatccttggctgtggaatatgtagattcacttttacctgagaatcctctgcaagaaccatttaaaaatgcttggaactatatgttgaataattatacaaagttccagattgcaacatggggatcccttatagttcatgaagccctttatttcttattctgtttacctggatttttatttcaatttataccttatatgaaaaaatacaaaattcaaaaggataagccagagacatgggaaaaccaatggaagtgtttcaaagttcttctctttaatcacttctgtatccagctgcctttgatttgtggaacctattattttacagagtatttcaatattccttatgattgggaaagaatgccaagatggtattttcttttggcaagatgctttggttgtgcagtcattgaagatacttggcactattttctgcatagactcttacaccacaaaagaatatacaagtatattcataaagttcatcatgagtttcaggctccatttggaatggaagctgaatatgcacatcctttggagactctaattcttggaactggatttttcattggaatcgtgcttttgtgtgatcatgtaattcttctttgggcatgggtgaccattcgttt

SEQ ID NO: 167608 - DNA, 882 bp, Artificial Sequence
  derived and/or modified sequence
atggccaccaacgagagcgtgagcatcttcagcagcgccagcctggcagtagagtatgtggattcacttctgcccgaaaacccactccaggagcctttcaaaaatgcttggaattacatgctgaataactataccaaattccagatcgctacttggggctcgctgattgtccatgaagccctgtactttctgttttgccttcccggtttcttgttccagtttattccttatatgaaaaagtacaaaattcagaaggataagcctgagacttgggaaaatcagtggaaatgtttcaaggtgcttctgttcaatcacttctgcattcagttacctctcatttgtgggacgtactattttaccgaatatttcaatattccttacgactgggagcgcatgccaaggtggtattttctgttggctcgctgcttcgggtgtgccgtcattgaggacacatggcactactttcttcatcgcttgctacaccataagagaatctacaagtacattcataaggttcatcacgagtttcaggccccgttcggaatggaagccgagtacgctcaccctctggaaactctgatccttgggaccgggttttttatcgggatcgttctactctgtgatcacgtcatcttgctttgggcctgggttactattcgcctgctggagaccattgacgtccattccggctacgacatccctctgaatcctctgaatttaattcccttctacgccggaagccggcaccatgacttccaccacatgaactttatcggaaattacgcgtcaaccttcacctggtgggatcgaatttttggaacagactcccagtacaatgcttacaatgagaagcgaaagaagttcgagaaaaagactgagtag

SEQ ID NO: 167609 - DNA, 258 bp, Artificial Sequence
  derived and/or modified sequence
atggccaccaacgagagcgtgagcatcttcagcagcgccagcctggccgtagagtacgtcgactcccttcttccggagaatcctctgcaggaaccattcaagaatgcctggaattacatgctcaataactacaccaaattccaaatcgcgacctggggcagcctcatcgtgcacgaggccttatatttcctgttttgccttcccggctttctctttcagtttatcccatacatgaagaagtataaaatccaaaaatag

SEQ ID NO: 167610 - DNA, 663 bp, Artificial Sequence
  derived and/or modified sequence
atggccaccaacgagagcgtgagcatcttcagcagcgccagcctggcagttgaatacgttgatagcttgctgcccgaaaatcctttgcaggagccattcaagaacgcctggaattatatgctaaataactacaccaagtttcaaatcgctacctgggggagcctgattgtgcatgaagctctgtatttccttttctgtctgcctgggttccttttccagttcattccatatatgaagaagtacaaaatacagaaagacaagccagagacttgggagaatcagtggaagtgtttcaaagtcttgttgttcaatcacttttgtatccagcttccgctgatctgcggcacttactacttcaccgaatattttaacatcccctacgattgggagcggatgcctaggtggtatttccttcttgccagatgtttcgggtgtgctgtcatagaggacacctggcattattttctccataggctcttgcaccacaaacgtatctataagtacatccacaaggtacatcacgaattccaggccccatttggcatggaagcagaatatgcgcacccgctagagacactcattctgggaaccgggttttttataggtattgtgctgctctgtgatcacgtcatacttctttgggcatgggttaccatccgctag

SEQ ID NO: 167611 - DNA, 882 bp, Artificial Sequence
  derived and/or modified sequence
atggccaccaacgaatccgtttcaattttttcttcagcgtccctcgccgtggaatatgtggatagcttgcttccggaaaaccctctgcaagagccattcaaaaatgcctggaactacatgctgaacaattataccaaattccaaattgcaacctggggaagcctgatcgtgcacgaggctctctattttttgttctgtctgcctggtttccttttccagtttatcccttacatgaaaaaatacaagatacagaaggataagcccgagacctgggagaaccagtggaagtgtttcaaagttctgctgtttaaccacttttgcattcagttgccactaatctgtggcacgtattattttaccgaatatttcaatattccctacgattgggagcgtatgccaaggtggtacttcctgcttgcgaggtgtttcggctgcgccgttattgaagacacatggcattattttttgcaccgtctcttgcaccacaaaagaatctataagtacattcacaaagtccaccatgaatttcaggcgcctttcggtatggaagctgagtatgcccatcccctggagacactgattctgggcactggcttctttatcggcatcgttctgctgtgcgatcacgtgatcttattatgggcctgggtcactattcggcttctcgagaccattgacgtccactcaggttacgatattcccctgaaccccctcaatttgattcctttctacgccggaagtagacatcatgactttcaccacatgaacttcataggcaactatgccagtacattcacatggtgggatcggatcttcggcactgactcgcagtacaacgcgtacaatgaaaaacgcaagaaattcgaaaaaaaaaccgaatag

SEQ ID NO: 167612 - DNA, 258 bp, Artificial Sequence
  derived and/or modified sequence
atggcgaccaatgagtctgtctctattttctcctccgccagcctcgctgtggaatacgtggactcactacttccagaaaatcctctccaggagccattcaagaatgcctggaactatatgctgaataactacactaaatttcaaatcgccacctggggcagtctcatagtccatgaggctttgtacttcctgttctgcctgccaggcttccttttccagttcataccctacatgaagaagtataagattcagaagtag

SEQ ID NO: 167613 - DNA, 663 bp, Artificial Sequence
  derived and/or modified sequence
atggctactaatgaaagtgtgtcaattttctcaagcgcttctctggccgtggagtacgtggattctctgctccctgagaaccctctgcaggagcctttcaagaacgcctggaactacatgctgaataattacactaaatttcaaattgcaacttggggctcactcatcgtgcacgaagcgctttacttcttgttttgcctgcccggatttctttttcagttcattccgtatatgaagaagtataaaatccagaaggataagccagaaacttgggagaaccagtggaaatgcttcaaagttctcttattcaatcacttttgcatccaactccctttaatatgcggtacctactactttactgaatacttcaatattccatacgactgggaacgaatgcctagatggtatttccttctggctcgatgcttcggctgtgctgtaattgaggacacatggcattacttcctacatcgactgcttcaccacaagcgcatttataaatatattcacaaagttcatcatgagttccaggcgccatttgggatggaagccgaatacgcccaccctttagagacacttattctcgggactggcttcttcattggaattgtgctgctgtgcgaccacgtgatccttctgtgggcctgggttactattcgttag

SEQ ID NO: 167614 - protein, 316 aa, Artificial Sequence
  derived and/or modified sequence
MLSKLGHSPLGGLRARLTFPVCLLYHRLWASPAAPGKKKEMGNSMKSTPAPAERPLPNPEGLDSDFLAVLSDYPSPDISPPIFRRGEKLRVISDEGGWWKAISLSTGRESYIPGICVARVYHGWLFEGLGRDKAEELLQLPDTKVGSFMIRESETKKGFYSLSVRHRQVKHYRIFRLPNNWYYISPRLTFQCLEDLVNHYSEVADGLCCVLTTPCLTQSTAAPAVRASSSPVTLRQKTVDWRRVSRLQEDPEGTENPLGVDESLFSYGLRESIASYLSLTSEDNTSFDRKKKSISLMYGGSKRKSSFFSSPPYFED

SEQ ID NO: 167615 - DNA, 951 bp, Artificial Sequence
  derived and/or modified sequence
atgctgagcaagctgggccacagccccctgggcggcctgagagccagactgaccttccccgtgtgcctgctgtaccacagactgtgggccagccccgccgcccccggcaagaagaaggagatgggcaacagcatgaagagcacccccgcccccgccgagagacccctgcccaaccccgagggcctggacagcgacttcctggccgtgctgagcgactaccccagccccgacatcagcccccccatcttcagaagaggcgagaagctgagagtgatcagcgacgagggcggctggtggaaggccatcagcctgagcaccggcagagagagctacatccccggcatctgcgtggccagagtgtaccacggctggctgttcgagggcctgggcagagacaaggccgaggagctgctgcagctgcccgacaccaaggtgggcagcttcatgatcagagagagcgagaccaagaagggcttctacagcctgagcgtgagacacagacaggtgaagcactacagaatcttcagactgcccaacaactggtactacatcagccccagactgaccttccagtgcctggaggacctggtgaaccactacagcgaggtggccgacggcctgtgctgcgtgctgaccaccccctgcctgacccagagcaccgccgcccccgccgtgagagccagcagcagccccgtgaccctgagacagaagaccgtggactggagaagagtgagcagactgcaggaggaccccgagggcaccgagaaccccctgggcgtggacgagagcctgttcagctacggcctgagagagagcatcgccagctacctgagcctgaccagcgaggacaacaccagcttcgacagaaagaagaagagcatcagcctgatgtacggcggcagcaagagaaagagcagcttcttcagcagccccccctacttcgaggactag

SEQ ID NO: 167616 - DNA, 45 bp, Artificial Sequence
  derived and/or modified sequence
atgggcaacagcatgaagagcacccccgcccccgccgagagatag

SEQ ID NO: 167617 - DNA, 951 bp, Artificial Sequence
  derived and/or modified sequence
atgcttagtaagctgggtcacagccccctcgggggacttcgagcaagactaaccttccccgtctgtttactttatcacaggctgtgggccagcccagctgcccccggcaaaaaaaaagagatgggtaatagtatgaaatcaacacctgcccccgccgaacgcccactaccgaatcctgaggggctggatagtgactttctggcagtgctcagcgactatccctcacccgacatctctcccccgatctttcggaggggcgagaaactcagagtgatttccgatgaggggggatggtggaaagccatctcactgtccaccggcagggaatcttacatccctggtatttgcgtggcaagggtctaccatgggtggttgttcgaaggactggggagggataaagccgaagaattactgcaattgccagatacgaaagtcggtagctttatgattcgtgagagcgagactaagaagggtttctatagtctttctgtccgccaccgccaagtaaagcattaccggatcttcagactgcctaacaactggtactatatcagcccaaggcttacttttcagtgtctcgaagatctggtcaatcactacagcgaggtggccgatggcctttgttgcgtgctgaccacgccctgtctcacacaaagcaccgcagcaccagctgttcgggctagttcttcaccggtcactctcagacagaagaccgtggattggcgacgcgtgtcccggctgcaggaagacccagagggaacagagaatccacttggagtcgacgaatccctcttctcttatggccttagggagtctatagcttcctacttgagtctgacgagcgaagacaacacctcgtttgatcggaagaagaaatctatcagtctcatgtacggaggaagtaagaggaaatctagctttttttcctcaccaccttattttgaggactag

SEQ ID NO: 167618 - DNA, 45 bp, Artificial Sequence
  derived and/or modified sequence
atgggcaactctatgaagtccacgcccgcacccgctgaacgttag

SEQ ID NO: 167619 - DNA, 951 bp, Artificial Sequence
  derived and/or modified sequence
atgctgagcaagctgggccacagccccctgggcggcctgcgggcccggctgaccttccctgtgtgcctgctgtaccaccggctgtgggccagccctgctgcccctgggaagaagaaggagatgggcaacagcatgaagagcaccccagccccagctgagcggcccctgcccaaccctgagggcctggacagcgacttcctggccgtgctgagtgactaccccagcccagacatcagcccccccatcttccggcggggggagaagctgcgggtcatcagtgatgagggcggctggtggaaggccatcagcctgagcacaggccgggagagctacatccctggcatctgtgtggcccgggtgtaccacggctggctgtttgagggcctgggccgggacaaggccgaggagctgctgcagctgcctgacaccaaggtgggcagcttcatgatccgggagagcgagaccaagaagggcttctacagcctgtctgtgcgccaccggcaggtgaagcactaccgcatcttccggctgcccaacaactggtactacatcagcccccggctgaccttccagtgcctggaggacctggtgaaccactacagcgaggtggctgatggcctgtgctgcgtgctgaccaccccctgcctgacccagagcacagctgccccagctgtgcgggccagcagcagccctgtgaccctgcggcagaagacagtggactggaggagagtgtcccggctgcaggaggaccctgagggcacagagaaccccctgggcgtggatgagagcctcttctcctatggcctgcgggagagcatcgccagctacctgagcctgaccagcgaggacaacaccagctttgacaggaagaagaagagcatcagcctgatgtatggaggcagcaagaggaagagcagcttcttcagcagccccccctactttgaagattag

SEQ ID NO: 167620 - DNA, 45 bp, Artificial Sequence
  derived and/or modified sequence
atgggcaacagcatgaagagcaccccagccccagctgagaggtag

SEQ ID NO: 167621 - DNA, 951 bp, Artificial Sequence
  derived and/or modified sequence
atgctgagcaagctgggccacagccccctgggcggcctgcgggccaggctgacatttccagtatgccttctttaccacaggctgtgggcctcccctgcagcacccggcaagaagaaagagatgggcaattcaatgaaaagcactcctgccccagctgaaaggccactccctaacccggaaggtctggattcggattttctggcagtgctgtctgactacccctcacctgatatttctccgccaattttcaggaggggagagaaactgcgggtgatcagtgacgaaggcggctggtggaaggctatcagcctttcaacaggtagggagtcttatatacctggcatttgtgtggcccgggtttaccatgggtggctgttcgagggccttgggcgggacaaagcggaggaactgctgcagcttccggacacaaaggtggggtcattcatgattcgggagtctgaaacaaagaaggggttctatagcctttccgtgagacatagacaggttaaacactaccgcatattcagactgcctaacaattggtactacattagcccaagactcacattccaatgtctggaagatctcgtcaatcattatagcgaggtagcagacggactgtgctgcgtgcttactacaccatgcctaacgcaaagcaccgcggcccccgctgtgagagcatcatcgtcacctgtaacactgcgacaaaaaaccgtggattggaggcgggtgagtcggctgcaggaggatcccgaagggaccgagaatcctctgggagtggacgagtccctcttctcctatgggttgcgggaatctattgcttcctatctgtcacttaccagtgaggacaatacatccttcgaccgcaaaaagaagagcatttccttaatgtatgggggaagcaagagaaaatcaagttttttctctagccccccgtactttgaggactag

SEQ ID NO: 167622 - DNA, 45 bp, Artificial Sequence
  derived and/or modified sequence
atgggcaacagcatgaagagcacccccgcccccgccgagcggtag

SEQ ID NO: 167623 - DNA, 951 bp, Artificial Sequence
  derived and/or modified sequence
atgctgagtaaattagggcacagtcctctaggcggtctcagagctcggctgacattcccggtgtgcctgctgtaccaccgcctatgggcctcccctgcagccccaggcaaaaaaaaagagatggggaatagtatgaagtctacacctgctcctgctgaaagacccctgccgaacccagagggtcttgattcagattttctcgcagtcctgagcgattaccctagcccagatatttcaccgcctatttttcgacgtggagagaaacttcgggtcatcagtgacgagggaggatggtggaaagccataagcctgtctaccggacgtgaaagctatatccctggtatctgcgtcgcaagggtgtaccacgggtggctcttcgaaggcctgggccgtgataaggctgaagagctcctgcagctccccgacactaaagttggatcattcatgataagagaaagcgagactaagaaaggattttacagcctgtccgtcaggcaccgacaggtgaagcactataggatctttcggcttcccaataactggtactatatctcccctaggctgaccttccagtgtctggaggacctagtaaaccactattctgaggtcgctgatggcttgtgttgtgtgttgacaactccgtgcctcacacagtccactgccgcacctgccgtgcgggcttcctcaagcccagtgaccctgcgccaaaaaacggttgactggaggagggtgtctcgactgcaggaggatcccgagggcaccgagaatccactaggagttgacgagagcttgttttcgtacgggctgagagaatctatcgcctcctaccttagcctgacatccgaggacaatacatcttttgaccgtaagaaaaagtcaatctctttgatgtacgggggttctaagcggaagtcgtcgttctttagttccccaccttacttcgaggactag

SEQ ID NO: 167624 - DNA, 45 bp, Artificial Sequence
  derived and/or modified sequence
atgggcaacagtatgaaatccacgcccgcacccgctgaaagatag

SEQ ID NO: 167625 - DNA, 1914 bp, Artificial Sequence
  derived and/or modified sequence
aaccaatcttcaccaatctcatcttcacatataaacagccgcctttcaagaagcaagctgccagaaaaatgatgcacgatgctctctaaactgggtcattctccacttggagggctcagggcacggttgactttccccgtctgtctcctataccacaggctctgggcatcaccagcggccccagggaaaaagaaagaaatgggaaacagcatgaaatccacccctgcgcctgccgagaggcccctgcccaacccggagggactggatagcgacttccttgccgtgctaagtgactacccgtctcctgacatcagccccccgatattccgccgaggggagaaactgcgtgtgatttctgatgaagggggctggtggaaagctatttctcttagcactggtcgagagagttacatccctggaatatgtgtggccagagtttaccatggctggctgtttgagggcctgggcagagacaaggccgaggagctgctgcagctgccagacacaaaggtcggctccttcatgatcagagagagtgagaccaagaaagggttttactcactgtcggtgagacacaggcaggtaaagcattaccgcattttccgtctgcccaacaactggtactacatttccccgaggctcaccttccagtgcctggaggacctggtgaaccactattctgaggtggctgatggcctgtgctgtgtgctcaccacgccctgcctgacacaaagcacggctgccccagcagtgagggcctccagctcacctgtcaccttgcgtcagaagactgtggactggaggagagtgtccagactgcaggaggaccccgagggaacagagaacccgcttggggtagacgagtcccttttcagctatggccttcgagagagcattgcctcttacctgtccctgaccagtgaggacaacacctcctttgatcgaaagaagaaaagcatctccctgatgtatggtggcagcaagagaaagagctcattcttctcatcaccaccttactttgaggactagccaagaacagacacaatggttcatgcccaaaaggaacagaagttccaactattgcctgggatcttgcgaaaagcgaggttccctgatccctgggagcctcacgtattttagaagccaagagaagccacatggagactcaaattcgcatcttctctatccacatcatgaccaaaggaacccctccctggtgtctgatcagggctgtggcatcacgaaacattggatcatgacatgtcgggcgatgcttggaagagcccagcatgtatgtatgcacacattgtgtgtgtgggaaggacaaagccactctcacaagaaagggcaccaggactgctctccaaggaactggacctgtccagacagttacactccaaggtcattggagagaacttctgtatgggcaagcctgagagggagaggaaacaaaagctgtgtcctggcagaaggtctgggtttgcagatgggtgccctgaatggaactactttaactaatccatagggacttctggtatgctttcctctctttttaaaggaacttcgtgacactaaacattagcccaaaggacttcttagccttcaattgggagatacctttggtctgctcctgcaccaaagccatatgggtggaagtcagttggcctccctggttctgcagagggccagaagaatgagagagaggaagactgctggcagggaaatcgaggaggcgagactagaactgcaccagcttccctgatgtctgcagccatggctttgcagcgcagacagagcttctctgggatgctgggattcttgcctgtatgaatgcatcaagtattcatttattgcccgaataggcattgcattaagtcctctgtaaggtgtcaggcaagccaaaaaaaaaaaaaa

SEQ ID NO: 167626 - protein, 1256 aa, Artificial Sequence
  derived and/or modified sequence
MDRPLSSSAEAEEELEWQVASRRRKAWAKCRSSWQASETEDLSTEATTQDEEEDEEEDLPGAQLPAAGGRGNVPNEKIAIWLKDCRTPLGASLDEQSSSTLKGVLVRNGGSFEDDLSLGAEANHLHESDAQIENCNNILAKERRLQFHQKGRSMNSTGSGKSSGTVSSVSELLELYEEDPEEILYNLGFGRDEPDIASKIPSRFFNSSSFAKGIDIKVFLSAQMQRMEVENPNYALTSRFRQIEVLTTVANAFSSLYSQVSGTPLQRIGSMSSVTSNKETDPPPPLTRSNTANRLMKTLSKLNLCVDKTEKGESSSPSPSAEKGKILNVSVIEESGNKNDQKSQKIMKKKESSSMLATVKEEVSGSSAAVTENADSDRISDEANSNFNQGTENEQSKETQSHESKLGEESGIVESKLDSDFNISSHSELENSSELKSVHISTPEKEPCAPLTIPSIRNIMTQQKDSFEMEEVQSTEGEAPHVPATYQLGLTKSKRDHLLRTASQHSDSSGFAEDSTDCLSLNHLQVQESLQAMGSSADSCDSETTVTSLGEDLATPTAQDQPYFNESEEESLVPLQKGLEKAAAVADKRKSGSQDFPQCNTIENTGTKQSTCSPGDHIIEITEVEEDLFPAETVELLREASAESDVGKSSESEFTQYTTHHILKSLASIEAKCSDMSSENTTGPPSSMDRVNTALQRAQMKVCSLSNQRMGRSLLKSKDLLKQRYLFAKAGYPLRRSQSLPTTLLSPVRVVSSVNVRLSPGKETRCSPPSFTYKYTPEEEQELEKRVMEHDGQSLVKSTIFISPSSVKKEEAPQSEAPRVEECHHGRTPTCSRLAPPPMSQSTCSLHSIHSEWQERPLCEHTRTLSTHSVPNISGATCSAFASPFGCPYSHRHATYPYRVCSVNPPSAIEMQLRRVLHDIRNSLQNLSQYPMMRGPDPAAAPYSTQKSSVLPLYENTFQELQVMRRSLNLFRTQMMDLELAMLRQQTMVYHHMTEEERFEVDQLQGLRNSVRMELQDLELQLEERLLGLEEQLRAVRMPSPFRSSALMGMCGSRSADNLSCPSPLNVMEPVTELMQEQSYLKSELGLGLGEMGFEIPPGESSESVFSQATSESSSVCSGPSHANRRTGVPSTASVGKSKTPLVARKKVFRASVALTPTAPSRTGSVQTPPDLESSEEVDAAEGAPEVVGPKSEVEEGHGKLPSMPAAEEMHKNVEQDELQQVIREVGMDPISCVILELSMICTGGGVICALEDTCC

SEQ ID NO: 167627 - DNA, 3771 bp, Artificial Sequence
  derived and/or modified sequence
atggacagacccctgagcagcagcgccgaggccgaggaggagctggagtggcaggtggccagcagaagaagaaaggcctgggccaagtgcagaagcagctggcaggccagcgagaccgaggacctgagcaccgaggccaccacccaggacgaggaggaggacgaggaggaggacctgcccggcgcccagctgcccgccgccggcggcagaggcaacgtgcccaacgagaagatcgccatctggctgaaggactgcagaacccccctgggcgccagcctggacgagcagagcagcagcaccctgaagggcgtgctggtgagaaacggcggcagcttcgaggacgacctgagcctgggcgccgaggccaaccacctgcacgagagcgacgcccagatcgagaactgcaacaacatcctggccaaggagagaagactgcagttccaccagaagggcagaagcatgaacagcaccggcagcggcaagagcagcggcaccgtgagcagcgtgagcgagctgctggagctgtacgaggaggaccccgaggagatcctgtacaacctgggcttcggcagagacgagcccgacatcgccagcaagatccccagcagattcttcaacagcagcagcttcgccaagggcatcgacatcaaggtgttcctgagcgcccagatgcagagaatggaggtggagaaccccaactacgccctgaccagcagattcagacagatcgaggtgctgaccaccgtggccaacgccttcagcagcctgtacagccaggtgagcggcacccccctgcagagaatcggcagcatgagcagcgtgaccagcaacaaggagaccgacccccccccccccctgaccagaagcaacaccgccaacagactgatgaagaccctgagcaagctgaacctgtgcgtggacaagaccgagaagggcgagagcagcagccccagccccagcgccgagaagggcaagatcctgaacgtgagcgtgatcgaggagagcggcaacaagaacgaccagaagagccagaagatcatgaagaagaaggagagcagcagcatgctggccaccgtgaaggaggaggtgagcggcagcagcgccgccgtgaccgagaacgccgacagcgacagaatcagcgacgaggccaacagcaacttcaaccagggcaccgagaacgagcagagcaaggagacccagagccacgagagcaagctgggcgaggagagcggcatcgtggagagcaagctggacagcgacttcaacatcagcagccacagcgagctggagaacagcagcgagctgaagagcgtgcacatcagcacccccgagaaggagccctgcgcccccctgaccatccccagcatcagaaacatcatgacccagcagaaggacagcttcgagatggaggaggtgcagagcaccgagggcgaggccccccacgtgcccgccacctaccagctgggcctgaccaagagcaagagagaccacctgctgagaaccgccagccagcacagcgacagcagcggcttcgccgaggacagcaccgactgcctgagcctgaaccacctgcaggtgcaggagagcctgcaggccatgggcagcagcgccgacagctgcgacagcgagaccaccgtgaccagcctgggcgaggacctggccacccccaccgcccaggaccagccctacttcaacgagagcgaggaggagagcctggtgcccctgcagaagggcctggagaaggccgccgccgtggccgacaagagaaagagcggcagccaggacttcccccagtgcaacaccatcgagaacaccggcaccaagcagagcacctgcagccccggcgaccacatcatcgagatcaccgaggtggaggaggacctgttccccgccgagaccgtggagctgctgagagaggccagcgccgagagcgacgtgggcaagagcagcgagagcgagttcacccagtacaccacccaccacatcctgaagagcctggccagcatcgaggccaagtgcagcgacatgagcagcgagaacaccaccggcccccccagcagcatggacagagtgaacaccgccctgcagagagcccagatgaaggtgtgcagcctgagcaaccagagaatgggcagaagcctgctgaagagcaaggacctgctgaagcagagatacctgttcgccaaggccggctaccccctgagaagaagccagagcctgcccaccaccctgctgagccccgtgagagtggtgagcagcgtgaacgtgagactgagccccggcaaggagaccagatgcagcccccccagcttcacctacaagtacacccccgaggaggagcaggagctggagaagagagtgatggagcacgacggccagagcctggtgaagagcaccatcttcatcagccccagcagcgtgaagaaggaggaggccccccagagcgaggcccccagagtggaggagtgccaccacggcagaacccccacctgcagcagactggcccccccccccatgagccagagcacctgcagcctgcacagcatccacagcgagtggcaggagagacccctgtgcgagcacaccagaaccctgagcacccacagcgtgcccaacatcagcggcgccacctgcagcgccttcgccagccccttcggctgcccctacagccacagacacgccacctacccctacagagtgtgcagcgtgaacccccccagcgccatcgagatgcagctgagaagagtgctgcacgacatcagaaacagcctgcagaacctgagccagtaccccatgatgagaggccccgaccccgccgccgccccctacagcacccagaagagcagcgtgctgcccctgtacgagaacaccttccaggagctgcaggtgatgagaagaagcctgaacctgttcagaacccagatgatggacctggagctggccatgctgagacagcagaccatggtgtaccaccacatgaccgaggaggagagattcgaggtggaccagctgcagggcctgagaaacagcgtgagaatggagctgcaggacctggagctgcagctggaggagagactgctgggcctggaggagcagctgagagccgtgagaatgcccagccccttcagaagcagcgccctgatgggcatgtgcggcagcagaagcgccgacaacctgagctgccccagccccctgaacgtgatggagcccgtgaccgagctgatgcaggagcagagctacctgaagagcgagctgggcctgggcctgggcgagatgggcttcgagatcccccccggcgagagcagcgagagcgtgttcagccaggccaccagcgagagcagcagcgtgtgcagcggccccagccacgccaacagaagaaccggcgtgcccagcaccgccagcgtgggcaagagcaagacccccctggtggccagaaagaaggtgttcagagccagcgtggccctgacccccaccgcccccagcagaaccggcagcgtgcagaccccccccgacctggagagcagcgaggaggtggacgccgccgagggcgcccccgaggtggtgggccccaagagcgaggtggaggagggccacggcaagctgcccagcatgcccgccgccgaggagatgcacaagaacgtggagcaggacgagctgcagcaggtgatcagagaggtgggcatggaccccatcagctgcgtgatcctggagctgagcatgatctgcaccggcggcggcgtgatctgcgccctggaggacacctgctgctag

SEQ ID NO: 167628 - DNA, 3771 bp, Artificial Sequence
  derived and/or modified sequence
atggaccggccactctctagctccgccgaagcagaagaagagctggaatggcaagtggcctcgaggaggcggaaagcctgggcaaagtgcagatccagctggcaggcctctgaaacagaagacctgtccaccgaggctactacacaggatgaggaagaagacgaggaggaagacctgcccggagcccagttgcccgccgcagggggcaggggaaatgtgcctaacgaaaaaatagccatttggttgaaggactgtaggacaccactgggtgcaagccttgacgaacagtccagctccacactcaaaggagtcctggttcgcaacggcgggtcctttgaagacgacctttcacttggggcagaagccaatcatctgcatgagagcgacgcacagattgaaaactgcaataatatcctggctaaagagcggagattacagttccaccagaaagggaggagtatgaatagcacaggcagcgggaagtccagtggcactgtatcctcagtgtctgaacttcttgagctttacgaagaggacccagaggaaattctgtacaatctggggttcggaagggacgaaccagatattgcctccaagatcccttcaagattctttaatagctcctcttttgcgaaaggtatagacatcaaggtgttcctgagcgctcagatgcagaggatggaagttgaaaaccccaactatgctctcacctctcggtttcgccaaatagaagtcctcaccactgtagcaaatgccttctcctccctgtactcccaagtaagcggcacacccctgcaacggataggtagtatgtcaagcgtaacctccaacaaagagaccgaccccccccccccactgactcggagcaatacagcaaatcggctgatgaaaaccctgtcgaagttaaatctgtgtgtcgacaagacagagaaaggtgaaagcagctcaccatcaccatccgcggaaaaaggtaaaattctgaacgtgtcggttatagaagagagcgggaacaagaacgaccagaagtcacaaaaaattatgaagaagaaagagtcttccagcatgttggctacagttaaagaagaagttagtgggtccagtgccgctgtgacagagaacgcggacagcgatagaattagcgacgaggctaacagcaattttaaccaagggaccgagaatgaacagtccaaagagacccagagccacgaaagtaagctgggcgaggagtccggaattgtagaaagcaagctggacagtgacttcaacatcagctctcactcagaactggagaatagttccgaactcaaatccgttcacatcagcacacctgagaaagagccctgcgcacccctcaccattccctccataagaaatattatgactcagcagaaggactccttcgaaatggaggaagtgcaaagcacggaaggagaggccccacacgtgcctgccacttaccaattaggactcacgaaatccaaaagggatcaccttttaagaactgctagtcagcatagtgactccagcggctttgcggaagattccactgactgtctgagcctaaatcaccttcaggtgcaggaatctctgcaggcaatgggatcctcagctgacagttgtgactccgaaaccacagtgacaagtttgggggaggatctggccacccctacagcccaggatcaaccgtactttaatgaatcagaggaggaatccctggtacctttacaaaaagggcttgagaaagccgcagcggtcgctgataagcgcaagtccggtagtcaggatttccctcagtgcaataccatagaaaataccggaaccaaacagtccacctgttctcctggtgaccacattattgaaataacagaagtggaagaggacctgtttcctgctgaaacagtcgaattacttcgcgaggcgagcgcagaatccgatgttgggaagtccagtgagtccgaatttacccagtacacaactcatcatattctgaaatccctggccagtattgaagctaaatgttccgacatgtcttctgagaacactactggtcccccatcgtccatggaccgggttaacacagccctccagcgagcgcagatgaaagtgtgttcactgtcaaaccaaagaatgggccgaagcctgctgaaatcaaaagatttgctgaaacagaggtatctattcgccaaagccgggtatcccttgcggcggtctcagagtctgccgacaactcttttgtcacccgtgcgggtggtgtccagcgtaaatgtaagactaagccccgggaaagagacccggtgctcccccccgtctttcacctataagtacacaccggaggaggaacaggaactcgaaaaacgagtgatggaacacgatgggcagagcctggtgaagtcaactatttttatctcccctagttctgtgaaaaaagaagaggcccctcaaagcgaagcccctagggtcgaggagtgccatcacgggcgcactcctacttgcagccgtctagcgcccccgcctatgtcacagtctacttgcagccttcatagcatccattccgaatggcaggagagacccctatgcgagcatacaaggacattgtctacccactctgtgcctaacatatcgggcgcaacctgcagcgcatttgcatcccctttcgggtgcccatactcccacaggcacgcgacctacccctacagagtttgttctgtgaatcctccaagcgccatcgagatgcaactcaggagggtattgcacgatattcggaatagtttgcagaaccttagccagtacccaatgatgcgtgggcctgaccccgcggccgctccatactctacccagaaaagtagcgtcctcccactgtacgaaaacaccttccaagaactgcaggtgatgcgcagatccctgaacctgtttcgaactcagatgatggacctggaactggccatgctgcgtcagcagacaatggtataccaccacatgactgaagaagagcgcttcgaagtggatcagttacagggcctgcggaattcagtgcggatggaactgcaggaccttgagctccaactagaagaacgacttttgggcctggaagagcagctgcgagctgtccgaatgccttccccatttcgctcatctgcccttatgggaatgtgtggcagcaggtctgctgataatctgagttgtccatcgcccctcaatgttatggagcctgtgacagaactcatgcaagagcagtcttaccttaagtccgaactggggttgggactaggcgaaatgggttttgagatcccgcctggcgaaagcagcgagagcgtcttctcccaggccactagtgagtctagttccgtctgttcaggacccagtcacgcaaatcgcaggaccggggtgcccagtacggcctctgtgggcaaaagcaagacacctctggtggcccggaaaaaagtttttcgggccagcgtcgctctgacacccaccgcacccagccgaactggttcggtccagaccccaccagaccttgagagttcagaagaagtggacgctgcagaaggcgcgccagaagtcgtgggcccaaagtcggaagttgaggagggccacggtaaattgccctccatgcccgctgcagaagagatgcataaaaacgtcgagcaggacgagcttcagcaggtgatccgggaggtgggaatggatcctatctcatgcgtaatccttgaactgtcaatgatctgtactggcggaggcgttatctgtgccctggaggacacctgctgctag

SEQ ID NO: 167629 - DNA, 3771 bp, Artificial Sequence
  derived and/or modified sequence
atggaccggcccctgagcagcagcgctgaggccgaggaggagctggagtggcaggtggccagcagaagaaggaaggcctgggccaagtgccgcagctcctggcaggccagcgagacagaggacctgagcacagaggccaccacccaggatgaggaggaggatgaggaggaggacctgcccggggcccagctgcctgctgctgggggcagaggaaatgtgcccaatgagaagatcgccatctggctgaaggactgcaggacccccctgggcgccagcctggatgagcagagcagcagcaccctgaagggcgtgctggtgagaaatggaggcagctttgaagatgacctgagcctgggcgctgaggccaaccacctgcacgagagtgatgcccagatcgagaactgcaacaacatcctggccaaggagcggcggctgcagttccaccagaagggccgctccatgaacagcactggaagtggcaagagcagcggcaccgtgtcctctgtgtctgagctgctggagctgtatgaggaggaccctgaggagatcctgtacaacctgggcttcggcagagatgagccagacatcgccagcaagatccccagccgcttcttcaacagcagcagctttgccaagggcatcgacatcaaggtgttcctgagcgcccagatgcagaggatggaggtggagaaccccaactatgccctgaccagccgcttccggcagatcgaggtgctgaccaccgtggccaatgccttcagcagcctgtacagccaggtgtctggcacccccctgcagagaattggctccatgagctctgtgaccagcaacaaggagacagaccccccaccacccctgaccaggagcaacacagccaaccggctgatgaagaccctgagcaagctgaacctgtgtgtggacaagacagagaagggggagagcagcagccccagccccagcgctgagaagggcaagatcctgaatgtgtctgtcatcgaggagagcggcaacaagaatgaccagaagagccagaagatcatgaagaagaaggagagcagctccatgctggccaccgtgaaggaggaggtgtctggcagcagcgctgctgtgacagaaaatgctgacagcgaccgcatcagtgatgaggccaacagcaacttcaaccagggcacagaaaatgagcagagcaaggagacccagagccatgagagcaagctgggggaggagagcggcatcgtggagagcaagctggacagcgacttcaacatcagcagccacagcgagctggagaacagcagcgagctgaagtctgtgcacatcagcaccccagagaaggagccctgtgcccccctgaccatccccagcatccggaacatcatgacccagcagaaggacagctttgagatggaggaggtgcagagcacagaaggagaggcccctcatgtgcctgccacctaccagctgggcctgaccaagagcaagagggaccacctgctgaggacagccagccagcacagcgacagcagcggctttgctgaggacagcacagactgcctgagcctgaaccacctgcaggtgcaggagagcctgcaggccatgggcagcagcgctgacagctgtgacagcgagaccaccgtgaccagcctgggggaggacctggccacccccacagcccaggaccagccctacttcaatgaaagtgaggaggagagcctggtgcccctgcagaagggcctggagaaggctgctgctgtggccgacaagaggaagagcggcagccaggacttcccccagtgcaacaccattgaaaatacaggcaccaagcagagcacctgcagccctggggaccacatcatcgagatcacagaggtggaggaggacctcttccctgctgagaccgtggagctgctgcgggaggccagcgctgagagtgatgtgggcaagagcagcgagagcgagttcacccagtacaccacccaccacatcctgaagagcctggccagcattgaggccaagtgcagcgacatgagcagcgagaacaccaccggcccccccagctccatggacagagtgaacacagccctgcagagggcccagatgaaggtgtgcagcctgagcaaccagaggatgggccgcagcctgctgaagagcaaggacctgctgaagcagcgctacctgtttgccaaggccggctaccccctgcggcgcagccagagcctgcccaccaccctgctgagccctgtgcgggtggtgtcctctgtgaatgtgcggctgagccctgggaaggagacccgctgcagcccccccagcttcacctacaagtacaccccagaggaggagcaggagctggagaagagggtgatggagcatgatggccagagcctggtgaagagcaccatcttcatcagccccagctctgtgaagaaggaggaggccccccagagcgaggccccccgggtggaggagtgccaccacggccgcacccccacctgcagccggctggcccccccacccatgagccagagcacctgcagcctgcacagcatccacagcgagtggcaggagcggcccctgtgtgagcacaccaggaccctgagcacccacagcgtgcccaacatcagcggggccacctgcagcgcctttgccagccccttcggctgcccctacagccacagacatgccacctacccctacagagtgtgcagcgtgaaccccccatctgccatcgagatgcagctgcggcgggtgctgcatgacatccggaacagcctgcagaacctgagccagtaccccatgatgaggggccctgaccctgctgctgccccctacagcacccagaagagctctgtgctgcccctgtatgagaacaccttccaggagctgcaggtgatgagaagaagcctgaacctcttccgcacccagatgatggacctggagctggccatgctgcggcagcagaccatggtgtaccaccacatgacagaggaggagagatttgaggtggaccagctgcagggcctgaggaacagcgtgaggatggagctgcaggacctggagctgcagctggaggagcggctgctgggcctggaggagcagctgcgggctgtgaggatgcccagccccttccgcagcagcgccctgatgggcatgtgtggcagccgctctgctgacaacctgagctgccccagccccctgaatgtgatggagcctgtgacagagctgatgcaggagcagagctacctgaagtctgagctgggcctgggcctgggggagatgggctttgagatccccccaggagagagcagcgagagcgtcttcagccaggccaccagcgagagcagctctgtgtgcagcggccccagccacgccaacagaagaactggagtgcccagcacagcctctgtgggcaagagcaagacccccctggtggccaggaagaaggtgttccgggcctctgtggccctgacccccacagcccccagcaggactggatctgtgcagaccccaccagacctggagagcagcgaggaggtggatgctgctgagggcgcccctgaggtggtgggccccaagtctgaggtggaggagggccacggcaagctgcccagcatgcctgctgctgaggagatgcacaagaatgtggagcaggatgagctgcagcaggtgatccgggaggtgggcatggaccccatcagctgtgtgatcctggagctgtccatgatctgcacaggaggcggcgtcatctgtgccctggaggacacctgctgctag

SEQ ID NO: 167630 - DNA, 3771 bp, Artificial Sequence
  derived and/or modified sequence
atggaccggcccctgagcagcagcgccgaggccgaggaggagctggaatggcaggtggccagtaggcggcgaaaagcatgggccaaatgcagatctagttggcaggctagtgagactgaagacctgtccacggaggcaacgacccaggacgaggaagaggacgaggaagaagatttaccgggtgcgcagctgccagcggcaggaggaaggggcaatgtgcccaatgagaagattgctatctggctgaaggactgcagaacccctctgggcgccagcctggacgaacagtccagctccaccctgaagggggtgctagttaggaacgggggctcgtttgaagatgacctttctcttggcgccgaggccaatcacctccacgagtccgatgcccagattgaaaactgtaataatattctcgcaaaagagagaagactgcagtttcaccaaaaaggtaggagtatgaatagtacggggtccggcaagagctctggcaccgtgtcctctgtcagcgagctcctggaactatatgaggaagatccagaggagatcctgtacaatctcggtttcggcagggacgaaccagatatcgctagcaagatcccgtcccgattcttcaatagctcttcatttgctaaggggattgatatcaaggtctttctgtcagcccagatgcagaggatggaagttgagaaccccaattacgctcttacaagccggtttcggcagatcgaagtgttgaccacggtggccaatgctttcagctctctctatagtcaggtctccggaactccactgcaacgaattggcagtatgagcagcgttacatctaacaaagagacagacccccccccacctttgacccgatctaatactgcaaatagattgatgaaaactttgagcaagctgaatttgtgcgtagataaaaccgagaagggtgaaagttcttccccttcgcctagcgcagaaaagggcaaaatccttaatgtgagcgtgattgaagagtcaggcaataaaaacgatcagaaatctcaaaaaatcatgaaaaagaaggaatcctcttcaatgctggcaaccgtcaaggaagaagtgtctgggtccagtgccgccgtgaccgagaacgccgactcggatcgcattagtgatgaagctaattccaattttaaccagggtacagaaaacgaacagagtaaagaaacacaatcgcacgagtccaagctgggagaggaaagcggcattgtcgagtctaaacttgattcagattttaacatctcgagccatagcgagctggagaactcaagcgagctgaagtccgtccacatcagcactcccgagaaggaaccttgcgctccactgactattccctctatcaggaacattatgactcagcagaaagacagcttcgaaatggaggaagtacagagcaccgaaggtgaggccccacatgtacccgcaacataccagctgggactgacaaagagcaaacgggatcacctgctgagaacagctagccagcactccgattcctctggatttgctgaggattccaccgactgtctgagtcttaaccatctgcaggttcaggaaagcttgcaggcgatgggatcctccgctgacagctgtgacagcgagacaaccgtcacttctttgggcgaagacctggccacgccgacagctcaggatcaaccctatttcaacgagtccgaagaagagagcctggtacctctgcagaaaggtctcgagaaggccgctgcagtggccgataagcggaaaagtggctctcaagactttccgcagtgcaatactattgagaacacaggaactaaacaatccacctgttctccaggagaccacatcatagaaatcacagaagtggaggaggacttgttcccggccgagacagtggaactcctgagagaggcctccgccgagtccgatgtgggtaaatctagcgagtctgagtttactcagtacactacacaccatattttaaagtctcttgcctccattgaggctaagtgcagcgacatgtcttctgagaacactaccgggccacctagttccatggatcgcgtgaacacggctctgcagcgtgcccagatgaaggtgtgtagtttaagtaatcaacggatgggccggagcctattgaagtcaaaggatctcttgaagcagcgctatctgttcgccaaggccggttatccactgaggaggtctcagagcctgcccacaacattgctgagtcctgtaagagtggtctcctctgtgaacgtgcgactatcccctggcaaagagacccggtgcagccccccatcttttacctacaagtacacgccagaagaggaacaggagctagagaagagagtgatggaacatgacggccagtcccttgtgaaatcgacaatatttatatcaccatcttccgtcaagaaggaagaagcgccacaatccgaagcccctcgggtggaggaatgccaccatggccggactcccacatgcagtcgcttggccccccctcccatgtctcagtccacgtgttctctgcattccatacacagcgagtggcaggagcgacctctgtgtgaacacaccagaacactgtctacccacagtgtgcctaatatctccggagccacttgtagcgctttcgcctcccccttcgggtgtccctactcgcaccgccatgcaacctatccctatagggtttgctcagttaatccgccatcagctattgaaatgcagctccggcgcgttctgcacgatatccgaaattctctacaaaacctctcccagtaccccatgatgcggggtccggatcccgccgcagccccgtatagtactcagaaatctagcgtcctccctttgtatgaaaacacctttcaagagctgcaggtgatgcgccggagcctcaatttgttcaggacacagatgatggacttggaattggccatgcttcgacagcagacaatggtgtatcaccatatgacagaggaggaacgctttgaagtggaccagctgcagggcttaagaaactctgttagaatggaattacaggacttagaattgcagctggaggagaggctgttgggtttggaggagcagctcagagctgtgagaatgccttcccccttcagatctagcgctctcatgggaatgtgcggatctagaagcgcggacaacctgtcttgccctagcccattaaatgtcatggaacccgtcaccgagctcatgcaggagcagtcctatctaaagagtgaactggggcttgggttaggcgaaatgggtttcgagataccacctggcgagtcatctgagtctgtcttctcgcaggccactagtgaaagttcgagcgtatgctccggcccatctcacgcaaatcgccgcacaggcgtgccgagtaccgccagtgtcgggaagagcaagactcccttggtagccagaaaaaaggtgtttcgggcctccgtggccctgactccaaccgctccaagtaggaccggctccgtccagaccccccccgacctggagtctagtgaggaggtggatgcagccgagggcgcccccgaggtggttggccccaaaagtgaagtcgaggagggtcacgggaagctgccctcaatgccagcagctgaggagatgcacaaaaatgtggagcaagatgagctacagcaggtgatcagagaagtgggaatggatcctatatcatgcgtcatcttagaactgtccatgatctgtacaggcggaggtgttatatgtgccctggaggacacctgctgctag

SEQ ID NO: 167631 - DNA, 3771 bp, Artificial Sequence
  derived and/or modified sequence
atggatcggcctctttcttcaagcgcagaagctgaggaggagctagaatggcaggtagcaagccgcagacgaaaggcctgggcaaaatgtaggtcgtcctggcaggcttccgagacagaggacctgtcaacagaagcgacgacacaggacgaggaggaggacgaggaggaagatctgcccggtgctcagctgcctgctgcaggaggcagggggaacgttcccaatgaaaaaatagcaatctggcttaaagactgtcggacccctctgggtgcaagcctggacgaacagtcctcgtcaacactgaaaggtgtgctggtccggaacggcggaagctttgaagatgacttgtcactgggagcagaggcaaatcatctgcatgagagtgatgcccagatcgaaaattgtaataatatcctggctaaagaaagaagattgcaattccaccagaagggacggagtatgaatagtacaggatctggaaaatccagcggcaccgtaagcagcgtttccgaacttctggagctctatgaggaggaccccgaagagattctgtataaccttgggtttgggagggacgagccggatatcgcctctaagataccctcccgattctttaactctagttcttttgctaagggcatcgacattaaggtgtttcttagcgctcagatgcagaggatggaggtcgagaatccaaattacgccctgacaagccggttcagacagatcgaggtcctcacaacagtggccaacgccttctcatctttatatagccaagtcagtgggacccccctgcagcggatcgggagtatgtctagcgtaacaagcaataaggaaaccgatcctccaccccctctgactcggagcaatacagccaacaggctgatgaaaacactgagcaagctaaatctgtgtgttgataagactgagaagggagagtcctccagtcccagtcctagtgccgaaaaaggtaagatattgaatgtgtctgtcatcgaagaaagtggaaacaagaacgaccagaagtctcagaaaatcatgaaaaagaaagagagcagcagtatgctggccaccgtgaaagaagaggtgtccggatccagcgccgcagtgaccgagaatgcagatagtgataggataagcgatgaagccaattccaactttaatcagggcactgagaacgaacagagcaaagagacgcagtctcacgagagcaagttgggggaagaaagcgggattgtcgagagcaaactggactctgattttaacatctctagtcatagcgagctcgagaattcttcagagctcaagagcgtgcacattagtacaccagaaaaggagccgtgtgccccacttacaattcccagcattcgtaatatcatgacccagcagaaagatagcttcgagatggaggaggtacagtccacagagggggaagctccccacgtaccagctacctaccagctcggactgacaaagagcaagcgggatcacttattgagaaccgccagccagcactccgatagtagcggctttgccgaggatagcaccgactgcttatctctgaatcacttgcaagtgcaggagagtctgcaggccatggggagctccgcagactcttgcgattccgagactacagtgacttccctcggagaggatctggcgacccccaccgcacaggaccagccctattttaatgagtctgaggaagagagtcttgtgcctctgcagaagggcttagaaaaggccgctgcggtggcagataaaaggaaaagtggcagtcaagacttcccccaatgcaacaccattgagaacaccggcacgaaacagtccacctgtagcccaggggaccatatcatagagattactgaggtagaagaagacctattcccagcagagactgttgagcttctccgggaggcctccgctgaatccgatgttggtaaaagctcagagtctgaattcacccagtatacaacccaccacatattgaaatcattagccagcatcgaagccaagtgtagtgatatgtcatctgagaacactacagggcctccaagcagcatggatagggtgaacacagctttgcagcgcgctcagatgaaagtgtgttccctatcaaaccagaggatgggaagatccctgctgaagtcaaaagacctgcttaagcagcgttacctcttcgctaaggccggttacccacttagaaggagtcagagtctgccaactacactgctgagcccggttcgcgtggtgtcctccgttaacgtgcggctgtctcctgggaaagaaacaaggtgctccccaccgtccttcacctacaagtatacccccgaggaggaacaagaactggagaagcgcgtgatggagcacgatgggcagtctttggtgaaatcaacaatctttatttccccgagctccgtaaagaaagaagaggctccacagtccgaagcccctagagtggaagagtgccatcatgggagaaccccaacgtgctctaggctggctccgcctcctatgagtcagtcaacatgcagtctgcacagtatccactctgagtggcaggaacgcccactgtgtgagcacactagaacgctctcaacgcatagcgtgcctaacatttcgggtgcaacatgttcagcatttgcaagcccgtttgggtgcccctactcacatagacacgccacatatccttaccgagtctgctccgtcaacccaccttcagctatcgagatgcagttgaggagagtgctgcacgatatccgtaacagcctccaaaatctatctcagtaccccatgatgagagggcctgaccccgctgctgcgccttatagcactcagaaatcaagcgtactgcccttgtacgaaaacacattccaggaactacaagttatgagacggtccctgaacctgttccgtacccagatgatggatctagagttggcaatgctcagacagcagacaatggtctaccaccatatgaccgaagaggagaggttcgaagtagaccagctccagggacttcgcaacagtgtgcggatggagctgcaagaccttgagttgcagctcgaagagcgcctgctcgggctagaagaacagctccgggctgtgcgcatgcccagtccgttcaggtcctcagcactgatgggcatgtgcggatctaggagcgcggacaacttgtcctgtccaagccccctcaatgtgatggagcctgtaacggaactcatgcaggaacagtcctacctgaagtccgaactgggccttggacttggcgagatgggctttgaaatccccccaggcgagagctcagaatctgtgtttagccaagccacttctgagtctagctccgtctgtagtggaccctcccacgctaacagaagaaccggtgtgccgagtactgcgtctgtcgggaaaagtaaaacaccactggtcgccaggaagaaggtattccgggcttctgttgccctgacaccgacagcgccatcccgcacgggtagtgtgcagactcctccagatctggaatcttctgaggaagttgatgcagctgagggggcacccgaggtggttgggccaaagtctgaggtagaggaaggacacgggaaactcccgagtatgccagctgctgaagagatgcacaaaaacgtggagcaagatgaactccagcaggtgatcagagaggtagggatggaccctatcagttgcgtgattctcgaactgtccatgatctgtacgggaggtggcgtgatttgtgctctggaggatacttgttgttag

SEQ ID NO: 167632 - DNA, 4965 bp, Artificial Sequence
  derived and/or modified sequence
agctccccggggccccctgcccggccgggcgctgacagcaagggcgggggtccctgccgccgccttgtctcgcgcagggtccggctggggtagcggagcccccagtgcggccatggaccggcccctgtcgtcgtcggcggaggcggaggaggaactggagtggcaagtggcgagtcgcaggaggaaggcctgggccaagtgccgcagctcctggcaagcgtcggagacggaggatctgtccacagaagcgacgacgcaggacgaggaggaggacgaggaggaggacctccccggcgcgcagctgccggcagcggggggaagaggaaacgtgcccaacgagaagatcgcgatatggctcaaggactgccgtacacctttgggagcctcactggatgaacaaagcagtagtacactcaagggtgtgcttgtgagaaatggaggaagttttgaagatgatttgtcattgggagctgaagccaaccacctccatgaaagtgatgctcaaattgaaaactgcaataatatcttggccaaagagagaagattacagtttcatcagaaagggagaagtatgaattccactggatctgggaaaagtagtgggacagtttcaagtgtttcagaattgttggaactttatgaggaagatcctgaagaaattctttataatcttggatttggacgtgatgaaccagatattgcttctaaaattccttccagattttttaattcatcatcctttgccaaagggatagatattaaagtatttttgagtgctcagatgcaacggatggaagtagaaaacccaaattatgctttaacaagccgttttcgtcaaattgaagtgcttactactgtggccaatgcgttttcttctttatattctcaagtctccgggacgcccctgcagagaattggaagtatgtcctcagtgacctctaacaaggagacagacccacctccacctttaactcgaagtaacactgcaaatcgtttaatgaaaacactctcaaaactgaatttatgtgttgataaaacagagaaaggagaaagtagtagtccttctccatcagctgaaaaaggaaagattctaaatgtttcagtgattgaagaaagtggcaataaaaacgatcaaaagtctcaaaaaattatgaagaagaaagagtcatcttctatgttggctacagttaaagaagaagtctctggtagttcagcagctgttacggagaatgctgatagtgatagaatttctgatgaagcaaatagtaattttaaccaaggaactgaaaatgaacaaagtaaagaaactcaaagtcatgagagtaaactgggtgaggaatctggtattgtagaatccaaattagatagtgatttcaacatatccagccacagtgagctggaaaatagcagtgagctgaaaagtgtccatatatccacacctgaaaaagagccttgtgcaccactgacaataccatccataagaaatataatgacacagcagaaggactccttcgaaatggaagaggttcaaagtacggagggagaagctcctcatgttccagccacttaccagctaggtcttacgaagtcgaaaagagatcatctgttacgtactgcaagtcagcattccgatagcagtggttttgctgaagattctacagactgcctatcccttaatcatcttcaggttcaggagtccttgcaggctatggggagtagtgctgatagttgtgacagtgagacaacagttacgtcacttggtgaagaccttgccacaccaacagcacaagaccagccttattttaatgaatcagaggaggagtctcttgtccctcttcagaagggactagagaaggcagcagcagttgcagacaaaagaaaatcaggtagccaggatttccctcagtgcaacaccattgagaatacaggaactaaacagtccacctgtagtccaggggatcatatcattgaaattactgaagtggaagaggatttgtttccagcagagacagtagagctactgagggaagcaagtgctgaaagtgatgtgggtaaaagcagtgaaagtgaatttactcagtataccacacaccatattctgaaatcattggcttctattgaagctaaatgcagtgatatgagctctgaaaatacaactgggcctccctcttccatggacagagttaatacagctttgcaaagagctcaaatgaaggtttgcagtctgtctaatcaaaggatggggcgtagcctgctaaaatcaaaagatttgttaaaacaaaggtacttatttgcaaaagctggctatcctctaagaaggtctcagtctttaccaaccaccttattgagcccagtaagggttgtgtcctctgtcaatgttcgattatctccaggaaaagagaccagatgcagcccaccttccttcacctataagtacacacctgaagaggagcaggaattggaaaagcgggtgatggaacatgatggtcagtctttagttaaatcgaccattttcatctctccatcatctgtgaagaaagaagaagccccccagagtgaggcgccgcgggtggaggaatgccatcatggaaggactcctacctgttcacggcttgctccaccaccaatgtctcagtctacctgttcccttcattccatccactctgagtggcaagaaaggcccctgtgtgagcacacaagaactctgagcactcacagtgttcccaacatatcaggggctacttgtagtgccttcgcttcccctttcgggtgtccttactcacatagacatgccacctacccttaccgagtgtgctctgtgaatcctccttcagccatagaaatgcagttgcgaagagtattacatgatattagaaactcactgcagaatctttcacagtaccctatgatgagaggacctgatcctgctgctgctccatatagtactcagaaatcatctgttctacctctttatgaaaatacttttcaggagctccaggtaatgaggcggagcctgaatttgtttagaacacaaatgatggatttagaattggcaatgctgcgtcagcaaaccatggtttatcatcatatgactgaggaggagaggtttgaagttgatcagctccagggtttgagaaattcagtccgaatggaacttcaggacctggaactgcagctggaggagcgcctgctgggcctggaggagcagcttcgtgctgtgcgcatgccttcacccttccgctcctccgcactcatgggaatgtgtggcagtagaagcgctgataacttgtcatgcccttctccattgaatgtaatggaaccagtcactgaactgatgcaggagcagtcatacctgaagtctgaattgggcctgggacttggagaaatgggatttgaaattcctcctggagaaagctcagaatctgttttttcccaagcaacatcagaatcatcttctgtatgttctggtccctctcatgctaacagaagaactggagtaccttctactgcctcagtgggcaaatccaaaaccccattagtggcaaggaagaaagtgttccgagcatcggtggctctaacgccaacagctccttctagaacaggctctgtgcagacacctccagatttggaaagttctgaggaagttgatgcagctgaaggagccccagaagttgtaggacctaaatctgaagtggaagaagggcatggaaaactcccatcaatgccagctgctgaggaaatgcataaaaatgtggagcaagatgagttgcagcaagtcatacgggaggttggcatggatcctattagctgtgtaatactggaattatcaatgatatgcactggtggaggtgttatttgtgctttagaagatacttgctgttgagctgggctactgtatacagtgtacaatgtgtatttcttcaaccatatattttaaaaagacgtacatagaaacttaggcactttgctatttcttttctaaactatcaaaaactctagcagtttgaaaagcctaatatttatttgtatgtcagtatttttcatttgattccctattagaattaattttaaaacttgaagacttccagacttatccaacttataaataacatatttcttcagactaacatcttaaaacactgacctctatgaggtatttactgtgcaataactgattcatttttttcagagcttgaagcatccaatgatttttccctccactgctgttaattaatgtcacttccaagaagaaaaactgttctgttgtaaaaaatataattgctcttaattcttggggaggttactaatagcagtaggatagaattttatgaggttacctacaactacttaatgtacttacactgtaagccttgttgctttacccaagacaaatgtaattttatcattgcttatgtagtatttttcttttggaaatgtgccttatgttaaacactatgtacttttactttttgcattgtccagacttctttattagatggagatgtttctttttctgtcttctagactaaatagagtatcatccaaataatggggcctatgacttgaatgaatagaaatgaataagctggtgtttgttttttcaaaatggaagtaatttagatttgttctcctcatacataaaatgattttagttcagttttaaccagtgaaaactttgtttttatgaaaaaaaaggaaaatggtttcccatttggttttatatgtgttaaataaatgtgtaaagtaaccaccaaatgttattagaatttttcttctagcatttataattttttcaactcctattgtgtttctttgtgtgtgatattttaatcaaaagtggttgagttgttaacagtgttctttgaaagaatctctaaaaggcttataaatgtttgaaatatcacacaaaggctgatttctaaaatatatatatattaaaacaataaagtatttattttgcctaaa

SEQ ID NO: 167633 - protein, 259 aa, Artificial Sequence
  derived and/or modified sequence
MAPNIYLVRQRISRLGQRMSGFQINLNPLKEPLGFIKVLEWIASIFAFATCGGFKGQTEIQVNCPPAVTENKTVTATFGYPFRLNEASFQPPPGVNICDVNWKDYVLIGDYSSSAQFYVTFAVFVFLYCIAALLLYVGYTSLYLDSRKLPMIDFVVTLVATFLWLVSTSAWAKALTDIKIATGHNIIDELPPCKKKAVLCYFGSVTSMGSLNVSVIFGFLNMILWGGNAWFVYKETSLHSPSNTSAPHSQGGIPPPTGI

SEQ ID NO: 167634 - protein, 241 aa, Artificial Sequence
  derived and/or modified sequence
MSGFQINLNPLKEPLGFIKVLEWIASIFAFATCGGFKGQTEIQVNCPPAVTENKTVTATFGYPFRLNEASFQPPPGVNICDVNWKDYVLIGDYSSSAQFYVTFAVFVFLYCIAALLLYVGYTSLYLDSRKLPMIDFVVTLVATFLWLVSTSAWAKALTDIKIATGHNIIDELPPCKKKAVLCYFGSVTSMGSLNVSVIFGFLNMILWGGNAWFVYKETSLHSPSNTSAPHSQGGIPPPTGI

SEQ ID NO: 167635 - DNA, 780 bp, Artificial Sequence
  derived and/or modified sequence
atggcccccaacatctacctggtgagacagagaatcagcagactgggccagagaatgagcggcttccagatcaacctgaaccccctgaaggagcccctgggcttcatcaaggtgctggagtggatcgccagcatcttcgccttcgccacctgcggcggcttcaagggccagaccgagatccaggtgaactgcccccccgccgtgaccgagaacaagaccgtgaccgccaccttcggctaccccttcagactgaacgaggccagcttccagcccccccccggcgtgaacatctgcgacgtgaactggaaggactacgtgctgatcggcgactacagcagcagcgcccagttctacgtgaccttcgccgtgttcgtgttcctgtactgcatcgccgccctgctgctgtacgtgggctacaccagcctgtacctggacagcagaaagctgcccatgatcgacttcgtggtgaccctggtggccaccttcctgtggctggtgagcaccagcgcctgggccaaggccctgaccgacatcaagatcgccaccggccacaacatcatcgacgagctgcccccctgcaagaagaaggccgtgctgtgctacttcggcagcgtgaccagcatgggcagcctgaacgtgagcgtgatcttcggcttcctgaacatgatcctgtggggcggcaacgcctggttcgtgtacaaggagaccagcctgcacagccccagcaacaccagcgccccccacagccagggcggcatccccccccccaccggcatctag

SEQ ID NO: 167636 - DNA, 780 bp, Artificial Sequence
  derived and/or modified sequence
atggcccctaacatttacctagttcgtcaaaggatctccagattagggcagcggatgtctgggttccagatcaacctgaaccccctcaaagagcccttgggattcattaaggtacttgaatggatcgcttccatcttcgcctttgccacctgtggaggctttaagggccagaccgaaatccaggtgaactgccctccagccgtgactgagaataaaaccgtaactgctacctttgggtaccctttccgattgaacgaagcgtccttccaacccccacctggggtgaatatctgtgatgtgaattggaaagactatgtattgattggtgattactccagtagtgcacagttctatgtaacattcgccgttttcgtgttcctctattgcatcgccgctctgctgctgtacgtcggatataccagcctctatctcgactctcggaagttacccatgatcgatttcgtggtgacactcgtagctacattcctgtggcttgtgagcactagcgcctgggccaaagcccttaccgatatcaagatcgccaccggtcacaatattatcgatgaattaccgccatgcaagaaaaaagctgtcctgtgctacttcggctctgttacatctatgggttcgctgaacgtgtctgtgattttcggatttctgaatatgattctgtggggaggcaacgcttggttcgtttacaaagaaaccagcttacactcgccatctaacacttctgcgccgcatagccaggggggcattcctcctccaactggcatatag

SEQ ID NO: 167637 - DNA, 780 bp, Artificial Sequence
  derived and/or modified sequence
atggcccccaacatctacctggtgcggcagaggatcagccggctgggccagaggatgagcggcttccagatcaacctgaaccccctgaaggagcccctgggcttcatcaaggtgctggagtggatcgccagcatctttgcctttgccacctgtggcggcttcaagggccagacagagatccaggtgaactgccccccagctgtgacagagaacaagacagtgacagccaccttcggctaccccttccggctgaatgaggccagcttccagcccccacctggggtgaacatctgtgatgtgaactggaaggactatgtgctgattggagactacagcagcagcgcccagttctacgtgacctttgctgtgtttgtgttcctgtactgcatcgccgccctgctgctgtatgtgggctacaccagcctgtacctggacagcaggaagctgcccatgattgactttgtggtgaccctggtggccaccttcctgtggctggtgtccaccagcgcctgggccaaggccctgacagacatcaagatcgccaccggccacaacatcattgatgagctgcccccctgcaagaagaaggctgtgctgtgctacttcggctctgtgacctccatgggcagcctgaatgtgtctgtcatcttcggcttcctgaacatgatcctgtggggcggcaatgcctggtttgtgtacaaggagaccagcctgcacagccccagcaacaccagcgccccccacagccagggcggcatccccccacccaccggcatctag

SEQ ID NO: 167638 - DNA, 780 bp, Artificial Sequence
  derived and/or modified sequence
atggcccccaacatctacctggtgcggcagcggatcagccggctgggacagaggatgtccggttttcaaatcaacctgaatcctttgaaagagccgctggggtttatcaaagtcctcgagtggatagctagtatcttcgccttcgccacatgcggtggctttaaggggcaaactgagatacaggtaaactgtccaccagccgtgacagaaaacaagactgtaactgccacattcgggtatcctttcagactgaatgaagcgtcattccagcctcctccaggagttaacatctgcgacgtgaattggaaagactacgtgctcattggggattatagtagctccgctcaattctatgtaacttttgccgtctttgtgttcctctactgcatcgccgctttgctgctgtacgtgggatacaccagtctgtaccttgacagtaggaagctaccaatgatcgattttgttgtgacactcgtggcgacattcctgtggcttgtgtctacttctgcctgggccaaggcactgaccgatataaaaatcgctacaggacacaatattattgacgaactgccgccctgtaaaaagaaggccgtactctgttattttgggagtgtgacttctatgggtagtttaaatgtgtctgtgattttcgggttcctcaacatgatcctgtggggcggaaatgcatggtttgtgtacaaagagacgtctttacatagcccaagcaataccagtgccccccactctcagggcggtataccgccaccaactggaatctag

SEQ ID NO: 167639 - DNA, 780 bp, Artificial Sequence
  derived and/or modified sequence
atggccccaaatatatatctagtgcgccagcggattagccgcctgggtcagcggatgtccggtttccagatcaatctcaatcccctgaaggagccactgggctttatcaaagtgctggagtggattgccagtatcttcgcttttgcgacttgcgggggatttaagggacagaccgagatacaagtgaactgccctcctgcggtgacagagaacaagacggttacggcaactttcggttacccctttcgcctcaacgaagcaagttttcaaccaccccctggcgtcaacatttgcgacgtgaattggaaagattacgtgctgattggcgattattccagctctgctcagttctatgtgaccttcgctgtctttgtgttcctgtattgcatagctgcactccttctgtacgtgggctacacttccctgtatctggactcccgaaaattgcccatgatcgatttcgtggtaaccttagttgctacctttctatggctcgtgtcaacttcggcatgggcaaaggccctcacagacattaagattgcaacggggcataacatcatcgacgaactgcccccatgtaagaaaaaggccgtgttgtgctatttcggcagcgtcactagcatgggatctctcaacgtgtcagtcatttttggattcttaaacatgattctctgggggggaaatgcttggtttgtgtacaaagagacatcactgcacagcccatccaacacttccgctccccacagtcagggtggcatacctccccctacgggcatctag

SEQ ID NO: 167640 - DNA, 780 bp, Artificial Sequence
  derived and/or modified sequence
atggccccgaacatctatctagtccgacagagaatatcccgcctgggtcaacgaatgagcggctttcagattaacctcaaccccctgaaagaacctttaggcttcatcaaggtcctggagtggattgcttcaatttttgccttcgccacatgcggaggtttcaaaggacagacagagattcaagtaaattgcccgccagcagttactgagaataagaccgtcacagctaccttcgggtacccttttcgacttaatgaagcatcatttcaaccaccccctggtgtcaacatatgcgatgttaattggaaagactacgtcttaatcggtgactatagtagctccgcccaattttatgttaccttcgccgtcttcgtgtttctctactgcatcgccgcactcttactgtacgtggggtacacctccctgtatcttgactctcgcaagctgccaatgattgattttgttgttacattggtggccaccttcctgtggctcgtgagcacgagcgcatgggcaaaagccctgacggacataaagatcgcaactggacacaacattatcgatgagctccctccttgtaagaaaaaagcagtgctctgttactttgggtctgtgacctcaatgggcagtctcaatgtttctgtgatctttggtttcctgaatatgattctttggggaggcaacgcatggtttgtctacaaagaaacttctttacactccccgagcaacacctctgccccgcacagccagggcggcatccccccacctacaggcatttag

SEQ ID NO: 167641 - DNA, 780 bp, Artificial Sequence
  derived and/or modified sequence
atggccccgaacatctatctagtccgacagagaatatcccgcctgggtcaacgaatgagcggctttcagattaacctcaaccccctgaaagaacctttaggcttcatcaaggtcctggagtggattgcttcaatttttgccttcgccacatgcggaggtttcaaaggacagacagagattcaagtaaattgcccgccagcagttactgagaataagaccgtcacagctaccttcgggtacccttttcgacttaatgaagcatcatttcaaccaccccctggtgtcaacatatgcgatgttaactggaaggattatgtgctcatcggagattactcatccagcgcccagttctacgtaacttttgctgtgtttgtgtttctctactgtatcgccgccttactcctttatgtaggctacacctcactgtatctggattcaagaaagctccccatgattgatttcgtagtcaccctcgtggccacgttcttatggttggttagtacatccgcctgggctaaggccttgaccgacattaagattgctactggccacaatatcattgatgaactgcccccctgcaaaaaaaaggctgttctgtgttatttcggctcagtgacttccatgggctctctaaacgtaagcgtgatttttggctttcttaacatgattctttggggtggcaatgcgtggtttgtttacaaggagaccagccttcactccccatcaaatacctctgctccccactcccagggcggtatccccccacccacaggcatttag

SEQ ID NO: 167642 - DNA, 2127 bp, Artificial Sequence
  derived and/or modified sequence
gagtgccaggggctgaaccgcagggaagggggcgcggcgcacgcagtatggcgcccaacatctacttggttcgccagcggatcagtcgactcggccagaggatgtccggcttccagatcaacctcaacccgctcaaggagccactcggcttcatcaaggtcctcgagtggattgcttctatctttgcttttgccacctgtggaggttttaagggccaaacagaaattcaagtgaattgtcctcctgcagttactgagaataaaactgttacagctacttttggttatccattcaggttgaatgaggcatcatttcagccacctccaggtgtaaacatatgtgatgtaaattggaaagattacgtcctcataggcgattactcttcttctgcacaattctatgttacctttgcagtctttgtgttcctgtactgcattgctgcccttctgctttatgttggctacacgagtctgtatctggatagtcgtaaacttcctatgatagactttgttgttacacttgttgccacttttttgtggttggtgagcacttcagcctgggctaaagctctgacagatattaaaatagctactggtcacaatattattgatgaacttccgccttgtaagaagaaagcagtactgtgttactttggctctgtgaccagtatgggatccctaaatgtatctgtgatatttggctttctaaatatgatactctggggaggaaatgcttggtttgtgtacaaggagaccagcctacacagtccatcaaatacatctgcccctcatagccaaggaggtattccacctcctaccggaatataattaaagggagaaatacactgtatgaagtatatgttgatactatgacatgttgccaacaccttgagaagcattatttgtttctaataaaagtaatggctttgtcaatatattggtgggtttaaaactttgctgcttttttacataaagcctgtgcctttcctagaaagttaagatgtaaatgtattctcacatgtaaatttgaaagttcaggggtctattatgaaatgatacacatttttaaatgaaccataatttttttcactaagctgtttgccttccaaagtgtttacaccttaagccttaacatgtatcttcattcagaaaacagttatattgtcataccatagtaggaagaaaaacctttatttggaatatacactactgtaagtttgtacagatcatatacctaccacctgtctttgcttaaagagccttgattacataaatatgtaggaaaaaacatattgagttcaaaatttatatctaacattgtttatgttatgatttttttttaattgcaaagactaggtgtatatttttttctgtttttctaaatgacccgtggtacttaataggtgtactaaaattgtgttgggagcagggatttggaaatttctgagagatgtgtagttaatttagtaattctgtttcatgagatatgatctgttatgctagtggtttaataggcttgctatgtaagtagaacgtggctcaactagatatctttatatgtatgggcattactcttagtgatatttgtttcctgtcctttgttgctcatgctgtttaagtgcaggctgagacccagcctctttgtaagtacagtaaaataatccaccgttttttacagaccctagtcaaagggttaaaaaaattaagattgctttccatgtttgaaatttaccattgagagtcaatgaagttgctattttgagtttagcattgatattgtgaaaataagtgcaatttggatttcatgtttcttaatattcattcttgtttcacaaatgaatgattaaggaattatgcatcataaaggaacctaagtgaggtatatgatgagtgtattgtctttgcacacacatataggtatattctgaatacaagcttattcacattttgcttcctaatctttttgttgtacagggattcaggtttcttattcttacaacatgattgtttatatgtgaagcacatcttgctgttgccttatttttgatgcttttattcatgacaagaattgtcaatataagaatgtatatcttttttgcaaccaatttaataaaggagttgaaagaaa

SEQ ID NO: 167643 - DNA, 2151 bp, Artificial Sequence
  derived and/or modified sequence
gcctccgagcccggccagcgcgccagccccgcctgcccttcctcgccaccgggctgctctggtctcgtcggtcccctcctccgccccgtcgtcctgactctctctccctcctttcctcagaggatgtccggcttccagatcaacctcaacccgctcaaggagccactcggcttcatcaaggtcctcgagtggattgcttctatctttgcttttgccacctgtggaggttttaagggccaaacagaaattcaagtgaattgtcctcctgcagttactgagaataaaactgttacagctacttttggttatccattcaggttgaatgaggcatcatttcagccacctccaggtgtaaacatatgtgatgtaaattggaaagattacgtcctcataggcgattactcttcttctgcacaattctatgttacctttgcagtctttgtgttcctgtactgcattgctgcccttctgctttatgttggctacacgagtctgtatctggatagtcgtaaacttcctatgatagactttgttgttacacttgttgccacttttttgtggttggtgagcacttcagcctgggctaaagctctgacagatattaaaatagctactggtcacaatattattgatgaacttccgccttgtaagaagaaagcagtactgtgttactttggctctgtgaccagtatgggatccctaaatgtatctgtgatatttggctttctaaatatgatactctggggaggaaatgcttggtttgtgtacaaggagaccagcctacacagtccatcaaatacatctgcccctcatagccaaggaggtattccacctcctaccggaatataattaaagggagaaatacactgtatgaagtatatgttgatactatgacatgttgccaacaccttgagaagcattatttgtttctaataaaagtaatggctttgtcaatatattggtgggtttaaaactttgctgcttttttacataaagcctgtgcctttcctagaaagttaagatgtaaatgtattctcacatgtaaatttgaaagttcaggggtctattatgaaatgatacacatttttaaatgaaccataatttttttcactaagctgtttgccttccaaagtgtttacaccttaagccttaacatgtatcttcattcagaaaacagttatattgtcataccatagtaggaagaaaaacctttatttggaatatacactactgtaagtttgtacagatcatatacctaccacctgtctttgcttaaagagccttgattacataaatatgtaggaaaaaacatattgagttcaaaatttatatctaacattgtttatgttatgatttttttttaattgcaaagactaggtgtatatttttttctgtttttctaaatgacccgtggtacttaataggtgtactaaaattgtgttgggagcagggatttggaaatttctgagagatgtgtagttaatttagtaattctgtttcatgagatatgatctgttatgctagtggtttaataggcttgctatgtaagtagaacgtggctcaactagatatctttatatgtatgggcattactcttagtgatatttgtttcctgtcctttgttgctcatgctgtttaagtgcaggctgagacccagcctctttgtaagtacagtaaaataatccaccgttttttacagaccctagtcaaagggttaaaaaaattaagattgctttccatgtttgaaatttaccattgagagtcaatgaagttgctattttgagtttagcattgatattgtgaaaataagtgcaatttggatttcatgtttcttaatattcattcttgtttcacaaatgaatgattaaggaattatgcatcataaaggaacctaagtgaggtatatgatgagtgtattgtctttgcacacacatataggtatattctgaatacaagcttattcacattttgcttcctaatctttttgttgtacagggattcaggtttcttattcttacaacatgattgtttatatgtgaagcacatcttgctgttgccttatttttgatgcttttattcatgacaagaattgtcaatataagaatgtatatcttttttgcaaccaatttaataaaggagttgaaagaaaga

SEQ ID NO: 167644 - RNA, 780 nt, Artificial Sequence
  derived and/or modified sequence
auggccccgaacaucuaucuaguccgacagagaauaucccgccugggucaacgaaugagcggcuuucagauuaaccucaacccccugaaagaaccuuuaggcuucaucaagguccuggaguggauugcuucaauuuuugccuucgccacaugcggagguuucaaaggacagacagagauucaaguaaauugcccgccagcaguuacugagaauaagaccgucacagcuaccuucggguacccuuuucgacuuaaugaagcaucauuucaaccacccccuggugucaacauaugcgauguuaauuggaaagacuacgucuuaaucggugacuauaguagcuccgcccaauuuuauguuaccuucgccgucuucguguuucucuacugcaucgccgcacucuuacuguacgugggguacaccucccuguaucuugacucucgcaagcugccaaugauugauuuuguuguuacauugguggccaccuuccuguggcucgugagcacgagcgcaugggcaaaagcccugacggacauaaagaucgcaacuggacacaacauuaucgaugagcucccuccuuguaagaaaaaagcagugcucuguuacuuugggucugugaccucaaugggcagucucaauguuucugugaucuuugguuuccugaauaugauucuuuggggaggcaacgcaugguuugucuacaaagaaacuucuuuacacuccccgagcaacaccucugccccgcacagccagggcggcauccccccaccuacaggcauuuag

SEQ ID NO: 167645 - RNA, 780 nt, Artificial Sequence
  derived and/or modified sequence
auggccccgaacaucuaucuaguccgacagagaauaucccgccugggucaacgaaugagcggcuuucagauuaaccucaacccccugaaagaaccuuuaggcuucaucaagguccuggaguggauugcuucaauuuuugccuucgccacaugcggagguuucaaaggacagacagagauucaaguaaauugcccgccagcaguuacugagaauaagaccgucacagcuaccuucggguacccuuuucgacuuaaugaagcaucauuucaaccacccccuggugucaacauaugcgauguuaacuggaaggauuaugugcucaucggagauuacucauccagcgcccaguucuacguaacuuuugcuguguuuguguuucucuacuguaucgccgccuuacuccuuuauguaggcuacaccucacuguaucuggauucaagaaagcuccccaugauugauuucguagucacccucguggccacguucuuaugguugguuaguacauccgccugggcuaaggccuugaccgacauuaagauugcuacuggccacaauaucauugaugaacugccccccugcaaaaaaaaggcuguucuguguuauuucggcucagugacuuccaugggcucucuaaacguaagcgugauuuuuggcuuucuuaacaugauucuuugggguggcaaugcgugguuuguuuacaaggagaccagccuucacuccccaucaaauaccucugcuccccacucccagggcgguauccccccacccacaggcauuuag

SEQ ID NO: 167646 - protein, 337 aa, Artificial Sequence
  derived and/or modified sequence
MSSSPVKRQRMESALDQLKQFTTVVADTGDFHAIDEYKPQDATTNPSLILAAAQMPAYQELVEEAIAYGRKLGGSQEDQIKNAIDKLFVLFGAEILKKIPGRVSTEVDARLSFDKDAMVARARRLIELYKEAGISKDRILIKLSSTWEGIQAGKELEEQHGIHCNMTLLFSFAQAVACAEAGVTLISPFVGRILDWHVANTDKKSYEPLEDPGVKSVTKIYNYYKKFSYKTIVMGASFRNTGEIKALAGCDFLTISPKLLGELLQDNAKLVPVLSAKAAQASDLEKIHLDEKSFRWLHNEDQMAVEKLSDGIRKFAADAVKLERMLTERMFNAENGK

SEQ ID NO: 167647 - protein, 318 aa, Artificial Sequence
  derived and/or modified sequence
MSSSPVKRQRMESALDQLKQFTTVVADTGDFHAIDEYKPQDATTNPSLILAAAQMPAYQELVEEAIAYGRKLGGSQEDQIKNAIDKLFVLFGAEILKKIPGRVSTEVDARLSFDKDAMVARARRLIELYKEAGISKDRILIKLSSTWEGIQAGKELEEQHGIHCNMTLLFSFAQAVACAEAGVTLISPFVGRILDWHVANTDKKSYEPLEDPGVKSVTKIYNYYKKFSYKTIVMGASFRNTGEIKALAGCDFLTISPKLLGELLQDNAKLVPVLSAKPKPVTWKKSTWMRSLSVGCTTRTRWLWRSSLTGSASLPLMQ

SEQ ID NO: 167648 - DNA, 1014 bp, Artificial Sequence
  derived and/or modified sequence
atgagcagcagccccgtgaagagacagagaatggagagcgccctggaccagctgaagcagttcaccaccgtggtggccgacaccggcgacttccacgccatcgacgagtacaagccccaggacgccaccaccaaccccagcctgatcctggccgccgcccagatgcccgcctaccaggagctggtggaggaggccatcgcctacggcagaaagctgggcggcagccaggaggaccagatcaagaacgccatcgacaagctgttcgtgctgttcggcgccgagatcctgaagaagatccccggcagagtgagcaccgaggtggacgccagactgagcttcgacaaggacgccatggtggccagagccagaagactgatcgagctgtacaaggaggccggcatcagcaaggacagaatcctgatcaagctgagcagcacctgggagggcatccaggccggcaaggagctggaggagcagcacggcatccactgcaacatgaccctgctgttcagcttcgcccaggccgtggcctgcgccgaggccggcgtgaccctgatcagccccttcgtgggcagaatcctggactggcacgtggccaacaccgacaagaagagctacgagcccctggaggaccccggcgtgaagagcgtgaccaagatctacaactactacaagaagttcagctacaagaccatcgtgatgggcgccagcttcagaaacaccggcgagatcaaggccctggccggctgcgacttcctgaccatcagccccaagctgctgggcgagctgctgcaggacaacgccaagctggtgcccgtgctgagcgccaaggccgcccaggccagcgacctggagaagatccacctggacgagaagagcttcagatggctgcacaacgaggaccagatggccgtggagaagctgagcgacggcatcagaaagttcgccgccgacgccgtgaagctggagagaatgctgaccgagagaatgttcaacgccgagaacggcaagtag

SEQ ID NO: 167649 - DNA, 957 bp, Artificial Sequence
  derived and/or modified sequence
atgagcagcagccccgtgaagagacagagaatggagagcgccctggaccagctgaagcagttcaccaccgtggtggccgacaccggcgacttccacgccatcgacgagtacaagccccaggacgccaccaccaaccccagcctgatcctggccgccgcccagatgcccgcctaccaggagctggtggaggaggccatcgcctacggcagaaagctgggcggcagccaggaggaccagatcaagaacgccatcgacaagctgttcgtgctgttcggcgccgagatcctgaagaagatccccggcagagtgagcaccgaggtggacgccagactgagcttcgacaaggacgccatggtggccagagccagaagactgatcgagctgtacaaggaggccggcatcagcaaggacagaatcctgatcaagctgagcagcacctgggagggcatccaggccggcaaggagctggaggagcagcacggcatccactgcaacatgaccctgctgttcagcttcgcccaggccgtggcctgcgccgaggccggcgtgaccctgatcagccccttcgtgggcagaatcctggactggcacgtggccaacaccgacaagaagagctacgagcccctggaggaccccggcgtgaagagcgtgaccaagatctacaactactacaagaagttcagctacaagaccatcgtgatgggcgccagcttcagaaacaccggcgagatcaaggccctggccggctgcgacttcctgaccatcagccccaagctgctgggcgagctgctgcaggacaacgccaagctggtgcccgtgctgagcgccaagcccaagcccgtgacctggaagaagagcacctggatgagaagcctgagcgtgggctgcaccaccagaaccagatggctgtggagaagcagcctgaccggcagcgccagcctgcccctgatgcagtag

SEQ ID NO: 167650 - DNA, 1014 bp, Artificial Sequence
  derived and/or modified sequence
atgtccagctccccagtgaagcgccagcggatggaatccgcactagaccagcttaaacagttcacaactgtggtcgccgacacaggcgacttccacgccatcgatgagtacaagccacaggacgccacaaccaatccatccctgatactggccgcagcccaaatgcctgcatatcaggaattggttgaggaggccatcgcctacggccgcaagcttggcggtagtcaagaggaccagatcaagaacgctattgacaaactatttgttctctttggcgccgaaatcttgaaaaagattccagggcgcgtgtcgaccgaggtagacgcacgccttagttttgataaagatgccatggttgcaagggccagacgtctcatcgagctgtacaaggaggccgggatctctaaagatcgaattcttattaagctgtctagcacctgggaaggcattcaggctggaaaagaactggaggagcagcacggaatacactgtaacatgaccttgttgtttagtttcgcacaggcagtggcctgcgccgaggctggcgtaactctcatatcaccctttgtgggtaggattttggattggcatgttgccaatactgataagaaatcgtatgagcccctcgaggacccaggagttaagagcgttactaagatctataattactacaaaaagttctcctacaaaacaatcgtgatgggggcatcctttaggaatactggagaaatcaaggcactcgctggctgtgatttcctgacgatatcaccaaagctgcttggcgagctactacaagacaatgctaaactcgtccctgtgctgtctgccaaggccgcccaagcatctgatctcgagaaaattcatctggacgaaaaaagtttcagatggttgcacaacgaggatcagatggccgtggagaaactaagcgacgggataaggaagttcgccgccgatgccgtgaaacttgaacgcatgctgaccgagcgaatgtttaatgcagaaaatggtaagtag

SEQ ID NO: 167651 - DNA, 957 bp, Artificial Sequence
  derived and/or modified sequence
atgtccagttcccctgtcaagaggcagaggatggagtctgcactcgatcagcttaagcaatttaccacagtggtggcagacactggggacttccacgccattgacgaatataaacctcaggatgcgaccaccaaccccagtcttattctggccgccgcccagatgccagcctaccaggagctggtagaagaagccatcgcctatgggcgcaagcttgggggttctcaggaggatcagattaagaacgccatcgacaaactattcgtactgttcggcgctgaaatccttaaaaaaatcccagggcgggtgagtaccgaggttgacgcgagactctcctttgataaagacgcgatggtagcacgcgcccggcgcctcatagaactgtataaagaagccggcatttccaaggatagaattctgataaagctcagctctacctgggaaggaatccaggcaggcaaggagcttgaagagcagcatggaattcactgtaacatgactctcctgttctcattcgctcaagcagtggcctgtgccgaggctggggtcacattgattagcccctttgtcgggagaatccttgattggcatgtagctaacaccgataagaaatcgtacgaacctttagaggatccaggggtgaagtctgtaactaagatctataactattataaaaaatttagctacaagactatcgtgatgggcgctagtttccggaatacaggtgaaattaaggctctcgcaggctgtgactttctgacgatatcccctaaactcctgggggagctgcttcaggacaatgcgaagctggtgccggtgctgagcgcgaaacctaaacctgtcacctggaaaaaaagcacttggatgagaagcctgtccgtcggatgcactacacggactaggtggttgtggcggtcgtcattgaccggctccgcttccctgccgctaatgcagtag

SEQ ID NO: 167652 - DNA, 1014 bp, Artificial Sequence
  derived and/or modified sequence
atgagcagcagccctgtgaagaggcagaggatggagagcgccctggaccagctgaagcagttcaccaccgtggtggccgacaccggggacttccacgccattgatgagtacaagccccaggatgccaccaccaaccccagcctcatcctggccgccgcccagatgcctgcctaccaggagctggtggaggaggccatcgcctacggcaggaagctgggcggcagccaggaggaccagatcaagaatgccatcgacaagctgtttgtgctgtttggagctgagatcctgaagaagatccctggccgggtgtccacagaggtggatgcccggctgagctttgacaaggatgccatggtggcccgggcccggcggctcatcgagctgtacaaggaggccggcatcagcaaggaccgcatcctgatcaagctgagcagcacctgggagggcatccaggccggcaaggagctggaggagcagcacggcatccactgcaacatgaccctgctcttctcctttgcccaggccgtggcctgtgccgaggccggcgtgaccctcatcagcccctttgtgggccgcatcctggactggcacgtggccaacacagacaagaagagctatgagcccctggaggaccccggggtgaagtctgtgaccaagatctacaactactacaagaagttctcctacaagaccatcgtgatgggcgccagcttcagaaatactggagagatcaaggccctggccggctgtgacttcctgaccatcagccccaagctgctgggggagctgctgcaggacaatgccaagctggtgcctgtgctgagcgccaaggccgcccaggccagtgacctggagaagatccacctggatgagaagagcttccgctggctgcacaatgaagaccagatggctgtggagaagctgagtgatggcatcaggaagtttgctgctgatgctgtgaagctggagaggatgctgacagagaggatgtttaatgcagaaaatggcaagtag

SEQ ID NO: 167653 - DNA, 957 bp, Artificial Sequence
  derived and/or modified sequence
atgagcagcagccctgtgaagaggcagaggatggagagcgccctggaccagctgaagcagttcaccaccgtggtggccgacaccggggacttccacgccattgatgagtacaagccccaggatgccaccaccaaccccagcctcatcctggccgccgcccagatgcctgcctaccaggagctggtggaggaggccatcgcctacggcaggaagctgggcggcagccaggaggaccagatcaagaatgccatcgacaagctgtttgtgctgtttggagctgagatcctgaagaagatccctggccgggtgtccacagaggtggatgcccggctgagctttgacaaggatgccatggtggcccgggcccggcggctcatcgagctgtacaaggaggccggcatcagcaaggaccgcatcctgatcaagctgagcagcacctgggagggcatccaggccggcaaggagctggaggagcagcacggcatccactgcaacatgaccctgctcttctcctttgcccaggccgtggcctgtgccgaggccggcgtgaccctcatcagcccctttgtgggccgcatcctggactggcacgtggccaacacagacaagaagagctatgagcccctggaggaccccggggtgaagtctgtgaccaagatctacaactactacaagaagttctcctacaagaccatcgtgatgggcgccagcttcagaaatactggagagatcaaggccctggccggctgtgacttcctgaccatcagccccaagctgctgggggagctgctgcaggacaatgccaagctggtgcctgtgctgagcgccaagcccaagcctgtgacctggaagaagagcacctggatgaggagcctgtctgtgggctgcaccaccaggacccgctggctgtggaggagcagcctgactggaagtgccagcctgcccctgatgcagtag

SEQ ID NO: 167654 - DNA, 1014 bp, Artificial Sequence
  derived and/or modified sequence
atgagcagcagccccgtgaagcggcagcggatggagagcgccctggaccagttaaagcaattcaccactgtcgtggctgataccggggatttccacgcaatcgacgagtataaaccgcaggacgctaccacaaaccctagcttgatcctcgccgccgctcagatgcctgcatatcaagagctggtggaggaggctatcgcatatggacgaaaactggggggcagccaggaggaccagataaaaaacgccattgataagctgtttgttttatttggagctgagatcctcaaaaagatcccaggtcgggtctctaccgaggtggatgcccggctcagtttcgacaaagacgccatggtcgcacgtgcccgcagactgattgaactgtacaaagaagctggaattagtaaagatcgcattctgataaaattgagttcaacctgggaaggcattcaggcgggtaaggagcttgaagaacagcacgggattcattgcaacatgacactcctgtttagcttcgcccaggccgtggcgtgtgcagaggccggggtcaccctgatctcaccattcgtgggaagaattttggattggcacgttgcgaatacagataagaagtcttacgagccactggaggatccgggtgttaagagcgtcacaaaaatctacaactactacaagaaatttagttataagaccattgtaatgggcgcatccttcaggaacacaggagaaatcaaagccctcgccggctgcgatttccttacaattagccccaagttactgggagaactcctgcaggacaatgccaagcttgtgcccgtgctgagtgcaaaggccgctcaggccagtgacttggagaagattcacctggacgaaaagtcctttagatggctgcacaatgaagaccagatggcagttgagaagctcagcgacggcattcggaagtttgccgccgatgcagtgaaacttgaaaggatgctcaccgagagaatgttcaatgccgagaatgggaagtag

SEQ ID NO: 167655 - DNA, 957 bp, Artificial Sequence
  derived and/or modified sequence
atgagcagcagccccgtgaagcggcagcggatggagagcgccctggaccagctgaagcagtttaccacagtggtcgctgacacaggcgatttccacgcgatcgacgaatataagcctcaagacgcaacaacaaatcctagccttatattggccgcagcccagatgcccgcctatcaggagctggtagaagaagcaattgcctacggcagaaaactggggggcagtcaggaagaccagattaagaatgccatcgacaagctttttgtgctatttggcgcagagatattgaaaaagataccagggagagtgagtactgaggtggacgcacggttgagctttgataaggacgctatggtggcccgagcacggaggctgattgagctctacaaggaggctgggatctctaaggatcggatcctcattaagttgtcctcaacatgggaaggcattcaagctgggaaagagctggaagagcagcacgggattcattgcaatatgactcttcttttttctttcgcacaggccgtggcctgcgccgaggctggcgtgacccttatctccccattcgtcggccgaatcctcgattggcacgtggcaaatacagacaagaagtcatacgaacccctggaagatccgggagtgaaaagcgtgactaaaatttataattattataagaagttttcctataaaacaatcgtcatgggcgcctcctttaggaacacgggcgaaatcaaggccctggcaggctgcgatttcttaacaatctcacctaaactgctcggcgaacttctccaggacaatgcaaagctggtgccagttctttcagctaaaccgaagccagtgacttggaagaaatctacctggatgagatcattgagcgtaggttgtaccacacgcacgagatggttgtggcgctcttcgctgactggatccgcctccttaccattgatgcagtag

SEQ ID NO: 167656 - DNA, 1014 bp, Artificial Sequence
  derived and/or modified sequence
atgtcatcttctcctgttaagcgacaacgtatggagagcgccctagatcagctgaaacaatttactaccgtggtggccgacacgggggattttcacgccatcgacgagtacaagccccaggatgcaactactaacccatcacttattttggctgcggcacagatgccagcttaccaggaattggttgaagaggcaatagcctacggaagaaaactaggcggaagtcaggaggaccaaattaagaacgctatcgataagcttttcgttctcttcggcgcagaaatactcaaaaagattccgggaagagtgtccacagaagtggatgcacggctgtctttcgataaagatgcaatggtggctcgggcacgcaggctcatcgagttatataaggaggccggtatttctaaggatcgcatattaatcaaactctcttccacctgggagggtatccaagcgggtaaggagctcgaggaacagcatggcattcattgtaacatgaccctccttttttcatttgcccaggcggttgcctgtgctgaagctggagttacccttatcagcccattcgttggtcgaatcctcgattggcacgtggccaatactgataagaagtcctacgaaccacttgaggaccccggtgtcaaatccgtaacaaagatctataactactacaagaagttcagttataagaccatagttatgggagcaagcttcaggaataccggcgagatcaaagcacttgccggatgcgacttcctcaccatttcgcctaaactgctgggcgagttgctgcaagacaacgctaagctagtgccagtgctgtccgccaaagctgcacaggcatctgatctcgaaaagatccatttggatgaaaagtcttttcggtggctccacaatgaagaccaaatggcagttgaaaaactctccgacggaatacggaaattcgcggctgacgcagtgaagctggaaaggatgctgactgagaggatgtttaacgccgaaaatgggaagtag

SEQ ID NO: 167657 - DNA, 957 bp, Artificial Sequence
  derived and/or modified sequence
atgtcctcaagccctgtaaagaggcagagaatggaaagtgcgttggatcagctgaagcagtttaccaccgtggtcgcagatacaggagacttccacgccatagatgagtataaacctcaagacgccaccaccaatccttcgcttatcttagctgcggcacagatgccagcctaccaggagctcgtggaagaggctatcgcctatggcagaaaattgggcggatcccaggaggatcagataaaaaatgcaatcgacaaattgtttgtcttgtttggggctgaaattttgaagaagatcccgggtagagtgagcacagaagtggacgcgaggctgagcttcgacaaagacgcgatggtagcgcgtgcgagaaggcttattgaattatacaaagaagctggaatatcaaaagatcgaattctgatcaagctctcttccacctgggaaggaattcaggccggaaaagagctagaggaacagcacggtatacactgcaatatgacgctcctgtttagcttcgcccaggcggtcgcatgtgccgaggcaggcgtgactctgatcagcccctttgtaggaagaatccttgattggcacgtcgcaaataccgacaaaaagtcctatgagccactcgaagatccaggtgttaagtccgtaaccaagatatacaactattacaaaaaattctcatacaagactatcgttatgggagcatccttccgcaatacaggggaaataaaagcgctcgctggatgcgacttcctgacaatttccccaaagttacttggtgagctcctgcaggacaatgctaaattggttcccgtcctgtcagccaagccaaaacccgtgacctggaaaaagagtacgtggatgcgatccttgagtgtgggctgcacaactaggactagatggctgtggagatcatctcttaccgggagcgcctcgttacctctcatgcagtag

SEQ ID NO: 167658 - DNA, 1346 bp, Artificial Sequence
  derived and/or modified sequence
cccgggggcggggcttcgtccaggcgcgcagggaccagcgggcctcgccctcccgcgccgctttccgattggcagccgcccgcggggcattgtgggccgtccgcgcgcccgtcccgtcgccgccgccgccgccgcagacccctcggtcttgctatgtcgagctcacccgtgaagcgtcagaggatggagtccgcgctggaccagctcaagcagttcaccaccgtggtggccgacacgggcgacttccacgccatcgacgagtacaagccccaggatgctaccaccaacccgtccctgatcctggccgcagcacagatgcccgcttaccaggagctggtggaggaggcgattgcctatggccggaagctgggcgggtcacaagaggaccagattaaaaatgctattgataaactttttgtgttgtttggagcagaaatactaaagaagattccgggccgagtatccacagaagtagacgcaaggctctcctttgataaagatgcgatggtggccagagccaggcggctcatcgagctctacaaggaagctgggatcagcaaggaccgaattcttataaagctgtcatcaacctgggaaggaattcaggctggaaaggagctcgaggagcagcacggcatccactgcaacatgacgttactcttctccttcgcccaggctgtggcctgtgccgaggcgggtgtgaccctcatctccccatttgttgggcgcatccttgattggcatgtggcaaacaccgacaagaaatcctatgagcccctggaagaccctggggtaaagagtgtcactaaaatctacaactactacaagaagtttagctacaaaaccattgtcatgggcgcctccttccgcaacacgggcgagatcaaagcactggccggctgtgacttcctcaccatctcacccaagctcctgggagagctgctgcaggacaacgccaagctggtgcctgtgctctcagccaaggcggcccaagccagtgacctggaaaaaatccacctggatgagaagtctttccgttggttgcacaacgaggaccagatggctgtggagaagctctctgacgggatccgcaagtttgccgctgatgcagtgaagctggagcggatgctgacagaacgaatgttcaatgcagagaatggaaagtagcgcatccctgaggctggactccagatctgcaccgccggccagctgggatctgactgcacgtggcttctgatgaatcttgcgttttttacaaattggagcagggacagatcatagatttctgattttatgtaaaattttgcctaatacattaaagcagtcacttttcctgtgctgtttca

SEQ ID NO: 167659 - DNA, 1231 bp, Artificial Sequence
  derived and/or modified sequence
tccgcgcgcccgtcccgtcgccgccgccgccgccgcagacccctcggtcttgctatgtcgagctcacccgtgaagcgtcagaggatggagtccgcgctggaccagctcaagcagttcaccaccgtggtggccgacacgggcgacttccacgccatcgacgagtacaagccccaggatgctaccaccaacccgtccctgatcctggccgcagcacagatgcccgcttaccaggagctggtggaggaggcgattgcctatggccggaagctgggcgggtcacaagaggaccagattaaaaatgctattgataaactttttgtgttgtttggagcagaaatactaaagaagattccgggccgagtatccacagaagtagacgcaaggctctcctttgataaagatgcgatggtggccagagccaggcggctcatcgagctctacaaggaagctgggatcagcaaggaccgaattcttataaagctgtcatcaacctgggaaggaattcaggctggaaaggagctcgaggagcagcacggcatccactgcaacatgacgttactcttctccttcgcccaggctgtggcctgtgccgaggcgggtgtgaccctcatctccccatttgttgggcgcatccttgattggcatgtggcaaacaccgacaagaaatcctatgagcccctggaagaccctggggtaaagagtgtcactaaaatctacaactactacaagaagtttagctacaaaaccattgtcatgggcgcctccttccgcaacacgggcgagatcaaagcactggccggctgtgacttcctcaccatctcacccaagctcctgggagagctgctgcaggacaacgccaagctggtgcctgtgctctcagccaagcccaagccagtgacctggaaaaaatccacctggatgagaagtctttccgttggttgcacaacgaggaccagatggctgtggagaagctctctgacgggatccgcaagtttgccgctgatgcagtgaagctggagcggatgctgacagaacgaatgttcaatgcagagaatggaaagtagcgcatccctgaggctggactccagatctgcaccgccggccagctgggatctgactgcacgtggcttctgatgaatcttgcgttttttacaaattggagcagggacagatcatagatttctgattttatgtaaaattttgcctaatacattaaagcagtcacttttcc

SEQ ID NO: 167660 - protein, 301 aa, Artificial Sequence
  derived and/or modified sequence
MEDEVVRFAKKMDKMVQKKNAAGALDLLKELKNIPMTLELLQSTRIGMSVNAIRKQSTDEEVTSLAKSLIKSWKKLLDGPSTEKDLDEKKKEPAITSQNSPEAREESTSSGNVSNRKDETNARDTYVSSFPRAPSTSDSVRLKCREMLAAALRTGDDYIAIGADEEELGSQIEEAIYQEIRNTDMKYKNRVRSRISNLKDAKNPNLRKNVLCGNIPPDLFARMTAEEMASDELKEMRKNLTKEAIREHQMAKTGGTQTDLFTCGKCKKKNCTYTQVQTRSADEPMTTFVVCNECGNRWKFC

SEQ ID NO: 167661 - protein, 117 aa, Artificial Sequence
  derived and/or modified sequence
MEDEVVRFAKKMDKMVQKKNAAGALDLLKELKNIPMTLELLQEMASDELKEMRKNLTKEAIREHQMAKTGGTQTDLFTCGKCKKKNCTYTQVQTRSADEPMTTFVVCNECGNRWKFC

SEQ ID NO: 167662 - DNA, 906 bp, Artificial Sequence
  derived and/or modified sequence
atggaggacgaggtggtgagattcgccaagaagatggacaagatggtgcagaagaagaacgccgccggcgccctggacctgctgaaggagctgaagaacatccccatgaccctggagctgctgcagagcaccagaatcggcatgagcgtgaacgccatcagaaagcagagcaccgacgaggaggtgaccagcctggccaagagcctgatcaagagctggaagaagctgctggacggccccagcaccgagaaggacctggacgagaagaagaaggagcccgccatcaccagccagaacagccccgaggccagagaggagagcaccagcagcggcaacgtgagcaacagaaaggacgagaccaacgccagagacacctacgtgagcagcttccccagagcccccagcaccagcgacagcgtgagactgaagtgcagagagatgctggccgccgccctgagaaccggcgacgactacatcgccatcggcgccgacgaggaggagctgggcagccagatcgaggaggccatctaccaggagatcagaaacaccgacatgaagtacaagaacagagtgagaagcagaatcagcaacctgaaggacgccaagaaccccaacctgagaaagaacgtgctgtgcggcaacatcccccccgacctgttcgccagaatgaccgccgaggagatggccagcgacgagctgaaggagatgagaaagaacctgaccaaggaggccatcagagagcaccagatggccaagaccggcggcacccagaccgacctgttcacctgcggcaagtgcaagaagaagaactgcacctacacccaggtgcagaccagaagcgccgacgagcccatgaccaccttcgtggtgtgcaacgagtgcggcaacagatggaagttctgctag

SEQ ID NO: 167663 - DNA, 906 bp, Artificial Sequence
  derived and/or modified sequence
atggaggacgaggtagtccggttcgcaaaaaaaatggataagatggtccagaaaaagaacgccgccggagctcttgacctactgaaggagctgaaaaatattcccatgacattagagctcctgcagtccacccgcatcggaatgagcgtgaatgcgatacgaaaacagtctaccgatgaagaagtcacgagcctggctaaatcgcttatcaaatcatggaaaaaactcctggatggcccttccacagaaaaagacctggatgaaaagaaaaaggagccagccatcacttctcagaattcccccgaggcccgagaagaaagcactagtagcggcaatgtcagcaaccggaaagatgagactaatgctagagatacttatgtgtcttctttccccagggctcctagcacatctgactccgtcaggctcaagtgcagggagatgctggcagcagcgctgcgaactggcgacgattacattgcaatcggggccgatgaggaggaactagggagtcagatcgaagaggccatctaccaggaaatcaggaatactgacatgaagtataaaaatcgggttcggtctagaatttcaaatctgaaggatgccaagaatcctaatttaagaaaaaatgtactgtgtggaaatatcccgcctgacttattcgccaggatgaccgccgaagagatggccagcgacgagcttaaagagatgcggaagaatctgacaaaagaggcgattcgtgagcaccagatggcgaaaacaggggggacccaaaccgacttgtttacttgtgggaagtgcaagaaaaaaaactgtacgtacacacaggtccaaactcgaagtgccgacgagcctatgacaacatttgtagtctgtaatgagtgcgggaacaggtggaaattttgttag

SEQ ID NO: 167664 - DNA, 906 bp, Artificial Sequence
  derived and/or modified sequence
atggaggatgaggtggtgcgctttgccaagaagatggacaagatggtgcagaagaagaatgctgctggggccctggacctgctgaaggagctgaagaacatccccatgaccctggagctgctgcagagcacccgcatcggcatgtctgtgaatgccatcaggaagcagagcacagatgaggaggtgaccagcctggccaagagcctcatcaagtcctggaagaagctgctggatggccccagcacagagaaggacctggatgagaagaagaaggagcccgccatcaccagccagaacagccctgaggcccgggaggagagcaccagcagtggaaatgtgagcaacaggaaggatgagaccaatgcccgggacacctacgtgtcctccttcccccgggcccccagcaccagtgacagcgtgcggctgaagtgccgggagatgctggccgccgccctgaggactggagatgactacatcgccatcggggctgatgaggaggagctgggcagccagatcgaggaggccatctaccaggagatccggaacacagacatgaagtacaagaacagagtgcgcagccgcatcagcaacctgaaggatgccaagaaccccaacctgaggaagaatgtgctgtgtggcaacatccccccagacctgtttgccaggatgacagctgaggagatggccagtgatgagctgaaggagatgaggaagaacctgaccaaggaggccatccgggagcaccagatggccaagacaggaggcacccagacagacctcttcacctgtgggaagtgcaagaagaagaactgcacctacacccaggtgcagaccaggtctgcagatgagcccatgaccacctttgtggtgtgcaatgaatgtggcaaccgctggaagttctgctag

SEQ ID NO: 167665 - DNA, 906 bp, Artificial Sequence
  derived and/or modified sequence
atggaggacgaggtggtgcggttcgccaagaagatggacaagatggttcagaagaagaacgccgccggtgctctggatctgctcaaggaactcaagaacataccgatgaccttggagctgctccagtcaacgcggatcgggatgagcgtgaatgcaatccgcaaacagtccaccgatgaggaggtgacttctctggccaagtctctcattaaatcatggaagaagctgctggacggtccaagcactgagaaggatctggacgaaaagaagaaagaacctgcaatcacttctcagaacagtcccgaagcgcgagaggagagtacttcaagcggcaacgtgagtaaccggaaggatgagaccaatgcccgcgatacttacgtgtcctccttcccccgagctccttcgactagtgactcagtaagactgaaatgcagagagatgctagccgcagccctccgtactggcgatgattatatcgcaatcggagccgatgaggaggaactggggtcacaaatcgaggaggcgatttaccaggaaatccgaaatactgacatgaagtacaagaaccgtgtgcgcagtagaatcagcaatttgaaggacgcgaagaaccccaacttgcgcaaaaatgttttatgtgggaacatccctcccgacctgttcgctaggatgacagcagaagagatggcaagtgatgagctaaaagaaatgcgaaagaatcttacaaaggaggcgatacgggagcatcagatggccaagactggggggacccagaccgacctgttcacctgtgggaaatgcaagaagaagaactgcacatatacgcaggtgcaaacccgctcagcagacgaacccatgaccacctttgtcgtgtgtaatgaatgcgggaatcggtggaaattctgctag

SEQ ID NO: 167666 - DNA, 906 bp, Artificial Sequence
  derived and/or modified sequence
atggaggatgaggttgttagattcgccaagaagatggacaaaatggtccagaagaagaatgctgcgggagcactggaccttcttaaggaattaaagaatatccccatgacactcgaattactccagtctacccgtattgggatgtcagtaaacgccatccgaaagcagtccacagatgaggaggtaacctccttagcgaagagtctgattaagtcatggaaaaaactgctggatggcccttcaactgagaaagatctagatgaaaaaaaaaaggagccagctattacgtcacagaattcccccgaagcacgcgaggaaagcactagtagcggaaatgtttctaatcggaaagacgagacaaatgcgagagacacctacgttagcagctttccccgagccccaagcacttccgactcggtgagacttaagtgccgggaaatgctggcggcagctctccgtactggagatgattatattgcaatcggagccgacgaggaagaacttggttcccagatagaggaagccatatatcaagagattcggaatacagacatgaagtataagaatcgtgtgcggagccggatcagtaacttgaaggatgcaaagaatccaaacctcaggaagaatgtactgtgcggtaatatccctccagatttgttcgccagaatgactgctgaggagatggcctctgacgaacttaaggagatgagaaaaaacttaaccaaggaggccattagagagcaccagatggccaagaccggaggaactcagacagatttgtttacttgcggtaagtgcaagaaaaaaaattgcacatacacacaggtgcagactcgctcggcagacgagccaatgaccaccttcgtggtgtgcaacgaatgcggcaaccgatggaaattctgctag

SEQ ID NO: 167667 - DNA, 2858 bp, Artificial Sequence
  derived and/or modified sequence
agggggccgaaaacccgccccgtgagggggcgggaccggaggtgaacgcgcagcaaaaccgggcgccttccacgaccctctagccggaagccacgcctgcccactagcccgacgcccgcctggcgggaacatgggctcgcccctcaccagcgatctgcagtcagttggtagcgcctgcacgtcgcgcgcggtgttcgattgtcgctgcctggggaggaggagccggagccgccgccgccgccgccgccgccgcgggcttcgttcgtaaggaagggggcctaggcccgggcctgcggtggtgggggttgctgcgcgccgggggtcgctcctgctgtgtcttccgctccagcttcgcccacttccccttgccagcggggtgggcgcggagaagacctgccggagccatggaggacgaagtggtccgctttgccaagaagatggacaagatggtgcagaagaagaacgcggctggagcattggatttgctaaaggagcttaagaatattcctatgaccctggaattactgcagtccacaagaatcggaatgtcagttaatgctattcgcaagcagagtacagatgaggaagttacatctttggcaaagtctctcatcaaatcctggaaaaaattattagatgggccatcaactgagaaagaccttgacgaaaagaagaaagaacctgcaattacatcgcagaacagccctgaggcaagagaagaaagtacttccagcggcaatgtaagcaacagaaaggatgagacaaatgctcgagatacttatgtttcatcctttcctcgggcaccaagcacttctgattctgtgcggttgaagtgtagggagatgcttgctgcagctcttcgaacaggggatgactacattgcaattggagctgatgaggaagaattaggatctcaaattgaagaagctatatatcaagaaataaggaatacagacatgaaatacaaaaatagagtacgaagtaggatatcaaatcttaaagatgcaaaaaatccaaatttaaggaaaaatgtcctctgtgggaatattcctcctgacttatttgctagaatgacagcagaggaaatggctagtgatgagctgaaagagatgcggaaaaacttgaccaaagaagccatcagagagcatcagatggccaagactggtgggacccagactgacttgttcacatgtggcaaatgtaaaaagaagaattgcacttacacacaggtacaaacccgtagtgctgatgaaccaatgacaacatttgttgtctgtaatgaatgtggaaatcgatggaagttctgttgagttggaagaattggcaaaatatctggaccattaagaaaacggattttgtaactagctttaaactaggccaagcaactagttttcctgcaaatcaaatttttaaagcaacttgggttagactttgtttttgacctaacatcccttccttaaatgccttctgtagtttcagatcagtagggagaccatataataattttatggtacctgtttcaaaacatattttttctgtttttataagtaagttgatattaattaaactcttggcaatatttcttctttcttaaaggaaaatataccttaactttttttcttttacactgtgaaacatacacagtagaaattctgttactctctgttattaatacataaatgaaaatacatttttttccatattggcatgtagctacaaatattaaaggaggagaaaaggtaatataattttaggtttaccaaatatggtgtgtattcaaataatacttgaccagcttatctaaaatgtacataattttgaggtagcttatgaatttgattttaattattatgttcacaagcttggaatattagatattattttgcatctgtaactaaccgtgatcatcatttcttgtaatttcttgtacatgtatattacttgttcttaatagatttttggaaacaagactttattgagatcagtttggttttcctgttaatttacctgtttgactttataatgtgttttagttttgcagaagaacactgttgtagtttagaaggcttttcataaatcccctcataggcaaagatgaaaacttcccactatttttttcccctcttaggaagacatactggaaagaaaatgtttagcatcttagtgtagtatagctattgtaaacagttcatgactagattttgattcggaaatctatactgaccaaggattaatcttaaggattgtataattcattaaagctgtggtctttccatgtggagactgatagaaaataattttgtcccaagtcttatttgctgactttttctgtcatgagtgagattgttgaacaaactgaatatatgggctatagcaagtagctttacagtacagatcttacaattaagttttgcttttgttaaagtgtgtaccattttttctgtttggagtaagacaaaaattgttttgacataggttccctagggtacacttgctctagcatactttaaaggccactgttgcaaagtctacattttatgctgaatctgcattctgtcaggcacccgtagaaagacctcagtacatgctttgcactctcctttgctccctttttccaatttcttattgcatatcattttgttgtaatacagaaagcagcatttttaaatgtccgtgttaagaattggcccactggtaccaactcacctctattttgtcagttcatagttgaagattttgttttatttcaaaaacaaagtacatttttgaaataatgtttcagaataaaataatctcacttttaagtgatccattttaaaatttgtaattcaataaagttttttttgttgttaaacata

SEQ ID NO: 167668 - protein, 258 aa, Artificial Sequence
  derived and/or modified sequence
MSDEEVEQVEEQYEEEEEAQEEEEVQEDTAEEDAEEEKPRPKLTAPKIPEGEKVDFDDIQKKRQNKDLMELQALIDSHFEARKKEEEELVALKERIEKRRAERAEQQRIRAEKERERQNRLAEEKARREEEDAKRRAEDDLKKKKALSSMGANYSSYLAKADQKRGKKQTAREMKKKILAERRKPLNIDHLGEDKLRDKAKELWETLHQLEIDKFEFGEKLKRQKYDITTLRSRIDQAQKHSKKAGTPAKGKVGGRWK

SEQ ID NO: 167669 - protein, 508 aa, Artificial Sequence
  derived and/or modified sequence
MSRFVQDLSKAMSQDGASQFQEVIRQELELSVKKELEKILTTASSHEFEHTKKDLDGFRKLFHRFLQEKGPSVDWGKIQRPPEDSIQPYEKIKARGLPDNISSVLNKLVVVKLNGGLGTSMGCKGPKSLIGVRNENTFLDLTVQQIEHLNKTYNTDVPLVLMNSFNTDEDTKKILQKYNHCRVKIYTFNQSRYPRINKESLLPVAKDVSYSGENTEAWYPPGHGDIYASFYNSGLLDTFIGEGKEYIFVSNIDNLGATVDLYILNHLMNPPNGKRCEFVMEVTNKTRADVKGGTLTQYEGKLRLVEIAQVPKAHVDEFKSVSKFKIFNTNNLWISLAAVKRLQEQNAIDMEIIVNAKTLDGGLNVIQLETAVGAAIKSFENSLGINVPRSRFLPVKTTSDLLLVMSNLYSLNAGSLTMSEKREFPTVPLVKLGSSFTKVQDYLRRFESIPDMLELDHLTVSGDVTFGKNVSLKGTVIIIANHGDRIDIPPGAVLENKIVSGNLRILDH

SEQ ID NO: 167670 - protein, 497 aa, Artificial Sequence
  derived and/or modified sequence
MSQDGASQFQEVIRQELELSVKKELEKILTTASSHEFEHTKKDLDGFRKLFHRFLQEKGPSVDWGKIQRPPEDSIQPYEKIKARGLPDNISSVLNKLVVVKLNGGLGTSMGCKGPKSLIGVRNENTFLDLTVQQIEHLNKTYNTDVPLVLMNSFNTDEDTKKILQKYNHCRVKIYTFNQSRYPRINKESLLPVAKDVSYSGENTEAWYPPGHGDIYASFYNSGLLDTFIGEGKEYIFVSNIDNLGATVDLYILNHLMNPPNGKRCEFVMEVTNKTRADVKGGTLTQYEGKLRLVEIAQVPKAHVDEFKSVSKFKIFNTNNLWISLAAVKRLQEQNAIDMEIIVNAKTLDGGLNVIQLETAVGAAIKSFENSLGINVPRSRFLPVKTTSDLLLVMSNLYSLNAGSLTMSEKREFPTVPLVKLGSSFTKVQDYLRRFESIPDMLELDHLTVSGDVTFGKNVSLKGTVIIIANHGDRIDIPPGAVLENKIVSGNLRILDH

SEQ ID NO: 167671 - protein, 517 aa, Artificial Sequence
  derived and/or modified sequence
MLLYPAGFSFASLKSDLSKAMSQDGASQFQEVIRQELELSVKKELEKILTTASSHEFEHTKKDLDGFRKLFHRFLQEKGPSVDWGKIQRPPEDSIQPYEKIKARGLPDNISSVLNKLVVVKLNGGLGTSMGCKGPKSLIGVRNENTFLDLTVQQIEHLNKTYNTDVPLVLMNSFNTDEDTKKILQKYNHCRVKIYTFNQSRYPRINKESLLPVAKDVSYSGENTEAWYPPGHGDIYASFYNSGLLDTFIGEGKEYIFVSNIDNLGATVDLYILNHLMNPPNGKRCEFVMEVTNKTRADVKGGTLTQYEGKLRLVEIAQVPKAHVDEFKSVSKFKIFNTNNLWISLAAVKRLQEQNAIDMEIIVNAKTLDGGLNVIQLETAVGAAIKSFENSLGINVPRSRFLPVKTTSDLLLVMSNLYSLNAGSLTMSEKREFPTVPLVKLGSSFTKVQDYLRRFESIPDMLELDHLTVSGDVTFGKNVSLKGTVIIIANHGDRIDIPPGAVLENKIVSGNLRILDH

SEQ ID NO: 167672 - protein, 150 aa, Artificial Sequence
  derived and/or modified sequence
MSQDGASQFQEVIRQELELSVKKELEKILTTASSHEFEHTKKDLDGFRKLFHRFLQEKGPSVDWGKIQRPPEDSIQPYEKIKARGLPDNISSVLNKLVVVKLNGGLGTSMGCKGPKSLIGVRNENTFLDLTVQQIEHLNKTYNTDVPLVL

SEQ ID NO: 167673 - protein, 171 aa, Artificial Sequence
  derived and/or modified sequence
MSQDGASQFQEVIRQELELSVKKELEKILTTASSHEFEHTKKDLDGFRKLFHRFLQEKGPSVDWGKIQRPPEDSIQPYEKIKARGLPDNISSVLNKLVVVKLNGGLGTSMGCKGPKSLIGVRNENTFLDLTVQQIEHLNKTYNTDVPLVLMNSFNTDEDTKKILQKYNHCR

SEQ ID NO: 167674 - protein, 38 aa, Artificial Sequence
  derived and/or modified sequence
MSQDGASQFQEVIRQELELSVKKELEKILTTASSHEFE

SEQ ID NO: 167675 - protein, 105 aa, Artificial Sequence
  derived and/or modified sequence
MSQDGASQFQEVIRQELELSVKKELEKILTTASSHEFEHTKKDLDGFRKLFHRFLQEKGPSVDWGKIQRPPEDSIQPYEKIKARGLPDNISSVLNKLVVVKLNGG

SEQ ID NO: 167676 - protein, 49 aa, Artificial Sequence
  derived and/or modified sequence
MSRFVQDLSKAMSQDGASQFQEVIRQELELSVKKELEKILTTASSHEFE

SEQ ID NO: 167677 - protein, 135 aa, Artificial Sequence
  derived and/or modified sequence
MSQDGASQFQEVIRQELELSVKKELEKILTTASSHEFEHTKKDLDGFRKLFHRFLQEKGPSVDWGKIQRPPEDSIQPYEKIKARGLPDNISSVLNKLVVVKLNGGLGTSMGCKGPKSLIGVRNENTFLDLTVQQI

SEQ ID NO: 167678 - protein, 213 aa, Artificial Sequence
  derived and/or modified sequence
MSQDGASQFQEVIRQELELSVKKELEKILTTASSHEFEHTKKDLDGFRKLFHRFLQEKGPSVDWGKIQRPPEDSIQPYEKIKARGLPDNISSVLNKLVVVKLNGGLGTSMGCKGPKSLIGVRNENTFLDLTVQQIEHLNKTYNTDVPLVLMNSFNTDEDTKKILQKYNHCRVKIYTFNQSRYPRINKESLLPVAKDVSYSGENTEAWYPPGHG

SEQ ID NO: 167679 - DNA, 1527 bp, Artificial Sequence
  derived and/or modified sequence
atgagcagattcgtgcaggacctgagcaaggccatgagccaggacggcgccagccagttccaggaggtgatcagacaggagctggagctgagcgtgaagaaggagctggagaagatcctgaccaccgccagcagccacgagttcgagcacaccaagaaggacctggacggcttcagaaagctgttccacagattcctgcaggagaagggccccagcgtggactggggcaagatccagagaccccccgaggacagcatccagccctacgagaagatcaaggccagaggcctgcccgacaacatcagcagcgtgctgaacaagctggtggtggtgaagctgaacggcggcctgggcaccagcatgggctgcaagggccccaagagcctgatcggcgtgagaaacgagaacaccttcctggacctgaccgtgcagcagatcgagcacctgaacaagacctacaacaccgacgtgcccctggtgctgatgaacagcttcaacaccgacgaggacaccaagaagatcctgcagaagtacaaccactgcagagtgaagatctacaccttcaaccagagcagataccccagaatcaacaaggagagcctgctgcccgtggccaaggacgtgagctacagcggcgagaacaccgaggcctggtacccccccggccacggcgacatctacgccagcttctacaacagcggcctgctggacaccttcatcggcgagggcaaggagtacatcttcgtgagcaacatcgacaacctgggcgccaccgtggacctgtacatcctgaaccacctgatgaacccccccaacggcaagagatgcgagttcgtgatggaggtgaccaacaagaccagagccgacgtgaagggcggcaccctgacccagtacgagggcaagctgagactggtggagatcgcccaggtgcccaaggcccacgtggacgagttcaagagcgtgagcaagttcaagatcttcaacaccaacaacctgtggatcagcctggccgccgtgaagagactgcaggagcagaacgccatcgacatggagatcatcgtgaacgccaagaccctggacggcggcctgaacgtgatccagctggagaccgccgtgggcgccgccatcaagagcttcgagaacagcctgggcatcaacgtgcccagaagcagattcctgcccgtgaagaccaccagcgacctgctgctggtgatgagcaacctgtacagcctgaacgccggcagcctgaccatgagcgagaagagagagttccccaccgtgcccctggtgaagctgggcagcagcttcaccaaggtgcaggactacctgagaagattcgagagcatccccgacatgctggagctggaccacctgaccgtgagcggcgacgtgaccttcggcaagaacgtgagcctgaagggcaccgtgatcatcatcgccaaccacggcgacagaatcgacatcccccccggcgccgtgctggagaacaagatcgtgagcggcaacctgagaatcctggaccactag

SEQ ID NO: 167680 - DNA, 1554 bp, Artificial Sequence
  derived and/or modified sequence
atgctgctgtaccccgccggcttcagcttcgccagcctgaagagcgacctgagcaaggccatgagccaggacggcgccagccagttccaggaggtgatcagacaggagctggagctgagcgtgaagaaggagctggagaagatcctgaccaccgccagcagccacgagttcgagcacaccaagaaggacctggacggcttcagaaagctgttccacagattcctgcaggagaagggccccagcgtggactggggcaagatccagagaccccccgaggacagcatccagccctacgagaagatcaaggccagaggcctgcccgacaacatcagcagcgtgctgaacaagctggtggtggtgaagctgaacggcggcctgggcaccagcatgggctgcaagggccccaagagcctgatcggcgtgagaaacgagaacaccttcctggacctgaccgtgcagcagatcgagcacctgaacaagacctacaacaccgacgtgcccctggtgctgatgaacagcttcaacaccgacgaggacaccaagaagatcctgcagaagtacaaccactgcagagtgaagatctacaccttcaaccagagcagataccccagaatcaacaaggagagcctgctgcccgtggccaaggacgtgagctacagcggcgagaacaccgaggcctggtacccccccggccacggcgacatctacgccagcttctacaacagcggcctgctggacaccttcatcggcgagggcaaggagtacatcttcgtgagcaacatcgacaacctgggcgccaccgtggacctgtacatcctgaaccacctgatgaacccccccaacggcaagagatgcgagttcgtgatggaggtgaccaacaagaccagagccgacgtgaagggcggcaccctgacccagtacgagggcaagctgagactggtggagatcgcccaggtgcccaaggcccacgtggacgagttcaagagcgtgagcaagttcaagatcttcaacaccaacaacctgtggatcagcctggccgccgtgaagagactgcaggagcagaacgccatcgacatggagatcatcgtgaacgccaagaccctggacggcggcctgaacgtgatccagctggagaccgccgtgggcgccgccatcaagagcttcgagaacagcctgggcatcaacgtgcccagaagcagattcctgcccgtgaagaccaccagcgacctgctgctggtgatgagcaacctgtacagcctgaacgccggcagcctgaccatgagcgagaagagagagttccccaccgtgcccctggtgaagctgggcagcagcttcaccaaggtgcaggactacctgagaagattcgagagcatccccgacatgctggagctggaccacctgaccgtgagcggcgacgtgaccttcggcaagaacgtgagcctgaagggcaccgtgatcatcatcgccaaccacggcgacagaatcgacatcccccccggcgccgtgctggagaacaagatcgtgagcggcaacctgagaatcctggaccactag

SEQ ID NO: 167681 - DNA, 117 bp, Artificial Sequence
  derived and/or modified sequence
atgagccaggacggcgccagccagttccaggaggtgatcagacaggagctggagctgagcgtgaagaaggagctggagaagatcctgaccaccgccagcagccacgagttcgagtag

SEQ ID NO: 167682 - DNA, 150 bp, Artificial Sequence
  derived and/or modified sequence
atgagcagattcgtgcaggacctgagcaaggccatgagccaggacggcgccagccagttccaggaggtgatcagacaggagctggagctgagcgtgaagaaggagctggagaagatcctgaccaccgccagcagccacgagttcgagtag

SEQ ID NO: 167683 - DNA, 1527 bp, Artificial Sequence
  derived and/or modified sequence
atgtctcgcttcgtccaggacttgtcaaaggccatgagtcaggatggggcatcgcagttccaggaggttatcagacaggagcttgaactaagcgttaagaaagagttagaaaagatacttaccactgcctcctcccatgaattcgaacatactaagaaggatctggacggctttaggaagctgtttcaccggttcctacaggagaagggaccgtcagtggactggggtaagatacagcgacctcctgaggatagtatacagccctatgaaaaaatcaaggccagaggtctgcccgacaacatctcgagcgtgctgaacaaactggtagtggtgaagctcaacggcggcctgggaacctctatggggtgcaaggggccaaaatcccttattggcgttcggaatgagaacaccttcctcgacctgacagtgcagcagattgaacatctgaataagacatataataccgacgtcccactagttctgatgaactctttcaataccgatgaagacaccaagaaaattttacagaagtacaaccactgtcgggtaaagatctacacctttaatcaaagtcgctatccccgcattaataaggagagtctgctacccgtcgcaaaggatgtctcctacagcggcgaaaacaccgaagcatggtaccctcctggccatggggacatctacgcttcattttacaatagtggcctgttggatacttttattggcgagggtaaagaatacattttcgtctctaacatcgataatctgggcgccaccgtggatctgtatatcttgaatcacctgatgaatccccctaatggaaagaggtgtgagttcgtcatggaagtgaccaataagacccgagccgatgtaaaaggcggcacactcacgcagtatgaaggcaagctgagactcgttgaaatcgcacaggttccgaaagctcacgtcgatgaatttaagtcggtttctaagttcaagatctttaacaccaacaatctttggatctccctcgctgcggtgaagaggctgcaggagcagaacgccattgatatggagatcattgttaacgccaaaaccctcgatggagggctcaatgtcattcagctagagaccgctgtgggggctgccattaagagttttgagaatagtctcggaattaatgtgccccggtctcggttcctgccagtgaagactacttctgacctgctcctagtgatgtccaacttatactctctgaacgcaggttcactgacaatgagcgagaaacgggaatttcctacagtacccctcgtcaagttagggtcaagcttcacgaaggtgcaggactatctgcgccgttttgagtccatacccgacatgttagagctggaccacttgaccgtcagtggcgacgtcacttttggaaagaacgtttcacttaaaggcacagtcatcatcatcgctaatcacggagacagaatagatattccgccaggcgccgtcctggaaaataagatcgttagcggcaacctgcgaatcttggatcactag

SEQ ID NO: 167684 - DNA, 1554 bp, Artificial Sequence
  derived and/or modified sequence
atgctcttataccccgctggcttcagcttcgcatctctgaaaagcgatctgtctaaggcgatgtctcaagacggggccagtcagtttcaggaagtaatcagacaggagctggagctgtcagtcaagaaggagctcgagaagattctaacaactgcgtcctcgcatgagttcgagcatactaagaaagatttggacggttttcgaaaactctttcacagatttcttcaagagaaagggccgagtgttgactgggggaagattcagagaccccccgaggattcaattcagccgtatgagaaaataaaggcaaggggattgcctgacaacatctctagcgtcctcaacaagctggtggtggtgaagctcaatggcggccttgggacctccatgggctgcaaggggcctaaatctctgattggggtccgaaacgagaatacttttctcgaccttacagtgcagcagatcgaacacctgaataagacgtacaacacagatgtccctctcgtgctaatgaatagcttcaacacagatgaggatacgaaaaaaatcctgcaaaagtataaccactgcagagttaagatttacacgttcaatcagagccgttacccgcgaattaataaagagtccttgctgccagtggcgaaagacgtgagctatagtggcgaaaacactgaggcctggtaccctcccggacacggcgatatatacgcctcgttttacaactctggattgctggacacatttattggcgagggtaaggagtatattttcgtgtcaaacatcgacaacctgggggccacggtggatctgtacattcttaaccatcttatgaatccgccaaacgggaaacgttgtgaatttgtcatggaggtgacaaacaaaacaagggccgatgttaagggaggaactctgactcagtatgagggcaaactgcggttagtggagatcgcccaggtcccaaaggcccatgttgacgagttcaagtcagtcagtaagtttaagatcttcaacaccaacaatttgtggatttcccttgctgccgtcaagaggctacaagaacagaacgctatagacatggagattatcgtcaacgccaagaccctcgatggcggcctgaacgttattcagctggaaacggcagtaggcgccgccatcaagtctttcgagaacagtcttggcattaacgtgcccagatcacggtttctgcccgtgaagacaaccagcgacctcttgctcgtaatgagcaacttgtactctctgaacgccgggtcactcaccatgtcggagaaaagagaatttccgacagtgccgctggtgaaactggggtcgtccttcaccaaggtacaggattatctgagacgcttcgaaagcattcctgatatgctggaactagatcacttgaccgtgagcggagatgtcactttcggcaagaatgtgagcctcaagggcaccgttattattatcgcaaaccatggcgacaggattgatatcccaccaggggcagtgctggaaaacaaaattgtctctggaaaccttaggatcctggaccactag

SEQ ID NO: 167685 - DNA, 117 bp, Artificial Sequence
  derived and/or modified sequence
atgtctcaggacggggcctcccagttccaagaggttatccgccaggagttggagctcagcgtcaagaaagagttggagaaaatcctgaccaccgcctcttctcacgagttcgaatag

SEQ ID NO: 167686 - DNA, 150 bp, Artificial Sequence
  derived and/or modified sequence
atgtcccggttcgtgcaggacctcagtaaggcaatgagtcaggatggggcaagtcagttccaggaagtgatcagacaggagttagagctttccgtgaagaaagaattggagaaaatcttgactactgcttcaagccacgagttcgaatag

SEQ ID NO: 167687 - DNA, 1527 bp, Artificial Sequence
  derived and/or modified sequence
atgagcagatttgtgcaggacctgagcaaggccatgagccaggatggagccagccagttccaggaggtgatccggcaggagctggagctgtctgtgaagaaggagctggagaagatcctgaccacagccagcagccatgaatttgagcacaccaagaaggacctggatggcttcaggaagctgttccaccgcttcctgcaggagaagggccccagcgtggactggggcaagatccagaggcccccagaagattccatccagccctatgagaagatcaaggcccggggcctgcctgacaacatcagctctgtgctgaacaagctggtggtggtgaagctgaatggaggcctgggcacctccatgggctgcaagggccccaagagcctcatcggcgtgagaaatgaaaacaccttcctggacctgactgtgcagcagatcgagcacctgaacaagacctacaacacagatgtgcccctggtgctgatgaacagcttcaacacagatgaggacaccaagaagatcctgcagaagtacaaccactgccgggtgaagatctacaccttcaaccagagccgctacccccgcatcaacaaggagagcctgctgcctgtggccaaggatgtgtcctacagcggagaaaatacagaggcctggtacccacctggccatggagacatctatgccagcttctacaacagcggcctgctggacaccttcatcggggagggcaaggagtacatctttgtgagcaacatcgacaacctgggcgccaccgtggacctgtacatcctgaaccacctgatgaacccccccaacgggaagagatgtgaatttgtgatggaggtgaccaacaagaccagggcagatgtgaagggcggcaccctgacccagtatgagggcaagctgcggctggtggagatcgcccaggtgcccaaggcccacgtggatgagttcaagtctgtgtccaagttcaagatcttcaacaccaacaacctgtggatcagcctggccgctgtgaagaggctgcaggagcagaatgccatcgacatggagatcatcgtgaatgccaagaccctggatggcggcctgaatgtcatccagctggagacagctgtgggcgccgccatcaagagctttgagaacagcctgggcatcaacgtgcccaggagccgcttcctgcctgtgaagaccaccagtgacctgctgctggtgatgagcaacctgtacagcctgaatgccggcagcctgaccatgtctgagaagcgggagttccccaccgtgcccctggtgaagctgggcagcagcttcaccaaggtgcaggactacctgcggagatttgagagcatcccagacatgctggagctggaccacctgactgtgtctggagatgtgaccttcggcaagaatgtgtccctgaagggcaccgtcatcatcatcgccaaccacggggacagaattgacatccccccaggagctgtgctggagaacaagatcgtgtctggcaacctgcgcatcctggaccactag

SEQ ID NO: 167688 - DNA, 1554 bp, Artificial Sequence
  derived and/or modified sequence
atgctgctgtacccagctggcttctcctttgccagcctgaagagtgacctgagcaaggccatgagccaggatggagccagccagttccaggaggtgatccggcaggagctggagctgtctgtgaagaaggagctggagaagatcctgaccacagccagcagccatgaatttgagcacaccaagaaggacctggatggcttcaggaagctgttccaccgcttcctgcaggagaagggccccagcgtggactggggcaagatccagaggcctcctgaggacagcatccagccctatgagaagatcaaggcccggggcctgcctgacaacatcagctctgtgctgaacaagctggtggtggtgaagctgaatggaggcctgggcacctccatgggctgcaagggccccaagagcctgattggagtgagaaatgaaaacaccttcctggacctgactgtgcagcagatcgagcacctgaacaagacctacaacacagatgtgcccctggtgctgatgaacagcttcaacacagatgaggacaccaagaagatcctgcagaagtacaaccactgccgggtgaagatctacaccttcaaccagagccgctacccccgcatcaacaaggagagcctgctgcctgtggccaaggatgtgtcctacagcggggagaacacagaggcctggtacccacctggccacggggacatctatgccagcttctacaacagcggcctgctggacaccttcatcggggagggcaaggagtacatctttgtgagcaacatcgacaacctgggcgccaccgtggacctgtacatcctgaaccacctgatgaaccccccaaatggcaagagatgtgaatttgtgatggaggtgaccaacaagaccagggcagatgtgaagggcggcaccctgacccagtatgagggcaagctgcggctggtggagatcgcccaggtgcccaaggcccacgtggatgagttcaagtctgtgtccaagttcaagatcttcaacaccaacaacctgtggatcagcctggccgctgtgaagaggctgcaggagcagaatgccatcgacatggagatcatcgtgaatgccaagaccctggatggcggcctgaatgtcatccagctggagacagctgtgggcgccgccatcaagagctttgagaacagcctgggcatcaacgtgcccaggagccgcttcctgcctgtgaagaccaccagtgacctgctgctggtgatgagcaacctgtacagcctgaatgccggcagcctgaccatgtctgagaagcgggagttccccaccgtgcccctggtgaagctgggcagcagcttcaccaaggtgcaggactacctgcggagatttgagagcatcccagacatgctggagctggaccacctgactgtgtctggagatgtgaccttcggcaagaatgtgtccctgaagggcaccgtcatcatcatcgccaaccacggggacagaattgacatccccccaggagctgtgctggagaacaagatcgtgtctggcaacctgcgcatcctggaccactag

SEQ ID NO: 167689 - DNA, 117 bp, Artificial Sequence
  derived and/or modified sequence
atgagccaggatggagccagccagttccaggaggtgatccggcaggagctggagctgtctgtgaagaaggagctggagaagatcctgaccacagccagcagccatgaatttgaatag

SEQ ID NO: 167690 - DNA, 150 bp, Artificial Sequence
  derived and/or modified sequence
atgagcagatttgtgcaggacctgagcaaggccatgagccaggatggagccagccagttccaggaggtgatccggcaggagctggagctgtctgtgaagaaggagctggagaagatcctgaccacagccagcagccatgaatttgaatag

SEQ ID NO: 167691 - DNA, 1527 bp, Artificial Sequence
  derived and/or modified sequence
atgagccggttcgtgcaggacctgagcaaggccatgagccaggacggtgcatcccagttccaggaagtgatccgccaggaacttgagttgtcagtcaaaaaagagctcgagaaaatcctgaccaccgcttcatctcatgagtttgaacatactaagaaagatctcgatggattcaggaagttatttcatcggtttttacaggagaaagggccatccgtcgactggggaaagatccagagacccccggaagattcaatccaaccttatgagaagatcaaagctcgcgggcttcctgataatatttcctcagtgctcaataagttagttgtcgtgaaactcaacggcggtttaggaacatccatgggttgcaaagggccgaagagcctaataggagttagaaatgaaaacacatttctggacttgacagtgcagcagattgaacatctcaataaaacctacaacacagacgttccgctcgtgctgatgaattcgttcaacaccgatgaggacaccaaaaaaatcttgcagaagtataaccactgtagagttaaaatttacactttcaaccagagccgatatccccggattaataaagagtccctcctgccagtcgccaaagacgttagctacagcggagagaataccgaagcttggtatccacccggccatggagacatctacgccagcttttacaatagcggactccttgatacctttattggagagggcaaggagtacatttttgttagcaacattgataatcttggggcaaccgtggacctttatatcctgaatcatcttatgaatccgccaaacggaaagcgatgcgagttcgtcatggaagtgacgaacaaaacccgcgccgacgtcaaaggcgggactctgacacagtacgagggcaaactacgcttagtggagatcgcccaagtccctaaggctcatgttgacgaatttaagagcgtcagtaagttcaaaatctttaatacaaataacctctggataagcctggccgctgtaaagcgacttcaggaacagaatgctatcgacatggagatcatcgtgaatgctaagacacttgatgggggactcaatgtgattcagttagagacggccgtcggggctgccattaaatcgtttgagaacagcctgggcatcaatgtcccgagaagtcgcttcctgccagtgaagacaaccagcgacctgctgctggtgatgtccaacttgtacagcctgaatgcgggcagtctcactatgtctgaaaagcgcgaattccccaccgtgcctcttgtcaagctgggctcctctttcactaaagtacaggattacctccggcggttcgagagtattccggatatgctcgagctcgaccatttgacggtgtctggcgatgttacgtttggaaaaaatgtgtccctcaaagggaccgtcattatcatcgctaaccatggggatcggattgacattcctccaggtgctgtgcttgagaataagattgtgtctggtaacctgcggattctggaccactag

SEQ ID NO: 167692 - DNA, 1554 bp, Artificial Sequence
  derived and/or modified sequence
atgctgctgtaccccgccggcttcagcttcgccagcctgaagagcgatttgtcgaaagcaatgagccaagatggtgcaagtcaattccaagaggtgatccggcaggagctcgagctgtcggtgaagaaggagctggaaaaaatccttacgacagcatcctcccacgagtttgagcacaccaagaaggacctggatggttttcgcaagctgtttcataggttcctccaagagaagggaccctctgttgactgggggaagatccagagaccacctgaggactccattcagccttacgagaagatcaaggcgaggggactgccggacaacatctcttccgtactaaacaaactggtggtcgtaaaacttaatggaggcttgggcacatccatggggtgcaaggggcccaagtctctcatcggagttaggaacgaaaacacctttctcgacctgactgtgcagcaaatcgagcacctcaacaagacatacaacaccgatgtgcccctggtgctgatgaattccttcaatacagatgaagatactaagaagatcctgcaaaagtacaatcactgccgcgtgaagatctacacattcaaccagtcccgatacccccggattaacaaggagagtttgctcccagtggccaaggatgtaagctacagtggagagaatacagaggcttggtacccaccaggacatggcgacatatacgcctctttttataactccggcctgttagacacctttataggcgaggggaaggagtatatattcgtgtctaacatcgacaatctgggggcgacagtggacctgtatatcctgaaccacctgatgaatccccctaatggcaaacgctgtgaattcgttatggaggtgaccaataagacaagagcagatgtgaaaggtgggacactgacgcaatatgaggggaagctcagactcgtggaaatcgctcaggtcccaaaagcccatgtggacgaattcaaatcagtttctaaatttaagattttcaacaccaataacctttggatatctctggccgctgtgaagagattgcaggaacagaacgccattgacatggaaataatcgtgaacgccaaaactctggacggcgggttgaatgtcatacagcttgagactgctgtgggtgctgctattaagtcttttgagaactcgctgggcatcaatgtgccgcgcagtcgctttttaccagtgaagaccacaagtgacctactgctggtcatgtccaatctgtatagcctcaatgcaggctcattgacaatgtccgaaaagcgagagtttcccacagtacctctcgtaaagctaggatccagcttcaccaaggtccaggactaccttcggcggtttgagtccatccctgacatgctggaacttgaccatctgaccgtgagcggcgacgttacttttggaaaaaacgtgtctctgaaaggaaccgtgattattatcgccaaccacggcgataggattgacatcccaccaggggcagttctggagaataaaatcgtcagcgggaatctaagaattctggaccattag

SEQ ID NO: 167693 - DNA, 117 bp, Artificial Sequence
  derived and/or modified sequence
atgagccaggacggcgccagccagttccaggaggtgatccggcaggagctggagctcagcgttaagaaagagttggagaaaatcctgacaactgcatcatctcacgaattcgagtag

SEQ ID NO: 167694 - DNA, 150 bp, Artificial Sequence
  derived and/or modified sequence
atgagccggttcgtgcaggacctgagcaaggccatgagccaggacggggcctcacagttccaggaggtgataagacaggaactggaactgagtgtgaaaaaggagttagagaagattctgactaccgcttctagtcacgagtttgaatag

SEQ ID NO: 167695 - DNA, 1527 bp, Artificial Sequence
  derived and/or modified sequence
atgtcacgatttgtccaggatctcagtaaagctatgtcacaggacggggcttcccagttccaagaagtcattcgacaagagcttgagctctctgtgaagaaggagcttgagaagatcctaacgactgcctcctctcacgagtttgagcacacgaagaaggatctggacggcttcaggaaattattccatcgcttcctgcaggagaaaggaccatcggtggactgggggaagatacagagaccccctgaggattctattcagccctacgagaagatcaaggccagaggcctgcccgacaacatcagctccgtgttaaataagctggtggtcgtgaagctcaacggtggactgggtacatcaatgggatgtaaaggtcccaaaagcttgattggagtaaggaatgaaaacacttttttggacctaactgtacagcaaattgaacacctgaacaaaacctataataccgatgttcctttagtcctcatgaactctttcaacacggacgaggatacaaagaaaatcttacaaaagtataaccattgcagagttaagatctacacatttaatcagagtagataccctcggatcaataaggagtctctgttgcccgttgctaaagatgtgtcctactcaggggagaatacagaggcctggtacccccctggccatggggatatttatgcctcattctataatagcggcctgttggataccttcataggagaaggaaaggagtacatcttcgtctctaatatcgacaacttgggcgcaaccgtggatctctatattttgaaccacctgatgaatcccccaaatggcaagaggtgtgaattcgtaatggaagtgacgaacaagacccgtgccgatgtgaagggcggaacactgacacagtatgaggggaagctgaggctggtagaaattgcccaggtgcctaaagcgcacgtcgacgagttcaaatcggtgtctaagttcaaaatttttaatactaacaacctgtggatcagcctagctgccgtaaagaggcttcaggagcagaatgctatcgacatggaaataatcgtgaatgctaagaccctggacgggggacttaatgttatccagcttgagacagctgtgggtgctgccattaagtcctttgagaattctttgggcataaacgtgcctagaagcaggttcctccccgtcaaaacaactagcgacttgctcctggtgatgtctaatctttactccctgaacgctgggtcacttacaatgtccgaaaagcgggagttccccaccgtccctcttgtcaagcttggatctagctttaccaaggtgcaagactacctgcggagatttgagtccatccccgacatgcttgagctagaccatctgaccgtgtctggcgacgtgactttcggtaaaaatgtgtctctcaaagggactgtaattatcatcgccaatcacggcgatcggattgacatcccaccgggagccgtgctggagaacaagattgtgagcgggaacctgcggatccttgaccactag

SEQ ID NO: 167696 - DNA, 1554 bp, Artificial Sequence
  derived and/or modified sequence
atgctcctttacccagctggtttctccttcgcctcactgaagagcgatctgtcaaaagcgatgagtcaagatggggcatcacagtttcaagaagtcattcgtcaggaattggagctgtctgttaagaaggaactagagaaaatactgacaactgcaagctctcatgaatttgagcataccaagaaggaccttgacgggttccgaaagctgtttcataggtttctgcaagagaaagggccaagtgtggactgggggaagattcagcgccctcccgaggactccatacagccctatgaaaagattaaagcaagaggcctgccagataacatttcctcagtgctgaacaaactggttgttgtgaagctgaacggcggactcgggacatcaatgggatgtaaggggccaaagtccctgatcggcgtgcgaaatgaaaatacgtttctagatctaacagtgcagcagattgaacatcttaacaaaacctacaataccgacgtgcccctcgtgctcatgaatagtttcaatactgacgaagataccaagaagattctgcaaaaatacaatcactgtcgggttaaaatttacaccttcaaccaaagccgataccctagaattaataaggagtctctactgccagttgcaaaggacgtcagctacagtggggagaataccgaggcctggtacccacccggacatggcgacatctacgcaagcttctacaacagcgggcttctcgatacttttatcggagagggtaaagaatatattttcgtgtcgaatattgacaatctgggcgcaacggtcgacctgtacatattgaatcacctgatgaaccctcccaacggcaagcgctgcgaattcgtaatggaagtcaccaataaaacacgggctgatgtaaagggagggaccctgacacagtacgagggtaaattaaggttagtggagatagcacaggtgccaaaagctcacgtcgatgagtttaagagcgtgtcaaaatttaaaatatttaatactaacaacttatggatttcactggccgcagtgaagcggctgcaggagcagaacgcaattgacatggagattattgttaacgcgaagacactggatggcggattgaacgtgattcagctggagaccgcggtgggggcagcgattaagagttttgaaaatagtctgggaattaacgtgccgagaagcaggttccttcccgtcaagaccactagcgacctgctcctcgtgatgagcaatctgtatagtctcaacgccggatcactgaccatgtccgagaaacgcgagtttccgactgtgccactcgtgaaactggggagtagttttacaaaagtacaggattacttgcggaggtttgaatcaatcccagacatgctggaactggaccacctgacggtgagtggggatgtcaccttcgggaaaaatgtatctctgaaggggacagttatcatcatcgctaaccacggtgaccggattgacataccaccaggggcagtgttagagaataagatcgtttctggaaatctcagaattcttgatcactag

SEQ ID NO: 167697 - DNA, 117 bp, Artificial Sequence
  derived and/or modified sequence
atgtcccaggatggtgcttcacaatttcaggaggttatacgacaggaattagagttgagcgttaaaaaagagctcgagaaaatacttacgactgcaagtagtcacgaattcgaatag

SEQ ID NO: 167698 - DNA, 150 bp, Artificial Sequence
  derived and/or modified sequence
atgtctcggtttgtgcaggatctgtccaaggctatgtcccaagatggggcatctcagtttcaggaggtgatcagacaggaactggagctgtcggtcaagaaagagctagagaaaattctgacaactgcgagttctcatgaatttgaatag

SEQ ID NO: 167699 - DNA, 2338 bp, Artificial Sequence
  derived and/or modified sequence
ggttttcgggggaggcgtttggggcctggacggcggcgcggggagggggcagctaggggcgcggcctgccagtgcctcctgcagtacagccctggagggcgtggggacttgggggcggtgaaatagccgctgtaggtccgcctctttcattgaagaaatttaagttcgtgtggttttaccttttccgggagtctccagctggccctcatttgtgtccggagctcaggagttcccaaaccgactcagtcgcaccaagtttccgtcttttggaattggggaaggagtttctttctttcttttcttttttcttgagccagttttaatcgctttgaataaatactcccttaagtagttaaatataggaggagaaagaatacatcggttgttaaagcaggagaggaagagagacctgccctgtagcgtgactcctctagaaaaaaaaaaaaaaagccggagtattttactaagcccctaaaatgtcgagatttgtacaagatcttagcaaagcaatgtctcaagatggtgcttctcagttccaagaagtcattcggcaagagctagaattatctgtgaagaaggaactagaaaaaatactcaccacagcatcatcacatgaatttgagcacaccaaaaaagacctggatggatttcggaagctatttcatagatttttgcaagaaaaggggccttctgtggattggggaaaaatccagagaccccctgaagattcgattcaaccctatgaaaagataaaggccaggggcttgcctgataatatatcttccgtgttgaacaaactagtggtggtgaaactcaatggtggtttgggaaccagcatgggctgcaaaggccctaaaagtctgattggtgtgaggaatgagaatacctttctggatctgactgttcagcaaattgaacatttgaataaaacctacaatacagatgttcctcttgttttaatgaactcttttaacacggatgaagataccaaaaaaatactacagaagtacaatcattgtcgtgtgaaaatctacactttcaatcaaagcaggtacccgaggattaataaagaatctttacttcctgtagcaaaggacgtgtcttactcaggggaaaatacagaagcttggtaccctccaggtcatggtgatatttacgccagtttctacaactctggattgcttgatacctttataggagaaggcaaagagtatatttttgtgtctaacatagataatctgggtgccacagtggatctgtatattcttaatcatctaatgaacccacccaatggaaaacgctgtgaatttgtcatggaagtcacaaataaaacacgtgcagatgtaaagggcgggacactcactcaatatgaaggcaaactgagactggtggaaattgctcaagtgccaaaagcacatgtagacgagttcaagtctgtatcaaagttcaaaatatttaatacaaacaacctatggatttctcttgcagcagttaaaagactgcaggagcaaaatgccattgacatggaaatcattgtgaatgcaaagactttggatggaggcctgaatgtcattcaattagaaactgcagtaggggctgccatcaaaagttttgagaattctctaggtattaatgtgccaaggagccgttttctgcctgtcaaaaccacatcagatctcttgctggtgatgtcaaacctctatagtcttaatgcaggatctctgacaatgagtgaaaagcgggaatttcctacagtgcccttggttaaattaggcagttcttttacgaaggttcaagattatctaagaagatttgaaagtataccagatatgcttgaattggatcacctcacagtttcaggagatgtgacatttggaaaaaatgtttcattaaagggaacggttatcatcattgcaaatcatggtgacagaattgatatcccacctggagcagtattagagaacaagattgtgtctggaaaccttcgcatcttggaccactgaaatgaaaaatactgtggacacttaaataatgggctagtttcttacaatgaaatgttctctaggattctaaaataggcaggtactttactatgttactgtaccctgcagtgttgatttttaaaatagagttttctgcagtatgcttttagtctaagaaaagcacagatggagcaatactttccttctttgaagagaatcccaaaagttagttcatcttaaagtgcaatattgtttaatcttaaaactgggcaactttggaagaacttttaacagaagcctcaatgatgatcactttgaattgcttgtgatttcaaaaataaagcagtgaagcaata

SEQ ID NO: 167700 - DNA, 2136 bp, Artificial Sequence
  derived and/or modified sequence
ctgtcggtccgtgcggcagggacatttccgcattgaaggggctgctccgaatggagggggaggggaggtgtttaggagaaagtaggggctgtgggtgtcgggagccggctgacgggtggacaagggggggttagcagctgggctgcgaccgttagggaggggctcaaggtgtgcatgtgtgagggaagagagagagagagaagggcgcctcagaggtgactttcagcctgcgagccttcttcccggggcgccataaacgcccccaatttcccagctgctaaaggaagaggaagatcttagcaaagcaatgtctcaagatggtgcttctcagttccaagaagtcattcggcaagagctagaattatctgtgaagaaggaactagaaaaaatactcaccacagcatcatcacatgaatttgagcacaccaaaaaagacctggatggatttcggaagctatttcatagatttttgcaagaaaaggggccttctgtggattggggaaaaatccagagaccccctgaagattcgattcaaccctatgaaaagataaaggccaggggcttgcctgataatatatcttccgtgttgaacaaactagtggtggtgaaactcaatggtggtttgggaaccagcatgggctgcaaaggccctaaaagtctgattggtgtgaggaatgagaatacctttctggatctgactgttcagcaaattgaacatttgaataaaacctacaatacagatgttcctcttgttttaatgaactcttttaacacggatgaagataccaaaaaaatactacagaagtacaatcattgtcgtgtgaaaatctacactttcaatcaaagcaggtacccgaggattaataaagaatctttacttcctgtagcaaaggacgtgtcttactcaggggaaaatacagaagcttggtaccctccaggtcatggtgatatttacgccagtttctacaactctggattgcttgatacctttataggagaaggcaaagagtatatttttgtgtctaacatagataatctgggtgccacagtggatctgtatattcttaatcatctaatgaacccacccaatggaaaacgctgtgaatttgtcatggaagtcacaaataaaacacgtgcagatgtaaagggcgggacactcactcaatatgaaggcaaactgagactggtggaaattgctcaagtgccaaaagcacatgtagacgagttcaagtctgtatcaaagttcaaaatatttaatacaaacaacctatggatttctcttgcagcagttaaaagactgcaggagcaaaatgccattgacatggaaatcattgtgaatgcaaagactttggatggaggcctgaatgtcattcaattagaaactgcagtaggggctgccatcaaaagttttgagaattctctaggtattaatgtgccaaggagccgttttctgcctgtcaaaaccacatcagatctcttgctggtgatgtcaaacctctatagtcttaatgcaggatctctgacaatgagtgaaaagcgggaatttcctacagtgcccttggttaaattaggcagttcttttacgaaggttcaagattatctaagaagatttgaaagtataccagatatgcttgaattggatcacctcacagtttcaggagatgtgacatttggaaaaaatgtttcattaaagggaacggttatcatcattgcaaatcatggtgacagaattgatatcccacctggagcagtattagagaacaagattgtgtctggaaaccttcgcatcttggaccactgaaatgaaaaatactgtggacacttaaataatgggctagtttcttacaatgaaatgttctctaggattctaaaataggcaggtactttactatgttactgtaccctgcagtgttgatttttaaaatagagttttctgcagtatgcttttagtctaagaaaagcacagatggagcaatactttccttctttgaagagaatcccaaaagttagttcatcttaaagtgcaatattgtttaatcttaaaactgggcaactttggaagaacttttaacagaagcctcaatgatgatcactttgaattgcttgtgatttcaaaaataaagcagtgaagcaata

SEQ ID NO: 167701 - DNA, 1955 bp, Artificial Sequence
  derived and/or modified sequence
cttttcgttgaattgtcatctgagctgccttgagctgctgggttgacgttccagacgcgtataatttatgctcctgtaccctgctgggtttagttttgcctccctgaaatcagatcttagcaaagcaatgtctcaagatggtgcttctcagttccaagaagtcattcggcaagagctagaattatctgtgaagaaggaactagaaaaaatactcaccacagcatcatcacatgaatttgagcacaccaaaaaagacctggatggatttcggaagctatttcatagatttttgcaagaaaaggggccttctgtggattggggaaaaatccagagaccccctgaagattcgattcaaccctatgaaaagataaaggccaggggcttgcctgataatatatcttccgtgttgaacaaactagtggtggtgaaactcaatggtggtttgggaaccagcatgggctgcaaaggccctaaaagtctgattggtgtgaggaatgagaatacctttctggatctgactgttcagcaaattgaacatttgaataaaacctacaatacagatgttcctcttgttttaatgaactcttttaacacggatgaagataccaaaaaaatactacagaagtacaatcattgtcgtgtgaaaatctacactttcaatcaaagcaggtacccgaggattaataaagaatctttacttcctgtagcaaaggacgtgtcttactcaggggaaaatacagaagcttggtaccctccaggtcatggtgatatttacgccagtttctacaactctggattgcttgatacctttataggagaaggcaaagagtatatttttgtgtctaacatagataatctgggtgccacagtggatctgtatattcttaatcatctaatgaacccacccaatggaaaacgctgtgaatttgtcatggaagtcacaaataaaacacgtgcagatgtaaagggcgggacactcactcaatatgaaggcaaactgagactggtggaaattgctcaagtgccaaaagcacatgtagacgagttcaagtctgtatcaaagttcaaaatatttaatacaaacaacctatggatttctcttgcagcagttaaaagactgcaggagcaaaatgccattgacatggaaatcattgtgaatgcaaagactttggatggaggcctgaatgtcattcaattagaaactgcagtaggggctgccatcaaaagttttgagaattctctaggtattaatgtgccaaggagccgttttctgcctgtcaaaaccacatcagatctcttgctggtgatgtcaaacctctatagtcttaatgcaggatctctgacaatgagtgaaaagcgggaatttcctacagtgcccttggttaaattaggcagttcttttacgaaggttcaagattatctaagaagatttgaaagtataccagatatgcttgaattggatcacctcacagtttcaggagatgtgacatttggaaaaaatgtttcattaaagggaacggttatcatcattgcaaatcatggtgacagaattgatatcccacctggagcagtattagagaacaagattgtgtctggaaaccttcgcatcttggaccactgaaatgaaaaatactgtggacacttaaataatgggctagtttcttacaatgaaatgttctctaggattctaaaataggcaggtactttactatgttactgtaccctgcagtgttgatttttaaaatagagttttctgcagtatgcttttagtctaagaaaagcacagatggagcaatactttccttctttgaagagaatcccaaaagttagttcatcttaaagtgcaatattgtttaatcttaaaactgggcaactttggaagaacttttaacagaagcctcaatgatgatcactttgaattgcttgtgatttcaaaaataaagcagtgaagcaat

SEQ ID NO: 167702 - DNA, 2057 bp, Artificial Sequence
  derived and/or modified sequence
gcattgaaggggctgctccgaatggagggggaggggaggtgtttaggagaaagtaggggctgtgggtgtcgggagccggctgacgggtggacaagggggggttagcagctgggctgcgaccgttagggaggggctcaaggtgtgcatgtgtgagggaagagagagagagagaagggcgcctcagaggtgactttcagcctgcgagccttcttcccggggcgccataaacgcccccaatttcccagctgctaaaggaagaggaaggtacctgtgcgtgcacgcagacgggaagggctggggaagcgggaggactgagaaaagccggatcttagcaaagcaatgtctcaagatggtgcttctcagttccaagaagtcattcggcaagagctagaattatctgtgaagaaggaactagaaaaaatactcaccacagcatcatcacatgaatttgagcacaccaaaaaagacctggatggatttcggaagctatttcatagatttttgcaagaaaaggggccttctgtggattggggaaaaatccagagaccccctgaagattcgattcaaccctatgaaaagataaaggccaggggcttgcctgataatatatcttccgtgttgaacaaactagtggtggtgaaactcaatggtggtttgggaaccagcatgggctgcaaaggccctaaaagtctgattggtgtgaggaatgagaatacctttctggatctgactgttcagcaaattgaacatttgaataaaacctacaatacagatgttcctcttgttttaatgaactcttttaacacggatgaagataccaaaaaaatactacagaagtacaatcattgtcgtgtgaaaatctacactttcaatcaaagcaggtacccgaggattaataaagaatctttacttcctgtagcaaaggacgtgtcttactcaggggaaaatacagaagcttggtaccctccaggtcatggtgatatttacgccagtttctacaactctggattgcttgatacctttataggagaaggcaaagagtatatttttgtgtctaacatagataatctgggtgccacagtggatctgtatattcttaatcatctaatgaacccacccaatggaaaacgctgtgaatttgtcatggaagtcacaaataaaacacgtgcagatgtaaagggcgggacactcactcaatatgaaggcaaactgagactggtggaaattgctcaagtgccaaaagcacatgtagacgagttcaagtctgtatcaaagttcaaaatatttaatacaaacaacctatggatttctcttgcagcagttaaaagactgcaggagcaaaatgccattgacatggaaatcattgtgaatgcaaagactttggatggaggcctgaatgtcattcaattagaaactgcagtaggggctgccatcaaaagttttgagaattctctaggtattaatgtgccaaggagccgttttctgcctgtcaaaaccacatcagatctcttgctggtgatgtcaaacctctatagtcttaatgcaggatctctgacaatgagtgaaaagcgggaatttcctacagtgcccttggttaaattaggcagttcttttacgaaggttcaagattatctaagaagatttgaaagtataccagatatgcttgaattggatcacctcacagtttcaggagatgtgacatttggaaaaaatgtttcattaaagggaacggttatcatcattgcaaatcatggtgacagaattgatatcccacctggagcagtattagagaacaagattgtgtctggaaaccttcgcatcttggaccactgaaatgaaaaatactgtggacacttaaataatgggctagtttcttacaatgaaatgttctctaggattctaaaataggcaggtactttactatgttactgtaccctgcagtgttgatttttaaaatagagttttctgcagtatgcttttagtctaagaaaagcacagatggagcaatactttccttctttgaagagaatcccaaaagttagttcatcttaaagtgc

SEQ ID NO: 167703 - DNA, 558 bp, Artificial Sequence
  derived and/or modified sequence
atttctcgagtttgatcctgtgtctgggattttttcaagtctgcctctgaaacttagacctgtgttgacagagagcacatgcaatattaaatatcttagcaaagcaatgtctcaagatggtgcttctcagttccaagaagtcattcggcaagagctagaattatctgtgaagaaggaactagaaaaaatactcaccacagcatcatcacatgaatttgagcacaccaaaaaagacctggatggatttcggaagctatttcatagatttttgcaagaaaaggggccttctgtggattggggaaaaatccagagaccccctgaagattcgattcaaccctatgaaaagataaaggccaggggcttgcctgataatatatcttccgtgttgaacaaactagtggtggtgaaactcaatggtggtttgggaaccagcatgggctgcaaaggccctaaaagtctgattggtgtgaggaatgagaatacctttctggatctgactgttcagcaaattgaacatttgaataaaacctacaatacagatgttcctcttgttttaat

SEQ ID NO: 167704 - DNA, 560 bp, Artificial Sequence
  derived and/or modified sequence
gttagtagtaccgtcgctttcctggatagtggctatcttagcaaagcaatgtctcaagatggtgcttctcagttccaagaagtcattcggcaagagctagaattatctgtgaagaaggaactagaaaaaatactcaccacagcatcatcacatgaatttgagcacaccaaaaaagacctggatggatttcggaagctatttcatagatttttgcaagaaaaggggccttctgtggattggggaaaaatccagagaccccctgaagattcgattcaaccctatgaaaagataaaggccaggggcttgcctgataatatatcttccgtgttgaacaaactagtggtggtgaaactcaatggtggtttgggaaccagcatgggctgcaaaggccctaaaagtctgattggtgtgaggaatgagaatacctttctggatctgactgttcagcaaattgaacatttgaataaaacctacaatacagatgttcctcttgttttaatgaactcttttaacacggatgaagataccaaaaaaatactacagaagtacaatcattgtcg

SEQ ID NO: 167705 - DNA, 505 bp, Artificial Sequence
  derived and/or modified sequence
agggggaggggaggtgtttaggagaaagtaggggctgtgggtgtcgggagccggctgacgggtggacaagggggggttagcagctgggctgcgaccgttagggaggggctcaaggtgtgcatgtgtgagggaagagagagagagagaagggcgcctcagaggtgactttcagcctgcgagccttcttcccggggcgccataaacgcccccaatttcccagctgctaaaggaagaggaaggtacctgtgcgtgcacgcagacgggaagggctggggaagcgggaggactgagaaaagccgggatctgcctctgtcacccaggctggagtgcggtggcgcgatctcgcctcactgcagcctctgcctcctcggctcaagatcttagcaaagcaatgtctcaagatggtgcttctcagttccaagaagtcattcggcaagagctagaattatctgtgaagaaggaactagaaaaaatactcaccacagcatcatcacatgaatttgag

SEQ ID NO: 167706 - DNA, 645 bp, Artificial Sequence
  derived and/or modified sequence
gcattgaaggggctgctccgaatggagggggaggggaggtgtttaggagaaagtaggggctgtgggtgtcgggagccggctgacgggtggacaagggggggttagcagctgggctgcgaccgttagggaggggctcaaggtgtgcatgtgtgagggaagagagagagagagaagggcgcctcagaggtgactttcagcctgcgagccttcttcccggggcgccataaacgcccccaatttcccagctgctaaaggaagaggaagtctgcctctgaaacttagacctgtgttgacagagagcacatgcaatattaaatatcttagcaaagcaatgtctcaagatggtgcttctcagttccaagaagtcattcggcaagagctagaattatctgtgaagaaggaactagaaaaaatactcaccacagcatcatcacatgaatttgagcacaccaaaaaagacctggatggatttcggaagctatttcatagatttttgcaagaaaaggggccttctgtggattggggaaaaatccagagaccccctgaagattcgattcaaccctatgaaaagataaaggccaggggcttgcctgataatatatcttccgtgttgaacaaactagtggtggtgaaactcaatggtgg

SEQ ID NO: 167707 - DNA, 553 bp, Artificial Sequence
  derived and/or modified sequence
ggcagggacatttccgcattgaaggggctgctccgaatggagggggaggggaggtgtttaggagaaagtaggggctgtgggtgtcgggagccggctgacgggtggacaagggggggttagcagctgggctgcgaccgttagggaggggctcaaggtgtgcatgtgtgagggaagagagagagagagaagggcgcctcagaggtgactttcagcctgcgagccttcttcccggggcgccataaacgcccccaatttcccagctgctaaaggaagaggaagtagttaaatataggaggagaaagaatacatcggttgttaaagcaggagaggaagagagacctgccctgtagcgtgactcctctagaaaaaaaaaaaaaaagccggagtattttactaagcccctaaaatgtcgagatttgtacaagatcttagcaaagcaatgtctcaagatggtgcttctcagttccaagaagtcattcggcaagagctagaattatctgtgaagaaggaactagaaaaaatactcaccacagcatcatcacatgaatttgag

SEQ ID NO: 167708 - DNA, 784 bp, Artificial Sequence
  derived and/or modified sequence
ctccagctggccctcatttgtgtccggagctcaggagttcccaaaccgactcagtcgcaccaagtttccgtcttttggaattggggaaggagtttctttctttcttttcttttttcttgagccagttttaatcgctttgaataaatactcccttaagtagttaaatataggaggagaaagaatacatcggttgttaaagcaggagaggaagagagacctgccctgtagcgtgactcctctagaaaaaaaaaaaaaaagccggagtattttactaagcccctaaaatgtcgagatttgtacaaggtacctgtgcgtgcacgcagacgggaagggctggggaagcgggaggactgagaaaagccggatcttagcaaagcaatgtctcaagatggtgcttctcagttccaagaagtcattcggcaagagctagaattatctgtgaagaaggaactagaaaaaatactcaccacagcatcatcacatgaatttgagcacaccaaaaaagacctggatggatttcggaagctatttcatagatttttgcaagaaaaggggccttctgtggattggggaaaaatccagagaccccctgaagattcgattcaaccctatgaaaagataaaggccaggggcttgcctgataatatatcttccgtgttgaacaaactagtggtggtgaaactcaatggtggtttgggaaccagcatgggctgcaaaggccctaaaagtctgattggtgtgaggaatgagaatacctttctggatctgactgttcagcaaattg

SEQ ID NO: 167709 - DNA, 753 bp, Artificial Sequence
  derived and/or modified sequence
gctattctgctgttgggtcaccttctgcctacttgtgacattccttctgctcttccttgctccagggattgttccagggcccccagttattctaaatggatatcttagcaaagcaatgtctcaagatggtgcttctcagttccaagaagtcattcggcaagagctagaattatctgtgaagaaggaactagaaaaaatactcaccacagcatcatcacatgaatttgagcacaccaaaaaagacctggatggatttcggaagctatttcatagatttttgcaagaaaaggggccttctgtggattggggaaaaatccagagaccccctgaagattcgattcaaccctatgaaaagataaaggccaggggcttgcctgataatatatcttccgtgttgaacaaactagtggtggtgaaactcaatggtggtttgggaaccagcatgggctgcaaaggccctaaaagtctgattggtgtgaggaatgagaatacctttctggatctgactgttcagcaaattgaacatttgaataaaacctacaatacagatgttcctcttgttttaatgaactcttttaacacggatgaagataccaaaaaaatactacagaagtacaatcattgtcgtgtgaaaatctacactttcaatcaaagcaggtacccgaggattaataaagaatctttacttcctgtagcaaaggacgtgtcttactcaggggaaaatacagaagcttggtaccctccaggtcatgg

SEQ ID NO: 167710 - protein, 184 aa, Artificial Sequence
  derived and/or modified sequence
MAPLLPIRTLPLILILLALLSPGAADFNISSLSGLLSPALTESLLVALPPCHLTGGNATLMVRRANDSKVVTSSFVVPPCRGRRELVSVVDSGAGFTVTRLSAYQVTNLVPGTKFYISYLVKKGTATESSREIPMSTLPRRNMESIGLGMARTGGMVVITVLLSVAMFLLVLGFIIALALGSRK

SEQ ID NO: 167711 - DNA, 555 bp, Artificial Sequence
  derived and/or modified sequence
atggcccccctgctgcccatcagaaccctgcccctgatcctgatcctgctggccctgctgagccccggcgccgccgacttcaacatcagcagcctgagcggcctgctgagccccgccctgaccgagagcctgctggtggccctgcccccctgccacctgaccggcggcaacgccaccctgatggtgagaagagccaacgacagcaaggtggtgaccagcagcttcgtggtgcccccctgcagaggcagaagagagctggtgagcgtggtggacagcggcgccggcttcaccgtgaccagactgagcgcctaccaggtgaccaacctggtgcccggcaccaagttctacatcagctacctggtgaagaagggcaccgccaccgagagcagcagagagatccccatgagcaccctgcccagaagaaacatggagagcatcggcctgggcatggccagaaccggcggcatggtggtgatcaccgtgctgctgagcgtggccatgttcctgctggtgctgggcttcatcatcgccctggccctgggcagcagaaagtag

SEQ ID NO: 167712 - DNA, 555 bp, Artificial Sequence
  derived and/or modified sequence
atggcccccctgctgcccataagaaccctccctctgattttgatcctgctggctcttctatctccaggcgcagcagatttcaacatcagtagcctgtcagggcttttaagtcctgcccttacagagagcctcctggtagctctgcccccgtgccacctgactgggggtaacgcaaccctcatggtcagaagagccaacgactctaaggtggttacaagcagttttgtggtacctccctgcagaggacgcagagaactggtgtcagtggtggatagtggagctggatttaccgtgactagactgtccgcgtaccaggtcactaatttagtacctggtacaaaattttacatcagttatctggtgaagaagggaaccgctaccgaatcaagccgggagatccctatgtccaccctgccacgccgcaacatggagtctatcggccttggtatggccaggacaggaggaatggtcgttattaccgtgctgctctccgtggccatgttcttgttagtgctggggtttataattgccctggccctcgggtctcggaagtag

SEQ ID NO: 167713 - DNA, 555 bp, Artificial Sequence
  derived and/or modified sequence
atggcccccctgctgcccatccgcaccctgcccctcatcctgatcctgctggccctgctgagccctggagctgctgacttcaacatcagcagcctgagcggcctgctgagccctgccctgacagagagcctgctggtggccctgcccccctgccacctgaccggcggcaatgccaccctgatggtgagaagagccaatgacagcaaggtggtgaccagcagctttgtggtgcccccctgccggggcagaagagagctggtgtctgtggtggacagcggggccggcttcaccgtgacccggctgagcgcctaccaggtgaccaacctggtgcccggcaccaagttctacatctcctacctggtgaagaagggcacagccacagagagcagccgggagatccccatgagcaccctgcccaggaggaacatggagagcatcggcctgggcatggccaggactggaggcatggtggtgatcaccgtgctgctgtctgtggccatgttcctgctggtgctgggcttcatcatcgccctggccctgggcagcaggaagtag

SEQ ID NO: 167714 - DNA, 555 bp, Artificial Sequence
  derived and/or modified sequence
atggcccccctgctgcccatccggaccctgcccctgatcctgatcttgctggctctactgtcccccggcgcagccgatttcaacatcagcagcttgtcaggactgctgagtccagccctgactgagtcactgttagtcgcgctgcctccctgccacctgacggggggtaatgccaccctgatggtccgacgtgccaatgattctaaggtcgtgacaagctcttttgtcgtgcccccttgtcgaggacggcgcgagttggtgtctgtcgtggatagcggagctggcttcaccgtgaccagactctctgcatatcaggttacaaaccttgtgcccggcaccaaattctacatttcatacctcgtcaagaaagggacggctacagaatcttcaagggaaattcccatgtctaccctgccccggagaaacatggagtcaataggactcggcatggccaggaccggaggtatggtggtcatcaccgttctcctgtccgtcgcaatgttcctcctagtgcttggtttcatcatcgctctcgcactgggttcccgaaaatag

SEQ ID NO: 167715 - DNA, 555 bp, Artificial Sequence
  derived and/or modified sequence
atggctcctttgctgcccataaggaccttgcctctaatcttgatcctgctcgccctgctctcacctggcgctgcagacttcaacattagttcattgagtgggcttttgtcacctgctttgacagagagcctgctggttgcacttcccccatgccaccttaccggagggaatgctacactgatggtgagacgagctaacgacagcaaggtcgtcactagttcattcgtggtgccaccctgccggggacgcagggagttagtgtccgtagtagattcaggggctggttttacagtgacaagactgtctgcctatcaagttaccaatctcgtccctggaacaaagttttatatctcgtatctggttaaaaagggcacagcaacagagagcagtagggagattcctatgtctaccctccctagacgtaacatggagtctataggtttggggatggcgcgaactgggggtatggtcgtgattactgtgcttcttagtgtcgctatgttcctcctggtgctaggcttcatcatcgccctcgccctgggatctcgaaagtag

SEQ ID NO: 167716 - DNA, 916 bp, Artificial Sequence
  derived and/or modified sequence
agcctgccagcacctattccacctcccagcccagcatggcacccctgctgcccatccggaccttgcccttgatcctgattctgctggctctgctgtccccaggggctgcagacttcaacatctcaagcctctctggtctgctgtccccggcgctaacggagagcctgctggttgccttgcccccctgtcacctcacaggaggcaatgccacactgatggtccggagagccaatgacagcaaagtggtgacgtccagctttgtggtgcctccgtgccgtgggcgcagggaactggtgagtgtggtggacagtggtgctggcttcacagtcactcggctcagtgcataccaggtgacaaacctcgtgccaggaaccaaattctacatttcctacctagtgaagaaggggacagccactgagtccagcagagagatcccaatgtccacactccctcgaaggaacatggaatccattgggctgggtatggcccgcacagggggcatggtggtcatcacggtgctgctctctgtcgccatgttcctgctggtgctgggcttcatcattgccctggcactgggctcccgcaagtaaggaggtctgcccggagcagcagcttctccaggaagcccagggcaccatccagctccccagcccacctgctcccaggccccaggcctgtggctcccttggtgccctcgcctcctcctcctgccctcctctcccctagagccctctcctccctctgtccctctccttgcccccagtgcctcaccttccaacactccattattcctctcaccccactcctgtcagagttgactttcctcccattttaccactttaaacacccccataacaattcccccatccttcagtgaactaagtccctataataaaggctgaggctgcatctgcca

SEQ ID NO: 167717 - protein, 255 aa, Artificial Sequence
  derived and/or modified sequence
MDDREDLVYQAKLAEQAERYDEMVESMKKVAGMDVELTVEERNLLSVAYKNVIGARRASWRIISSIEQKEENKGGEDKLKMIREYRQMVETELKLICCDILDVLDKHLIPAANTGESKVFYYKMKGDYHRYLAEFATGNDRKEAAENSLVAYKAASDIAMTELPPTHPIRLGLALNFSVFYYEILNSPDRACRLAKAAFDDAIAELDTLSEESYKDSTLIMQLLRDNLTLWTSDMQGDGEEQNKEALQDVEDENQ

SEQ ID NO: 167718 - protein, 233 aa, Artificial Sequence
  derived and/or modified sequence
MVESMKKVAGMDVELTVEERNLLSVAYKNVIGARRASWRIISSIEQKEENKGGEDKLKMIREYRQMVETELKLICCDILDVLDKHLIPAANTGESKVFYYKMKGDYHRYLAEFATGNDRKEAAENSLVAYKAASDIAMTELPPTHPIRLGLALNFSVFYYEILNSPDRACRLAKAAFDDAIAELDTLSEESYKDSTLIMQLLRDNLTLWTSDMQGDGEEQNKEALQDVEDENQ

SEQ ID NO: 167719 - DNA, 768 bp, Artificial Sequence
  derived and/or modified sequence
atggacgacagagaggacctggtgtaccaggccaagctggccgagcaggccgagagatacgacgagatggtggagagcatgaagaaggtggccggcatggacgtggagctgaccgtggaggagagaaacctgctgagcgtggcctacaagaacgtgatcggcgccagaagagccagctggagaatcatcagcagcatcgagcagaaggaggagaacaagggcggcgaggacaagctgaagatgatcagagagtacagacagatggtggagaccgagctgaagctgatctgctgcgacatcctggacgtgctggacaagcacctgatccccgccgccaacaccggcgagagcaaggtgttctactacaagatgaagggcgactaccacagatacctggccgagttcgccaccggcaacgacagaaaggaggccgccgagaacagcctggtggcctacaaggccgccagcgacatcgccatgaccgagctgccccccacccaccccatcagactgggcctggccctgaacttcagcgtgttctactacgagatcctgaacagccccgacagagcctgcagactggccaaggccgccttcgacgacgccatcgccgagctggacaccctgagcgaggagagctacaaggacagcaccctgatcatgcagctgctgagagacaacctgaccctgtggaccagcgacatgcagggcgacggcgaggagcagaacaaggaggccctgcaggacgtggaggacgagaaccagtag

SEQ ID NO: 167720 - DNA, 702 bp, Artificial Sequence
  derived and/or modified sequence
atggtggagagcatgaagaaggtggccggcatggacgtggagctgaccgtggaggagagaaacctgctgagcgtggcctacaagaacgtgatcggcgccagaagagccagctggagaatcatcagcagcatcgagcagaaggaggagaacaagggcggcgaggacaagctgaagatgatcagagagtacagacagatggtggagaccgagctgaagctgatctgctgcgacatcctggacgtgctggacaagcacctgatccccgccgccaacaccggcgagagcaaggtgttctactacaagatgaagggcgactaccacagatacctggccgagttcgccaccggcaacgacagaaaggaggccgccgagaacagcctggtggcctacaaggccgccagcgacatcgccatgaccgagctgccccccacccaccccatcagactgggcctggccctgaacttcagcgtgttctactacgagatcctgaacagccccgacagagcctgcagactggccaaggccgccttcgacgacgccatcgccgagctggacaccctgagcgaggagagctacaaggacagcaccctgatcatgcagctgctgagagacaacctgaccctgtggaccagcgacatgcagggcgacggcgaggagcagaacaaggaggccctgcaggacgtggaggacgagaaccagtag

SEQ ID NO: 167721 - DNA, 768 bp, Artificial Sequence
  derived and/or modified sequence
atggacgacagggaggaccttgtgtatcaggccaagcttgcagaacaggctgaacgctacgatgagatggtggaatcaatgaagaaggtcgccggtatggacgtggagctgactgttgaggagagaaatctgctgagtgtggcttataaaaatgtgatcggggcacgcagggccagctggcggattatttcctctattgaacagaaagaagagaacaaaggcggcgaagacaaactgaaaatgatccgagaatatcgacaaatggtagagacggagttgaaactgatttgctgtgacatcctagatgtcttggataagcacctcatcccagctgcgaacaccggtgaatcaaaagtcttctactataaaatgaagggagactatcatcgctatctagctgaattcgcaactggcaacgaccgcaaggaagcagccgagaacagcctcgtcgcctacaaagcagctagcgacatagccatgacggaactgccccctacccatcccataaggcttggcctggctttgaacttctcagttttctactatgaaatcctgaacagcccggacagggcctgccgcctggctaaagccgcatttgacgacgcaatagctgagctcgacactctctccgaggaaagctacaaagacagtactttaattatgcagctgttgcgcgataacttaactctatggaccagcgacatgcagggtgatggtgaggaacagaacaaggaagcccttcaagatgtggaggatgagaatcagtag

SEQ ID NO: 167722 - DNA, 702 bp, Artificial Sequence
  derived and/or modified sequence
atggtggaatctatgaaaaaggtagccggcatggatgttgaactaaccgtggaagagagaaacttgctaagcgtagcttataagaatgtgataggtgctcgccgggcatcatggcgaatcatcagcagtatagagcagaaagaggagaacaaggggggagaggataaactaaaaatgataagggaatatcggcagatggtcgaaaccgagctgaaactgatatgttgtgacattttagacgtgcttgataaacatctgattcccgcagctaatacaggagagtcaaaggttttctactataagatgaaaggcgactaccacaggtacttagccgagttcgccacagggaacgacagaaaggaagccgcagagaattcgctcgttgcatacaaagcagcctctgacatcgccatgaccgagctaccccccacacaccctatcagactgggcctggccctaaacttctctgtgttctactacgagattcttaattctcccgatcgcgcttgcaggctagccaaggctgccttcgatgacgcaatagcagagctcgatacattgagcgaagagtcatacaaggactccacgctaatcatgcagcttttgagagacaaccttacgctatggacaagcgatatgcagggtgatggggaggagcagaataaagaagcgctgcaagatgttgaagacgagaaccagtag

SEQ ID NO: 167723 - DNA, 768 bp, Artificial Sequence
  derived and/or modified sequence
atggatgaccgggaggacctggtgtaccaggccaagctggccgagcaggccgagagatatgatgagatggtggagagcatgaagaaggtggccggcatggatgtggagctgactgtggaggagaggaacctgctgtctgtggcctacaagaatgtgattggagcccggcgggcctcctggaggatcatcagcagcattgagcagaaggaggagaacaagggcggggaggacaagctgaagatgatccgggagtaccggcagatggtggagacagagctgaagctgatctgctgtgacatcctggatgtgctggacaagcacctgatcccagctgccaacacaggagagagcaaggtgttctactacaagatgaagggggactaccaccgctacctggccgagtttgccactggaaatgacaggaaggaggccgctgagaacagcctggtggcctacaaggccgccagtgacatcgccatgacagagctgccccccacccaccccatccggctgggcctggccctgaacttcagcgtcttctactatgagatcctgaacagcccagaccgggcctgccgcctggccaaggccgcctttgatgatgccatcgccgagctggacaccctgtctgaggagagctacaaggacagcaccctcatcatgcagctgctgcgggacaacctgaccctgtggaccagtgacatgcagggagatggagaggagcagaacaaggaggccctgcaggatgtggaggatgagaaccagtag

SEQ ID NO: 167724 - DNA, 702 bp, Artificial Sequence
  derived and/or modified sequence
atggtggagagcatgaagaaggtggccggcatggatgtggagctgactgtggaggagaggaacctgctgtctgtggcctacaagaatgtgattggagcccggcgggcctcctggaggatcatcagcagcattgagcagaaggaggagaacaagggcggggaggacaagctgaagatgatccgggagtaccggcagatggtggagacagagctgaagctgatctgctgtgacatcctggatgtgctggacaagcacctgatcccagctgccaacacaggagagagcaaggtgttctactacaagatgaagggggactaccaccgctacctggccgagtttgccactggaaatgacaggaaggaggccgctgagaacagcctggtggcctacaaggccgccagtgacatcgccatgacagagctgccccccacccaccccatccggctgggcctggccctgaacttcagcgtcttctactatgagatcctgaacagcccagaccgggcctgccgcctggccaaggccgcctttgatgatgccatcgccgagctggacaccctgtctgaggagagctacaaggacagcaccctcatcatgcagctgctgcgggacaacctgaccctgtggaccagtgacatgcagggagatggagaggagcagaacaaggaggccctgcaggatgtggaggatgagaaccagtag

SEQ ID NO: 167725 - DNA, 768 bp, Artificial Sequence
  derived and/or modified sequence
atggacgaccgggaggacctggtgtaccaggccaagctggccgagcaagcggagaggtacgatgaaatggtcgagtctatgaaaaaggtagctggaatggacgttgagctgactgtcgaggaaagaaatctgctttcagtcgcatataaaaatgttattggtgcccggagggcgtcctggcggataatcagttccatcgagcaaaaagaggaaaataagggaggagaggacaaactcaaaatgatcagagaataccgccagatggtggaaacagaactgaaactgatctgttgcgacatcctggacgtgctagataaacatctgatacctgccgcgaacaccggcgagagcaaggtattctactataagatgaaaggcgattatcaccgatatctcgccgagttcgccaccggcaacgacagaaaagaggcagcagaaaattcgttagtcgcctataaggcagcatccgatatagcgatgactgaactgccgcccacccaccctataagactcggcctcgctctcaacttttcagtattctactacgaaatacttaactcacccgacagagcttgtcgactcgccaaggccgccttcgacgacgccatcgctgagctcgatacgttgtccgaagagtcatataaggatagtactttgatcatgcaacttctgagagacaatctgactctgtggacttctgacatgcagggagacggggaagagcagaataaggaagcattgcaagatgtggaggacgagaaccagtag

SEQ ID NO: 167726 - DNA, 702 bp, Artificial Sequence
  derived and/or modified sequence
atggtggagagcatgaagaaggtggccggcatggacgtggagctgactgtggaggagcgtaacctgctcagcgtcgcctataagaatgtgattggggcacggcgagcatcttggagaatcattagtagcatcgagcaaaaagaagagaacaaaggaggggaggacaagttgaagatgatccgcgagtacaggcaaatggtcgagactgaactgaagcttatctgctgcgacattctcgacgtcctggataagcatctgattccagccgctaacaccggtgagtctaaagttttctattacaagatgaagggtgattaccatcggtacctggcagagtttgctactgggaacgacagaaaggaagccgccgaaaattctctagtggcttacaaagctgcatcggatatagctatgaccgagcttccaccaacccatcccatcagactgggactggccctcaatttcagcgtgttttattacgagatcctgaacagcccagatcgggcttgtaggttagctaaggcagccttcgatgatgctatcgctgagttggatacccttagtgaggaaagctacaaagactccacccttatcatgcagctgctgcgagacaatctgacactgtggacatccgacatgcaaggtgacggggaggaacaaaataaagaagcactccaggatgttgaagatgagaatcagtag

SEQ ID NO: 167727 - DNA, 768 bp, Artificial Sequence
  derived and/or modified sequence
atggacgaccgagaggacttagtttaccaggccaagctggccgaacaggcagagcggtacgatgaaatggtcgaatccatgaagaaggtggccggaatggacgtggaattaactgtggaggagcgtaacttattaagtgttgcatacaagaacgtgatcggggctcgtcgcgcttcatggcgaatcatctcgtcaatcgagcagaaggaggaaaataagggcggtgaggataagttgaagatgatccgggagtataggcagatggttgagaccgagctgaagcttatatgctgcgacattttggatgtgttggacaaacatcttatcccggctgctaataccggggagtctaaagtcttctactacaaaatgaagggtgactaccacagatacctggctgaattcgcgactggaaatgatcgcaaggaagctgctgagaactcactcgtcgcttacaaagcagcatctgatatcgccatgactgagctgcccccaacccacccaattcgattaggcctggctctgaacttttcagtgttctactatgagatcctgaactctcccgatagggcatgcaggttggccaaggcggcattcgatgacgccatcgctgagctggatactcttagtgaagagtcttataaagatagcactctgataatgcagttattgcgcgacaatctgactctgtggacctccgatatgcagggcgacggcgaagaacaaaacaaggaggcactgcaggatgtcgaggatgaaaaccagtag

SEQ ID NO: 167728 - DNA, 702 bp, Artificial Sequence
  derived and/or modified sequence
atggtggaatcaatgaagaaggtcgctggcatggatgtcgagttgacagttgaggagaggaatttactctcggtggcctataagaatgttattggcgcaagaagggctagctggcggattatttccagcatcgagcagaaggaggagaataagggcggtgaagataaactgaaaatgattagagagtatagacagatggtcgaaacagaactgaaactgatctgctgcgatatactcgacgttctggacaagcatctcatccccgctgcaaacacaggggagtctaaggtgttctattataagatgaaaggggactatcatcgttacttagccgagtttgctacagggaacgaccgcaaggaagcagccgagaatagtctggtggcctacaaggcagcctccgatattgcgatgactgagcttcccccaacacatcccatcaggcttggtctggcacttaattttagcgttttctattatgagattcttaacagtcccgatcgggcatgtcgcctggcgaaagctgccttcgatgacgcgattgcagagctggataccctgtccgaagagtcctacaaagacagcactctcatcatgcagctgttgagagataacctgacgctgtggaccagtgacatgcaaggcgacggcgaggaacagaataaagaggccctccaggatgtggaggatgagaatcagtag

SEQ ID NO: 167729 - DNA, 2044 bp, Artificial Sequence
  derived and/or modified sequence
ccgccatttttgctgcccggacgcggagcgagaggctgagagagtcggagacactatccgcttccatccgtcgcgcagaccctgccggagccgctgccgctatggatgatcgagaggatctggtgtaccaggcgaagctggccgagcaggctgagcgatacgacgaaatggtggagtcaatgaagaaagtagcagggatggatgtggagctgacagttgaagaaagaaacctcctatctgttgcatataagaatgtgattggagctagaagagcctcctggagaataatcagcagcattgaacagaaagaagaaaacaagggaggagaagacaagctaaaaatgattcgggaatatcggcaaatggttgagactgagctaaagttaatctgttgtgacattctggatgtactggacaaacacctcattccagcagctaacactggcgagtccaaggttttctattataaaatgaaaggggactaccacaggtatctggcagaatttgccacaggaaacgacaggaaggaggctgcggagaacagcctagtggcttataaagctgctagtgatattgcaatgacagaacttccaccaacgcatcctattcgcttaggtcttgctctcaatttttccgtattctactacgaaattcttaattcccctgaccgtgcctgcaggttggcaaaagcagcttttgatgatgcaattgcagaactggatacgctgagtgaagaaagctataaggactctacacttatcatgcagttgttacgtgataatctgacactatggacttcagacatgcagggtgacggtgaagagcagaataaagaagcgctgcaggacgtggaagacgaaaatcagtgagacataagccaacaagagaaaccatctctgaccaccccctcctccccatcccaccctttggaaactccccattgtcactgagaaccaccaaatctgacttttacatttggtctcagaatttaggttcctgccctgttggttttttttttttttttttaaacagttttcaaaagttcttaaaggcaagagtgaatttctgtggattttactggtcccagcttttaggttctttaagacactaacaggactacatagaggctttttcagcattactgtgtcgtctccgtgccagatgtggcaagatcaccattagcaaatggaaattacatttgaaagccattagacttataggtgatgcaagcatctaagagagaggttaatcacactatagaggcataagtggtatcagttttcatttttctaattgtttaaactgtgttttataccagtgtttgcaagtaattgggtgttagcttgagatggttaaaggtggtttggggagggacttcgttgtaatggttttgctgtaaaaaatgtttccaactccgctgaaatgttgctgaaaagcatggtgctggtaacagttcaacaatccgtggctgctcattcttgcctactttactctcccactgaagcaggttagcgttgaaggtggtatggaaaagcctgcatgcctgttcaattcttttgtttcttctccttccccctccccctacctccttcccctcactcctcccctccttcgctcgctcaacctcttttgttcagtatgtgtaacttgaagctaatttgtactactggatatctgactggagccacagatacagaatctgtattgttcttactgaaacacagcatggaattaacattaaacttaaataaaacaaacctaaattaaaaatgccaaatatcgcgcctccatcctttatacttctaaaataaaatctctagtccaaacacactgacagtattatgtttgcctgaatgtgaaacattcctccttttttcttccataaataatttgtttgcttcccaaagatgtatgttttggaaaaaaattgcctgtagtctggttgtgaagaacactgagtcagttgatggtgtgtcttgtcctccagaccaggcagcaacatggtatttattttaatcattaaagtacaacatgagtagtacaa

SEQ ID NO: 167730 - DNA, 1295 bp, Artificial Sequence
  derived and/or modified sequence
gctgcccggacgcggagcgagaggctgagagagtcggagacactatccgcttccatccgtcgcgcaggctgagcgatacgacgaaatggtggagtcaatgaagaaagtagcagggatggatgtggagctgacagttgaagaaagaaacctcctatctgttgcatataagaatgtgattggagctagaagagcctcctggagaataatcagcagcattgaacagaaagaagaaaacaagggaggagaagacaagctaaaaatgattcgggaatatcggcaaatggttgagactgagctaaagttaatctgttgtgacattctggatgtactggacaaacacctcattccagcagctaacactggcgagtccaaggttttctattataaaatgaaaggggactaccacaggtatctggcagaatttgccacaggaaacgacaggaaggaggctgcggagaacagcctagtggcttataaagctgctagtgatattgcaatgacagaacttccaccaacgcatcctattcgcttaggtcttgctctcaatttttccgtattctactacgaaattcttaattcccctgaccgtgcctgcaggttggcaaaagcagcttttgatgatgcaattgcagaactggatacgctgagtgaagaaagctataaggactctacacttatcatgcagttgttacgtgataatctgacactatggacttcagacatgcagggtgacggtgaagagcagaataaagaagcgctgcaggacgtggaagacgaaaatcagtgagacataagccaacaagagaaaccatctctgaccaccccctcctccccatcccaccctttggaaactccccattgtcactgagaaccaccaaatctgacttttacatttggtctcagaatttaggttcctgccctgttggttttttttttttttttttaaacagttttcaaaagttcttaaaggcaagagtgaatttctgtggattttactggtcccagcttttaggttctttaagacactaacaggactacatagaggctttttcagcattactgtgtcgtctccgtgccagatgtggcaagatcaccattagcaaatggaaattacatttgaaagccattagacttataggtgatgcaagcatctaagagagaggttaatcacactatagaggcataagtggtatcagttttcatttttctaattgtttaaactgtgttttataccagtgtttgcaagtaattgggtgttagcttgagatggttaaaggtggtttggggagggactt

SEQ ID NO: 167731 - protein, 158 aa, Artificial Sequence
  derived and/or modified sequence
MSHGKGTDMLPEIAAAVGFLSSLLRTRGCVSEQRLKVFSGALQEALTEHYKHHWFPEKPSKGSGYRCIRINHKMDPIISRVASQIGLSQPQLHQLLPSELTLWVDPYEVSYRIGEDGSICVLYEEAPLAASCGLLTCKNQVLLGRSSPSKNYVMAVSS

SEQ ID NO: 167732 - DNA, 477 bp, Artificial Sequence
  derived and/or modified sequence
atgtctcatggtaagggaaccgacatgcttcccgagatcgccgcagcagtcggctttctgtcttccctgttgcgaactcgaggctgcgtgtcagagcagcgtctcaaggtattcagcggggcactccaagaagccctgacagagcactacaagcaccactggttccccgagaagccttcaaaagggtcaggttaccgctgtattcggatcaatcacaaaatggatcctatcatcagtcgggtcgccagtcaaatcggactctctcagccacagctgcaccagctgctcccaagcgagttgacactgtgggtcgatccgtatgaggtgtcctatcgcatcggcgaagatggttcaatctgcgtcctgtacgaggaggcaccactggccgcctcttgtggactcctgacatgtaagaatcaggtactgttgggcagatcctctcccagcaaaaactatgtaatggccgtgtcctcgtag

SEQ ID NO: 167733 - DNA, 477 bp, Artificial Sequence
  derived and/or modified sequence
atgagccatggaaaaggaacagacatgctgcctgagattgctgctgctgtgggcttcctgagcagcctgctgcggacccggggctgtgtgtctgagcagaggctgaaggtgttttctggggccctgcaggaggccctgacagagcactacaagcaccactggttccctgagaagcccagcaaaggaagtggctaccgctgcatccgcatcaaccacaagatggaccccatcatcagccgggtggccagccagatcggcctgagccagccccagctgcaccagctgctgcccagcgagctgaccctgtgggtggacccctatgaggtgtcctacagaattggagaagatggcagcatctgtgtgctgtatgaggaggcccccctggccgccagctgtggcctgctgacctgcaagaaccaggtgctgctgggccgcagcagccccagcaagaactacgtgatggctgtgagcagctag

SEQ ID NO: 167734 - DNA, 477 bp, Artificial Sequence
  derived and/or modified sequence
atgagccacggcaagggcaccgacatgctgcccgagatcgccgccgccgtggggttcctgtcatccttgttaaggactagaggctgcgtttccgagcagcggttgaaagtctttagcggcgcactgcaggaagcacttactgagcactataaacatcattggttccccgagaagccgagcaaaggctccggctatcgctgtatacgaatcaaccataaaatggatcccatcatctctagagtggcctcccagataggtctcagccagccccagctccatcagcttttgccctcggaacttacactgtgggtagatccttacgaggtgagttacagaattggcgaggatggcagcatttgcgtactctacgaggaagcgcctttggcggccagctgcggattgctgacttgcaagaatcaagttttactggggcgtagtagccctagcaagaattatgtgatggccgtgagttcctag

SEQ ID NO: 167735 - DNA, 477 bp, Artificial Sequence
  derived and/or modified sequence
atgagtcacggcaaagggaccgacatgctccctgagatagccgcagctgtgggattcctgagctcactgctgcgtactcgcggatgcgtatccgaacagagacttaaggtgttttctggagctctacaagaagccctgaccgaacattataaacaccattggtttcccgaaaagccgtccaaaggatccggctatcgctgtatccggatcaaccataagatggatcccataattagccgggtggctagccagatcggtctgagtcagccccagctgcaccagctcctgccatctgaactgaccttgtgggtggacccctacgaggtgtcctaccgcataggggaggatggcagcatttgtgtattatacgaggaggcgccacttgcagccagctgcggcttactgacgtgcaaaaaccaggtacttctgggccgatcctccccgagtaaaaactatgtcatggctgtgtcgagctag

SEQ ID NO: 167736 - DNA, 2712 bp, Artificial Sequence
  derived and/or modified sequence
cagggtaacgctgtcttgtggacccgcacttcccacccgagacctctcactgagcccgagccgcgcgcgacatgagccacgggaagggaaccgacatgctcccggagatcgccgccgccgtgggcttcctctccagcctcctgaggacccggggctgcgtgagcgagcagaggcttaaggtcttcagcggggcgctccaggaggcactcacagagcactacaaacaccactggtttcccgaaaagccgtccaagggctccggctaccgctgcattcgcatcaaccacaagatggaccccatcatcagcagggtggccagccagatcggactcagccagccccagctgcaccagctgctgcccagcgagctgaccctgtgggtggacccctatgaggtgtcctaccgcattggggaggacggctccatctgcgtcttgtacgaggaggccccactggccgcctcctgtgggctcctcacctgcaagaaccaagtgctgctgggccggagcagcccctccaagaactacgtgatggcagtctccagctaggcccttccgcccccgccctgggcgccgccgtgctcatgctgccgtgacaacaggccaccacatacctcaacctggggaactgtatttttaaatgaagagctatttatatatattatttttttttaagaaaggaggaaaagaaaccaaaagttttttttaagaaaaaaaatccttcaagggagctgcttggaagtggcctccccaggtgcctttggagagaactgttgcgtgcttgagtctgtgagccagtgtctgcctataggagggggagctgttagggggtagacctagccaaggagaagtgggagacgtttggctagcaccccaggaagatgtgagagggagcaagcaaggttagcaactgtgaacagagaggtcgggatttgccctgggggaggaagagaggccaagttcagagctctctgtctcccccagccagacacctgcatccctggctcctctattactcaggggcattcatgcctggacttaaacaatactatgttatcttttcttttatttttctaatgaggtcctgggcagagagtgaaaaggcctctcctgattcctactgtcctaagctgcttttcttgaaatcatgacttgtttctaattctaccctcaggggcctgtagatgttgctttccagccaggaatctaaagctttgggttttctgaggggggggaggagggaactggaggttattggggttaggatggaagggaactctgcacaaaacctttgctttgctagtgctgctttgtgtgtatgtgtggcaaataatttgggggtgatttgcaatgaaattttgggacccaaagagtatccactggggatgttttttggccaaaactcttccttttggaaccacatgaaagtcttgatgctgctgccatgatccctttgagaggtggctcaaaagctacagggaactccaggtcctttattactgccttcttttcaaaagcacaactctcctctaaccctcccctcccccttcccttctggtcgggtcatagagctaccgtattttctaggacaagagttctcagtcactgtgcaatatgccccctgggtcccaggagggtctggaggaaaactggctatcagaacctcctgatgccctggtgggcttagggaaccatctctcctgctctccttgggatgatggctggctagtcagccttgcatgtattccttggctgaatgggagagtgccccatgttctgcaagactacttggtattcttgtagggccgacactaaataaaagccaaaccttgggcactgttttttctccctggtgctcagagcacctgtgggaaaggttgctgtctgtctcagtacaatccaaatttgtcgtagacttgtgcaatatatactgttgtgggttggagaaaagtggaaagctacactgggaagaaactcccttccttcaatttctcagtgacattgatgaggggtcctcaaaagacctcgagtttcccaaaccgaatcaccttaagaaggacagggctagggcatttggccaggatggccaccctcctgctgttgccccttagtgaggaatcttcaccccacttcctctacccccaggttctcctccccacagccagtcccctttcctggatttctaaactgctcaattttgactcaaaggtgctatttaccaaacactctccctacccattcctgccagctctgcctccttttcaactctccacattttgtattgccttcccagacctgcttccagtctttattgctttaaagttcactttgggcccacagacccaagagctaattttctggtttgtgggttgaaacaaagctgtgaatcactgcaggctgtgttcttgcatcttgtctgcaaacaggtccctgcctttttagaagcagcctcatggtctcatgcttaatcttgtctctcttctcttctttatgatgttcactttaaaaacaacaaaacccctgagctggactgttgagcaggcctgtctctcctattaagtaaaaataaatagtagtagtatgtttgtaagctattctgacagaaaagacaaaggttactaattgtatgatagtgtttttatatggaagaatgtacagcttatggacaaatgtacacctttttgttactttaataaaaatgtagtaggataaa

SEQ ID NO: 167737 - DNA, 477 bp, Artificial Sequence
  derived and/or modified sequence
atgagccacggcaagggcaccgacatgctgcccgagatcgccgccgccgtgggcttcctgagcagcctgctgagaaccagaggctgcgtgagcgagcagagactgaaggtgttcagcggcgccctgcaggaggccctgaccgagcactacaagcaccactggttccccgagaagcccagcaagggcagcggctacagatgcatcagaatcaaccacaagatggaccccatcatcagcagagtggccagccagatcggcctgagccagccccagctgcaccagctgctgcccagcgagctgaccctgtgggtggacccctacgaggtgagctacagaatcggcgaggacggcagcatctgcgtgctgtacgaggaggcccccctggccgccagctgcggcctgctgacctgcaagaaccaggtgctgctgggcagaagcagccccagcaagaactacgtgatggccgtgagcagctag

SEQ ID NO: 167738 - protein, 348 aa, Artificial Sequence
  derived and/or modified sequence
MGARGAPSRRRQAGRRLRYLPTGSFPFLLLLLLLCIQLGGGQKKKENLLAEKVEQLMEWSSRRSIFRMNGDKFRKFIKAPPRNYSMIVMFTALQPQRQCSVCRQANEEYQILANSWRYSSAFCNKLFFSMVDYDEGTDVFQQLNMNSAPTFMHFPPKGRPKRADTFDLQRIGFAAEQLAKWIADRTDVHIRVFRPPNYSGTIALALLVSLVGGLLYLRRNNLEFIYNKTGWAMVSLCIVFAMTSGQMWNHIRGPPYAHKNPHNGQVSYIHGSSQAQFVAESHIILVLNAAITMGMVLLNEAATSKGDVGKRRIICLVGLGLVVFFFSFLLSIFRSKYHGYPYSDLDFE

SEQ ID NO: 167739 - DNA, 1047 bp, Artificial Sequence
  derived and/or modified sequence
atgggcgccagaggcgcccccagcagaagaagacaggccggcagaagactgagatacctgcccaccggcagcttccccttcctgctgctgctgctgctgctgtgcatccagctgggcggcggccagaagaagaaggagaacctgctggccgagaaggtggagcagctgatggagtggagcagcagaagaagcatcttcagaatgaacggcgacaagttcagaaagttcatcaaggccccccccagaaactacagcatgatcgtgatgttcaccgccctgcagccccagagacagtgcagcgtgtgcagacaggccaacgaggagtaccagatcctggccaacagctggagatacagcagcgccttctgcaacaagctgttcttcagcatggtggactacgacgagggcaccgacgtgttccagcagctgaacatgaacagcgcccccaccttcatgcacttcccccccaagggcagacccaagagagccgacaccttcgacctgcagagaatcggcttcgccgccgagcagctggccaagtggatcgccgacagaaccgacgtgcacatcagagtgttcagaccccccaactacagcggcaccatcgccctggccctgctggtgagcctggtgggcggcctgctgtacctgagaagaaacaacctggagttcatctacaacaagaccggctgggccatggtgagcctgtgcatcgtgttcgccatgaccagcggccagatgtggaaccacatcagaggccccccctacgcccacaagaacccccacaacggccaggtgagctacatccacggcagcagccaggcccagttcgtggccgagagccacatcatcctggtgctgaacgccgccatcaccatgggcatggtgctgctgaacgaggccgccaccagcaagggcgacgtgggcaagagaagaatcatctgcctggtgggcctgggcctggtggtgttcttcttcagcttcctgctgagcatcttcagaagcaagtaccacggctacccctacagcgacctggacttcgagtag

SEQ ID NO: 167740 - DNA, 1047 bp, Artificial Sequence
  derived and/or modified sequence
atgggcgctagaggcgctcccagcagacgaagacaggccggacgccggctgcgctacctgcctaccgggagtttcccgtttcttctcttgctgcttctactgtgtatccagcttggaggcggtcagaagaagaaggagaatcttctcgctgagaaggtggagcaactgatggagtggtcaagccgcagatcgatctttcgcatgaatggagacaagttccgaaagttcataaaggctccgcccagaaactatagcatgattgttatgttcaccgccttgcagccccagcgccagtgcagtgtctgtcggcaggccaacgaagagtaccagatcctggccaattcttggagatacagttctgcattttgcaacaagctattcttctctatggtcgactatgatgaggggacggatgtgtttcagcagctgaacatgaacagcgcacccaccttcatgcactttcccccaaagggccgccctaagagagccgacaccttcgacctgcaaagaattggcttcgccgccgagcagttggcaaaatggatcgccgaccgtacagacgtgcacatcagagtgtttaggccacccaactatagtgggaccatagcattggctcttctggtatctctagtgggaggcctgctgtacctcaggcgcaacaacctagagttcatttacaacaagaccggctgggcaatggtctccctatgcattgttttcgccatgacttcagggcagatgtggaaccatatccgcggccccccgtacgcccacaaaaatccacacaacggtcaggtgagttatatccatgggtctagtcaagcacaattcgttgctgaatcccatatcattttagttctgaatgctgctattaccatgggtatggtgctgctgaacgaagcagcaacgagtaagggggacgtgggcaaacggagaatcatctgtttggtcgggttgggacttgtggtgttcttcttttcctttttactttccatatttaggtccaaatatcacggttatccgtactcagatctcgacttcgaatag

SEQ ID NO: 167741 - DNA, 1047 bp, Artificial Sequence
  derived and/or modified sequence
atgggagcacggggagcaccctctagacgtagacaggcaggcaggaggctgcgatacctgcccacgggatcttttccttttctgctgttgctactgctcctttgcatccagctgggaggtggtcagaagaaaaaggagaacctcctggccgagaaggtcgagcagcttatggaatggagcagcaggcggtctatttttaggatgaacggcgacaaattccggaagtttattaaggcgccaccacggaattattctatgatcgtgatgtttactgcactccagcctcagcgtcagtgctctgtgtgccgccaggccaatgaagagtaccaaatcctagccaactcttggaggtatagttcagcgttctgcaataagctgtttttcagcatggtcgattacgacgaaggcaccgacgttttccaacaactaaacatgaacagcgcccccactttcatgcacttcccgcctaagggacgtcctaaaagggccgatacattcgatctacagagaattggttttgcggccgagcagttggcaaaatggattgcagataggaccgatgttcatatacgggttttccggcctcctaattacagcggaactatcgcattggccctgctggtgtcgctggttggcgggctgctgtatctgaggcggaacaatctggaattcatttataacaagacaggatgggccatggtcagtttgtgcatagttttcgcaatgacatcgggtcagatgtggaaccacatccgcgggcccccctacgcgcacaaaaacccccataacggtcaagtgagctacatacatgggtcctcccaagcccagtttgtcgcagagtcacacattatcctcgttctgaacgcggcaatcaccatggggatggtgctattaaacgaagcagcgaccagcaaaggagatgtcggaaagaggcggatcatttgcctcgtcgggctgggcctggtcgttttctttttcagttttctgttgagcatatttcgctcaaaataccacggctacccttattccgatctggatttcgaatag

SEQ ID NO: 167742 - DNA, 1047 bp, Artificial Sequence
  derived and/or modified sequence
atgggagccaggggcgccccctcgcggaggagacaggctggaagacgcctgcgctacctgcccactggctccttccccttcctgcttcttctactgctgctgtgtatccagttgggcggcggacagaagaaaaaggagaatctgctggcggagaaggtggagcaattgatggagtggtccagccgcagatctatatttcggatgaatggggacaaattcagaaagtttataaaagcgcctccccggaattacagcatgatcgtgatgttcactgctctgcagccacagagacaatgttctgtgtgccgccaagctaacgaggaatatcaaattttggcaaattcctggagatattcgagcgccttttgcaacaagctgttcttttctatggttgactacgatgagggtaccgacgtgtttcagcagctaaatatgaatagtgcacctactttcatgcatttccctcccaaggggcggcctaaacgcgcagatactttcgatctccaaaggattggatttgctgcagagcaattagcaaagtggatagctgaccggacagatgtccacattcgcgtttttagaccccctaactactcggggaccatcgccctggcactgttagttagtcttgtcggcggcttactgtatctcagacggaacaacctggaatttatctacaataagaccggctgggcaatggtgtctctgtgcatcgtgtttgcaatgacgtccggccagatgtggaaccacatcagaggaccgccatacgcacacaaaaatccacataacggccaggtgtcctatatccacggctcctctcaggcccagttcgtagctgaatcacacatcatcctggtgctgaatgcagccataaccatgggcatggtcttactaaacgaggctgccacttctaaaggcgatgtgggcaagaggcggatcatctgcctggtggggctcggactggtggtcttctttttctcctttctgctgagtatctttcgctctaaatatcatggctatccctactcagatcttgattttgaatag

SEQ ID NO: 167743 - DNA, 1047 bp, Artificial Sequence
  derived and/or modified sequence
atgggcgcccggggggcccccagcagaagacggcaggccggccgccgcctgcgctacctgcccaccggcagcttccccttcctgctgctgctgctgctgctgtgcatccagctgggcggcggccagaagaagaaggagaacctgctggccgagaaggtggagcagctgatggagtggagcagccgccgcagcatcttcaggatgaatggagacaagttcaggaagttcatcaaggccccacccaggaactacagcatgattgtgatgttcaccgccctgcagccccagaggcagtgcagcgtgtgccggcaggccaatgaggagtaccagatcctggccaacagctggagatacagcagcgccttctgcaacaagctgttcttctccatggtggactatgatgagggcacagatgtgttccagcagctgaacatgaacagcgcccccaccttcatgcacttcccccccaagggccggcccaagagagctgacacctttgacctgcagagaattggatttgctgctgagcagctggccaagtggattgctgacagaacagatgtgcacatccgggtcttccggccccccaactacagcggcaccatcgccctggccctgctggtgtccctggtgggcggcctgctgtacctgcggaggaacaacctggagttcatctacaacaagacaggctgggccatggtgtccctgtgcatcgtgtttgccatgaccagcggccagatgtggaaccacatccggggccccccctatgcccacaagaacccccacaacggccaggtgtcctacatccacggcagcagccaggcccagtttgtggccgagagccacatcatcctggtgctgaatgctgccatcaccatgggcatggtgctgctgaatgaagctgccaccagcaaaggagatgtgggcaagaggcgcatcatctgcctggtgggcctgggcctggtggtgttcttcttctccttcctgctgagcatcttccgcagcaagtaccacggctacccctacagcgacctggactttgaatag

SEQ ID NO: 167744 - DNA, 1047 bp, Artificial Sequence
  derived and/or modified sequence
atgggcgcccggggcgcccccagccggcggcggcaggccggccggaggctgcgctacctccccactgggtctttccctttcttgctgctcctgctgcttctctgtatccagttgggaggaggacagaaaaagaaagagaatctcctagccgaaaaagtcgagcagttgatggagtggtccagccggcgaagcatcttccggatgaatggtgataaattccgaaaatttatcaaggcaccccccaggaattactctatgattgtcatgtttacggcattgcagcctcagagacagtgcagcgtgtgtaggcaagctaatgaggagtaccagattctcgcaaattcttggcgctacagctccgcattttgtaataaactattcttcagcatggtggattatgatgagggaactgatgtgttccagcaacttaatatgaattccgcaccaacatttatgcacttccctcccaaagggcgccccaagcgcgcagatacgttcgacttgcagcgaatcggcttcgccgccgaacaactggcaaaatggattgcagaccggactgatgtacatatcagagtttttcgacctcccaactacagcggtactatcgcactggcactgctcgtgagcctcgtcggggggctcctgtatctgcggcggaataaccttgagttcatctacaacaagaccggatgggcaatggtgtccctgtgtatcgtcttcgcaatgacaagtggccagatgtggaaccacatcaggggcccgccttacgctcacaagaacccccataacgggcaggtgtcttacatccacggatcaagccaggcacagttcgtggctgagagtcacataatcttggttctcaacgcagctattacaatgggcatggttctgctgaacgaggccgcgacctccaaaggagacgtgggcaagaggcggataatttgtttagtgggcttagggttagtcgtcttcttcttctcttttctgctgtccatttttcggtctaagtaccatggatacccttattctgacctggatttcgagtag

SEQ ID NO: 167745 - DNA, 1047 bp, Artificial Sequence
  derived and/or modified sequence
atgggcgcccggggcgcccccagccggcggcggcaggccggccggaggcttcggtacctgcccactggctcctttccatttctcttactactcctgctgttatgcatccagctcggcggagggcagaagaagaaggaaaacttgctggcagaaaaggtcgagcagcttatggagtggtcttcacggcgctccattttcaggatgaatggggataagtttcgtaaattcatcaaggctccccctcgaaattactccatgatagtgatgttcactgcgctgcagccgcagcggcagtgttccgtttgtcggcaggctaacgaggaatatcagatccttgccaattcctggaggtactcatcagctttctgtaataagttgttcttctcaatggtggactatgacgaaggcacagacgtgttccaacagcttaatatgaattccgcccccaccttcatgcactttccaccaaagggccggcccaaacgcgctgacacgttcgatttacagcggattgggttcgctgcagagcaactggctaaatggatagcagaccgtaccgatgtgcacatccgggtctttcgtccccctaattacagtggcaccattgccctcgcgctgctcgtttccctcgtgggaggtctgctgtatttgcgcagaaataacctggaattcatatacaataagaccggctgggcaatggtctcactgtgtatagtctttgcaatgacaagcgggcagatgtggaaccatattagaggacctccttacgctcacaaaaatcctcacaatggccaggtgtcatatatccacggaagcagtcaggcacagtttgtggccgaatcccacataatccttgtgctgaatgccgcaatcactatgggcatggtcctgctgaatgaggctgccacaagcaaaggcgacgtgggtaaaaggcgcatcatctgcctggtcggactgggtctcgtggtcttttttttttcttttcttcttagcatttttcggtcaaagtaccatgggtatccttacagtgatctcgattttgaatag

SEQ ID NO: 167746 - DNA, 1047 bp, Artificial Sequence
  derived and/or modified sequence
atgggcgcccggggcgcccccagccggcggcggcaggccggccggagactgcgctatctgcctaccggaagtttcccctttttactgttgttgctgctcctctgtatccagttgggtggaggccagaagaagaaagagaacttactcgcagaaaaggttgagcagctgatggaatggtcctcacgccgcagcatcttcagaatgaacggtgacaaatttcgaaagttcatcaaggcccctccacggaattactcgatgattgttatgtttacagcgctgcagccacagaggcagtgcagcgtgtgtaggcaggctaatgaagagtatcaaattctggctaattcttggcggtactcttcggccttctgtaacaaactcttcttttcaatggtggactacgatgagggcactgacgtcttccaacagctcaacatgaacagcgcgccaacatttatgcacttcccccctaaaggaaggcccaagcgtgccgacacgttcgacctccaaaggatcgggtttgctgccgagcagctcgctaagtggattgcagaccgcactgacgtgcacatccgggtgttcagacctcccaattacagtggcaccatcgccctcgccctgctggtgtcactagtgggtgggcttctctacttgcgcaggaataaccttgagttcatctacaataagactggatgggccatggtatcactttgcattgtctttgcaatgacgtccggccagatgtggaaccatatcagaggcccaccctatgcacacaaaaacccacataatggccaggtctcctatattcatggctcctctcaggctcaatttgtggctgagagccacattatcctcgtgcttaatgccgccattactatgggcatggtattactgaatgaggctgctacaagtaagggcgatgttggcaagagaagaataatttgcctggtagggctgggactggtggtgttctttttcagttttctgctttccatatttagatctaagtatcacggctatccatactctgatctggactttgagtag

SEQ ID NO: 167747 - DNA, 1047 bp, Artificial Sequence
  derived and/or modified sequence
atgggagctcgtggggcaccgtctaggcgcaggcaggcaggtcgcaggctccgatacttgcccaccggttcgttcccctttctgttgctgctgctcctcctctgtatccaattgggcggtggccaaaaaaagaaggaaaatctgctggcagagaaggttgagcaactcatggagtggtcttcgagacgatcaatctttagaatgaatggggataaattccggaaatttatcaaagcccctccccgaaattactcgatgattgttatgttcactgccctccagccacagaggcagtgctcagtctgtcgccaggccaatgaagagtatcaaatcctcgccaatagctggcggtatagctcggcattctgcaacaaacttttcttttctatggttgactacgacgagggcactgacgtttttcagcagctcaacatgaactccgcccctacttttatgcacttcccaccgaaaggcaggccaaagcgggcagacacttttgacctgcagcggatcggttttgccgcagagcagctagccaagtggatagccgaccggactgacgtccacataagggtttttcggccacccaactattctggcacaatcgccctggcccttttagtgtctcttgttgggggactactttatctgagacgcaacaacttggaatttatttataataaaaccggctgggctatggtgtctttatgcatcgtcttcgcgatgacgtccggccagatgtggaatcatatcagagggccaccctacgcacacaaaaatccacacaacggccaggtaagttacatccatggatcttcgcaagcccagtttgtagcagagagccacattatacttgtgcttaatgcagctataacaatgggtatggtgttgttaaatgaggcggcaacttctaaaggcgacgtcggaaagagacgaatcatttgcctggtcggcttgggactggtggtcttcttcttctcatttttgctgtccattttccggagcaaatatcatggatatccgtacagcgatctcgacttcgagtag

SEQ ID NO: 167748 - DNA, 1047 bp, Artificial Sequence
  derived and/or modified sequence
atgggggcacggggagccccttcccgaaggagacaggccggacgtagactgagatatctaccaacaggcagctttccctttctcctgcttcttctgcttttatgtatccagttgggcggaggccagaaaaagaaggaaaacctactggccgagaaggtagaacagctgatggaatggagctctcgcagatcaatcttccggatgaatggggacaaattccgtaagtttattaaagccccaccccgtaactatagcatgatcgtgatgtttaccgcactgcagccccagcgacaatgcagcgtctgtagacaagccaacgaagagtaccagattcttgccaactcttggagatactcctcagcattctgcaataaactgttcttctccatggtggattatgatgagggtaccgatgtcttccagcagttaaacatgaattccgccccaaccttcatgcatttccctcccaaaggtcggcctaagcgtgccgacacattcgacctccagagaattggcttcgcagcagaacagttagcgaaatggattgctgacagaaccgatgtgcatatcagagttttccgtccgcctaattattctggcacaatcgctctggcgctcctcgtcagcctggtgggtggcctgctctacctgcgcaggaacaacttggaattcatatacaataaaaccggatgggcaatggtctccttgtgtatcgtcttcgcgatgacttcaggtcagatgtggaaccacatacggggaccaccgtacgcacataagaatccccacaacggtcaggtctcatacatccacgggtccagccaggctcagtttgtggccgaatctcatattatcctagtcttgaatgccgcaatcacgatgggtatggtgctcctcaacgaggccgctacatccaaaggagacgttggcaagaggcgcattatttgtctcgtgggccttggactcgtggtgtttttcttctcttttttgctcagcatttttcggagcaagtatcacggctatccctactcagatctggacttcgaatag

SEQ ID NO: 167749 - DNA, 1047 bp, Artificial Sequence
  derived and/or modified sequence
atgggcgcacgcggtgctccttccaggcgccgacaggcagggagaagattgcggtatctccccacaggctcttttccattccttctcctcctgttactactgtgcattcagctggggggtggccagaaaaagaaagagaatctgctggctgagaaggtcgaacagctgatggaatggagtagcaggaggtccatcttcagaatgaatggggataaatttcggaagtttatcaaagctcctccgagaaactacagcatgatcgtcatgtttacagcccttcagccccagcggcaatgctcagtttgccgacaagcaaacgaagaatatcagattttggcaaatagttggaggtacagctctgctttctgtaataagttatttttctccatggttgactacgatgaggggaccgatgtgtttcagcagctgaatatgaatagcgccccaacattcatgcattttcccccaaaaggtagacccaagcgggcagatacttttgacctccagcgcatcgggttcgcagctgaacagcttgcaaaatggatcgcagatcgaactgatgtccatattagggtctttcgccctcccaattactcgggcaccatcgccctggcgttattggttagccttgtgggcggactgctgtacctgaggcgaaacaacttagaattcatctacaataaaacagggtgggcaatggtttctttgtgcatcgtgttcgcaatgactagcggccagatgtggaatcacatccgcggtccgccatatgcacataaaaatccacacaacggccaggtgtcttatattcacggttcctcacaagcgcaattcgtagcggagagccacatcattttggtgcttaacgctgccattacaatgggcatggtcctgctgaacgaggccgctaccagtaaaggggacgttggcaaacgacggattatctgcttggtgggcctgggcctcgttgtgttctttttcagctttttactgagcattttccggagcaagtatcacggttatccctattcagacctggattttgaatag

SEQ ID NO: 167750 - DNA, 1545 bp, Artificial Sequence
  derived and/or modified sequence
tcctcctctgcgtcctcggccgcggcccgggtccctcgcaaagccgctgccatcccggagggcccagccagcgggctcccggaggctggccgggcaggcgtggtgcgcggtaggagctgggcgcgcacggctaccgcgcgtggaggagacactgccctgccgcgatgggggcccggggcgctccttcacgccgtaggcaagcggggcggcggctgcggtacctgcccaccgggagctttcccttccttctcctgctgctgctgctctgcatccagctcgggggaggacagaagaaaaaggagaatcttttagctgaaaaagtagagcagctgatggaatggagttccagacgctcaatcttccgaatgaatggtgataaattccgaaaatttataaaggcaccacctcgaaactattccatgattgttatgttcactgctcttcagcctcagcggcagtgttctgtgtgcaggcaagctaatgaagaatatcaaatactggcgaactcctggcgctattcatctgctttttgtaacaagctcttcttcagtatggtggactatgatgaggggacagacgtttttcagcagctcaacatgaactctgctcctacattcatgcattttcctccaaaaggcagacctaagagagctgatacttttgacctccaaagaattggatttgcagctgagcaactagcaaagtggattgctgacagaacggatgttcatattcgggttttcagaccacccaactactctggtaccattgctttggccctgttagtgtcgcttgttggaggtttgctttatttgagaaggaacaacttggagttcatctataacaagactggttgggccatggtgtctctgtgtatagtctttgctatgacttctggccagatgtggaaccatatccgtggacctccatatgctcataagaacccacacaatggacaagtgagctacattcatgggagcagccaggctcagtttgtggcagaatcacacattattctggtactgaatgccgctatcaccatggggatggttcttctaaatgaagcagcaacttcgaaaggcgatgttggaaaaagacggataatttgcctagtgggattgggcctggtggtcttcttcttcagttttctactttcaatatttcgttccaagtaccacggctatccttatagtgatctggactttgagtgagaagatgtgatttggaccatggcacttaaaaactctataacctcaggcaactttttaattaaatgaagccaagtgggatttgcataaagtgaatgtttaccatgaagataaactgttcctgactttatactattttgaattcattcatttcattgtgatcagctagcttattcttgtgtactttttttaaactgtgggttttcctagtaaatttaatttacagaaatcaatggtagcatttagtaatctacaaaggaaatatcaaagtgtttttcaagcctgttatattcagtgtgtgccacaggattgaaataaatgacaatgtaattatgaa

SEQ ID NO: 167751 - DNA, 1498 bp, Artificial Sequence
  derived and/or modified sequence
cggccgcggcccgggtccctcgcaaagccgctgccatcccggagggcccagccagcgggctcccggaggctggccgggcaggcgtggtgcgcggtaggagctgggcgcgcacggctaccgcgcgtggaggagacactgccctgccgcgatgggggcccggggcgctccttcacgccgtaggcaagcggggcggcggctgcggtacctgcccaccgggagctttcccttccttctcctgctgctgctgctctgcatccagctcgggggaggacagaagaaaaaggagaatcttttagctgaaaaagtagagcagctgatggaatggagttccagacgctcaatcttccgaatgaatggtgataaattccgaaaatttataaaggcaccacctcgaaactattccatgattgttatgttcactgctcttcagcctcagcggcagtgttctgtgtgcaggcaagctaatgaagaatatcaaatactggcgaactcctggcgctattcatctgctttttgtaacaagctcttcttcagtatggtggactatgatgaggggacagacgtttttcagcagctcaacatgaactctgctcctacattcatgcattttcctccaaaaggcagacctaagagagctgatacttttgacctccaaagaattggatttgcagctgagcaactagcaaagtggattgctgacagaacggatgttcatattcgggttttcagaccacccaactactctggtaccattgctttggccctgttagtgtcgcttgttggaggtttgctttatttgagaaggaacaacttggagttcatctataacaagactggttgggccatggtgtctctgtgtatagtctttgctatgacttctggccagatgtggaaccatatccgtggacctccatatgctcataagaacccacacaatggacaagtgagctacattcatgggagcagccaggctcagtttgtggcagaatcacacattattctggtactgaatgccgctatcaccatggggatggttcttctaaatgaagcagcaacttcgaaaggcgatgttggaaaaagacggataatttgcctagtgggattgggcctggtggtcttcttcttcagttttctactttcaatatttcgttccaagtaccacggctatccttatagtgatctggactttgagtgagaagatgtgatttggaccatggcacttaaaaactctataacctcagctttttaattaaatgaagccaagtgggatttgcataaagtgaatgtttaccatgaagataaactgttcctgactttatactattttgaattcattcatttcattgtgatcagctagcttattcttgtgtactttttttaaactgtgggttttcctagtaaatttaatttacagaaatcaatggtagcatttagtaatctacaaaggaaatatcaaagtgtttttcaagcctgttatattcagtgtgtgccacaggat

SEQ ID NO: 167752 - DNA, 1449 bp, Artificial Sequence
  derived and/or modified sequence
ggagggcccagccagcgggctcccggaggctggccgggcaggcgtggtgcgcggtaggagctgggcgcgcacggctaccgcgcgtggaggagacactgccctgccgcgatgggggcccggggcgctccttcacgccgtaggcaagcggggcggcggctgcggtacctgcccaccgggagctttcccttccttctcctgctgctgctgctctgcatccagctcgggggaggacagaagaaaaaggagaatcttttagctgaaaaagtagagcagctgatggaatggagttccagacgctcaatcttccgaatgaatggtgataaattccgaaaatttataaaggcaccacctcgaaactattccatgattgttatgttcactgctcttcagcctcagcggcagtgttctgtgtgcaggcaagctaatgaagaatatcaaatactggcgaactcctggcgctattcatctgctttttgtaacaagctcttcttcagtatggtggactatgatgaggggacagacgtttttcagcagctcaacatgaactctgctcctacattcatgcattttcctccaaaaggcagacctaagagagctgatacttttgacctccaaagaattggatttgcagctgagcaactagcaaagtggattgctgacagaacggatgttcatattcgggttttcagaccacccaactactctggtaccattgctttggccctgttagtgtcgcttgttggaggtttgctttatttgagaaggaacaacttggagttcatctataacaagactggttgggccatggtgtctctgtgtatagtctttgctatgacttctggccagatgtggaaccatatccgtggacctccatatgctcataagaacccacacaatggacaagtgagctacattcatgggagcagccaggctcagtttgtggcagaatcacacattattctggtactgaatgccgctatcaccatggggatggttcttctaaatgaagcagcaacttcgaaaggcgatgttggaaaaagacggataatttgcctagtgggattgggcctggtggtcttcttcttcagttttctactttcaatatttcgttccaagtaccacggctatccttatagtgatctggactttgagtgagaagatgtgatttggaccatggcacttaaaaactctataacctcaggcaaaagtcctcagataaaaatgtctaccaaaagactgacacgtggagttaatcatttgacagatgcaatgcttccacccccaacaaatatactttcttaacttctgtttgttatcacttagggaaaaaaggcagtcaacaaatatatttcattctatctaggaaaaatgtagccaaatcttttttcccattaacaaataatgtaagccttaatattcaagggtaataaaaaatacaagtcttccaaa

SEQ ID NO: 167753 - protein, 2004 aa, Artificial Sequence
  derived and/or modified sequence
MVKLANPLYTEWILEAIKKVKKQKQRPSEERICNAVSSSHGLDRKTVLEQLELSVKDGTILKVSNKGLNSYKDPDNPGRIALPKPRNHGKLDNKQNVDWNKLIKRAVEGLAESGGSTLKSIERFLKGQKDVSALFGGSAASGFHQQLRLAIKRAIGHGRLLKDGPLYRLNTKATNVDGKESCESLSCLPPVSLLPHEKDKPVAEPIPICSFCLGTKEQNREKKPEELISCADCGNSGHPSCLKFSPELTVRVKALRWQCIECKTCSSCRDQGKNADNMLFCDSCDRGFHMECCDPPLTRMPKGMWICQICRPRKKGRKLLQKKAAQIKRRYTNPIGRPKNRLKKQNTVSKGPFSKVRTGPGRGRKRKITLSSQSASSSSEEGYLERIDGLDFCRDSNVSLKFNKKTKGLIDGLTKFFTPSPDGRKARGEVVDYSEQYRIRKRGNRKSSTSDWPTDNQDGWDGKQENEERLFGSQEIMTEKDMELFRDIQEQALQKVGVTGPPDPQVRCPSVIEFGKYEIHTWYSSPYPQEYSRLPKLYLCEFCLKYMKSRTILQQHMKKCGWFHPPANEIYRKNNISVFEVDGNVSTIYCQNLCLLAKLFLDHKTLYYDVEPFLFYVLTQNDVKGCHLVGYFSKEKHCQQKYNVSCIMILPQYQRKGYGRFLIDFSYLLSKREGQAGSPEKPLSDLGRLSYMAYWKSVILECLYHQNDKQISIKKLSKLTGICPQDITSTLHHLRMLDFRSDQFVIIRREKLIQDHMAKLQLNLRPVDVDPECLRWTPVIVSNSVVSEEEEEEAEEGENEEPQCQERELEISVGKSVSHENKEQDSYSVESEKKPEVMAPVSSTRLSKQVLPHDSLPANSQPSRRGRWGRKNRKTQERFGDKDSKLLLEETSSAPQEQYGECGEKSEATQEQYTESEEQLVASEEQPSQDGKPDLPKRRLSEGVEPWRGQLKKSPEALKCRLTEGSERLPRRYSEGDRAVLRGFSESSEEEEEPESPRSSSPPILTKPTLKRKKPFLHRRRRVRKRKHHNSSVVTETISETTEVLDEPFEDSDSERPMPRLEPTFEIDEEEEEEDENELFPREYFRRLSSQDVLRCQSSSKRKSKDEEEDEESDDADDTPILKPVSLLRKRDVKNSPLEPDTSTPLKKKKGWPKGKSRKPIHWKKRPGRKPGFKLSREIMPVSTQACVIEPIVSIPKAGRKPKIQESEETVEPKEDMPLPEERKEEEEMQAEAEEAEEGEEEDAASSEVPAASPADSSNSPETETKEPEVEEEEEKPRVSEEQRQSEEEQQELEEPEPEEEEDAAAETAQNDDHDADDEDDGHLESTKKKELEEQPTREDVKEEPGVQESFLDANMQKSREKIKDKEETELDSEEEQPSHDTSVVSEQMAGSEDDHEEDSHTKEELIELKEEEEIPHSELDLETVQAVQSLTQEESSEHEGAYQDCEETLAACQTLQSYTQADEDPQMSMVEDCHASEHNSPISSVQSHPSQSVRSVSSPNVPALESGYTQISPEQGSLSAPSMQNMETSPMMDVPSVSDHSQQVVDSGFSDLGSIESTTENYENPSSYDSTMGGSICGNSSSQSSCSYGGLSSSSSLTQSSCVVTQQMASMGSSCSMMQQSSVQPAANCSIKSPQSCVVERPPSNQQQQPPPPPPQQPQPPPPQPQPAPQPPPPQQQPQQQPQPQPQQPPPPPPPQQQPPLSQCSMNNSFTPAPMIMEIPESGSTGNISIYERIPGDFGAGSYSQPSATFSLAKLQQLTNTIMDPHAMPYSHSPAVTSYATSVSLSNTGLAQLAPSHPLAGTPQAQATMTPPPNLASTTMNLTSPLLQCNMSATNIGIPHTQRLQGQMPVKGHISIRSKSAPLPSAAAHQQQLYGRSPSAVAMQAGPRALAVQRGMNMGVNLMPTPAYNVNSMNMNTLNAMNSYRMTQPMMNSSYHSNPAYMNQTAQYPMQMQMGMMGSQAYTQQPMQPNPHGNMMYTGPSHHSYMNAAGVPKQSLNGPYMRR

SEQ ID NO: 167754 - protein, 13 aa, Artificial Sequence
  derived and/or modified sequence
MVKLANPLYTEWI

SEQ ID NO: 167755 - protein, 815 aa, Artificial Sequence
  derived and/or modified sequence
MVKLANPLYTEWILEAIKKVKKQKQRPSEERICNAVSSSHGLDRKTVLEQLELSVKDGTILKVSNKGLNSYKDPDNPGRIALPKPRNHGKLDNKQNVDWNKLIKRAVEGLAESGGSTLKSIERFLKGQKDVSALFGGSAASGFHQQLRLAIKRAIGHGRLLKDGPLYRLNTKATNVDGKESCESLSCLPPVSLLPHEKDKPVAEPIPICSFCLGTKEQNREKKPEELISCADCGNSGHPSCLKFSPELTVRVKALRWQCIECKTCSSCRDQGKNADNMLFCDSCDRGFHMECCDPPLTRMPKGMWICQICRPRKKGRKLLQKKAAQIKRRYTNPIGRPKNRLKKQNTVSKGPFSKVRTGPGRGRKRKITLSSQSASSSSEEGYLERIDGLDFCRDSNVSLKFNKKTKGLIDGLTKFFTPSPDGRKARGEVVDYSEQYRIRKRGNRKSSTSDWPTDNQDGWDGKQENEERLFGSQEIMTEKDMELFRDIQEQALQKVGVTGPPDPQVRCPSVIEFGKYEIHTWYSSPYPQEYSRLPKLYLCEFCLKYMKSRTILQQHMKKCGWFHPPANEIYRKNNISVFEVDGNVSTIYCQNLCLLAKLFLDHKTLYYDVEPFLFYVLTQNDVKGCHLVGYFSKEKHCQQKYNVSCIMILPQYQRKGYGRFLIDFSYLLSKREGQAGSPEKPLSDLGRLSYMAYWKSVILECLYHQNDKQISIKKLSKLTGICPQDITSTLHHLRMLDFRSDQFVIIRREKLIQDHMAKLQLNLRPVDVDPECLRWTPVIVSNSVVSEEEEEEAEEGENEEPQCQERELEISVRA

SEQ ID NO: 167756 - DNA, 9153 bp, Artificial Sequence
  derived and/or modified sequence
actgtctccaagatggcggccgtgtcagtttggggcatctccgcggtccggcccggggccccgggatctcggctgtccttcctcccggcataagatgcacatttttctgctctggagccgggaatgaaatattcttgagttcttacaactttatgacgagacccatgtgtggtgctattgagaaattcattgggaagttggaagacatttcaatcaacaggttgttttggtttctatagtacaattggggtggcattctgttttgtgaaaggaggaaggacttaggccagaaaactcatatgctatggttaactggttcccagcctccgagaatcttgttttccatggtgtaaaacttactcagcatcaggataagggataacgactctatggatatacagaatccttcaccatggtaaaactcgcaaacccgctttatactgagtggattttggaggccatcaaaaaagtgaaaaagcagaaacagcgtccttcagaagaaaggatatgcaatgctgtgtcttcatcccatggcttggatcgtaaaactgttttagaacaattggagttgagtgttaaagatggaacaattttaaaagtctcaaataaaggactcaattcctataaagatcctgataatcctgggcgaatagcacttcctaagcctcggaaccatggaaaattggataataaacaaaatgtggattggaataaactgataaagcgggcagttgagggcttggcagagtctggtggctcaactttgaaaagcattgaacgttttttgaaaggtcagaaggatgtgtctgcattattcggaggcagtgctgcctctggctttcaccagcagttacgattggctatcaaacgtgccattggccacggcagactccttaaagatggacctctttatcggctcaacactaaagcaaccaacgtggatgggaaagagagttgtgagtctctttcctgtttacctccagtgtcccttcttccacatgaaaaggataagccggttgctgaaccaatccccatctgtagtttctgtcttggtacaaaagaacaaaaccgagaaaagaagccagaggaactcatctcctgtgccgactgtggcaacagtggccatccatcctgtttaaagttttcccctgaactaacggttcgagtgaaggccttacggtggcagtgcatcgagtgtaaaacatgcagctcctgtcgagatcaaggcaaaaatgcggataacatgctcttttgtgattcatgtgaccgaggttttcacatggagtgttgtgatccgccactcacccgtatgccaaaaggcatgtggatatgtcaaatatgtcgacctaggaaaaaaggacgaaaacttctacaaaagaaggcagcacagataaaacggcgctatactaatccaataggacgtccaaaaaacaggttaaagaaacaaaacacggtatcaaaaggtcccttcagcaaagttcgaactggccctggaaggggtaggaaacgaaaaatcactctttccagccaatcagcatcatcatcatcagaagaaggatatttagagcggatagatggcttggacttctgcagagatagcaatgtctccttgaagttcaacaagaaaaccaaagggctcattgatggccttaccaaattttttaccccttcccctgatgggcggaaagctcggggggaagtggtggactactctgagcaatatcgaatcagaaagaggggcaacaggaaatcaagcacttcagattggcccacagacaatcaggatggctgggatggcaaacaagaaaatgaggagcgactttttgggagccaggaaatcatgactgagaaagatatggaattatttcgtgatatccaagaacaagcactgcagaaagttggagtgactggtccccctgatccacaagtccgctgtccctctgtcattgagtttgggaagtatgaaattcacacctggtactcctccccatatcctcaagaatactcaaggctgcccaaattgtatctttgtgaattttgtctaaaatatatgaaaagtagaactattctgcagcagcacatgaagaaatgtggttggttccatcctcctgccaatgagatttacagaaagaataatatttctgtctttgaggttgatgggaatgtgagtaccatttattgtcaaaacctgtgtcttttggcaaagttgtttcttgaccacaaaaccctctattacgatgtggagccatttcttttttatgtactaacacagaatgatgtcaagggctgccaccttgttggctacttttctaaggaaaagcactgccaacagaagtacaatgtttcctgtataatgattcttcctcaataccagcgtaagggctatggcaggtttctcatcgatttcagttatttgttatcaaagcgtgaaggccaagcagggtctccagagaaaccgttatctgatctgggtcgtctttcctacatggcatattggaaaagtgtaatattggagtgcctttatcaccaaaatgacaagcagatcagcattaagaagttaagcaagttgactggaatctgccctcaagacatcacttccacactccaccacctacgaatgctggacttccgtagtgaccaatttgtgattatccgccgggaaaaacttatccaggatcacatggcaaagcttcagctgaatttgcgacctgtagatgtagatccagaatgtttgcgctggactccagtcatagtgtccaactctgtggtctcagaggaggaagaagaggaggctgaggaaggagaaaacgaagagccacagtgccaggaaagagaattagagatcagtgtgggaaagtctgtgtctcatgagaacaaagaacaagattcttattcagtagaaagtgaaaagaaaccagaagttatggctccagtcagttctacacgtttgagcaaacaagtccttcctcatgatagtcttcctgcaaatagccagccatctcggaggggccgctgggggaggaagaacagaaaaacccaggaacgttttggtgataaagattctaaactgctcttggaagagacgtcttcagctcctcaggaacaatatggagaatgtggggagaaatcagaagccacccaggaacaatacactgaaagtgaagaacagctggtggcttctgaggagcagccaagccaggacgggaaacctgaccttcccaagagaagactcagtgagggggttgagccctggcgaggacagctcaagaaaagccctgaggctctgaagtgcagattaacagaaggaagtgagaggctgccccgtcgctacagtgagggtgacagggctgtcctcaggggcttcagtgagagcagcgaggaggaggaggagccggaaagccctcggtcaagctcgccaccaattctcacaaagcccacgctgaagcgaaagaaaccatttctccaccgaaggaggagagtccgaaagcgcaaacaccacaatagcagtgtagtcacagaaactatttctgagaccactgaagtgttagatgaaccttttgaagattctgactccgagaggccaatgccaagattagaacccacgtttgagatcgatgaagaagaggaggaagaggatgaaaatgaacttttccctagagaatacttccgtcgtttgtcttcgcaggatgtactcaggtgtcagtcctcttctaagaggaagtctaaagatgaagaagaagatgaagagtcagatgatgctgatgacactcctatcttaaagccagtatctcttttgcgaaaacgtgatgtgaagaattctcctcttgagccagatacatccacacctttgaaaaagaaaaagggatggcccaaaggcaagagccgcaaaccaatccactggaagaaaagacctggtcgaaaaccaggatttaagttgagtcgggaaatcatgccagtttctactcaagcatgcgtcattgagcccatcgtttccattcctaaagctggacgtaaacccaagatccaggagagtgaagaaactgttgagccaaaagaagacatgcccctacccgaggagaggaaggaggaggaggagatgcaagcagaggcagaagaggctgaagagggtgaggaagaggatgcagccagcagtgaagtcccagcagcctctccagcagacagcagcaatagtcctgagaccgaaaccaaggagcctgaggtggaggaggaagaagagaagccccgtgtctcagaggagcagaggcagtcagaggaggagcagcaggaattagaggagccagagccagaggaggaggaagatgcagctgcagagactgcccagaatgacgaccacgacgctgatgatgaggatgatggccacctggagtccacaaagaaaaaggagctagaggaacagcccacgagggaagatgtcaaggaggagcctggtgttcaagagtcttttttagatgctaatatgcagaagagtagggaaaagataaaggataaagaggaaaccgagctggattccgaagaggagcagccttcccatgacacgtccgtggtgtcagagcagatggctgggtctgaggacgaccacgaagaagactcccacactaaggaagagttaatcgaattaaaagaggaggaagagattcctcatagtgagctggatctggaaactgtacaggcagtgcagtctttgactcaagaagaaagcagtgagcatgagggcgcctaccaggactgtgaggaaactcttgcggcgtgtcagaccctgcagagttacacccaggctgacgaggaccctcagatgtccatggttgaagactgtcatgcgtcagaacataatagccctatctcctccgttcagtctcaccccagccagtcagtccgttcggtcagcagtcccaacgtgcctgcccttgagagtggctacacccagatcagcccagaacaaggatccctgtccgcaccctctatgcagaacatggagaccagccccatgatggatgtgccttccgtatcagaccactctcagcaggtggtggacagcggcttcagtgacctgggcagcattgagagcaccactgaaaactatgagaacccaagcagttacgactccacgatgggcggcagcatctgtgggaacagctcttcccagagcagctgctcctacggtgggctgtcgtcctccagcagcctcacccagagcagctgtgtggtcactcagcagatggccagcatgggcagcagctgcagcatgatgcagcagagcagcgtccagcctgctgccaactgcagcatcaagtcacctcagagctgcgtggtggagaggcctcccagtaaccagcagcagcagccgccaccaccgcctccacagcagccacagccgccgccgccacaaccacaaccagcaccacagcctccaccaccccagcagcagccgcaacagcagccgcagcctcagccccagcagcctccacccccaccccctccccagcagcagcccccgctgtcacagtgtagtatgaataacagtttcaccccagctcctatgatcatggagataccagaatctggaagcactgggaacataagtatctatgagaggattccaggggattttggtgccggcagctactctcaaccatcagccaccttcagcctagccaagctgcagcagctgaccaacaccattatggaccctcatgccatgccttatagccattctcctgctgtgacttcctatgcaaccagtgtttctctgtccaatacaggactggctcagctggctccatctcatcccttagctgggactcctcaagcacaagccaccatgacgccacccccaaacttggcatccactaccatgaacctcacatctcctctgcttcagtgcaacatgtctgccaccaacattggcattcctcacacgcagagattgcaagggcaaatgccagtgaaggggcacatttccatccgctccaagtctgcgccactgccctctgcggctgctcaccagcagcagctgtatggccgtagcccatcggcagttgccatgcaggctggccctcgcgcactggctgttcagcgtggcatgaacatgggggttaatctgatgcctactcccgcctataatgtcaattccatgaatatgaacaccttgaatgccatgaacagctatcgaatgacacagcccatgatgaacagcagttaccatagtaaccctgcctacatgaaccagacagcacagtatcctatgcagatgcagatgggaatgatggggagccaggcctatacccagcagcctatgcagcctaaccctcatgggaacatgatgtacacaggcccctcccatcacagctacatgaacgctgctggcgtgcccaagcagtcactcaacggaccttacatgagaagatgagcaagatgaacttgcaatcaaaaacttaaatatatataaataaaggaaccttttatactgacaaaccagagaaaaatggacctttttccagttaaaatattgctgtagatttagaggaatttttctttggtttattttattttttagaaaacctgatcttctctttttttgggttcattttgttctgggttttggttttcttcacaatcttgaacattttacagtagaactcatctaaaaatggatttggggatggggaaacatgcacaaaatcttttcataattaaaaagagccttactttctttacataccacatggacagaatttgtgtaaaagtgaattatctttattttaaaatgtatgtttcccctcactgtttgcagctcccaatgttgtcatttttaaatgttatatacatctcaagggttaaccagaccctttcctccaaacccaacctttcatttcctacttcattccagcaggaggcacttaggggagactcggatggggacatggagaacaacccaagctccttaaacttattattattgttaatattattattattattattaataaagtgaggcaggaaaatgcttctccttttaaaatcccctccactcctcacacacacacacctcttgaaacccttccccaagaatgtttctttatagacggacttcattgaaatctttgttgttcttgaatcaagtgtaatataatttttttcttcttttttaaaatattcccactcagcactcagagacacaaaaatactgtaagtctcaattaacagcagaatctcagagaaaagctgtttgcaatccaaatccagcctttggaggaatagagatggtcaattaacaatcaaaaagaggagattaacctcttgtttttttaccacctggtgaatcagccataacgcacacacacgccacccagcctcttgtttctagtatgtactttgaaatgctaactgagggtcttgatgcttgagcctttgactgataaaactcaaatagcagtccccagtgatttgcctcttaggttctttcttaaattgttggtggatgactgtacattttagtgatttgaaaaataactgacaaaccattgaaacagtttattttatgttggaagagatggcgcagatgtgtgtcagaagggagatcacggtgtgagtttcgtagctatttaagtgatacatacctctagtttttgtatgtcttttgagatcctgagttcatcccctgtgaatcagagtgcacaagcacctctcctgtgagtggctaatgagaagagggacagaccgaccaccagcacagtagggcagatctggacagcagaatgttataacgcaagttcatgtgttgctcccaactccattctcttttctctcgtgcaaccagtttgcccattctcttcctattacttgctccagggataggtaaaaaaaaaaaaaaaaaaaaaaaaaatatatatatatatatatacacacacacacacacacacacacacacatatatatatatatatattccatcattagaagatggaaactattataccacttggtatgtgcagtcaaatatccaaaagggggaagtactgcttagagaaatatctgtaagcattaaattctctcctttatttgtacattttatatagataaatttttaaagtactaattaggcattaacttttttcaaatgcacaggtttgttggtttttttaatacactttaattgactttctcaagcgtgctaggtagaaacgcagaattccacatcttcccgctctcagctctgagcatgtgcaaggctgtgtaggacccagtttctctgtatatactattccagttcccagtcatctatgtagaaagtgcactgtgctgccatcgccctacatcttcagctgtgtcattgcttcctggttggggtggggacggggtgggtcgggagggaggtatattgggaggagggtgggtcaaggcagaaggagaagctgttgaaatgagggccgtgaaatcagtttctgttggtttgcggttgtgtttggttttgtttgtttctttataaaaaattcaatcgggcagctcccttttccacaagcctctttgtgactgtagaactattgtagaaaaaaaaagttcttttctatattataaaagaaattatccaacacagtaatattggtacctgtcattttttcacttctgtttaaaaaaaatgtatttttagcaagataacttgggtaatcttctaaaaaagaaatttaaaaactcactgttagtgactttgatgccttttaaaataagagctttttcatttcattccatctttaaaattttttatctttgttgtagaatattaaaaactattttaagaaagataaattctctttaaagagatctctagcgtgtgtgaatagagctccagatgcctctaaaagccgcatgtacaaaggaagccacgtctatcctgtctgtttatatttgcttttcctgttttgtaacctctttgtactttgttcatggtgacttgtaagctaaggggaaggggtgcctagatgcctttgtatctctccatgtcacgcgctcctgggccagccggcctcccttcctctccttgtatgtaatacctttttttcccctttctagcaagtactttcaaaagaactctgtacattttaacataaaaaataaattatgttgagccattttgga

SEQ ID NO: 167757 - DNA, 9285 bp, Artificial Sequence
  derived and/or modified sequence
actgtctccaagatggcggccgtgtcagtttggggcatctccgcggtccggcccggggccccgggatctcggctgtccttcctcccggattctttctactaatccagatacttgttgaagtgctgactagtttcttggggaaagatgtcaaggaagagttgaaattcctagactggtgagcagagattgcggagtacagaatagccatcacccactctggcataagatgcacatttttctgctctggagccgggaatgaaatattcttgagttcttacaactttatgacgagacccatgtgtggtgctattgagaaattcattgggaagttggaagacatttcaatcaacaggttgttttggtttctatagtacaattggggtggcattctgttttgtgaaaggaggaaggacttaggccagaaaactcatatgctatggttaactggttcccagcctccgagaatcttgttttccatggtgtaaaacttactcagcatcaggataagggataacgactctatggatatacagaatccttcaccatggtaaaactcgcaaacccgctttatactgagtggattttggaggccatcaaaaaagtgaaaaagcagaaacagcgtccttcagaagaaaggatatgcaatgctgtgtcttcatcccatggcttggatcgtaaaactgttttagaacaattggagttgagtgttaaagatggaacaattttaaaagtctcaaataaaggactcaattcctataaagatcctgataatcctgggcgaatagcacttcctaagcctcggaaccatggaaaattggataataaacaaaatgtggattggaataaactgataaagcgggcagttgagggcttggcagagtctggtggctcaactttgaaaagcattgaacgttttttgaaaggtcagaaggatgtgtctgcattattcggaggcagtgctgcctctggctttcaccagcagttacgattggctatcaaacgtgccattggccacggcagactccttaaagatggacctctttatcggctcaacactaaagcaaccaacgtggatgggaaagagagttgtgagtctctttcctgtttacctccagtgtcccttcttccacatgaaaaggataagccggttgctgaaccaatccccatctgtagtttctgtcttggtacaaaagaacaaaaccgagaaaagaagccagaggaactcatctcctgtgccgactgtggcaacagtggccatccatcctgtttaaagttttcccctgaactaacggttcgagtgaaggccttacggtggcagtgcatcgagtgtaaaacatgcagctcctgtcgagatcaaggcaaaaatgcggataacatgctcttttgtgattcatgtgaccgaggttttcacatggagtgttgtgatccgccactcacccgtatgccaaaaggcatgtggatatgtcaaatatgtcgacctaggaaaaaaggacgaaaacttctacaaaagaaggcagcacagataaaacggcgctatactaatccaataggacgtccaaaaaacaggttaaagaaacaaaacacggtatcaaaaggtcccttcagcaaagttcgaactggccctggaaggggtaggaaacgaaaaatcactctttccagccaatcagcatcatcatcatcagaagaaggatatttagagcggatagatggcttggacttctgcagagatagcaatgtctccttgaagttcaacaagaaaaccaaagggctcattgatggccttaccaaattttttaccccttcccctgatgggcggaaagctcggggggaagtggtggactactctgagcaatatcgaatcagaaagaggggcaacaggaaatcaagcacttcagattggcccacagacaatcaggatggctgggatggcaaacaagaaaatgaggagcgactttttgggagccaggaaatcatgactgagaaagatatggaattatttcgtgatatccaagaacaagcactgcagaaagttggagtgactggtccccctgatccacaagtccgctgtccctctgtcattgagtttgggaagtatgaaattcacacctggtactcctccccatatcctcaagaatactcaaggctgcccaaattgtatctttgtgaattttgtctaaaatatatgaaaagtagaactattctgcagcagcacatgaagaaatgtggttggttccatcctcctgccaatgagatttacagaaagaataatatttctgtctttgaggttgatgggaatgtgagtaccatttattgtcaaaacctgtgtcttttggcaaagttgtttcttgaccacaaaaccctctattacgatgtggagccatttcttttttatgtactaacacagaatgatgtcaagggctgccaccttgttggctacttttctaaggaaaagcactgccaacagaagtacaatgtttcctgtataatgattcttcctcaataccagcgtaagggctatggcaggtttctcatcgatttcagttatttgttatcaaagcgtgaaggccaagcagggtctccagagaaaccgttatctgatctgggtcgtctttcctacatggcatattggaaaagtgtaatattggagtgcctttatcaccaaaatgacaagcagatcagcattaagaagttaagcaagttgactggaatctgccctcaagacatcacttccacactccaccacctacgaatgctggacttccgtagtgaccaatttgtgattatccgccgggaaaaacttatccaggatcacatggcaaagcttcagctgaatttgcgacctgtagatgtagatccagaatgtttgcgctggactccagtcatagtgtccaactctgtggtctcagaggaggaagaagaggaggctgaggaaggagaaaacgaagagccacagtgccaggaaagagaattagagatcagtgtgggaaagtctgtgtctcatgagaacaaagaacaagattcttattcagtagaaagtgaaaagaaaccagaagttatggctccagtcagttctacacgtttgagcaaacaagtccttcctcatgatagtcttcctgcaaatagccagccatctcggaggggccgctgggggaggaagaacagaaaaacccaggaacgttttggtgataaagattctaaactgctcttggaagagacgtcttcagctcctcaggaacaatatggagaatgtggggagaaatcagaagccacccaggaacaatacactgaaagtgaagaacagctggtggcttctgaggagcagccaagccaggacgggaaacctgaccttcccaagagaagactcagtgagggggttgagccctggcgaggacagctcaagaaaagccctgaggctctgaagtgcagattaacagaaggaagtgagaggctgccccgtcgctacagtgagggtgacagggctgtcctcaggggcttcagtgagagcagcgaggaggaggaggagccggaaagccctcggtcaagctcgccaccaattctcacaaagcccacgctgaagcgaaagaaaccatttctccaccgaaggaggagagtccgaaagcgcaaacaccacaatagcagtgtagtcacagaaactatttctgagaccactgaagtgttagatgaaccttttgaagattctgactccgagaggccaatgccaagattagaacccacgtttgagatcgatgaagaagaggaggaagaggatgaaaatgaacttttccctagagaatacttccgtcgtttgtcttcgcaggatgtactcaggtgtcagtcctcttctaagaggaagtctaaagatgaagaagaagatgaagagtcagatgatgctgatgacactcctatcttaaagccagtatctcttttgcgaaaacgtgatgtgaagaattctcctcttgagccagatacatccacacctttgaaaaagaaaaagggatggcccaaaggcaagagccgcaaaccaatccactggaagaaaagacctggtcgaaaaccaggatttaagttgagtcgggaaatcatgccagtttctactcaagcatgcgtcattgagcccatcgtttccattcctaaagctggacgtaaacccaagatccaggagagtgaagaaactgttgagccaaaagaagacatgcccctacccgaggagaggaaggaggaggaggagatgcaagcagaggcagaagaggctgaagagggtgaggaagaggatgcagccagcagtgaagtcccagcagcctctccagcagacagcagcaatagtcctgagaccgaaaccaaggagcctgaggtggaggaggaagaagagaagccccgtgtctcagaggagcagaggcagtcagaggaggagcagcaggaattagaggagccagagccagaggaggaggaagatgcagctgcagagactgcccagaatgacgaccacgacgctgatgatgaggatgatggccacctggagtccacaaagaaaaaggagctagaggaacagcccacgagggaagatgtcaaggaggagcctggtgttcaagagtcttttttagatgctaatatgcagaagagtagggaaaagataaaggataaagaggaaaccgagctggattccgaagaggagcagccttcccatgacacgtccgtggtgtcagagcagatggctgggtctgaggacgaccacgaagaagactcccacactaaggaagagttaatcgaattaaaagaggaggaagagattcctcatagtgagctggatctggaaactgtacaggcagtgcagtctttgactcaagaagaaagcagtgagcatgagggcgcctaccaggactgtgaggaaactcttgcggcgtgtcagaccctgcagagttacacccaggctgacgaggaccctcagatgtccatggttgaagactgtcatgcgtcagaacataatagccctatctcctccgttcagtctcaccccagccagtcagtccgttcggtcagcagtcccaacgtgcctgcccttgagagtggctacacccagatcagcccagaacaaggatccctgtccgcaccctctatgcagaacatggagaccagccccatgatggatgtgccttccgtatcagaccactctcagcaggtggtggacagcggcttcagtgacctgggcagcattgagagcaccactgaaaactatgagaacccaagcagttacgactccacgatgggcggcagcatctgtgggaacagctcttcccagagcagctgctcctacggtgggctgtcgtcctccagcagcctcacccagagcagctgtgtggtcactcagcagatggccagcatgggcagcagctgcagcatgatgcagcagagcagcgtccagcctgctgccaactgcagcatcaagtcacctcagagctgcgtggtggagaggcctcccagtaaccagcagcagcagccgccaccaccgcctccacagcagccacagccgccgccgccacaaccacaaccagcaccacagcctccaccaccccagcagcagccgcaacagcagccgcagcctcagccccagcagcctccacccccaccccctccccagcagcagcccccgctgtcacagtgtagtatgaataacagtttcaccccagctcctatgatcatggagataccagaatctggaagcactgggaacataagtatctatgagaggattccaggggattttggtgccggcagctactctcaaccatcagccaccttcagcctagccaagctgcagcagctgaccaacaccattatggaccctcatgccatgccttatagccattctcctgctgtgacttcctatgcaaccagtgtttctctgtccaatacaggactggctcagctggctccatctcatcccttagctgggactcctcaagcacaagccaccatgacgccacccccaaacttggcatccactaccatgaacctcacatctcctctgcttcagtgcaacatgtctgccaccaacattggcattcctcacacgcagagattgcaagggcaaatgccagtgaaggggcacatttccatccgctccaagtctgcgccactgccctctgcggctgctcaccagcagcagctgtatggccgtagcccatcggcagttgccatgcaggctggccctcgcgcactggctgttcagcgtggcatgaacatgggggttaatctgatgcctactcccgcctataatgtcaattccatgaatatgaacaccttgaatgccatgaacagctatcgaatgacacagcccatgatgaacagcagttaccatagtaaccctgcctacatgaaccagacagcacagtatcctatgcagatgcagatgggaatgatggggagccaggcctatacccagcagcctatgcagcctaaccctcatgggaacatgatgtacacaggcccctcccatcacagctacatgaacgctgctggcgtgcccaagcagtcactcaacggaccttacatgagaagatgagcaagatgaacttgcaatcaaaaacttaaatatatataaataaaggaaccttttatactgacaaaccagagaaaaatggacctttttccagttaaaatattgctgtagatttagaggaatttttctttggtttattttattttttagaaaacctgatcttctctttttttgggttcattttgttctgggttttggttttcttcacaatcttgaacattttacagtagaactcatctaaaaatggatttggggatggggaaacatgcacaaaatcttttcataattaaaaagagccttactttctttacataccacatggacagaatttgtgtaaaagtgaattatctttattttaaaatgtatgtttcccctcactgtttgcagctcccaatgttgtcatttttaaatgttatatacatctcaagggttaaccagaccctttcctccaaacccaacctttcatttcctacttcattccagcaggaggcacttaggggagactcggatggggacatggagaacaacccaagctccttaaacttattattattgttaatattattattattattattaataaagtgaggcaggaaaatgcttctccttttaaaatcccctccactcctcacacacacacacctcttgaaacccttccccaagaatgtttctttatagacggacttcattgaaatctttgttgttcttgaatcaagtgtaatataatttttttcttcttttttaaaatattcccactcagcactcagagacacaaaaatactgtaagtctcaattaacagcagaatctcagagaaaagctgtttgcaatccaaatccagcctttggaggaatagagatggtcaattaacaatcaaaaagaggagattaacctcttgtttttttaccacctggtgaatcagccataacgcacacacacgccacccagcctcttgtttctagtatgtactttgaaatgctaactgagggtcttgatgcttgagcctttgactgataaaactcaaatagcagtccccagtgatttgcctcttaggttctttcttaaattgttggtggatgactgtacattttagtgatttgaaaaataactgacaaaccattgaaacagtttattttatgttggaagagatggcgcagatgtgtgtcagaagggagatcacggtgtgagtttcgtagctatttaagtgatacatacctctagtttttgtatgtcttttgagatcctgagttcatcccctgtgaatcagagtgcacaagcacctctcctgtgagtggctaatgagaagagggacagaccgaccaccagcacagtagggcagatctggacagcagaatgttataacgcaagttcatgtgttgctcccaactccattctcttttctctcgtgcaaccagtttgcccattctcttcctattacttgctccagggataggtaaaaaaaaaaaaaaaaaaaaaaaaaatatatatatatatatatacacacacacacacacacacacacacacatatatatatatatatattccatcattagaagatggaaactattataccacttggtatgtgcagtcaaatatccaaaagggggaagtactgcttagagaaatatctgtaagcattaaattctctcctttatttgtacattttatatagataaatttttaaagtactaattaggcattaacttttttcaaatgcacaggtttgttggtttttttaatacactttaattgactttctcaagcgtgctaggtagaaacgcagaattccacatcttcccgctctcagctctgagcatgtgcaaggctgtgtaggacccagtttctctgtatatactattccagttcccagtcatctatgtagaaagtgcactgtgctgccatcgccctacatcttcagctgtgtcattgcttcctggttggggtggggacggggtgggtcgggagggaggtatattgggaggagggtgggtcaaggcagaaggagaagctgttgaaatgagggccgtgaaatcagtttctgttggtttgcggttgtgtttggttttgtttgtttctttataaaaaattcaatcgggcagctcccttttccacaagcctctttgtgactgtagaactattgtagaaaaaaaaagttcttttctatattataaaagaaattatccaacacagtaatattggtacctgtcattttttcacttctgtttaaaaaaaatgtatttttagcaagataacttgggtaatcttctaaaaaagaaatttaaaaactcactgttagtgactttgatgccttttaaaataagagctttttcatttcattccatctttaaaattttttatctttgttgtagaatattaaaaactattttaagaaagataaattctctttaaagagatctctagcgtgtgtgaatagagctccagatgcctctaaaagccgcatgtacaaaggaagccacgtctatcctgtctgtttatatttgcttttcctgttttgtaacctctttgtactttgttcatggtgacttgtaagctaaggggaaggggtgcctagatgcctttgtatctctccatgtcacgcgctcctgggccagccggcctcccttcctctccttgtatgtaatacctttttttcccctttctagcaagtactttcaaaagaactctgtacattttaacataaaaaataaattatgttgagccattttgga

SEQ ID NO: 167758 - DNA, 9241 bp, Artificial Sequence
  derived and/or modified sequence
actgtctccaagatggcggccgtgtcagtttggggcatctccgcggtccggcccggggccccgggatctcggctgtccttcctcccggattctttctactaatccagatacttgttgaagtgctgactagtttcttggggaaagatgtcaaggaagagttgaaattcctagactggcataagatgcacatttttctgctctggagccgggaatgaaatattcttgagttcttacaactttatgacgagacccatgtgtggtgctattgagaaattcattgggaagttggaagacatttcaatcaacaggttgttttggtttctatagtacaattggggtggcattctgttttgtgaaaggaggaaggacttaggccagaaaactcatatgctatggttaactggttcccagcctccgagaatcttgttttccatggtgtaaaacttactcagcatcaggataagggataacgactctatggatatacagaatccttcaccatggtaaaactcgcaaacccgctttatactgagtggattttggaggccatcaaaaaagtgaaaaagcagaaacagcgtccttcagaagaaaggatatgcaatgctgtgtcttcatcccatggcttggatcgtaaaactgttttagaacaattggagttgagtgttaaagatggaacaattttaaaagtctcaaataaaggactcaattcctataaagatcctgataatcctgggcgaatagcacttcctaagcctcggaaccatggaaaattggataataaacaaaatgtggattggaataaactgataaagcgggcagttgagggcttggcagagtctggtggctcaactttgaaaagcattgaacgttttttgaaaggtcagaaggatgtgtctgcattattcggaggcagtgctgcctctggctttcaccagcagttacgattggctatcaaacgtgccattggccacggcagactccttaaagatggacctctttatcggctcaacactaaagcaaccaacgtggatgggaaagagagttgtgagtctctttcctgtttacctccagtgtcccttcttccacatgaaaaggataagccggttgctgaaccaatccccatctgtagtttctgtcttggtacaaaagaacaaaaccgagaaaagaagccagaggaactcatctcctgtgccgactgtggcaacagtggccatccatcctgtttaaagttttcccctgaactaacggttcgagtgaaggccttacggtggcagtgcatcgagtgtaaaacatgcagctcctgtcgagatcaaggcaaaaatgcggataacatgctcttttgtgattcatgtgaccgaggttttcacatggagtgttgtgatccgccactcacccgtatgccaaaaggcatgtggatatgtcaaatatgtcgacctaggaaaaaaggacgaaaacttctacaaaagaaggcagcacagataaaacggcgctatactaatccaataggacgtccaaaaaacaggttaaagaaacaaaacacggtatcaaaaggtcccttcagcaaagttcgaactggccctggaaggggtaggaaacgaaaaatcactctttccagccaatcagcatcatcatcatcagaagaaggatatttagagcggatagatggcttggacttctgcagagatagcaatgtctccttgaagttcaacaagaaaaccaaagggctcattgatggccttaccaaattttttaccccttcccctgatgggcggaaagctcggggggaagtggtggactactctgagcaatatcgaatcagaaagaggggcaacaggaaatcaagcacttcagattggcccacagacaatcaggatggctgggatggcaaacaagaaaatgaggagcgactttttgggagccaggaaatcatgactgagaaagatatggaattatttcgtgatatccaagaacaagcactgcagaaagttggagtgactggtccccctgatccacaagtccgctgtccctctgtcattgagtttgggaagtatgaaattcacacctggtactcctccccatatcctcaagaatactcaaggctgcccaaattgtatctttgtgaattttgtctaaaatatatgaaaagtagaactattctgcagcagcacatgaagaaatgtggttggttccatcctcctgccaatgagatttacagaaagaataatatttctgtctttgaggttgatgggaatgtgagtaccatttattgtcaaaacctgtgtcttttggcaaagttgtttcttgaccacaaaaccctctattacgatgtggagccatttcttttttatgtactaacacagaatgatgtcaagggctgccaccttgttggctacttttctaaggaaaagcactgccaacagaagtacaatgtttcctgtataatgattcttcctcaataccagcgtaagggctatggcaggtttctcatcgatttcagttatttgttatcaaagcgtgaaggccaagcagggtctccagagaaaccgttatctgatctgggtcgtctttcctacatggcatattggaaaagtgtaatattggagtgcctttatcaccaaaatgacaagcagatcagcattaagaagttaagcaagttgactggaatctgccctcaagacatcacttccacactccaccacctacgaatgctggacttccgtagtgaccaatttgtgattatccgccgggaaaaacttatccaggatcacatggcaaagcttcagctgaatttgcgacctgtagatgtagatccagaatgtttgcgctggactccagtcatagtgtccaactctgtggtctcagaggaggaagaagaggaggctgaggaaggagaaaacgaagagccacagtgccaggaaagagaattagagatcagtgtgggaaagtctgtgtctcatgagaacaaagaacaagattcttattcagtagaaagtgaaaagaaaccagaagttatggctccagtcagttctacacgtttgagcaaacaagtccttcctcatgatagtcttcctgcaaatagccagccatctcggaggggccgctgggggaggaagaacagaaaaacccaggaacgttttggtgataaagattctaaactgctcttggaagagacgtcttcagctcctcaggaacaatatggagaatgtggggagaaatcagaagccacccaggaacaatacactgaaagtgaagaacagctggtggcttctgaggagcagccaagccaggacgggaaacctgaccttcccaagagaagactcagtgagggggttgagccctggcgaggacagctcaagaaaagccctgaggctctgaagtgcagattaacagaaggaagtgagaggctgccccgtcgctacagtgagggtgacagggctgtcctcaggggcttcagtgagagcagcgaggaggaggaggagccggaaagccctcggtcaagctcgccaccaattctcacaaagcccacgctgaagcgaaagaaaccatttctccaccgaaggaggagagtccgaaagcgcaaacaccacaatagcagtgtagtcacagaaactatttctgagaccactgaagtgttagatgaaccttttgaagattctgactccgagaggccaatgccaagattagaacccacgtttgagatcgatgaagaagaggaggaagaggatgaaaatgaacttttccctagagaatacttccgtcgtttgtcttcgcaggatgtactcaggtgtcagtcctcttctaagaggaagtctaaagatgaagaagaagatgaagagtcagatgatgctgatgacactcctatcttaaagccagtatctcttttgcgaaaacgtgatgtgaagaattctcctcttgagccagatacatccacacctttgaaaaagaaaaagggatggcccaaaggcaagagccgcaaaccaatccactggaagaaaagacctggtcgaaaaccaggatttaagttgagtcgggaaatcatgccagtttctactcaagcatgcgtcattgagcccatcgtttccattcctaaagctggacgtaaacccaagatccaggagagtgaagaaactgttgagccaaaagaagacatgcccctacccgaggagaggaaggaggaggaggagatgcaagcagaggcagaagaggctgaagagggtgaggaagaggatgcagccagcagtgaagtcccagcagcctctccagcagacagcagcaatagtcctgagaccgaaaccaaggagcctgaggtggaggaggaagaagagaagccccgtgtctcagaggagcagaggcagtcagaggaggagcagcaggaattagaggagccagagccagaggaggaggaagatgcagctgcagagactgcccagaatgacgaccacgacgctgatgatgaggatgatggccacctggagtccacaaagaaaaaggagctagaggaacagcccacgagggaagatgtcaaggaggagcctggtgttcaagagtcttttttagatgctaatatgcagaagagtagggaaaagataaaggataaagaggaaaccgagctggattccgaagaggagcagccttcccatgacacgtccgtggtgtcagagcagatggctgggtctgaggacgaccacgaagaagactcccacactaaggaagagttaatcgaattaaaagaggaggaagagattcctcatagtgagctggatctggaaactgtacaggcagtgcagtctttgactcaagaagaaagcagtgagcatgagggcgcctaccaggactgtgaggaaactcttgcggcgtgtcagaccctgcagagttacacccaggctgacgaggaccctcagatgtccatggttgaagactgtcatgcgtcagaacataatagccctatctcctccgttcagtctcaccccagccagtcagtccgttcggtcagcagtcccaacgtgcctgcccttgagagtggctacacccagatcagcccagaacaaggatccctgtccgcaccctctatgcagaacatggagaccagccccatgatggatgtgccttccgtatcagaccactctcagcaggtggtggacagcggcttcagtgacctgggcagcattgagagcaccactgaaaactatgagaacccaagcagttacgactccacgatgggcggcagcatctgtgggaacagctcttcccagagcagctgctcctacggtgggctgtcgtcctccagcagcctcacccagagcagctgtgtggtcactcagcagatggccagcatgggcagcagctgcagcatgatgcagcagagcagcgtccagcctgctgccaactgcagcatcaagtcacctcagagctgcgtggtggagaggcctcccagtaaccagcagcagcagccgccaccaccgcctccacagcagccacagccgccgccgccacaaccacaaccagcaccacagcctccaccaccccagcagcagccgcaacagcagccgcagcctcagccccagcagcctccacccccaccccctccccagcagcagcccccgctgtcacagtgtagtatgaataacagtttcaccccagctcctatgatcatggagataccagaatctggaagcactgggaacataagtatctatgagaggattccaggggattttggtgccggcagctactctcaaccatcagccaccttcagcctagccaagctgcagcagctgaccaacaccattatggaccctcatgccatgccttatagccattctcctgctgtgacttcctatgcaaccagtgtttctctgtccaatacaggactggctcagctggctccatctcatcccttagctgggactcctcaagcacaagccaccatgacgccacccccaaacttggcatccactaccatgaacctcacatctcctctgcttcagtgcaacatgtctgccaccaacattggcattcctcacacgcagagattgcaagggcaaatgccagtgaaggggcacatttccatccgctccaagtctgcgccactgccctctgcggctgctcaccagcagcagctgtatggccgtagcccatcggcagttgccatgcaggctggccctcgcgcactggctgttcagcgtggcatgaacatgggggttaatctgatgcctactcccgcctataatgtcaattccatgaatatgaacaccttgaatgccatgaacagctatcgaatgacacagcccatgatgaacagcagttaccatagtaaccctgcctacatgaaccagacagcacagtatcctatgcagatgcagatgggaatgatggggagccaggcctatacccagcagcctatgcagcctaaccctcatgggaacatgatgtacacaggcccctcccatcacagctacatgaacgctgctggcgtgcccaagcagtcactcaacggaccttacatgagaagatgagcaagatgaacttgcaatcaaaaacttaaatatatataaataaaggaaccttttatactgacaaaccagagaaaaatggacctttttccagttaaaatattgctgtagatttagaggaatttttctttggtttattttattttttagaaaacctgatcttctctttttttgggttcattttgttctgggttttggttttcttcacaatcttgaacattttacagtagaactcatctaaaaatggatttggggatggggaaacatgcacaaaatcttttcataattaaaaagagccttactttctttacataccacatggacagaatttgtgtaaaagtgaattatctttattttaaaatgtatgtttcccctcactgtttgcagctcccaatgttgtcatttttaaatgttatatacatctcaagggttaaccagaccctttcctccaaacccaacctttcatttcctacttcattccagcaggaggcacttaggggagactcggatggggacatggagaacaacccaagctccttaaacttattattattgttaatattattattattattattaataaagtgaggcaggaaaatgcttctccttttaaaatcccctccactcctcacacacacacacctcttgaaacccttccccaagaatgtttctttatagacggacttcattgaaatctttgttgttcttgaatcaagtgtaatataatttttttcttcttttttaaaatattcccactcagcactcagagacacaaaaatactgtaagtctcaattaacagcagaatctcagagaaaagctgtttgcaatccaaatccagcctttggaggaatagagatggtcaattaacaatcaaaaagaggagattaacctcttgtttttttaccacctggtgaatcagccataacgcacacacacgccacccagcctcttgtttctagtatgtactttgaaatgctaactgagggtcttgatgcttgagcctttgactgataaaactcaaatagcagtccccagtgatttgcctcttaggttctttcttaaattgttggtggatgactgtacattttagtgatttgaaaaataactgacaaaccattgaaacagtttattttatgttggaagagatggcgcagatgtgtgtcagaagggagatcacggtgtgagtttcgtagctatttaagtgatacatacctctagtttttgtatgtcttttgagatcctgagttcatcccctgtgaatcagagtgcacaagcacctctcctgtgagtggctaatgagaagagggacagaccgaccaccagcacagtagggcagatctggacagcagaatgttataacgcaagttcatgtgttgctcccaactccattctcttttctctcgtgcaaccagtttgcccattctcttcctattacttgctccagggataggtaaaaaaaaaaaaaaaaaaaaaaaaaatatatatatatatatatacacacacacacacacacacacacacacatatatatatatatatattccatcattagaagatggaaactattataccacttggtatgtgcagtcaaatatccaaaagggggaagtactgcttagagaaatatctgtaagcattaaattctctcctttatttgtacattttatatagataaatttttaaagtactaattaggcattaacttttttcaaatgcacaggtttgttggtttttttaatacactttaattgactttctcaagcgtgctaggtagaaacgcagaattccacatcttcccgctctcagctctgagcatgtgcaaggctgtgtaggacccagtttctctgtatatactattccagttcccagtcatctatgtagaaagtgcactgtgctgccatcgccctacatcttcagctgtgtcattgcttcctggttggggtggggacggggtgggtcgggagggaggtatattgggaggagggtgggtcaaggcagaaggagaagctgttgaaatgagggccgtgaaatcagtttctgttggtttgcggttgtgtttggttttgtttgtttctttataaaaaattcaatcgggcagctcccttttccacaagcctctttgtgactgtagaactattgtagaaaaaaaaagttcttttctatattataaaagaaattatccaacacagtaatattggtacctgtcattttttcacttctgtttaaaaaaaatgtatttttagcaagataacttgggtaatcttctaaaaaagaaatttaaaaactcactgttagtgactttgatgccttttaaaataagagctttttcatttcattccatctttaaaattttttatctttgttgtagaatattaaaaactattttaagaaagataaattctctttaaagagatctctagcgtgtgtgaatagagctccagatgcctctaaaagccgcatgtacaaaggaagccacgtctatcctgtctgtttatatttgcttttcctgttttgtaacctctttgtactttgttcatggtgacttgtaagctaaggggaaggggtgcctagatgcctttgtatctctccatgtcacgcgctcctgggccagccggcctcccttcctctccttgtatgtaatacctttttttcccctttctagcaagtactttcaaaagaactctgtacattttaacataaaaaataaattatgttgagccattttgga

SEQ ID NO: 167759 - DNA, 3592 bp, Artificial Sequence
  derived and/or modified sequence
actgtctccaagatggcggccgtgtcagtttggggcatctccgcggtccggcccggggccccgggatctcggctgtccttcctcccggcataagatgcacatttttctgctctggagccgggaatgaaatattcttgagttcttacaactttatgacgagacccatgtgtggtgctattgagaaattcattgggaagttggaagacatttcaatcaacaggttgttttggtttctatagtacaattggggtggcattctgttttgtgaaaggaggaaggacttaggccagaaaactcatatgctatggttaactggttcccagcctccgagaatcttgttttccatggtgtaaaacttactcagcatcaggataagggataacgactctatggatatacagaatccttcaccatggtaaaactcgcaaacccgctttatactgagtggattttggaggccatcaaaaaagtgaaaaagcagaaacagcgtccttcagaagaaaggatatgcaatgctgtgtcttcatcccatggcttggatcgtaaaactgttttagaacaattggagttgagtgttaaagatggaacaattttaaaagtctcaaataaaggactcaattcctataaagatcctgataatcctgggcgaatagcacttcctaagcctcggaaccatggaaaattggataataaacaaaatgtggattggaataaactgataaagcgggcagttgagggcttggcagagtctggtggctcaactttgaaaagcattgaacgttttttgaaaggtcagaaggatgtgtctgcattattcggaggcagtgctgcctctggctttcaccagcagttacgattggctatcaaacgtgccattggccacggcagactccttaaagatggacctctttatcggctcaacactaaagcaaccaacgtggatgggaaagagagttgtgagtctctttcctgtttacctccagtgtcccttcttccacatgaaaaggataagccggttgctgaaccaatccccatctgtagtttctgtcttggtacaaaagaacaaaaccgagaaaagaagccagaggaactcatctcctgtgccgactgtggcaacagtggccatccatcctgtttaaagttttcccctgaactaacggttcgagtgaaggccttacggtggcagtgcatcgagtgtaaaacatgcagctcctgtcgagatcaaggcaaaaatgcggataacatgctcttttgtgattcatgtgaccgaggttttcacatggagtgttgtgatccgccactcacccgtatgccaaaaggcatgtggatatgtcaaatatgtcgacctaggaaaaaaggacgaaaacttctacaaaagaaggcagcacagataaaacggcgctatactaatccaataggacgtccaaaaaacaggttaaagaaacaaaacacggtatcaaaaggtcccttcagcaaagttcgaactggccctggaaggggtaggaaacgaaaaatcactctttccagccaatcagcatcatcatcatcagaagaaggatatttagagcggatagatggcttggacttctgcagagatagcaatgtctccttgaagttcaacaagaaaaccaaagggctcattgatggccttaccaaattttttaccccttcccctgatgggcggaaagctcggggggaagtggtggactactctgagcaatatcgaatcagaaagaggggcaacaggaaatcaagcacttcagattggcccacagacaatcaggatggctgggatggcaaacaagaaaatgaggagcgactttttgggagccaggaaatcatgactgagaaagatatggaattatttcgtgatatccaagaacaagcactgcagaaagttggagtgactggtccccctgatccacaagtccgctgtccctctgtcattgagtttgggaagtatgaaattcacacctggtactcctccccatatcctcaagaatactcaaggctgcccaaattgtatctttgtgaattttgtctaaaatatatgaaaagtagaactattctgcagcagcacatgaagaaatgtggttggttccatcctcctgccaatgagatttacagaaagaataatatttctgtctttgaggttgatgggaatgtgagtaccatttattgtcaaaacctgtgtcttttggcaaagttgtttcttgaccacaaaaccctctattacgatgtggagccatttcttttttatgtactaacacagaatgatgtcaagggctgccaccttgttggctacttttctaaggaaaagcactgccaacagaagtacaatgtttcctgtataatgattcttcctcaataccagcgtaagggctatggcaggtttctcatcgatttcagttatttgttatcaaagcgtgaaggccaagcagggtctccagagaaaccgttatctgatctgggtcgtctttcctacatggcatattggaaaagtgtaatattggagtgcctttatcaccaaaatgacaagcagatcagcattaagaagttaagcaagttgactggaatctgccctcaagacatcacttccacactccaccacctacgaatgctggacttccgtagtgaccaatttgtgattatccgccgggaaaaacttatccaggatcacatggcaaagcttcagctgaatttgcgacctgtagatgtagatccagaatgtttgcgctggactccagtcatagtgtccaactctgtggtctcagaggaggaagaagaggaggctgaggaaggagaaaacgaagagccacagtgccaggaaagagaattagagatcagtgtaagggcatgaatagtctctatttttgatgacagaagatatatttttgatttcatgagtatttataataatgtattatgatcatctttcacagaaaagtaaattcacattagaatgtcaagagttttatttcagtggtagagatttcaagaagactggacctggtttacttaagtatttttaagccttggacaattaggaggagaccatcaaatttcttataatgtgttacttgtgagaaaaatatttgttaccagggtgccaagaagcagctcagttttaagctggatagtagttgagaaatctgaattgaatccaaatctgacagtttttaaaaatgaaatggaggttgggtgtggtgtttcatgcctgtaatctcagcgctttaggaggcccaggcgggaggattgcttgagattaggagttcaggacaaccagggaaatatagtgagaccccatctctacaaaaaaaacccaacaacaaaatgaaatggagatacattttccttaaatagaatattaagtaactattgtaaacttgtgtatgttttctgatggggcaccaaaacatcctgtggacacacagatctctttagccgttaaagggttgctggtgaactgtagtgcatgtgtcattgtcagtatttttcttcatgtgatgcatacttttatagctcttttttttaagcagtgcttcatcctttcaacaccggtatcctcctttaataaacataaaaaatccca

SEQ ID NO: 167760 - DNA, 6015 bp, Artificial Sequence
  derived and/or modified sequence
atggtgaaattggcgaatccactgtacaccgaatggatccttgaagccatcaagaaggtgaagaagcagaagcagaggccctcagaggagcgtatttgtaacgccgtcagctcctctcacgggctagaccgcaaaacagtgctcgaacagcttgaactgtccgtcaaggacggcaccattcttaaggtcagcaataaggggttaaactcttataaagaccccgataatcccggccgaatcgccttgcctaagccaagaaaccacgggaagctggataacaaacaaaacgtggactggaataaattgatcaagcgcgcggtcgagggtctcgccgagtccggaggtagcactctcaagagtatagaacgctttttgaaaggtcagaaggacgtatctgctctgttcggcggttctgccgcaagtggattccaccagcaattacgcttagccatcaaacgtgctatcggccatggccgattgctgaaggatggccctctgtataggctgaacacaaaggctacgaatgttgatggtaaggagagctgtgagtcactaagctgtctaccccctgtatccttgctgccccacgaaaaggacaaaccagtcgctgagccaatcccaatctgcagcttttgcctcggcacaaaggaacagaatagagagaaaaaaccggaggaacttatcagttgtgcagattgcggcaacagtgggcatcccagctgtctcaaattttcccccgagctgactgttcgggtcaaggccctgcggtggcagtgcatcgaatgcaagacttgtagtagttgcagagaccaagggaaaaacgccgataatatgctgttctgcgattcatgcgatcgcggatttcacatggagtgctgcgaccccccactgactagaatgcccaagggtatgtggatctgtcaaatatgccggccacggaaaaagggccgaaagctgctccaaaagaaagcagctcagattaagcgccgctacacaaatcccatcggccggcctaagaacagactgaagaagcagaatacagtgtctaagggtccattttccaaagtgcgcacggggccgggtaggggacggaaacggaagattaccctttcctctcagtcagccagttcctcatccgaggagggttatctggagagaattgacggcctcgatttttgtcgggactccaacgtttccctgaaattcaataaaaaaaccaagggcttaattgatggactgacaaaattcttcacaccatctcccgatggtagaaaagcgagaggcgaagtagtggactattcagaacaatatcgcattagaaagcgcgggaaccgaaagagctctacttctgattggccgaccgacaatcaagacggctgggatggcaagcaggaaaacgaggaaagactctttgggagtcaggagatcatgaccgaaaaagacatggagctattccgcgacatacaagagcaggcgctgcagaaagttggagtgactgggccacctgatccacaagtaaggtgtccgtcagttattgagttcgggaaatatgagatccatacttggtattcctccccttacccccaagagtactctcgtctccccaagttatatttgtgtgagttctgcctaaagtacatgaaaagcagaacaatactgcagcagcacatgaagaaatgcggatggttccacccccccgctaatgagatttatagaaagaacaatatctctgtctttgaggttgacggaaacgtgtctaccatttattgccagaacctctgtttactcgctaaactgttcctggatcacaagacattatactacgatgtggaaccctttcttttttacgtgctcactcagaatgatgtgaagggctgtcacctggttggatacttctcaaaggaaaaacactgtcagcagaagtacaacgtgagctgtattatgattctaccgcaataccagaggaaagggtatgggcgcttcctcatcgacttcagctatctgctgtctaagcgggagggtcaggcaggaagccctgaaaagccactgtcagacctgggccggttgagctacatggcatactggaagtcagtgatcctcgagtgcctgtaccaccagaatgataaacagatcagcattaaaaaactgagcaagctgacgggaatctgtccccaggacattacatcgactcttcatcacctgaggatgctggatttccggagtgaccagttcgtcattatcaggcgcgaaaaattgatacaagaccatatggccaaactacagttgaacctgagacccgtcgacgttgatcccgaatgtcttaggtggacccccgtgattgtgtcgaactctgtggtatccgaagaggaagaggaagaggctgaagagggcgaaaatgaggagccacagtgccaggagcgcgaactggaaattagcgtcgggaagtccgtcagtcatgagaacaaggaacaggactcttactcggtggagagcgagaaaaaacctgaagttatggctccagtcagcagcacaagactgagcaagcaggtcttacctcatgactccctgcctgccaattcccagccgagtcgtagagggcgctgggggaggaaaaacaggaagacccaggagcgcttcggtgacaaagacagtaaacttctcctggaggaaacgtcttctgctccacaggagcagtacggtgaatgcggggagaagagcgaagctacacaagaacagtacaccgagtctgaggaacagctggtagcaagcgaggaacagccatctcaagacggcaaacctgatctgcctaagcggcggttgagtgaaggagttgaaccgtggagaggacaacttaaaaagagtcccgaggctctcaaatgccgtcttaccgagggcagtgagagacttccgcgcaggtattccgagggtgaccgagctgtgctgagaggcttttcagaaagctcggaggaggaagaagagccagagagtccccgatcgtcatcccctccgattcttactaagcctactctgaaacgaaaaaaaccctttctgcatcgacgtagaagagtacggaaacggaagcaccataatagctcggtggtcactgagaccatctcagaaacaacggaagtcttggacgagccgtttgaggactcagactccgaaaggcctatgccacgtctggagcctacctttgagatcgacgaggaagaagaagaggaggacgagaacgagctattccctagggagtacttccgaaggctcagctcacaggatgtgttaagatgtcagtcctcttccaagaggaagtccaaagatgaggaggaggatgaagaaagcgacgatgcggacgacacccctatcctaaagccagtaagcttgcttcgtaagagagacgtgaagaactccccattggaacctgacacctcaactccactgaaaaaaaagaaaggatggcctaagggaaagtccagaaaacccattcattggaaaaagcgcccaggacgaaagcccgggttcaaactctcacgcgagatcatgcctgtaagcacgcaggcttgcgtcattgaacccatcgtctcaatcccgaaagctggcaggaaacccaagattcaggaatcggaagagacagtcgagcctaaagaggacatgcccttgcccgaagagcgcaaggaagaggaggagatgcaggccgaagctgaagaagcagaggagggtgaggaggaggacgcggcaagttcagaggtccctgccgccagtcccgccgactcctccaatagccctgagaccgaaacaaaggagcccgaggtagaggaggaggaagagaaaccccgagttagcgaagaacaacggcagagcgaggaagaacagcaagagcttgaggaacccgagccagaggaggaggaagacgctgccgccgaaacagcacagaacgatgaccacgatgccgatgatgaggatgatgggcatctggagtcgacgaagaagaaggagctggaggaacagccaactcgcgaggatgttaaggaggagccaggtgtgcaagagtcctttctggatgcgaacatgcagaagtccagagaaaagattaaggacaaagaggagacagaactggatagcgaggaagaacaaccatcccacgatacctcggtcgtctctgagcagatggcagggagcgaagacgatcatgaagaagactcccatactaaggaggagttaatcgagttgaaggaggaagaagagatccctcactctgagttggatctagaaacagtacaggcagtgcaatcactgacacaggaagaatcttctgagcatgaaggggcttaccaagattgcgaggagaccttggccgcttgtcagactttgcagtcctacacacaggctgacgaagacccgcagatgagtatggtggaagactgtcacgcgtcggaacacaactcaccgatctccagcgtgcaaagccacccttctcagagcgtgcggagcgtttcttcgcctaatgtgccggccctggaatcagggtatacgcagatctctcctgagcaagggtcactgtccgcgcctagcatgcagaatatggagacctccccaatgatggatgtgccgtccgtgtcggaccacagccagcaggttgtcgactcggggttttcagacttgggctccattgagtccacgaccgagaactatgagaatcccagcagctatgactctaccatgggtggtagtatatgcggcaattcctcatcacagtcctcttgttcttatggcgggctgtcatccagctcttcactaacccagagttcatgcgtggtcacccagcagatggcaagcatggggtcctcctgttccatgatgcagcagtcatctgtacagcccgctgctaattgtagcatcaaatcgcctcagtcttgtgtcgttgaacggccaccctcgaaccagcagcagcagcctccaccccccccaccgcagcagccgcagccgcccccccctcagcctcaaccggccccccagccaccaccaccacagcagcaacctcagcagcagccacaaccccagccccagcagccccctccgcctccgccccctcaacagcagccaccgctctcacagtgctccatgaacaatagctttactccagcaccaatgataatggaaattccggagagtggctccaccggaaatatatcaatatacgaacggatccctggtgattttggagccggaagttacagccaacccagtgccacgttttcgcttgccaagctgcagcaacttactaacactatcatggatccccatgccatgccgtattcccattcacccgccgttacatcctacgccacttctgtcagtctcagcaacacagggctcgcccagctggctccctcccaccccctggcggggaccccccaggcccaggctactatgaccccgccaccaaatctggccagtacaaccatgaacctcacatcgcctctgctgcaatgcaatatgtctgcgaccaatatcggaatcccccacacgcagcgcttacaggggcagatgccagtgaagggtcacatatccatccgctctaagtcagcacctctgccaagcgccgctgcacaccagcagcagttatacggcagatctccctctgcagttgctatgcaggcaggacctcgggcattagccgtgcagaggggcatgaatatgggagtcaatctcatgcctacccctgcctataacgtcaattcaatgaatatgaatacactaaatgctatgaactcctacaggatgacccagccaatgatgaacagcagctatcattctaatcctgcctatatgaaccagactgcccagtaccccatgcagatgcaaatgggaatgatgggttcacaagcatatacgcagcagccaatgcagccaaaccctcatggaaacatgatgtatactggcccttctcaccacagctatatgaatgctgcaggcgtcccaaagcagagcttaaatggtccgtatatgcgcagatag

SEQ ID NO: 167761 - DNA, 6015 bp, Artificial Sequence
  derived and/or modified sequence
atggtaaagctggccaatcccttgtatactgagtggatcttggaggctatcaagaaagttaagaaacagaagcagcgacctagtgaagagcggatttgcaatgccgtttcaagcagtcacggtctcgatcggaaaacggttctcgagcagctcgaactctccgtcaaagacggcactattctgaaggtgagcaacaaggggctgaactcctataaagatccggataatccagggcgcattgcactgcccaagccacgtaatcacggcaaactggataacaagcagaacgttgactggaataagctgattaaacgggccgtggagggcctggccgagagtggcggttccacactgaagtctatcgaacgattcctaaaaggacagaaggatgtgagcgcccttttcggaggctctgctgcctccggtttccatcaacaactgagactcgccatcaaacgcgccattggtcatgggcgattactcaaggatggcccactctatcgcttaaacacaaaagccactaatgtggacgggaaggagagctgcgagtctttaagctgcctgcctccagtgtcactgttgccccatgagaaagacaaaccagttgccgaacccatcccaatatgttcattttgtctcggcacgaaagagcaaaatcgcgagaaaaaaccagaggaacttatctcctgtgctgactgcggcaattctggacacccatcatgtctgaaatttagccccgagctgaccgtacgcgtgaaagctttacggtggcagtgtatagagtgcaagacctgttcctcttgcagggatcagggcaaaaacgctgataatatgttattctgcgattcctgcgacagaggtttccacatggagtgttgcgatcccccgctgactcgcatgccaaaaggaatgtggatctgtcagatctgccggcccaggaaaaagggacgaaaactgctgcagaagaaggctgcccagattaaacggagatacactaatcctattggtaggcccaagaaccggctgaagaaacagaataccgtaagtaaggggcctttcagcaaagtgcggaccggaccaggcaggggccgcaagaggaaaatcaccctgagcagccagtcggcgagctcttcctcagaagaggggtacttagagaggattgacggactggatttctgtcgcgacagcaatgtatccctgaaatttaacaaaaagactaaaggccttattgatgggctgacaaaattctttacaccttccccagacggacggaaggcacggggtgaagtagttgactattctgagcagtatcgcataaggaaacgtggaaaccggaaatctagcacttcagattggcccacggacaatcaagacgggtgggacggcaagcaggaaaacgaagagaggctgtttggctcccaggagatcatgactgaaaaggatatggagctctttagagacattcaggagcaggccttgcagaaggtaggcgtgaccgggcctccagatccacaagtgcgatgtccttctgttatagagtttggcaagtacgaaattcacacttggtattcaagcccctacccccaggagtacagtagacttcctaagctgtacctctgcgaattttgcctgaagtatatgaaatccagaactattttacagcagcacatgaaaaaatgcggctggtttcatccccccgccaacgagatttaccgcaaaaataatatctccgtgttcgaagtggacggaaacgtgagcacaatttactgccaaaatctatgtctgctcgccaagttattcttagaccataagacactttattatgacgttgagccctttctgttttacgtgttaacacaaaacgacgtcaagggttgccatctggttggatatttttccaaggagaaacactgtcagcagaaatataatgtcagttgtattatgattttaccccaataccagaggaaggggtacggacggtttctcatcgatttcagttatctgctttcaaagagagagggacaggcgggcagcccggaaaagcccttaagcgatttaggcagacttagctatatggcttattggaagagcgtcattcttgaatgtctgtaccaccagaacgacaaacagatttccatcaaaaagttgtccaaacttacggggatctgtccacaggacattacatctacgctgcaccacctgagaatgttggacttccggtcagaccaattcgtaataattcgcagagagaagttaatccaggaccatatggctaaactacagctcaatttaagaccagtggacgtcgacccagaatgcctcagatggacaccagtgattgtctccaactctgttgtgtccgaggaggaggaagaggaggccgaggagggcgaaaacgaggagcctcagtgtcaggaaagggaattggagatatctgtgggcaaaagtgtttctcatgaaaataaagagcaagacagctattccgtggagagcgaaaagaaacctgaagttatggccccagtgtcatccactcgattatccaagcaggtactacctcatgattccctccccgccaactcccagccaagtaggcgcgggagatggggaagaaaaaatcggaaaacgcaggagaggtttggtgacaaggactccaagttactgttagaggagacttcctctgcgccgcaggagcagtacggagagtgtggggagaaatctgaggccacccaggaacagtacacagagagcgaagagcagctggtagctagtgaggaacaacccagtcaggatgggaaacctgacctccccaaaagacgcctgtcagagggtgtggagccttggcgcggtcagctgaagaagtctccagaagcactcaagtgccgcctcacagaaggctcagagaggcttccaagaagatactccgagggggatagagccgtgctgcgcggcttctccgagtcaagtgaagaggaggaggagccagagtcaccaaggtccagcagcccccccatcctcacaaaaccaacacttaaacggaagaagcccttcctgcaccgccgtcggcgcgtgcgcaaacgtaagcatcacaactcatccgtggtgacggaaaccatctccgagaccactgaggtcctggacgagccgtttgaggatagtgattccgagcggccaatgccacggctggagccgaccttcgaaatagatgaggaagaagaggaggaggacgagaacgaattattccctcgggagtacttccggcgtctctcatctcaggacgtgctgcgctgtcagagttcatccaaaaggaagtccaaggacgaagaggaagatgaggagagtgatgatgcggacgacactcctatccttaagcctgtgtccctgctaagaaaacgcgatgttaagaacagccctctggagccggatacctcaactcccctgaaaaagaagaagggctggcctaaaggtaagtcacgcaaacccattcactggaagaagagacccgggcgtaaacccggctttaagctgagcagagagatcatgcccgtcagtacccaggcttgcgtcatcgaacccattgtatccattcccaaagcggggagaaagccgaagattcaggaatctgaggagacagttgaaccaaaagaagacatgccccttcccgaagagcggaaggaagaggaggagatgcaggcagaggccgaagaagctgaggagggggaggaagaggatgctgctagtagcgaggtccccgcagcatctcctgcagatagctccaactcccctgaaactgaaacaaaagagcccgaggtggaggaagaagaggagaagccgcgcgttagcgaggaacagagacaatcagaagaagagcagcaggaacttgaagagcccgaaccagaggaggaagaggacgccgccgctgaaaccgcacaaaacgatgaccacgatgctgatgatgaggacgacgggcatcttgaaagcactaaaaagaaagagctagaggagcagcctacaagagaggacgtaaaggaggagcccggggtgcaggagtcgttccttgatgcaaatatgcagaaaagcagggagaagataaaggacaaagaagagacggaactcgacagcgaggaggagcagccaagccacgacacaagtgtggttagcgagcagatggcaggctcggaagatgaccacgaggaagacagccatactaaagaggagctcatagagctgaaggaggaagaggagattccacactccgagctggatctggagactgtccaggcagtgcaatctctgacccaggaggaatcttcggaacacgaaggggcttaccaggactgcgaggagactctggccgcttgccagacattacagagctatactcaagcagacgaagatccacaaatgtcgatggttgaagactgccatgccagcgagcataacagccctatatctagtgtccagagtcacccatcccagagtgtgcgatctgtgtcttcaccaaacgttcctgctctagaatccggatacacccagatctctccagagcagggttctctctccgcaccttctatgcagaacatggaaacatctcccatgatggatgtaccaagcgtgagcgatcattcacagcaggtcgtggatagtgggtttagtgatttgggatctattgagtctaccactgaaaattacgagaacccaagttcgtacgattcgacgatgggaggctccatttgtggcaacagctccagccagtcctcatgctcgtatgggggtctgtcatcttccagcagtctgacacagagtagctgcgtggtaacccagcagatggcaagcatggggagcagctgcagcatgatgcagcaatcctccgtgcagccggctgccaattgctcaataaaatccccacagtcatgcgtggtggaaagacccccatccaaccagcagcagcagcccccccccccccccccccaacaacctcaaccacctcccccccagccacagcccgcacctcagcccccacctcctcagcaacaaccccagcagcagccccaaccccaaccccagcaaccgccccctcccccaccgcctcaacagcagcccccgctgtctcaatgctccatgaataattctttcacacccgcaccaatgattatggagatccccgagagcggctccacaggaaatatctcaatttatgaaagaataccaggcgactttggcgctggcagttacagtcagcctagtgctactttctccctcgccaagctgcagcagcttaccaacaccattatggacccccatgccatgccctattctcatagccctgccgtcacctcttatgccaccagcgtgtccttgagtaataccggcttggcacagctggccccctcacacccacttgctggcacaccccaagcacaggccaccatgaccccccctcccaatctcgcgtcaacaaccatgaatctgacttcacccctcttgcagtgtaacatgagcgccacaaacatcggtatccctcacactcagcgactgcaaggtcagatgccggtgaaaggacacataagcattcggtctaagtcagctccattaccctctgctgccgctcatcagcagcaactgtatggccggtccccttccgcggtggccatgcaggccggaccgcgggccctggcagtgcagcggggaatgaatatgggtgtcaatctcatgccaaccccggcctataacgtcaactccatgaatatgaataccctgaatgctatgaatagctatagaatgactcagcctatgatgaactcctcctatcatagcaatccggcctacatgaatcagactgcccagtacccaatgcagatgcagatgggaatgatggggtcccaggcgtatacacagcagccgatgcagccaaacccgcacggtaatatgatgtatactggcccgtctcaccatagttacatgaatgctgccggcgtcccgaaacagagcctcaacgggccatacatgagacgctag

SEQ ID NO: 167762 - DNA, 6015 bp, Artificial Sequence
  derived and/or modified sequence
atggtgaaactggccaaccccctctatactgagtggatacttgaggcaataaaaaaggtgaagaagcagaagcagcgcccctccgaggagcgcatctgcaacgcagtgtcatcgagtcatggactcgaccggaagactgttctggagcagctggagctttccgtgaaagatgggactatattaaaggttagcaataagggattgaactcatataaggacccggacaaccctgggcgcatcgctctgccgaagccaaggaatcacggaaaactggataataagcaaaatgtagactggaacaagctgattaagcgagcagttgagggtttggccgaaagcggagggagcaccctcaagtccatcgagagatttttgaaaggtcagaaggacgtgtccgcactgttcggaggatccgccgcctcggggttccatcagcaattgaggctggcaattaagagagccatcggtcatggtcgcctgctgaaagatgggcctctgtatcggttaaacaccaaagctactaatgttgatggtaaggagagttgcgagtcactgtcttgtcttcctccagtctctctgctccctcacgaaaaagataagcctgtggctgagcccatccccatatgctcattctgccttggcaccaaggaacagaaccgcgaaaagaagccggaggaactgatctcctgtgctgattgtggaaactccggtcatccttcatgccttaagttctccccggaactgaccgtgcgggtgaaggccctaaggtggcagtgcatcgaatgtaagacgtgctcgtcttgccgggatcaggggaagaatgccgacaacatgcttttctgtgactcttgcgacagaggatttcacatggaatgttgtgaccccccactcacaaggatgcccaaggggatgtggatttgtcaaatttgccgaccgagaaagaagggacggaaactcctccagaaaaaagcagcccagatcaaacgcagatatacaaacccgatcggccggcccaaaaacagattaaagaaacaaaatacggtgtccaagggccccttcagtaaggtgcgcacagggccaggccggggccgcaaacgaaagataacattgagctcccagtccgccagcagcagctcagaagaaggatacctggagaggatcgatggactagatttttgtagagacagcaacgtctctttgaagtttaataaaaagaccaagggacttattgacggactgactaaattttttaccccttctcccgacggcagaaaggcgaggggggaagttgtggactattctgagcagtatcgcatccggaagagagggaacagaaagagctcaaccagcgactggccaaccgataaccaggacgggtgggatggaaaacaggaaaatgaggagagactatttgggtcgcaggagatcatgaccgagaaagacatggagctgtttagagatattcaagaacaggcactccaaaaggtgggcgtgacaggaccgcctgatcctcaggtgagatgcccgagcgtcattgagtttgggaaatacgagattcacacatggtacagtagcccctatccccaggagtactcccggctgcccaaactgtacctatgtgagttctgcctgaagtatatgaagtcgcgcactattttgcagcagcacatgaagaagtgtggatggtttcatcccccagcaaatgaaatctacaggaagaacaatatttccgttttcgaagtggacgggaatgtgtcgactatctactgtcagaacctgtgtctactggccaagctgttcctcgaccacaaaaccctgtattacgacgtggagccgttcttgttctatgtgcttactcagaacgatgttaaaggctgtcacttggtgggatatttctcaaaggagaagcattgtcagcagaaatacaacgtgtcctgcatcatgatccttccccagtaccagcgaaaagggtacggccgatttctgattgacttttcgtatctgctatcgaagcgtgaggggcaggcaggcagtcctgagaaacctctctctgatctgggacgactttcttacatggcctactggaaatccgtcatcctggagtgcctctatcaccaaaacgataagcagatctctattaaaaagctctctaagctcactggcatatgtccacaggacatcacgagcacgctgcaccacctgcgaatgctcgacttccggtccgaccagttcgtgatcataaggcgggaaaaactgatccaggaccacatggccaagttgcagctgaatctgagacccgtggatgttgatccggagtgcctccggtggactcccgttatcgtgtccaatagtgttgtgagcgaagaagaagaggaggaagctgaagaaggagagaacgaggaaccacaatgtcaggagagggaactggaaataagtgtggggaaaagtgtatctcacgagaacaaggaacaagattcctattccgtagagtccgagaaaaaaccagaagttatggcccccgtaagctccacccgactatccaaacaggtcctgccacatgactcactcccagccaattcccagccaagccggagaggtaggtggggaagaaaaaacagaaaaacccaagagaggtttggtgataaggactctaaactcctcttggaagagactagctccgcacctcaggaacagtatggcgaatgtggagagaagtccgaggccacccaggagcagtacaccgagtcagaagagcaactggtagcctctgaagaacagccctcccaggacggaaaacccgatcttccgaagcgcagattgtctgaaggagttgagccctggcgcggacagctcaagaagtccccagaagccctcaaatgccgcctgactgaaggttcagagaggctcccccggaggtacagcgaaggcgatcgggccgtgcttagaggtttttctgagagctctgaggaggaggaagaaccggagtctccccgttcgtcttctccaccgatactcacaaaacccacactgaaaaggaagaaaccatttctgcatcgacggagaagagtgcgaaaacgcaaacaccacaattcgtccgtagtgacagaaacaatcagtgaaactaccgaggtactggatgagccctttgaggacagcgacagcgagagaccgatgcctcggctggagcctacttttgagattgatgaagaggaggaagaagaggacgaaaacgagctctttccccgcgagtatttcagacgtctgagttcacaggacgttctcagatgtcagtcttcaagcaagcggaagtctaaagacgaagaggaagacgaggagagtgatgacgccgacgacacgccaattctcaaaccagtcagtttattgcgaaagagagatgtcaagaattcaccactcgagccggacaccagtacccccctcaaaaagaaaaaaggatggccgaagggcaagagccgtaagccaatacactggaagaaaagaccaggaagaaagcctggcttcaaactaagccgggagatcatgccagtcagtactcaggcctgcgtaattgaacctatagtttcaatccccaaagcgggaagaaagccgaagatacaagagagtgaggagaccgtcgaaccaaaggaagatatgccactcccagaggaacggaaggaggaggaagaaatgcaagccgaggcagaagaggctgaagagggtgaggaggaggacgccgccagctcagaagttccagcggcaagcccagccgattcgtcgaattctccagagaccgaaacaaaggagcccgaggtggaggaagaggaagaaaaaccacgcgtgagcgaagagcaacgacagagtgaggaggaacagcaggagctcgaggagcctgagcctgaagaggaagaggatgctgccgccgaaaccgctcagaacgatgaccacgacgccgacgatgaagatgatgggcatctggagagcacgaaaaaaaaggagttagaggaacaaccgaccagagaagatgtaaaagaggagcccggcgtgcaggaaagtttcctcgacgctaatatgcagaagagccgcgaaaaaatcaaggataaggaggagactgaattagactccgaagaggagcagccatcccacgacacctccgtggtgtccgagcagatggcaggctctgaagacgaccacgaggaagactctcatactaaggaagaattgatcgaactgaaggaggaagaggagattccccacagcgagctcgacttagaaacagtccaagccgtgcagagtctgacgcaggaagaaagttccgagcacgaaggtgcataccaggactgcgaagaaaccctcgccgcctgccagactcttcaatcttatacacaggcagatgaggatccacagatgtcaatggtcgaagattgccatgcctctgagcataacagtccaatcagtagtgtacagagccatccttcacagagcgttagatccgtaagcagtcccaatgttcctgccctggagtccggttatacccagatttccccagaacagggctcgctgtctgcgccgagtatgcagaatatggagactagccctatgatggatgtcccgtctgtctccgaccattcccagcaagttgtggactccggtttttctgatctgggttcaatcgagagtactaccgagaactatgagaatcctagttcatatgattcgacaatgggcggatcgatctgtggtaacagtagctcgcaatcttcttgctcctacggcgggttgtctagctcttcgtccttgacgcagagctcatgtgtggttacacagcagatggcatcaatgggatcatcttgtagcatgatgcaacagtccagcgtacagcctgcggctaactgtagtatcaagagtccgcagagttgtgtagtggagagaccaccctcaaatcagcagcagcagccgccacctccccccccacaacaaccccagcccccacctccacagccccagccagctccccaacctccccctccccagcaacagccccagcaacagccccaaccgcagcctcagcagccccccccaccacctcctccccagcagcagccgcctctctctcagtgtagtatgaacaactcctttactccagctcccatgataatggagattcccgaaagcgggtccaccggcaacatttccatttatgaacgtattccaggagacttcggtgctggctcatattctcagccatctgccacattttccctagcaaagctgcaacagcttaccaatacaatcatggatccacacgcgatgccctattcccatagtcctgctgtgacatcctatgccacttcagtttcgctttcaaataccggccttgctcagctagctccgagtcaccccctcgccgggactcctcaggcacaggctacaatgaccccaccaccaaatctggccagtactaccatgaacctgacttcccctctgctccagtgtaacatgagcgcgactaacatcggcattccgcatacacagcgtctgcagggccaaatgccggtcaaagggcatattagtatcagaagcaagtctgcaccgctgccttctgctgcagcccaccagcagcaactgtacggtcgatcgcctagcgctgtagctatgcaggccggaccacgagccctggcagtccagcggggcatgaacatgggagttaacttgatgcctacacccgcttataatgtaaactctatgaacatgaacactctcaatgctatgaactcttaccgcatgacccagcctatgatgaactcctcctatcactccaatcccgcgtacatgaaccagactgctcaataccccatgcagatgcagatggggatgatgggaagtcaggcttacacccagcagcccatgcagcccaatccgcacggcaatatgatgtataccggccctagccaccactcctatatgaacgctgccggcgtgccaaagcagagtctgaatggtccctatatgcggcgctag

SEQ ID NO: 167763 - DNA, 2448 bp, Artificial Sequence
  derived and/or modified sequence
atggttaaattggccaaccctctgtatacagagtggattctggaggccatcaagaaagtgaagaaacaaaagcagagaccttccgaagaaagaatttgtaacgcagtgagctccagtcacggcctggaccggaagacagtcttagaacagctcgagctgtctgttaaggatggtacgatactgaaggtttcaaacaaagggctgaattcgtataaagaccctgataacccggggaggatagcactccccaaaccccgcaatcatggaaaactcgataataaacagaacgttgattggaataagcttatcaagagggctgtggaagggcttgctgagtctggtggctccactttgaagtctatcgaaagatttctgaaaggccaaaaggacgtgtctgctctgttcggtggatctgccgcttctggatttcaccaacagctcagactggccattaagagggccataggacatgggcggttgctcaaagacggccccctctacaggctgaatactaaggcgaccaatgtggacggaaaagagagctgtgaatccttgtcttgtcttccaccagtgagtctgctccctcatgagaaggataaaccggtggccgagcccattccgatttgctcattctgtcttggaacgaaagagcagaatcgagagaaaaagccagaggagctgatcagttgcgccgactgcggtaatagcggccatccctcttgtctgaagttctcccccgagctcacagtgagagttaaggcccttcgctggcagtgtattgaatgtaaaacctgttcatcgtgcagggatcaggggaagaacgcagacaacatgctcttttgcgacagttgtgatcggggcttccacatggaatgttgtgatccgccactcaccagaatgcccaaggggatgtggatctgtcagatttgcaggccacgcaaaaaagggaggaaactcttgcaaaagaaagccgctcaaatcaagcggcggtacaccaatcctattggaaggcctaagaaccggttaaaaaaacaaaacaccgtctcaaaaggccctttttcgaaggtccggactggccctggccgcggacggaaaaggaaaattactttgtcatcccagtccgcctcctctagttccgaggagggatatctggaacggatagacggtctcgacttctgccgtgattctaacgtgagcctaaaatttaacaagaaaactaaaggcctcatcgatggcctgacgaagttcttcactccttcaccagatggacgcaaggctagaggcgaggtggttgactattccgagcagtacaggatcagaaagagggggaaccggaaatcctccacttccgactggccaactgacaatcaggacggatgggacgggaaacaggaaaatgaggagagactgttcggctcccaggagattatgacagagaaggacatggaactctttagagatattcaggagcaagccctgcaaaaagtgggcgtgaccggcccaccagatccacaggtgaggtgccccagtgttattgaattcggtaagtatgaaatccacacttggtactcctcaccctatccacaggagtattcccgcctgcctaagctgtacttgtgcgaattctgccttaagtatatgaagtccaggactatcttgcagcagcatatgaaaaaatgcggttggtttcatccacctgcaaatgagatttaccggaaaaataatatctcagtgtttgaagtggacggtaacgtctccaccatctattgccagaatttatgtctgttagccaaactgtttcttgatcataaaacgttgtactacgatgtggagcccttcctgttttacgttcttacccagaacgacgtcaaggggtgtcatctagtaggatactttagcaaggagaagcactgtcagcagaagtacaatgtaagttgcatcatgatcctcccccagtatcagagaaaggggtacggccgcttcctgatagatttttcttacctcctgagcaagcgggagggccaggccggttcccctgagaagccgctgagtgacctcggcagactctcctacatggcctactggaaatcagtgattcttgagtgcttgtatcaccagaacgataagcagatctccattaaaaagttatccaagctaacaggtatatgcccacaagacatcaccagcaccctccatcacctgagaatgctggattttcgcagcgatcagtttgtgattatccgacgtgagaaactgatccaggaccatatggcaaaacttcaactgaatctgagaccggtggacgttgaccccgaatgcctccgctggacaccagtgattgtttctaactctgtggtgagtgaagaggaagaagaggaagctgaggaaggagagaacgaagagccccaatgccaagagcgggaactcgaaatcagtgtacgcgcatag

SEQ ID NO: 167764 - DNA, 6015 bp, Artificial Sequence
  derived and/or modified sequence
atggtgaagctggccaaccccctgtacacagagtggatcctggaggccatcaagaaggtgaagaagcagaagcagaggcccagcgaggagcgcatctgcaatgctgtgagcagcagccacggcctggacaggaagacagtgctggagcagctggagctgtctgtgaaggatggcaccatcctgaaggtgagcaacaagggcctgaacagctacaaggaccctgacaaccctggccgcatcgccctgcccaagcccaggaaccacggcaagctggacaacaagcagaatgtggactggaacaagctgatcaagagagctgtggagggcctggccgagagcggcggcagcaccctgaagagcattgagcgcttcctgaagggccagaaggatgtgtctgccctgtttggaggcagcgctgccagcggcttccaccagcagctgcggctggccatcaagagggccatcggccacggccgcctgctgaaggatggccccctgtaccgcctgaacaccaaggccaccaacgtggatggcaaggagagctgtgagagcctgagctgcctgccccctgtgtccctgctgccccatgagaaggacaagcctgtggccgagcccatccccatctgcagcttctgcctgggcaccaaggagcagaaccgggagaagaagccagaggagctgatcagctgtgccgactgtggcaacagcggccaccccagctgcctgaagttcagccctgagctgactgtgcgggtgaaggccctgcgctggcagtgcatcgagtgcaagacctgcagcagctgccgggaccagggcaagaatgctgacaacatgctgttctgtgacagctgtgaccggggcttccacatggagtgctgtgacccccccctgaccaggatgcccaagggcatgtggatctgccagatctgccggcccaggaagaagggcaggaagctgctgcagaagaaggccgcccagatcaagaggcgctacaccaaccccatcggccggcccaagaaccggctgaagaagcagaacacagtgtccaagggccccttcagcaaggtgaggacaggccctggccggggcaggaagaggaagatcaccctgagcagccagagcgccagcagcagcagcgaggagggctacctggagagaattgatggcctggacttctgccgggacagcaatgtgtccctgaagttcaacaagaagaccaagggcctgattgatggcctgaccaagttcttcacccccagcccagatggcaggaaggcccggggggaggtggtggactacagcgagcagtaccgcatcaggaagaggggcaacaggaagagcagcaccagtgactggcccacagacaaccaggacggctgggatggcaagcaggagaatgaggagcggctgtttggcagccaggagatcatgacagagaaggacatggagctgttccgggacatccaggagcaggccctgcagaaggtgggcgtgactggacctccagacccccaggtgcgctgccccagcgtcatcgagtttgggaagtatgagatccacacctggtacagcagcccctacccccaggagtacagccggctgcccaagctgtacctgtgtgagttctgcctgaagtacatgaagagcaggaccatcctgcagcagcacatgaagaagtgtggctggttccaccccccagccaatgagatctacaggaagaacaacatctctgtgtttgaggtggatggaaatgtgtccaccatctactgccagaacctgtgcctgctggccaagctgttcctggaccacaagaccctgtactatgatgtggagcccttcctgttctacgtgctgacccagaatgatgtgaagggctgccacctggtgggctacttcagcaaggagaagcactgccagcagaagtacaacgtgtcctgcatcatgatcctgccccagtaccagaggaagggctacggccgcttcctgattgacttctcctacctgctgagcaagcgggagggccaggccggcagccctgagaagcccctgagtgacctgggccgcctgagctacatggcctactggaagagcgtcatcctggagtgcctgtaccaccagaatgacaagcagatcagcatcaagaagctgagcaagctgaccggcatctgcccccaggacatcaccagcaccctgcaccacctgaggatgctggacttcagaagtgaccagtttgtgatcatccggcgggagaagctgatccaggaccacatggccaagctgcagctgaacctgcggcctgtggatgtggaccctgagtgcctgcgctggacccctgtgattgtgagcaacagcgtggtgtctgaggaggaggaggaggaggccgaggagggggagaatgaggagccccagtgccaggagcgggagctggagatctctgtgggcaagtctgtgtcccatgagaacaaggagcaggacagctacagcgtggagagcgagaagaagccagaggtgatggcccctgtgagcagcacccggctgagcaagcaggtgctgccccatgacagcctgcctgccaacagccagcccagccggcggggccgctggggcaggaagaacaggaagacccaggagagatttggagacaaggacagcaagctgctgctggaggagaccagcagcgccccccaggagcagtatggagaatgtggggagaagtctgaggccacccaggagcagtacacagagagcgaggagcagctggtggccagcgaggagcagcccagccaggacggcaagccagacctgcccaagaggcggctgtctgaaggagtggagccctggaggggccagctgaagaagagccctgaggccctgaagtgccgcctgacagagggcagcgagcggctgccccggcgctacagcgagggggacagagctgtgctgcggggcttcagcgagagcagcgaggaggaggaggagcctgagagccccaggagcagcagcccccccatcctgaccaagcccaccctgaagaggaagaagcccttcctgcacagaagaagaagagtgaggaagaggaagcaccacaacagctctgtggtgacagagaccatcagcgagaccacagaggtgctggatgagccctttgaggacagcgacagcgagcggcccatgccccggctggagcccacctttgaaattgatgaggaggaggaggaggaggatgaaaatgaactcttcccccgggagtacttccggcggctgagcagccaggatgtgctgcgctgccagagcagcagcaagaggaagagcaaggatgaggaggaggatgaggagagtgatgatgctgatgacacccccatcctgaagcctgtgtccctgctgaggaagagagatgtgaagaacagccccctggagccagacaccagcacccccctgaagaagaagaagggctggcccaagggcaagagcaggaagcccatccactggaagaagaggcctggcaggaagccaggcttcaagctgagccgggagatcatgcctgtgtccacccaggcctgtgtgattgagcccatcgtgtccatccccaaggccggcaggaagcccaagatccaggagagcgaggagaccgtggagcccaaggaggacatgcccctgcctgaggagaggaaggaggaggaggagatgcaggccgaggccgaggaggccgaggagggggaggaggaggatgctgccagcagcgaggtgcctgctgccagccctgctgacagcagcaacagccctgagacagagaccaaggagcctgaggtggaggaggaggaggagaagccccgggtgtctgaggagcagaggcagagcgaggaggagcagcaggagctggaggagcctgagcctgaggaggaggaggatgctgctgctgagacagcccagaatgatgaccatgatgctgatgatgaagatgatggccacctggagagcaccaagaagaaggagctggaggagcagcccaccagagaagatgtgaaggaggagcccggggtgcaggagagcttcctggatgccaacatgcagaagagccgggagaagatcaaggacaaggaggagacagagctggacagcgaggaggagcagcccagccatgacacctctgtggtgtctgagcagatggccggctctgaagatgaccacgaggaggacagccacaccaaggaggagctgattgagctgaaggaggaggaggagatcccccacagcgagctggacctggagaccgtgcaggccgtgcagagcctgacccaggaggagagcagcgagcatgaaggagcctaccaggactgtgaggagaccctggccgcctgccagaccctgcagagctacacccaggctgatgaggacccccagatgtccatggtggaggactgccacgccagcgagcacaacagccccatcagctctgtgcagagccaccccagccagagcgtgcgctctgtgagcagccccaacgtgcctgccctggagagcggctacacccagatcagccctgagcagggcagcctgagcgcccccagcatgcagaacatggagaccagccccatgatggatgtgcccagcgtgtctgaccacagccagcaggtggtggacagcggcttcagtgacctgggcagcattgagagcaccacagaaaattatgagaaccccagcagctatgacagcaccatgggcggcagcatctgtggcaacagcagcagccagagcagctgcagctatggaggcctgagcagcagcagcagcctgacccagagcagctgtgtggtgacccagcagatggcctccatgggcagcagctgcagcatgatgcagcagagctctgtgcagcctgctgccaactgcagcatcaagagcccccagagctgtgtggtggagaggcctcccagcaaccagcagcagcagcccccacctcctccaccccagcagccccagcccccaccaccccagccccagcctgccccccagcccccaccaccccagcagcagccccagcagcagccccagccccagccccagcagcccccacctcctcctccaccccagcagcagccccccctgagccagtgcagcatgaacaacagcttcaccccagcccccatgatcatggagatccctgagagcggcagcacaggcaacatcagcatctatgaaagaattcctggggactttggagctggcagctacagccagcccagcgccaccttcagcctggccaagctgcagcagctgaccaacaccatcatggacccccacgccatgccctacagccacagccctgctgtgaccagctatgccacctctgtgtccctgagcaacacaggcctggcccagctggcccccagccaccccctggccggcaccccccaggcccaggccaccatgaccccaccacccaacctggccagcaccaccatgaacctgaccagccccctgctgcagtgcaacatgtctgccaccaacatcggcatcccccacacccagaggctgcagggccagatgcctgtgaagggccacatcagcatccgcagcaagagcgcccccctgcccagcgctgctgcccaccagcagcagctgtatggccgcagccccagcgctgtggccatgcaggccggcccccgggccctggccgtgcagaggggcatgaacatgggcgtgaacctgatgcccaccccagcctacaacgtgaacagcatgaacatgaacaccctgaatgccatgaacagctacaggatgacccagcccatgatgaacagcagctaccacagcaacccagcctacatgaaccagacagcccagtaccccatgcagatgcagatgggcatgatgggcagccaggcctacacccagcagcccatgcagcccaacccccacggcaacatgatgtacacaggccccagccaccacagctacatgaatgctgctggggtgcccaagcagagcctgaatggcccctacatgagaagatag

SEQ ID NO: 167765 - DNA, 2448 bp, Artificial Sequence
  derived and/or modified sequence
atggtgaagctggccaaccccctgtacacagagtggatcctggaggccatcaagaaggtgaagaagcagaagcagaggcccagcgaggagcgcatctgcaatgctgtgagcagcagccacggcctggacaggaagacagtgctggagcagctggagctgtctgtgaaggatggcaccatcctgaaggtgagcaacaagggcctgaacagctacaaggaccctgacaaccctggccgcatcgccctgcccaagcccaggaaccacggcaagctggacaacaagcagaatgtggactggaacaagctgatcaagagagctgtggagggcctggccgagagcggcggcagcaccctgaagagcattgagcgcttcctgaagggccagaaggatgtgtctgccctgtttggaggcagcgctgccagcggcttccaccagcagctgcggctggccatcaagagggccatcggccacggccgcctgctgaaggatggccccctgtaccgcctgaacaccaaggccaccaacgtggatggcaaggagagctgtgagagcctgagctgcctgccccctgtgtccctgctgccccatgagaaggacaagcctgtggccgagcccatccccatctgcagcttctgcctgggcaccaaggagcagaaccgggagaagaagccagaggagctgatcagctgtgccgactgtggcaacagcggccaccccagctgcctgaagttcagccctgagctgactgtgcgggtgaaggccctgcgctggcagtgcatcgagtgcaagacctgcagcagctgccgggaccagggcaagaatgctgacaacatgctgttctgtgacagctgtgaccggggcttccacatggagtgctgtgacccccccctgaccaggatgcccaagggcatgtggatctgccagatctgccggcccaggaagaagggcaggaagctgctgcagaagaaggccgcccagatcaagaggcgctacaccaaccccatcggccggcccaagaaccggctgaagaagcagaacacagtgtccaagggccccttcagcaaggtgaggacaggccctggccggggcaggaagaggaagatcaccctgagcagccagagcgccagcagcagcagcgaggagggctacctggagagaattgatggcctggacttctgccgggacagcaatgtgtccctgaagttcaacaagaagaccaagggcctgattgatggcctgaccaagttcttcacccccagcccagatggcaggaaggcccggggggaggtggtggactacagcgagcagtaccgcatcaggaagaggggcaacaggaagagcagcaccagtgactggcccacagacaaccaggacggctgggatggcaagcaggagaatgaggagcggctgtttggcagccaggagatcatgacagagaaggacatggagctgttccgggacatccaggagcaggccctgcagaaggtgggcgtgactggacctccagacccccaggtgcgctgccccagcgtcatcgagtttgggaagtatgagatccacacctggtacagcagcccctacccccaggagtacagccggctgcccaagctgtacctgtgtgagttctgcctgaagtacatgaagagcaggaccatcctgcagcagcacatgaagaagtgtggctggttccaccccccagccaatgagatctacaggaagaacaacatctctgtgtttgaggtggatggaaatgtgtccaccatctactgccagaacctgtgcctgctggccaagctgttcctggaccacaagaccctgtactatgatgtggagcccttcctgttctacgtgctgacccagaatgatgtgaagggctgccacctggtgggctacttcagcaaggagaagcactgccagcagaagtacaacgtgtcctgcatcatgatcctgccccagtaccagaggaagggctacggccgcttcctgattgacttctcctacctgctgagcaagcgggagggccaggccggcagccctgagaagcccctgagtgacctgggccgcctgagctacatggcctactggaagagcgtcatcctggagtgcctgtaccaccagaatgacaagcagatcagcatcaagaagctgagcaagctgaccggcatctgcccccaggacatcaccagcaccctgcaccacctgaggatgctggacttcagaagtgaccagtttgtgatcatccggcgggagaagctgatccaggaccacatggccaagctgcagctgaacctgcggcctgtggatgtggaccctgagtgcctgcgctggacccctgtgattgtgagcaacagcgtggtgtctgaggaggaggaggaggaggccgaggagggggagaatgaggagccccagtgccaggagcgggagctggagatctctgtgcgggcctag

SEQ ID NO: 167766 - DNA, 6015 bp, Artificial Sequence
  derived and/or modified sequence
atggtgaagctggccaaccccctgtacaccgagtggatcctggaggccatcaaaaaagtcaaaaaacagaagcagcgtccgtccgaggaacgtatttgtaacgcagtctccagctcacacggactggaccgaaagacagtgctagagcaactggagctatcggtcaaagatggcacaatcctgaaggtcagtaacaaaggcctgaacagctacaaggatccagataacccagggcggatcgccctgccgaaaccccgaaaccatggcaaactggataacaaacagaatgtcgactggaacaaactgattaagagagccgtcgaggggctggctgagtccggcggctccacactgaaatccattgagcgttttctcaagggacaaaaagacgtgtcggccctgttcggaggctcagccgcaagtgggttccatcaacaactgcgcttagccatcaagagagccatcggccatggacgtcttctgaaagatgggcccctgtacagacttaataccaaagcaactaatgttgatggcaaagagtcttgtgagtccctatcgtgtctgcctcccgtcagcttacttcctcacgagaaggacaagccagttgccgaacccatacccatctgctcattttgccttggaactaaggaacagaaccgagaaaagaagccagaggaactgatcagttgtgcagattgcgggaacagtggtcatcctagttgcctgaagtttagtcctgagctgactgtgagagtgaaggccctgcgatggcagtgcatcgaatgtaagacatgctcctcttgtcgtgaccagggcaagaacgcagacaacatgctgttttgcgatagttgcgaccgagggttccatatggaatgttgcgatccccccctcacaagaatgcccaagggtatgtggatttgccagatctgccgaccccgaaaaaaaggacggaagctcctccagaagaaagccgcccagattaagcggcgctataccaatcccattggccgacctaaaaatagactcaaaaagcagaacactgtgtccaaggggcccttttcaaaagtgcggactgggcctggacggggccgcaagaggaagataaccctcagctctcagtcagcatcctctagttcagaggaggggtaccttgaacgaattgatggacttgatttttgccgggacagcaacgtcagcctcaagtttaacaaaaagaccaaaggactgattgatgggttgactaagttcttcacgccgtcccccgacggtcgcaaagctaggggggaagtggttgactactctgaacagtatagaatcagaaagcgtgggaacagaaagagcagtacttcagactggccaaccgataaccaggacggctgggacgggaagcaggagaacgaggagaggctcttcgggtcacaggagataatgactgaaaaggatatggagttgtttagagatatccaggagcaggccctacagaaggttggcgtgaccggtcctccagacccccaggtccggtgtccatcagtcatcgagttcggcaagtatgagatacatacttggtattcctcaccctacccccaggaatatagcaggttgccaaagttatatctatgcgaattctgtcttaagtatatgaaatcgaggacaatcctccagcaacacatgaaaaaatgtgggtggttccatcccccagctaatgagatttaccgcaagaacaatatatcagtgtttgaagttgacggaaatgtgtctacgatctactgccagaatctttgcctgctggcgaaattgtttctagatcacaaaaccctttactacgatgtggagcctttcttattctatgtacttacccagaacgacgtaaagggatgtcatctggtcgggtatttcagcaaggagaaacattgccagcagaagtataatgtttcttgtatcatgatccttcctcagtatcagagaaagggatacggacgatttctgattgacttctcatatctgctgtcaaagagggagggccaagctgggtcaccggagaagccgctgagtgacttaggcaggttgagctatatggcatactggaagagtgtgatccttgagtgcctctaccatcaaaacgataagcaaatctctatcaagaaattgtccaaactaacaggaatctgcccccaggacatcacttctactctgcaccacctgcgtatgcttgactttagatcagatcaattcgtaattattagaagggaaaagctgattcaagatcatatggccaaactgcaactaaacttgaggccggttgatgtcgatcccgagtgcctaaggtggacaccggtcattgtgtcaaacagtgtggtctccgaggaggaggaggaagaggcagaggagggcgaaaacgaggaaccacagtgccaggagcgagagttagagattagcgtggggaaaagcgtgagtcacgagaacaaagaacaagactcctacagcgtagagtcagagaaaaagccggaggtgatggctccagtgagtagcacacggctttcaaaacaggtactcccacatgattccctgcctgcgaattcacagcccagccgacgggggaggtgggggcgcaagaatcggaagactcaggagagatttggcgataaggatagtaaactgctgttagaggagacctccagtgcgccacaggagcagtatggagaatgcggcgagaagagcgaggccacacaggaacagtatactgagtcagaagaacaactggtcgcctcagaggaacagccgtcgcaggatggcaaacccgacctgcctaaacgtaggctgtctgagggcgtggaaccttggcgcgggcagttgaagaaaagtccggaagctcttaagtgcagactaactgagggctcagagcgtctcccccgcagatactctgaaggtgatagagctgtcctaaggggtttctccgaatcgagtgaagaggaggaagagcctgagtcacccaggtcctcatctccccctatcctgactaagcctactctgaaacggaaaaagccattcctgcataggcgcagacgcgtcagaaaacgaaagcatcacaattcttcagttgtgacagagactatttccgagaccacagaggtgctggatgagcctttcgaagatagtgattcagaacgacccatgccaagactcgaacccaccttcgaaatcgacgaggaggaagaggaggaggatgaaaatgagcttttcccacgcgaatacttccggaggctatcttcccaagacgtgcttcggtgccagagctcttccaagcgcaagtccaaagacgaggaggaagatgaggagagtgacgatgctgacgacacaccaatcctgaagcccgtatcattgctccggaaacgagatgtaaagaactccccgttggaacccgataccagtactcctctgaagaagaagaaagggtggcccaaagggaaatcccggaagccgattcattggaaaaaaagacctggccgcaaacccggcttcaaactgagcagggaaattatgccagtatccacacaggcctgcgtgatcgagcctattgtctcaatccccaaagccggaaggaaacctaaaattcaggaaagcgaggaaactgtagagcctaaggaagatatgcccctgcccgaggagcgaaaggaagaggaggagatgcaagccgaggctgaggaggcagaagaaggcgaagaggaagacgcagcctcgtctgaagtgcccgcagcttctcctgcagattcctctaacagccctgagactgagaccaaagaaccagaagtggaagaggaggaagagaagcctagggtttcagaggaacaacgccaatctgaggaggagcaacaggagctcgaagaaccagagccagaggaggaagaagatgccgctgccgaaactgcccagaatgatgaccatgatgccgatgacgaggatgacggccacctggagagtaccaaaaagaaagagctggaggagcagcctacaagagaagatgtcaaggaagagccgggcgtgcaggaatcattcctcgatgccaatatgcagaagagccgagaaaaaatcaaggataaggaagagaccgagttagattccgaagaggaacaaccctctcatgacaccagcgttgttagtgaacagatggctggctctgaagatgatcacgaggaggatagccatactaaagaagaactcatcgagttgaaagaggaggaggagattccccacagtgagctcgacctggaaacggtccaggctgtccagtcactgacgcaggaggaatcatcagagcacgagggggcgtatcaggattgcgaggagactctcgccgcttgccagaccctccagtcgtatacccaggcagatgaggacccgcagatgtcgatggtcgaggattgccacgcttccgaacacaatagtcctattagcagtgttcagtcccatccttcgcaaagcgttcgatccgtgtcatctcccaacgtgcccgccctggagtcaggatacacccaaatatctcctgagcagggttccttatctgctccctctatgcaaaatatggagacaagtcctatgatggacgtgccgtccgtgagcgaccattcccagcaggtcgtcgattctggcttctccgatctaggatcaattgaatctaccacagaaaattatgagaatccatcatcctacgactctacaatgggcggcagcatctgcggcaattcctcatctcaaagttcctgttcctacggcggcctgagctcaagttcctctttgacacagtcaagttgtgtggtcactcagcagatggccagtatgggttcctcatgctccatgatgcagcagtcttccgtgcaaccggccgcgaactgctccatcaagtcgcctcagagctgtgtggtggagagacctcccagcaaccagcagcagcaaccaccacccccaccaccgcagcagccacagcctcccccaccccagccccagcctgccccgcagccccctcctccgcaacagcagccccagcagcagccgcagcctcagccgcagcagcccccacctccccctccaccacagcagcagccgccactgtctcagtgttcaatgaataactccttcactcccgcaccaatgatcatggaaattccagaatccgggtctacaggtaacatttccatttacgaaaggataccgggagatttcggtgcggggtcatattcacagccttcagccacttttagccttgcgaaactccagcagctgacaaacaccatcatggacccccatgctatgccatatagccactccccagccgttacctcctacgcaacctcagtgagtctgtctaacacagggctggcccaacttgcccctagccatcccctggccggcacaccccaggctcaggctacgatgacgccacccccgaatctcgccagcactaccatgaatcttacgagtccactgttgcagtgcaatatgagtgccacgaacataggaatacctcacacacagagactccagggtcagatgcctgtgaagggtcacatctcgatacggtcaaagagcgcccctctgccctctgctgccgcacatcagcaacagctctacggacgtagcccctccgctgttgccatgcaggcaggaccacgggccctcgccgtgcagagagggatgaacatgggggttaacctgatgcctaccccagcctataacgtgaactctatgaatatgaatacactgaatgctatgaacagctacagaatgacgcaaccaatgatgaactctagctatcacagcaatcccgcctacatgaaccagacagcacaatatccaatgcagatgcagatgggcatgatgggcagtcaggcctacacgcagcagcccatgcagcccaacccacatgggaacatgatgtataccggacccagccaccacagttatatgaacgccgcaggcgtccccaagcagagcctgaacgggccgtatatgcggcgatag

SEQ ID NO: 167767 - DNA, 6015 bp, Artificial Sequence
  derived and/or modified sequence
atggtgaagctggccaaccccctgtacaccgagtggatcctggaggctattaaaaaggtgaagaaacaaaagcagagaccctctgaggagagaatatgtaatgctgtgagttctagccacggactggatagaaaaacggtgctcgagcagctcgaactatctgtcaaggatggaaccatcctgaaggtgagtaacaaaggtctcaatagctataaagatcctgacaaccctgggcgaatcgcccttccaaagccaaggaatcatgggaaacttgacaataagcagaatgtggattggaacaagctgatcaaacgcgcggtggaagggctcgccgagtccgggggcagtacactgaaatcaattgaacgcttcctgaaggggcaaaaggatgtgtccgctctcttcggcggatcagctgcaagcggatttcatcagcagcttaggttagctataaagcgagctattggacatggaaggctacttaaggacggccctttgtaccgccttaacacgaaagcaacaaacgtggacggaaaagaaagctgcgaatccttgtcctgcttacctccagtgagcctgctgccccatgagaaggacaagccagtggctgagcctattcctatctgcagcttctgcctaggaacaaaagagcagaatcgtgaaaaaaagcccgaagagttgatttcttgtgcggattgtggtaactctgggcacccctcgtgtcttaaattctcacccgagctgacggtccgcgtgaaggccctgaggtggcagtgcatagaatgcaagacctgttcatcttgtcgggatcaaggcaaaaacgcggacaacatgctgttctgtgacagttgtgatcggggattccacatggaatgctgtgatccccccctaacccgtatgccaaaaggtatgtggatctgccagatttgccgccctcggaagaagggcaggaaactcctccagaagaaggctgctcagatcaagaggcgctacacgaacccaatcggcaggccaaaaaatagactcaaaaagcagaacacagtcagcaagggcccgtttagcaaggtgcggacaggcccaggccgcgggagaaagcgcaagatcactctgtctagccaatccgcatctagttcatctgaagagggctacctggaaaggattgacggcctcgatttctgccgggatagcaacgtatctttaaagtttaacaaaaagaccaaaggcttgattgatggattgaccaaattcttcacaccatcccccgatggccgcaaggcacgaggagaggtggtggattactcagagcagtacaggattcggaagcgaggtaaccggaagtcatccaccagcgactggccaacagataaccaggatggctgggacggaaaacaggagaacgaggagcgactgttcggctctcaggagatcatgacggagaaggacatggagttatttcgggacattcaggagcaggcgttgcagaaagtaggcgtcaccggacccccagatccccaagtgcgttgtccttccgtaatcgaattcgggaagtatgagatccatacctggtacagctcgccataccctcaggagtacagccggctccctaaactgtatctgtgcgagttctgcctgaaatacatgaaatccagaactattctgcagcaacacatgaaaaagtgcggttggttccatccacccgcaaatgagatttacaggaagaataacatttctgtgttcgaagtggacggcaacgtgagcaccatctactgtcagaacctgtgtcttttggcaaaactgtttttggaccataaaaccctgtattacgacgtggaaccttttctattttatgtcctcactcagaatgatgtgaagggttgtcatctcgtgggatacttttccaaggagaaacactgccagcagaaatacaacgtcagttgcataatgattctgccccaataccagaggaaaggctatggtcggttccttattgatttctcctacctcttaagtaaacgcgaggggcaggccggctccccagagaagcccctctcagacctgggccggctatcatatatggcttactggaagtcggtcattttggagtgcctctaccaccagaatgacaaacagattagcatcaaaaaactgtctaaactgaccggtatatgcccacaagacatcacaagtacgctccaccacctccgcatgcttgattttcgcagtgatcagttcgtgattattaggagggagaagctaatccaggaccatatggcgaaactgcagctgaaccttcggcctgtcgatgtggaccccgaatgcctcaggtggacgccagtaatcgtcagtaatagcgtcgtatcagaggaggaggaggaagaagctgaagaaggtgagaacgaggagccccagtgtcaggagcgcgagttggaaataagcgtggggaagtctgtgtcccacgagaacaaagaacaggactcctatagcgtcgagtcagagaaaaagccagaggttatggcccctgtgagctccacccggctgtccaagcaggtgctgcctcatgacagcctgcccgctaactcccaacccagcagacgggggcgttggggcaggaaaaaccggaaaacacaggagcgtttcggcgacaaggactcaaaattgctgctggaggaaacctctagcgcccctcaggagcaatatggagagtgtggagagaaatccgaggcaactcaggaacagtataccgaaagcgaggaacagctggttgcctcggaagaacagcctagccaagacggcaagccagacttgcccaaacggcggctgtctgaaggcgtggaaccatggcgcgggcagttgaaaaaatccccggaagccctcaaatgcaggcttacagagggatcagaaagattgccgagaaggtactctgagggggatagggccgtcctgcgagggttcagcgaatcaagcgaggaagaggaagagcctgagtccccacgtagcagctcccccccgatattgactaaacctacactgaaacggaaaaagccatttctccaccggagacgccgcgtccgaaagcggaaacaccataatagctcagtcgttaccgagacgatcagcgagaccacagaggtgcttgacgaacctttcgaagactccgactcggaacggccgatgccgcggcttgaaccgaccttcgaaatagacgaagaggaagaagaagaggatgagaacgagcttttcccccgggagtacttcaggcgcctaagttctcaggacgtgctccgatgtcaatcctcctcgaaaaggaagagtaaagacgaggaagaagacgaggaaagcgacgacgctgacgacacccccatcctcaaacctgtgtcacttttacgcaaacgagatgtgaaaaacagtcccttagaacctgatacatctacccctttaaagaagaagaaaggctggcccaaaggtaaatcgagaaagcctattcactggaaaaaacggccaggtcgcaaacctgggtttaagctgagtagggagattatgcccgtgtcaacccaggcctgtgtaatcgagcccattgtatctataccaaaagcaggtcgcaaacccaagatccaggaaagtgaagaaaccgtagagcccaaggaggatatgcctcttcccgaagagaggaaggaagaggaggaaatgcaggccgaagctgaagaggcagaagaaggggaagaggaggacgctgcctcttctgaggtacctgcagcctcaccagccgattcttcaaacagccctgaaaccgagacgaaagagcctgaagttgaggaggaagaggaaaaaccgcgggtgtctgaggagcagcgtcagtctgaggaagaacagcaggaattggaggagccagaacccgaggaggaggaggatgccgccgccgagaccgcacagaatgacgaccacgacgcagacgacgaggacgacggtcatctggaatccacaaagaagaaggagctggaggagcagcctacccgcgaggatgtcaaagaggaaccgggcgtccaggagagtttcctggatgctaacatgcaaaagtcacgcgaaaagatcaaggataaggaagagactgagctcgattcagaggaggaacagccctctcacgacacaagtgtcgtgtcagagcagatggcgggcagcgaggacgaccacgaagaggatagccatactaaagaggaattgatcgagcttaaagaggaggaagaaatcccacattcggaactagacctggaaacagtgcaagctgtgcaatctttaactcaggaagaatcttccgaacacgaaggcgcatatcaggactgcgaagagacccttgcagcatgtcagacactgcagagttacacacaggccgatgaagaccctcagatgtcaatggttgaagattgtcatgcgtctgagcacaactcccccattagttccgtgcaatctcatcccagtcagagcgtgagaagcgtcagttctccaaacgtgccagcacttgagtcaggctacacccagataagtcctgaacagggctcactctctgctccttcaatgcaaaatatggaaacttctccaatgatggatgtcccatctgtgtccgaccatagccaacaggtggtcgattctggattctcagaccttggcagcattgaatctaccaccgaaaattacgagaatccttcctcatacgatagcaccatgggcggatccatatgcggaaattcatcaagtcagtcatcttgtagttatgggggactgagttcatcaagttctctgacccagtccagctgtgtggtgacacagcaaatggcttcaatgggcagcagctgctccatgatgcaacagtcttccgtgcagccagcggcaaactgtagcattaaatctccacagtcttgcgtggtggagaggcctcctagcaatcagcagcagcagcctccgcccccccccccccagcagccccaacccccgcctccgcaaccccagcctgctcctcagcccccacccccacagcagcagccacagcaacagccccagcctcaaccacaacaaccaccccctccaccaccaccacagcagcaaccacctttgagccaatgtagcatgaataacagctttacacctgcaccgatgatcatggagatacccgagtcagggtccacaggaaatatttccatatacgagcgcatccccggtgacttcggggcaggtagctattcccagcctagcgccaccttcagtttagcaaaactgcaacaattgaccaacaccattatggatccccacgcaatgccatactcccattctccagcagtgacgtcttacgcaacctctgtgtcactaagtaataccggcttggcacagctggctccttcacatcctttggccggcaccccccaagcccaggctaccatgacacctcctccaaatctggcaagtacgaccatgaacctaacgtcacccctgttgcaatgcaacatgtcggctacgaacatcggaataccacacactcagcgcctgcagggccaaatgcctgttaaggggcatatctcgataaggtcaaagtctgcccccctccctagcgctgccgctcaccaacagcagctgtacggacgatcgccttctgccgtggccatgcaggccggacctcgggccctggctgtgcagcggggtatgaacatgggagtgaacttgatgccaacccctgcctataacgtcaatagcatgaacatgaatactctgaacgcaatgaacagctataggatgacccagcctatgatgaattcatcttaccactctaatcctgcctacatgaatcagacagcacagtaccccatgcaaatgcagatggggatgatgggaagccaagcctacacgcagcagccaatgcaaccaaacccgcatgggaatatgatgtatacaggcccgtcacaccattcttacatgaatgctgcaggggttccaaaacagagcctcaacggcccctacatgaggcggtag

SEQ ID NO: 167768 - DNA, 6015 bp, Artificial Sequence
  derived and/or modified sequence
atggtgaagctggccaaccccctgtacaccgagtggatcctggaggccatcaaaaaggtgaagaagcaaaagcagcggccctccgaggaacgcatctgtaacgccgtctcgtccagccacggcttggataggaagaccgtgctcgaacagttggagttatctgtcaaggacggcacaattcttaaggttagcaacaaaggcctgaatagttacaaagatcctgataatccgggtcggattgcactgccaaagcctcggaatcacggcaagcttgacaacaaacagaatgtggactggaacaagttaataaagcgggcagtcgaagggttggcggagtcgggagggagcacgctgaaatccatcgagaggtttctgaaaggacagaaggacgtaagcgccctgtttggcggatccgcagcctccggcttccaccagcaactgcgcctagccataaagcgggctatcggacatggaagactcctaaaagacggcccgctgtacagactgaataccaaagcaacgaatgtagacggtaaggagtcctgcgagtccctgagctgtttgccgcccgtatccctgctgcctcacgaaaaggacaagcctgttgccgaaccgattcctatttgtagtttttgtctgggtacgaaggagcagaaccgcgagaagaaaccggaggagctcatctcctgcgccgattgcggcaattcaggtcatccttcatgtctgaagttctcacctgagttgacagtgagagttaaggctctgaggtggcagtgtatcgaatgtaagacttgttctagctgccgtgaccaggggaagaacgcggacaatatgctgttttgtgacagctgcgatagaggatttcatatggaatgttgcgatccgccactcacacggatgcctaaagggatgtggatctgccagatttgcagaccacgcaaaaaaggacgcaagctgctgcaaaagaaagcagcccagataaagcgcaggtacacgaatcctatagggaggccgaaaaacaggctgaagaagcaaaatactgtgtctaagggtccattctctaaagtccggaccggccctggtcggggccgtaaaaggaagataacgctttcaagccagagtgcaagttcatcatctgaggagggatatctggaacgaatcgacggactggatttctgtcgcgatagtaatgtgtccctgaaattcaataagaagactaaggggctcattgatggattaaccaaattcttcacaccgagcccggatgggagaaaggcccgaggagaggtggtggattactctgagcaatacaggatcaggaaacgcggcaatcgtaaaagttctacttccgactggcctaccgataatcaggatggctgggatggcaagcaggaaaatgaggaaaggctgtttggaagccaggaaattatgacagaaaaagacatggaactttttcgggatatccaggaacaagcactacagaaggttggggtgacagggccacccgatcctcaggtgcgctgcccctcagtcattgaattcggcaaatacgagatccatacctggtattcctcaccgtatccccaagagtatagtagactgcccaagctgtatttatgtgaattttgcttgaagtacatgaagagtaggactatcttgcaacagcacatgaaaaagtgtggctggttccaccctccagctaacgagatttatcgtaaaaataatattagtgtgtttgaggtggatggaaacgtgtccaccatttactgtcaaaacctgtgcctcctggccaagctgttccttgaccacaagaccctgtactatgacgtcgagccatttctgttctacgtgctaacacagaatgacgtaaaaggatgccatctcgtggggtatttttccaaggagaaacattgtcagcagaagtacaacgtcagctgcatcatgatcctgcctcagtaccagaggaaaggatacggcagattccttatagacttctcttacttactgtctaaacgggagggacaggccggcagtcctgaaaagcccctgtctgacctgggccgacttagctacatggcatattggaagtctgtgatcctggagtgtttgtaccatcagaatgacaaacagatctctatcaaaaagctgtctaagctcactggcatatgcccacaagacatcacgtcaacactccaccaccttagaatgctcgattttcggagcgaccagtttgtgattatccggagagaaaagctcattcaggatcatatggctaagctgcagttgaatttgaggcccgtggacgtcgacccagaatgtctgcgatggacccccgtaatagtatctaattccgtggtgagtgaagaggaggaggaagaggctgaggaaggagaaaatgaggagccccaatgccaggaaagggagcttgagattagtgtgggaaagagcgtgtctcatgagaacaaagagcaggattcatattcagtggagtccgagaagaaacccgaagttatggccccagtgtcaagcaccagactcagcaagcaagtgttgccccacgacagcctgcctgccaacagtcagccgagccggcgtggtaggtgggggaggaaaaatcgcaagacccaggaacgctttggcgacaaagattctaaacttctgttagaggagacttcctctgctccacaagaacagtatggcgagtgtggagagaaatccgaggcgactcaggaacaatatactgaatccgaagagcagctggtcgcatcagaggagcagccaagtcaggatggcaagcccgaccttcctaagcggcgcctgagcgagggggtggagccctggagggggcagctgaaaaagtccccggaggcattaaaatgtcgacttacagaaggaagcgagaggttaccccggagatatagtgaaggtgaccgagccgtactccgtgggttttctgagagctccgaagaagaagaggagccggaatccccgcggagcagctcccctccgattttaacaaaacctactctgaagaggaagaagccttttctccataggagaagacgtgttcgaaagcgcaagcatcataactcgtcagtagtaactgaaacaatctccgagaccactgaagtactcgacgaaccgttcgaagacagcgactctgagcgacctatgccaaggctggaacctacattcgaaattgatgaagaggaagaagaagaggacgagaatgagctatttcctcgcgaatacttccgacggctgtcttcacaggatgtactcaggtgccaatcaagctctaagaggaagagtaaggatgaagaggaggacgaagagtccgatgatgccgacgatacacctatcctgaaacctgtgtctctgctgcggaaacgtgacgtgaagaactccccattggaaccagacacttctactccgctgaagaagaagaaaggttggcccaaaggtaagtcccgcaagcccatacactggaaaaaaaggcccgggagaaaacccggctttaagttatcacgggaaattatgccagtctccacacaagcttgtgtgattgagccaatagtctctatacctaaagcgggacgaaagcctaaaatccaggaaagcgaggagacagtcgagcccaaagaagatatgccactgcccgaggagagaaaagaagaggaggagatgcaggctgaggccgaagaggcagaggaaggagaagaagaggacgctgcctccagcgaggtgcctgccgccagccccgccgactcctccaactcacctgaaaccgagacaaaggaacccgaggtggaagaagaagaggagaaacctagagtctctgaagaacaacggcagtccgaagaagagcagcaggagctggaggagcctgaacctgaggaagaagaggacgccgccgcagagacagcacagaatgacgaccacgacgccgacgatgaggacgacgggcatctagaaagcacaaaaaaaaaagagctggaggagcaaccgactcgcgaggatgtgaaggaggaacctggcgtacaggaaagcttcctggatgcaaatatgcagaagtctcgggagaagataaaggataaagaggaaaccgagctagactcagaagaggaacagccttctcacgacacctccgtggtttccgagcagatggctggctctgaggacgaccatgaggaagacagccacactaaggaggagctgattgaactgaaggaggaagaagagataccacactctgagctggatctcgaaaccgtccaggctgtgcagagcctaacgcaggaggagtcaagcgaacacgagggggcataccaggactgcgaagagactttggcggcctgccagactctgcagtcgtatacgcaagccgatgaggaccctcaaatgtctatggtggaagactgtcatgcaagcgagcacaactctccgatcagctctgtgcaaagtcatccaagccaatcagtcaggtctgtgtcgagccccaacgtccccgccctggaaagcgggtacacacaaatctcccccgagcagggctccctctcggcccccagcatgcaaaacatggagacgagccctatgatggatgtgccttctgtttccgaccatagtcagcaagttgtggattccggcttctccgatctcggaagcatcgaatcgactacagagaattacgaaaatccctcaagctacgatagcactatgggcggtagcatctgcgggaattcatctagtcaatcatcgtgcagttatggcggactgtcctctagctcatctttaactcaaagtagttgtgtcgtcacacagcagatggcttcaatggggtctagttgttctatgatgcagcagtccagcgtacagccggcagcgaattgttcaattaaaagcccacagagctgtgtagtggaaaggccaccgagcaaccagcaacagcaaccgcctccccctccaccgcagcaaccacagccaccgcccccacaaccacagcctgccccccagccaccccccccccagcagcagcctcagcagcagccccaaccacagccacagcagcccccaccccctcccccgccgcagcagcaaccacccctctctcagtgcagtatgaataattccttcactccagctcccatgatcatggagattccagagagcgggtctactggcaacatcagcatctacgaacgcattcctggtgattttggcgctggcagctatagccaacccagcgccacattttctctcgcgaaactccaacaactgacaaacactatcatggatccacacgcaatgccgtacagccactctcccgcggtgacaagctacgctacatctgtcagcctgtcaaacaccggtctggcccaacttgctccatcacaccctcttgcaggaactccccaggctcaggctacaatgacccctcctccaaatttagcatcgaccaccatgaacctaacatccccgttactgcagtgcaatatgagtgcaacaaatatcgggatcccacacacacagcgactccaagggcagatgcctgtgaaagggcacataagcattcgttccaagagcgcccctctgcctagcgctgcggcccaccagcagcaattgtacggacggtcgccctctgccgtggccatgcaggcgggccctcgcgccctcgcggtacagagagggatgaatatgggcgtcaatcttatgccaacccccgcctataacgtgaacagcatgaacatgaacactctgaacgctatgaattcttaccgtatgacacagccaatgatgaactcatcctatcatagtaatcccgcttacatgaatcagacagcacagtatcccatgcagatgcagatgggcatgatggggtcccaggcttatacccagcagcccatgcagcctaatcctcacggcaacatgatgtacaccggcccaagccatcatagttatatgaatgccgcaggagttcccaagcagtcactgaacggtccttatatgcgtaggtag

SEQ ID NO: 167769 - DNA, 2448 bp, Artificial Sequence
  derived and/or modified sequence
atggtgaagctggccaaccccctgtacaccgagtggatcctggaggcgattaagaaagttaagaaacagaagcagaggccgtccgaggaacgcatttgtaacgccgtgtcttcctctcatggactggacagaaagaccgtgctcgagcagttggagttgagcgtcaaagacggaaccatcctaaaagtgagcaacaaggggttgaatagctacaaggatcccgataatcctggcagaatcgcactccccaaaccaagaaaccatggcaagctggacaacaagcagaatgtggattggaataagttaataaagagagctgtcgaagggttagccgagagtgggggttccactcttaagagtatcgagcgctttctgaagggccagaaggatgtgtccgccctattcggcggttcggcggcttcaggatttcatcaacagctgagattggcgattaaacgtgccattggacatgggagactgttaaaagatgggcccctgtacaggctgaatacgaaggccactaatgtagacggcaaggaatcctgcgagtctctgagctgcctccccccagtgtctctcctgccccacgagaaggataaaccagttgcagaacctataccgatttgctctttttgtctgggaacaaaagagcagaatagagagaagaagcctgaggagttgatcagttgtgctgattgcgggaattctggccacccttcctgtcttaagttctccccggaattgactgtgagggtaaaggccttgcgctggcagtgcatcgagtgcaagacatgttccagttgcagggatcagggcaagaatgccgataacatgttattttgtgatagttgtgataggggattccatatggaatgctgtgaccctccccttactagaatgccgaaaggtatgtggatttgtcagatttgccggccgaggaaaaaaggtcggaaactgctgcagaaaaaagccgcgcaaattaagagacggtatacaaaccccattggtagacccaaaaaccgactgaaaaagcaaaatactgtcagtaagggtccattttccaaggttcggaccgggcctgggagagggagaaagcgcaagatcacattgtcctcacagtcagcgtcctcatcaagcgaagaaggttacttggagcgaatcgacggcctggacttttgccgggacagcaacgtgagcctgaaattcaataaaaagacaaaggggcttatcgatgggctcaccaaattttttactccttccccagacggtcgaaaggcgcgcggcgaggtagtggattactctgagcaatatagaattaggaagcgcgggaacaggaagagctccacttcagattggccaactgacaaccaggatggctgggatggaaaacaggaaaacgaggaaaggctttttggcagccaagaaattatgactgaaaaagatatggagctctttcgagacatacaggagcaggctttacaaaaggttggcgtgacgggccctcctgatccacaagtgagatgcccatcagtcatagaattcggaaagtatgagatacacacttggtattcctctccatatccccaggagtattcgcgtcttccgaagctatacctgtgcgaattttgtctgaaatacatgaaaagccggactatcctgcagcagcatatgaagaaatgcggctggtttcacccacctgccaatgagatatatcgaaagaacaacatttccgtgtttgaggttgatggaaatgtgtccacaatctattgtcagaacttatgcctcctagcgaagctctttctggaccacaagacactgtattacgatgtggagcccttcctgttttacgttttaacgcagaacgacgttaagggatgtcatctagttggttacttttctaaggaaaaacactgtcagcaaaagtacaacgtcagctgcatcatgatccttcctcagtaccagcgaaagggttacgggagatttctgatcgactttagctacctcttgtccaaacgagaggggcaggcaggctcccccgaaaagcctctgtctgacctcggccgtttgtcatacatggcctattggaaaagtgtcatcctggaatgtctgtatcaccagaacgataaacagatatcaataaagaagttaagcaagctgaccggtatctgtccccaggacattacttctacactgcaccaccttaggatgttggactttagatcagaccagttcgtcatcattagacgagaaaaacttatccaggaccacatggccaaattacagctgaatctgcggcccgtagacgttgatccagagtgtctccggtggacccccgtaattgtttccaacagcgtagttagcgaggaagaagaagaggaagctgaggaaggagagaatgaagagccacagtgccaggaacgtgagctggagattagtgtcagggcctag

SEQ ID NO: 167770 - DNA, 6015 bp, Artificial Sequence
  derived and/or modified sequence
atggtgaagttggccaatcccctgtacacagagtggatcttggaagccatcaaaaaagtgaaaaaacagaaacaacgcccatcagaagaacggatttgcaatgctgtctccagttcccatgggctcgacagaaagaccgtactcgagcagctggaactgtctgtgaaggatggaacgattctgaaagtaagcaataagggtctgaacagctacaaggacccagacaaccccggtcgtattgcgctccctaaaccaagaaatcatggaaaacttgataacaaacagaacgtggactggaataagctgataaagcgagcggtcgaaggcttggctgaaagtgggggtagcactctcaaatccattgagaggtttttaaaagggcagaaggacgtgagcgccttatttggaggctctgctgcgagtggcttccaccagcagttacgattggccattaaaagagcgattggtcacggtcggctgctcaaagacggaccgttgtacagattgaacacaaaggctacgaacgtggacgggaaggaatcttgtgaaagtctttcttgcctcccccctgtgagccttctgccccacgagaaggataagcccgtggccgaacctatcccaatctgttccttctgtcttgggactaaagaacagaaccgggaaaaaaagccagaggaattgatcagttgtgcggattgtggcaactccggacacccctcctgcctgaagttttcgccggagctcacggtacgggtgaaggctttgcggtggcagtgtatcgaatgcaaaacctgctcgagttgtcgcgatcagggcaagaacgcagataacatgctgttctgcgattcctgcgatagggggtttcatatggaatgttgtgatccccctcttaccaggatgcccaaaggcatgtggatctgccagatctgcagaccaagaaaaaaaggtcgcaagctgttgcagaagaaggcagctcaaatcaagcggaggtacaccaatcctatcgggagaccaaagaatcgtttgaagaagcagaatactgtgtcgaaaggtccgttctcaaaagttcggactgggcctgggagaggacgaaaacgcaagattactctctcgtcacagagtgcgtcaagtagctccgaagagggttatctggagcgcatcgacgggctcgacttctgccgagacagcaacgtatcactaaaattcaataagaaaaccaagggcctcatagacggactcaccaaattcttcaccccatcaccagatggcagaaaggccaggggcgaggtcgttgactactcagaacaataccgcataagaaaaaggggaaaccgaaaatcctcaacatcagattggccaaccgacaaccaggacggctgggatggaaagcaggaaaacgaagagagactgttcggctcccaggagataatgactgaaaaggacatggagctgtttagagacattcaggagcaagctctacagaaggttggcgtgacagggcctcctgacccgcaggttcgctgcccatctgtgatcgagttcggcaagtatgaaatacatacttggtactccagtccatatccacaggagtatagtcggctcccaaaactttacctctgtgagttctgtctcaagtacatgaagtctcggaccatcctgcagcaacatatgaagaaatgcgggtggttccatccccctgccaatgagatctatcgcaaaaataacatctccgtgttcgaagtagacgggaacgtgtccacgatatactgtcagaatctttgtcttcttgccaaactgttcttggaccacaagactttgtactatgatgtcgaaccgtttcttttctacgtgcttacacagaacgatgtgaagggttgtcatctggtcgggtacttttcaaaggagaagcactgccagcagaaatataatgtcagttgtatcatgattcttccacagtatcagagaaagggatatggacggttcctgatcgattttagctatctgctctccaagcgggagggccaagctggatcacctgaaaagccattgtccgacctggggagactgtcctacatggcctactggaaatcagtgattttggaatgcttgtatcaccagaacgacaagcagatctctatcaagaagctgtccaagttaaccgggatatgcccacaggacattacgtctacactgcatcatttgcggatgcttgatttcaggagcgatcagtttgtcattatccggcgagaaaaactgatccaggaccatatggccaaacttcagctcaacttacggcctgttgacgtagacccagagtgtctcagatggactcccgtgatcgtgagtaatagcgtggtatcagaggaggaggaggaagaagctgaagagggggagaacgaggaaccccagtgccaggaaagggaactcgagatttccgtggggaagagcgtctcccacgagaataaggagcaagatagctacagtgtggaaagcgaaaagaagcccgaagtcatggccccagtgagcagcactcggcttagcaagcaagtgctgccacatgacagcctgccggctaatagccagccctcccgacgcggaagatggggacggaagaatagaaagacccaagaacgctttggcgacaaagatagcaagttactcctggaggagacaagttccgcccctcaagagcagtatggtgagtgtggcgagaaatccgaggccacccaggagcagtacaccgaatccgaagagcagctggtggcatcagaggaacagccctcccaagatggaaaacccgatttacccaaacgtagactttccgaaggagtggagccctggaggggccagcttaagaaaagcccggaggctctaaagtgtcgacttacggaagggtccgagcggcttccaagaaggtacagtgagggcgaccgtgctgttctacggggatttagtgaaagctcagaggaggaagaagaacctgagtctcctaggtcgtctagccccccaatcctgactaaacccacactgaagaggaagaaaccatttctgcataggcgacgaagggtccggaagagaaaacaccataacagcagcgtggtgactgagaccatcagcgaaactacggaagtcttagatgagccgttcgaagacagtgattcagaaaggcccatgcccaggttggagcctacatttgagatcgacgaggaggaggaggaagaggatgagaacgaactcttccctagggaatattttcggaggctgagctcacaggatgttctgcgctgccagtcctcctctaaaaggaaatctaaagacgaggaagaggatgaggaatcagacgacgctgatgacacccccattctcaagcctgtgagcctactgcggaaacgcgatgtcaagaattcccccctggaaccagacaccagcacacctctgaagaaaaagaagggctggcccaaagggaagagtcgtaaacccattcactggaagaagcgccctggtcggaagccaggatttaagttatcccgcgagatcatgcccgtatctacacaagcttgcgtgatagaacccatagtttccatccctaaggccggtaggaagcctaagatacaggagagcgaggaaactgttgagcctaaagaggacatgcccctccccgaggagcgcaaagaggaagaggagatgcaggccgaagctgaggaagctgaggaaggcgaggaagaggatgcagcttcaagcgaagtacccgctgcatcgccagccgacagtagcaactcacctgagaccgaaacaaaggaacctgaagttgaagaagaagaagaaaaacctcgagtctctgaggagcagcggcaatccgaggaggagcagcaggagctcgaagagcctgaacccgaagaggaggaagatgctgccgctgagaccgcccagaacgatgaccacgacgcggacgacgaggatgacggtcacctggagtctacgaagaagaaggagctggaagagcagcctacaagggaggatgtcaaggaggaacccggagtgcaggagtcatttctagacgctaatatgcaaaaatcgcgcgagaagatcaaggataaggaggagaccgaactggattccgaagaggagcagccgagccacgacactagtgtcgtctctgagcagatggctggatccgaggatgaccatgaagaagacagtcataccaaggaagaactcatcgaactgaaagaagaagaagagattcctcattccgagctggatcttgagaccgtgcaggcagtgcagtccctgactcaggaggagtcctcagaacatgagggagcctaccaggattgtgaagagactctggcagcctgtcagactctgcagtcctatacccaggctgatgaggatccccagatgtctatggttgaagactgccatgctagtgagcataacagccctatttcttctgtccagtcacacccctctcagagtgtccgatcagtgtcctctccaaacgtgcctgccctggaaagtggttacacccagatctcaccagaacagggctctctttctgctccctctatgcagaacatggagacatcaccgatgatggatgtcccctccgtgtcagaccactcccagcaggtagttgactcaggcttttcagacctcggctccatcgaatccactactgagaactatgaaaacccctccagctatgacagtactatgggaggctctatctgtggtaacagcagctcgcaaagcagttgttcctatggtggtctatccagctcttcaagtctgacacaaagcagctgcgtggtaactcagcagatggccagcatgggaagttcctgcagtatgatgcagcagtcctcagtgcagccggctgcaaattgttcgatcaaaagcccgcagtcctgcgtcgtagaaaggccaccatcaaatcagcagcagcaaccgcctccacccccaccccagcagccccagcctcccccaccgcagcctcagcctgcaccgcaacctcccccaccacagcagcaacctcaacagcagccacagcctcagccacaacagccgccaccacccccacctccccaacagcagccaccactatcccagtgctccatgaacaatagctttactcctgctcctatgattatggaaatccctgagagcggatcaacaggtaacatcagcatctatgagcgtattcccggtgacttcggcgcaggctcgtactcacagccctcagccaccttctccctggctaaacttcagcagttgactaataccataatggatccacacgccatgccttacagccattcccctgccgtaacgagttatgcaacctcagtgtccctgtccaacacaggccttgctcaacttgcgccaagtcatcctctggcaggcactccccaggctcaggctactatgacacctcctccaaacctggcttcaacaacaatgaatctgacctcgcccctgctgcagtgcaatatgtccgctaccaatatcgggattccacacacacagcgcctgcagggacagatgcctgtgaagggccacataagcatccgtagcaagtccgcccctctgcccagtgccgctgcccaccagcagcaattgtacggcaggagccccagtgccgtggccatgcaagctgggcctcgcgctctggcagtgcaacgtggcatgaacatgggagttaatctgatgcccacgccagcttacaatgtgaattccatgaacatgaatacattgaatgctatgaactcctatagaatgactcaacctatgatgaactcgtcgtaccacagcaacccagcttatatgaatcagactgcacagtatcctatgcaaatgcagatgggcatgatgggtagccaggcctacacacagcagcccatgcagcccaatccccatggaaacatgatgtacactggtccttcacaccactcttacatgaacgcagccggagtcccaaagcaatcactgaacggaccatatatgagacggtat

SEQ ID NO: 167771 - DNA, 6014 bp, Artificial Sequence
  derived and/or modified sequence
atggtgaaacttgctaaccctctgtacacggagtggattctggaagctattaaaaaggttaaaaagcagaagcagcgcccatctgaggagaggatttgtaatgccgtgtcaagcagccacgggttagatcgtaaaactgtgctcgagcagctggaattgtctgtcaaggacgggaccattctaaaggtgagtaacaaaggtctcaactcttacaaggacccagacaacccaggccgaatcgctctaccaaaaccaaggaaccatggtaaactcgacaataagcaaaacgtggactggaataagctcatcaaacgcgctgtcgagggtctggctgagtccgggggaagcactctcaagagtatcgagcggtttctgaaaggtcagaaggatgtcagcgctctgtttggcggtagtgccgcttcaggcttccaccagcagctacggctagctatcaaaagggctatcgggcatggtcgtctgcttaaagatgggcctttgtacaggcttaacaccaaggccaccaatgtcgatggcaaggaaagctgtgagagcctgtcttgcctcccgccagttagtctcctgccgcacgagaaagataaaccagtggccgagccaattcccatttgctcattctgccttggaaccaaggaacagaaccgcgaaaagaaacccgaggaactcattagctgtgcagattgtggaaattctggtcatccaagctgtcttaagttctctcccgaactgactgttcgggtcaaggccctgcgatggcagtgcattgaatgcaagacctgcagctcttgccgcgaccaagggaagaacgcagataacatgctgttttgtgattcctgcgaccgtggctttcatatggaatgctgtgatccaccgctgacgcgtatgcccaaggggatgtggatctgccaaatctgccgtccaaggaagaaaggacgtaagctgttacagaaaaaggctgcacagatcaagaggagatacactaatcctatcgggagaccaaaaaaccgtctgaagaagcagaacacggtttccaaggggcctttcagcaaggtcagaaccgggccaggtcggggacggaaaaggaaaattactctttcatctcagtctgcttcgagcagctctgaggaggggtacctcgaacggattgatgggctggacttttgtcgtgacagcaacgtctccctgaagttcaacaaaaagaccaagggactcatcgatgggctgacaaaattttttacccccagcccagatggcaggaaggccagaggggaggtggttgattatagtgaacagtacagaataaggaagagaggcaataggaagagctccacaagtgattggccaaccgataaccaggacggatgggacggaaagcaggaaaacgaagagcggttgttcggtagtcaggagatcatgactgagaaggacatggagctgttccgagacattcaggagcaagctctgcaaaaggtgggagttactgggccaccggacccccaagtgcgctgccccagcgtgattgagtttggcaaatatgagatacacacgtggtacagctctccttatccccaggagtacagccgcctgcctaagctttacttgtgtgagttttgtctcaaatatatgaagagccgtaccatactgcagcagcacatgaaaaaatgcgggtggtttcaccccccagccaacgagatctaccgaaaaaacaatattagtgtgttcgaggtagacggcaacgtgagcactatctactgccaaaatctctgccttctggcgaaactctttcttgaccacaaaaccttgtattacgacgtggagcccttcttattctacgtgttaacccaaaacgacgttaaagggtgccacctggtgggttatttcagtaaagaaaagcattgccagcaaaaatacaatgtcagttgtataatgatcttgccccagtaccagaggaaaggatacgggcgatttctcattgatttcagctacctgctgtcaaagcgcgagggtcaggctggcagcccggagaaacccctttccgatctgggcaggttatcttatatggcttattggaaatccgtgattttagaatgcctataccaccagaatgataagcagatcagcataaagaaactcagcaaactcacagggatttgtcctcaagatattactagtacgttacaccatctccggatgctggatttccgaagtgatcagtttgtgataatccgccgtgagaaactcatacaggatcacatggccaagctacaactgaatttacgcccagttgacgtggaccctgaatgtctcaggtggactcccgttatcgtatcaaactccgttgtatctgaagaggaagaagaggaggctgaggaaggggaaaatgaggagccacagtgccaggaaagggagctggagatctccgtcggaaaatccgtgagtcacgaaaacaaggaacaggattcttattcggtggagagtgaaaagaagcccgaagtgatggcgccagtttcgtccaccaggctctcaaagcaagttctgccgcatgattctctgcccgcaaatagccaacccagcaggagggggcgatggggcaggaagaaccggaagacacaagaaaggttcggagacaaagactcaaagcttctgctggaggaaactagctccgcccctcaagaacagtatggtgagtgcggggaaaaatccgaagctacacaggaacagtacactgaatctgaggaacaactggtggccagcgaggagcagccatctcaggacggaaagccagacctccccaagagaaggctgtcagagggcgtcgagccctggcgtgggcaactgaaaaaaagcccagaggccctgaaatgcagactgaccgagggctctgaacgcctgccaaggagatactcggagggagaccgggcagtgctccgcggtttttctgagagctctgaagaggaagaggagcctgagagccctcgttcatcctcccctcccattctgacaaagccgacactcaagcggaagaagcctttcctccaccgtcgaagaagagtcaggaagagaaaacatcacaactcgagcgtggttacagagacgatctcagagacaaccgaagtcttagatgagccgttcgaggattcagattcagagcgacccatgccgcgactggaaccgacctttgaaatcgacgaggaggaggaggaggaggacgaaaacgaattattccccagggaatactttaggcggctgagtagtcaggatgttcttcgctgtcagtcatcgagcaagagaaagagcaaagacgaagaggaggacgaagaatccgacgacgctgacgatacaccaatcctgaagccggtgtcactccttcggaaacgggacgttaaaaacagccccctggaaccggacacgtccacacccctgaagaaaaagaagggctggcccaagggtaaatctagaaaacccatccattggaagaagcgtccgggacgaaagcctggcttcaaactgtcaagggagatcatgcctgtcagcacccaggcatgcgtcatagagccaatcgtatctattccaaaggctggacgcaaaccaaaaattcaggagagcgaagagactgtggagcctaaagaagatatgccgctgcccgaagaaagaaaggaggaagaagaaatgcaggctgaggcagaggaggccgaggagggcgaagaggaggacgccgcttcctccgaggtccctgccgcttctcccgcagattcctccaactcaccagaaaccgaaacaaaagagcctgaagtggaagaggaggaggagaaacctagagtgtccgaagagcagaggcagagcgaagaggaacagcaagagttggaagaaccggaacctgaggaggaggaagacgcggctgccgagacggcacagaacgacgatcacgatgcagacgacgaggatgacggccatttagaatccacaaaaaaaaaagagctagaggagcagcccacgcgagaggacgttaaggaagaaccaggcgtgcaagagtcatttctggatgccaacatgcaaaaatcccgggagaagattaaagataaagaagagaccgagctggatagtgaagaggagcagccgtctcacgatacatcagtggtatctgagcagatggccggttcagaggacgatcacgaggaagacagccacactaaggaggagcttatcgaacttaaggaagaagaggagattcctcattcagaattggacttggaaaccgttcaggctgtccagtctctcacgcaggaagaatcttcggaacacgaaggcgcttaccaagattgcgaagagactcttgcggcatgccagacccttcaaagctatacccaggccgatgaggaccctcagatgtctatggttgaagactgccatgcatcagaacacaacagtcccatctcatctgtccagagtcatccctcacaatccgtccgctccgtgtcatccccaaacgtgccagccctggagtccggctatacccagatatccccagagcaggggtctcttagtgcaccctccatgcagaatatggagacttctccgatgatggacgtgccgtcggtttccgaccactcccagcaagttgtcgacagtggcttctctgatctgggatcaatcgagtcaacaactgagaattacgaaaacccatccagctacgactctaccatgggaggctctatttgcggcaactcttctagccaatcctcttgttcttacggcggtctatcctctagctcctcactaacccagtcatcttgcgtcgtgacacagcaaatggcttccatggggtctagctgttctatgatgcagcagagcagcgtccagccggcagccaactgtagcattaagagccctcagtcgtgcgtggtcgagcgaccacctagcaatcaacaacaacaacctcctccccctccccctcagcaaccccagcccccacctcctcagccccagccggcaccgcagcctcctccgcctcagcagcagccccaacagcagcctcagcctcagccacagcagccacccccaccgccacctcctcagcagcagccacccctgagccagtgttctatgaacaatagcttcacgcccgctcccatgattatggaaatccccgagtcaggatcaacaggtaacatatccatctatgagagaattcctggggactttggtgccggaagttacagccaaccttcagccacgttttcccttgccaaactgcagcagctaacgaataccatcatggacccgcatgcaatgccgtactcccatagcccagccgtgacctcctacgccacatctgtctcactaagtaacactgggctcgcacagctcgccccttcccatcccctcgcaggaacacctcaggctcaggccactatgacaccgcctcctaatctcgcatccaccacaatgaatctgacgagccccttgctccaatgcaatatgagtgctacaaacattgggatacctcacacacagagactgcaggggcagatgcctgtcaaaggccacatctccatccgctcaaaaagcgcacctctgccgtctgccgcagcccaccagcagcagttgtatgggaggtcaccaagcgctgttgctatgcaggccggacccagggcgctcgcagtacagaggggtatgaatatgggcgtgaacctcatgcccacacccgcttacaacgtgaactcaatgaacatgaacactctcaacgctatgaactcatatcgcatgacgcaacccatgatgaacagttcttaccactccaaccctgcatatatgaaccagacagcacagtatccaatgcaaatgcagatgggtatgatggggtctcaagcctatacccagcaacctatgcaacccaaccctcacgggaatatgatgtacaccggaccaagtcaccacagctacatgaatgccgctggagttccaaagcagagcttgaatggcccatatatgcgaagata

SEQ ID NO: 167772 - DNA, 6014 bp, Artificial Sequence
  derived and/or modified sequence
atggtcaaactcgccaacccgctctacaccgagtggatattggaagccattaaaaaggtgaagaaacaaaagcaacggcctagcgaagagcggatttgcaatgcggtctcaagtagtcacgggttagatcggaagacagtgctagagcagttggagttgtctgtcaaagacggaaccatccttaaggtttctaacaagggtctgaacagttacaaggacccagacaaccctgggaggattgctctccctaagccccgtaaccacgggaagctggataataaacagaatgtggactggaacaaactgatcaagcgcgcagttgaaggcctcgccgaatcaggaggaagcaccttaaagagtattgaacggttcctcaaagggcagaaagacgtaagcgctttattcggagggagtgccgcttctgggttccaccagcagctgcgtctggccattaagagagctatcggccacggacggttattgaaggatggcccactgtatagactgaataccaaagcaaccaatgtggacggcaaagagtcttgcgagagcttaagctgtctcccgccagtctctctgctcccgcatgagaaggacaagccggtggctgagccgattcctatttgtagtttttgtctaggaaccaaggaacagaaccgggaaaagaaacccgaggaactaatctcttgtgctgattgcggaaacagcggacatccatcctgcctgaaattctcccccgagctgacggtgagggtgaaggcactacgttggcagtgtatcgagtgcaagacatgttctagctgccgagatcagggcaaaaacgccgacaacatgctcttttgcgatagctgtgatcgagggttccatatggagtgctgtgatcctcccttgacaaggatgccaaaaggcatgtggatctgtcagatctgccgccctaggaagaaaggccgtaagcttctacagaaaaaggctgcccagattaagcgcagatacaccaaccctatcgggaggcccaagaataggttaaaaaagcagaacacagtctccaaaggcccattctcaaaggtaaggactggcccaggacggggaagaaagcgcaagatcactctttcaagtcaatccgcaagctcctcctcagaggaggggtacctggaacgtatcgacgggctcgacttttgcagagacagtaatgtcagtctcaaatttaacaagaagacgaagggcttgatagatggattgacaaaatttttcacgcccagccccgacggccgtaaagcaagaggcgaggttgtggattattccgagcagtaccgaattcggaaaaggggcaaccgtaaatccagcacctccgactggccaactgacaatcaagacggatgggatggcaagcaggaaaacgaagaaagactgtttggctcacaggagattatgaccgagaaagacatggaactctttagggacatccaggaacaggccttacagaaagtcggtgtaacaggaccaccggatccccaggtcagatgtcctagtgtcatcgagtttggaaaatacgagatccatacctggtattcctcaccttacccacaggaatactccagactacccaaattgtatctctgcgaattctgtctcaaatatatgaagtccaggaccatccttcagcagcacatgaaaaaatgcggatggtttcatcctccggcaaatgagatctatagaaagaataacatatctgtatttgaggtcgatggaaacgtgagtactatctattgtcagaatctttgtctccttgcgaaactcttcctcgatcacaagaccctttattacgatgtggaacctttcttgttttacgtgcttactcagaatgatgttaagggttgccacttagtgggctacttctccaaggaaaagcactgtcagcagaagtataacgtttcttgcatcatgatcctccctcagtatcaacgtaagggctatgggagatttttgatcgatttttcctatttgttatcgaaacgcgagggacaagccggtagtcctgagaagcctctctccgacctgggtcgtttgtcgtatatggcttactggaagtcagtcattttggagtgcctctatcaccagaatgataaacagatcagcatcaaaaagttatccaagcttaccgggatctgtcctcaagacatcacgtcgacacttcaccatctgagaatgctcgactttcggtctgaccagttcgtgattatccgtcgggagaaactgatccaagaccatatggctaaactgcagctgaacttgaggcccgtggatgtcgacccagaatgtctgaggtggacgccagtgatcgttagtaacagcgtggtaagcgaggaggaggaggaagaggccgaggagggggagaatgaggaaccacagtgtcaggagagggagcttgaaataagcgtcggcaagagcgttagtcacgagaataaagaacaggacagttatagcgtggagtctgaaaaaaaacctgaggtgatggcacccgtgtcctcgacgagactatctaagcaagtgctgccgcatgacagcctgccagctaattcgcagccgagcagaagaggacgctggggacgcaaaaaccgcaagacccaggagaggttcggggacaaggattccaaacttctgctggaggagacctcttccgctccacaggaacagtacggcgagtgtggcgaaaaatccgaggccacacaggagcagtacaccgagtccgaagaacagctcgtagcctctgaagagcagccttcccaagatggaaaacccgacctgcccaagcgaagactttccgagggagttgagccatggcggggacagctgaaaaagagccctgaggctttaaaatgcaggcttacagaaggctctgaacgcctgccacgcaggtacagcgaaggtgatcgagcagtcctgaggggtttctctgaaagttctgaggaggaagaggagccagagtcaccacgatcttccagcccccctatattgaccaaaccaacgctgaagaggaaaaaacccttcttacacagaaggaggcgggtccggaaacgcaagcatcataactcgtcagtggttacagaaaccataagcgagaccaccgaggtactggatgaaccgttcgaagattccgacagcgagagacccatgccacggctggaaccgacattcgaaatcgacgaggaggaggaggaggaggacgagaacgagctgtttccccgagagtactttaggcgcctgagctcccaggacgttctgaggtgccagtcatcctccaaacgcaagagtaaggacgaggaagaggacgaagaatccgatgacgccgacgatacaccaattctcaaaccggtgagtttgctccgaaagcgggatgtaaaaaattcccccctcgagcccgatactagcacaccactgaagaagaagaagggttggcctaaaggtaaatcccgcaaaccaatacactggaagaaaaggcccggaagaaagcccggatttaaactgtcgagagagatcatgcccgttagcacccaggcctgtgtgatcgagcccatagtttccatacccaaagctggccgaaaacccaaaattcaggaatctgaagagaccgtggaacctaaagaagacatgccgttgcctgaggaaaggaaggaagaggaggaaatgcaggcagaggctgaggaagctgaggagggcgaagaggaggatgccgcttcttccgaagtgccagccgcttctccggcagattcttctaattcccctgagacggagactaaggagccggaagtggaagaagaggaggaaaagccccgagttagcgaggagcaacgccagtccgaggaagaacagcaggaactggaggagccggagccagaggaggaggaagacgcagccgctgaaaccgcccagaacgacgatcacgacgccgacgatgaagacgacggccatctagaaagtacaaagaagaaggaacttgaggaacagcctacaagggaggacgtaaaagaagaacccggagtccaggaaagttttcttgacgctaacatgcagaagagccgcgagaaaatcaaggataaggaggaaacagagctggattcagaggaagagcaaccttcccatgacacatccgtggtgagtgaacagatggccggaagcgaagatgaccacgaagaagactctcacactaaggaggagctcattgaactcaaggaggaagaagagattcctcactcagaactagacctcgagacagtgcaggccgttcagagtctaacccaggaggaaagttctgagcatgagggcgcataccaggactgtgaagaaacactcgctgcttgccagacactgcagtcctacacccaggccgacgaggaccctcagatgagtatggtggaagattgccatgccagcgaacataattctccaatcagcagtgttcagagtcacccttcgcaatctgtgcggtccgtttctagccctaatgtacccgcactggaatctggctacacacagattagcccagagcagggctcactgtctgcacccagcatgcagaacatggagacttcaccaatgatggatgtgccaagcgtgagtgatcattcacagcaggtggtggactctggcttttccgacctaggctcaatcgaaagtacaactgagaattacgaaaacccctctagctacgattcgacaatgggtggatccatctgtggcaactccagctcccaatcttcatgctcctatggcggactttctagctccagctcattaacacagagtagctgcgtcgttacccagcagatggcttctatgggcagctcctgctccatgatgcagcagagctccgtgcagcccgctgccaactgttcaattaaatcccctcagtcttgcgtggtggaaagaccaccatctaatcagcaacagcagcccccacccccaccaccgcagcagccccagcctccccctccacagccccagccagcaccccagccaccccctccccagcagcaaccccaacagcagccccagccccagccacagcagccccctccaccacctccgccacagcagcagccaccactctcccagtgctccatgaacaactcttttaccccggcacctatgatcatggaaattccagagtccggcagtacgggcaacatatcgatttatgaacgtatacctggagattttggagcaggaagctactctcagccatccgccacattctccctggcaaagttgcaacagctgacgaacacgatcatggacccccatgcaatgccttattcccacagcccagccgtgacatcttatgccacgtctgtgtcactgtcaaatactggactcgctcaattggcgccatcacatcctctagccggaaccccgcaggcacaggccaccatgacaccacccccaaaccttgcctctacaacaatgaatcttacctctccactactgcaatgcaatatgtctgctacaaatattggaataccgcatacacagagacttcagggccaaatgccggtgaagggccacatcagtatccgcagcaagagcgctccgctgccctctgccgcagcccatcagcagcaactgtatgggagatccccgtccgccgtggcaatgcaggccggacctcgcgctctcgccgtgcaacgaggcatgaacatgggggtgaacctgatgccgacacccgcttacaatgtgaactccatgaacatgaacaccctcaacgcaatgaatagctaccgcatgactcagcccatgatgaactcaagctaccacagtaatcctgcatatatgaatcaaaccgcacagtaccccatgcagatgcagatgggaatgatgggatcacaagcctatacacaacaacctatgcagcctaatccacacgggaatatgatgtacaccgggccatctcatcatagctacatgaacgccgctggtgtgcccaagcagtctttaaacggcccttacatgaggcgtta

SEQ ID NO: 167773 - DNA, 2448 bp, Artificial Sequence
  derived and/or modified sequence
atggttaaactggctaaccccctttatacagaatggatattggaagctattaagaaggtgaagaaacaaaaacagcgtccatcggaagagcgtatctgcaatgctgtgtcctcttcccacgggctggacagaaaaacagttctggaacagttagaactcagtgtcaaggacggtactattcttaaagtgtcaaacaagggcctgaattcatataaagatcctgacaaccccggacggatagctctgcctaagcccagaaatcacggaaagctagataataagcagaacgtagattggaataagctgatcaaacgagccgttgagggactggctgaatccggtgggtccacattaaaatccattgagcgcttcctcaagggacagaaagacgtgagtgccctgttcggcggttccgctgcttctggattccatcaacaattgcgcctcgctattaagagggcaatcggacacggaaggttgttaaaagacggtcccttgtaccgtctgaatactaaggctaccaatgtcgacggcaaggagtcctgtgaatcgcttagttgtctgccacctgtaagcttgctgccacatgaaaaggataagcccgtcgcggagccaattccaatctgtagcttctgtctaggcacaaaggaacagaacagggagaaaaagcctgaggaactgatctcttgtgcggattgcggaaactccggacacccctcatgcctcaaatttagtccagagctgaccgtcagggtgaaggcgctccgctggcagtgcattgagtgtaagacgtgctcctcctgccgagaccaaggcaaaaatgccgataatatgctcttttgcgactcatgcgataggggctttcacatggaatgctgtgatcctcccctgaccagaatgccaaagggtatgtggatatgccagatctgtagaccacggaagaagggcagaaaattgcttcagaaaaaagccgcacagatcaaaagacgttatactaatccaatcggacgccctaaaaaccgacttaaaaaacagaacacggtgagcaagggaccctttagcaaagtgcgcaccggccctggtcgtggcagaaaacgcaagattacgctgagttcccaatccgcctcttcgtcgtctgaagaaggctacctggagagaatcgacggcctagacttttgtagggattcaaacgtgagtctgaagttcaacaagaagaccaaaggcctgattgatgggctgacaaagtttttcactccatctcctgacgggagaaaggccaggggtgaggtggtagattatagcgagcagtaccggatcaggaagcgcggaaataggaaaagttccacaagtgactggcccacagacaatcaggatgggtgggacggcaaacaggaaaatgaggaacgcctgtttggatcccaggagatcatgaccgagaaagatatggagctgttcagagatatccaggaacaggccttacagaaagtgggggtaacaggccctcccgatccacaagtccgatgcccaagtgttatcgaatttggcaagtacgaaattcatacttggtactcatccccttatccacaggagtatagccgcctacctaaactgtatctgtgtgaattctgtctgaagtacatgaagagccggactatccttcaacagcatatgaaaaaatgcgggtggttccatcctccagccaacgaaatctaccggaaaaacaacatatccgtgttcgaagtagacggcaatgtgagcaccatctactgtcagaacctgtgcctcctggctaagctgttcctcgaccacaagacactgtattatgatgtcgagccctttctgttttacgtcttgacacagaatgatgttaaaggctgccacttagtcggctacttttccaaggaaaagcattgccaacaaaaatacaatgtttcctgtatcatgatcttgccccagtatcagcggaaaggctacggacgttttctaatcgattttagctacctactgtcaaaacgcgaggggcaggcaggcagcccggaaaaaccactgagtgaccttgggagactcagctacatggcctattggaagtcagtgatactcgagtgcctttaccaccagaacgataagcagatctcaatcaagaaactcagtaaactgacaggaatttgtcctcaggatatcacaagcacacttcatcacctcaggatgttagattttcggtctgaccagttcgtaatcattcggcgtgagaagcttatacaggatcatatggcgaagctgcagctgaatctcaggcccgtggacgtggaccccgaatgccttcggtggactccggtgattgtgagcaactccgttgtgtcagaagaggaggaggaggaggctgaagagggcgaaaacgaggagccccagtgccaggagcgggaactagagatctccgtcagagcatag

SEQ ID NO: 167774 - DNA, 6015 bp, Artificial Sequence
  derived and/or modified sequence
atggtgaagctggccaaccccctgtacaccgagtggatcctggaggccatcaagaaggtgaagaagcagaagcagagacccagcgaggagagaatctgcaacgccgtgagcagcagccacggcctggacagaaagaccgtgctggagcagctggagctgagcgtgaaggacggcaccatcctgaaggtgagcaacaagggcctgaacagctacaaggaccccgacaaccccggcagaatcgccctgcccaagcccagaaaccacggcaagctggacaacaagcagaacgtggactggaacaagctgatcaagagagccgtggagggcctggccgagagcggcggcagcaccctgaagagcatcgagagattcctgaagggccagaaggacgtgagcgccctgttcggcggcagcgccgccagcggcttccaccagcagctgagactggccatcaagagagccatcggccacggcagactgctgaaggacggccccctgtacagactgaacaccaaggccaccaacgtggacggcaaggagagctgcgagagcctgagctgcctgccccccgtgagcctgctgccccacgagaaggacaagcccgtggccgagcccatccccatctgcagcttctgcctgggcaccaaggagcagaacagagagaagaagcccgaggagctgatcagctgcgccgactgcggcaacagcggccaccccagctgcctgaagttcagccccgagctgaccgtgagagtgaaggccctgagatggcagtgcatcgagtgcaagacctgcagcagctgcagagaccagggcaagaacgccgacaacatgctgttctgcgacagctgcgacagaggcttccacatggagtgctgcgacccccccctgaccagaatgcccaagggcatgtggatctgccagatctgcagacccagaaagaagggcagaaagctgctgcagaagaaggccgcccagatcaagagaagatacaccaaccccatcggcagacccaagaacagactgaagaagcagaacaccgtgagcaagggccccttcagcaaggtgagaaccggccccggcagaggcagaaagagaaagatcaccctgagcagccagagcgccagcagcagcagcgaggagggctacctggagagaatcgacggcctggacttctgcagagacagcaacgtgagcctgaagttcaacaagaagaccaagggcctgatcgacggcctgaccaagttcttcacccccagccccgacggcagaaaggccagaggcgaggtggtggactacagcgagcagtacagaatcagaaagagaggcaacagaaagagcagcaccagcgactggcccaccgacaaccaggacggctgggacggcaagcaggagaacgaggagagactgttcggcagccaggagatcatgaccgagaaggacatggagctgttcagagacatccaggagcaggccctgcagaaggtgggcgtgaccggcccccccgacccccaggtgagatgccccagcgtgatcgagttcggcaagtacgagatccacacctggtacagcagcccctacccccaggagtacagcagactgcccaagctgtacctgtgcgagttctgcctgaagtacatgaagagcagaaccatcctgcagcagcacatgaagaagtgcggctggttccacccccccgccaacgagatctacagaaagaacaacatcagcgtgttcgaggtggacggcaacgtgagcaccatctactgccagaacctgtgcctgctggccaagctgttcctggaccacaagaccctgtactacgacgtggagcccttcctgttctacgtgctgacccagaacgacgtgaagggctgccacctggtgggctacttcagcaaggagaagcactgccagcagaagtacaacgtgagctgcatcatgatcctgccccagtaccagagaaagggctacggcagattcctgatcgacttcagctacctgctgagcaagagagagggccaggccggcagccccgagaagcccctgagcgacctgggcagactgagctacatggcctactggaagagcgtgatcctggagtgcctgtaccaccagaacgacaagcagatcagcatcaagaagctgagcaagctgaccggcatctgcccccaggacatcaccagcaccctgcaccacctgagaatgctggacttcagaagcgaccagttcgtgatcatcagaagagagaagctgatccaggaccacatggccaagctgcagctgaacctgagacccgtggacgtggaccccgagtgcctgagatggacccccgtgatcgtgagcaacagcgtggtgagcgaggaggaggaggaggaggccgaggagggcgagaacgaggagccccagtgccaggagagagagctggagatcagcgtgggcaagagcgtgagccacgagaacaaggagcaggacagctacagcgtggagagcgagaagaagcccgaggtgatggcccccgtgagcagcaccagactgagcaagcaggtgctgccccacgacagcctgcccgccaacagccagcccagcagaagaggcagatggggcagaaagaacagaaagacccaggagagattcggcgacaaggacagcaagctgctgctggaggagaccagcagcgccccccaggagcagtacggcgagtgcggcgagaagagcgaggccacccaggagcagtacaccgagagcgaggagcagctggtggccagcgaggagcagcccagccaggacggcaagcccgacctgcccaagagaagactgagcgagggcgtggagccctggagaggccagctgaagaagagccccgaggccctgaagtgcagactgaccgagggcagcgagagactgcccagaagatacagcgagggcgacagagccgtgctgagaggcttcagcgagagcagcgaggaggaggaggagcccgagagccccagaagcagcagcccccccatcctgaccaagcccaccctgaagagaaagaagcccttcctgcacagaagaagaagagtgagaaagagaaagcaccacaacagcagcgtggtgaccgagaccatcagcgagaccaccgaggtgctggacgagcccttcgaggacagcgacagcgagagacccatgcccagactggagcccaccttcgagatcgacgaggaggaggaggaggaggacgagaacgagctgttccccagagagtacttcagaagactgagcagccaggacgtgctgagatgccagagcagcagcaagagaaagagcaaggacgaggaggaggacgaggagagcgacgacgccgacgacacccccatcctgaagcccgtgagcctgctgagaaagagagacgtgaagaacagccccctggagcccgacaccagcacccccctgaagaagaagaagggctggcccaagggcaagagcagaaagcccatccactggaagaagagacccggcagaaagcccggcttcaagctgagcagagagatcatgcccgtgagcacccaggcctgcgtgatcgagcccatcgtgagcatccccaaggccggcagaaagcccaagatccaggagagcgaggagaccgtggagcccaaggaggacatgcccctgcccgaggagagaaaggaggaggaggagatgcaggccgaggccgaggaggccgaggagggcgaggaggaggacgccgccagcagcgaggtgcccgccgccagccccgccgacagcagcaacagccccgagaccgagaccaaggagcccgaggtggaggaggaggaggagaagcccagagtgagcgaggagcagagacagagcgaggaggagcagcaggagctggaggagcccgagcccgaggaggaggaggacgccgccgccgagaccgcccagaacgacgaccacgacgccgacgacgaggacgacggccacctggagagcaccaagaagaaggagctggaggagcagcccaccagagaggacgtgaaggaggagcccggcgtgcaggagagcttcctggacgccaacatgcagaagagcagagagaagatcaaggacaaggaggagaccgagctggacagcgaggaggagcagcccagccacgacaccagcgtggtgagcgagcagatggccggcagcgaggacgaccacgaggaggacagccacaccaaggaggagctgatcgagctgaaggaggaggaggagatcccccacagcgagctggacctggagaccgtgcaggccgtgcagagcctgacccaggaggagagcagcgagcacgagggcgcctaccaggactgcgaggagaccctggccgcctgccagaccctgcagagctacacccaggccgacgaggacccccagatgagcatggtggaggactgccacgccagcgagcacaacagccccatcagcagcgtgcagagccaccccagccagagcgtgagaagcgtgagcagccccaacgtgcccgccctggagagcggctacacccagatcagccccgagcagggcagcctgagcgcccccagcatgcagaacatggagaccagccccatgatggacgtgcccagcgtgagcgaccacagccagcaggtggtggacagcggcttcagcgacctgggcagcatcgagagcaccaccgagaactacgagaaccccagcagctacgacagcaccatgggcggcagcatctgcggcaacagcagcagccagagcagctgcagctacggcggcctgagcagcagcagcagcctgacccagagcagctgcgtggtgacccagcagatggccagcatgggcagcagctgcagcatgatgcagcagagcagcgtgcagcccgccgccaactgcagcatcaagagcccccagagctgcgtggtggagagaccccccagcaaccagcagcagcagcccccccccccccccccccagcagccccagcccccccccccccagccccagcccgccccccagcccccccccccccagcagcagccccagcagcagccccagccccagccccagcagccccccccccccccccccccccagcagcagccccccctgagccagtgcagcatgaacaacagcttcacccccgcccccatgatcatggagatccccgagagcggcagcaccggcaacatcagcatctacgagagaatccccggcgacttcggcgccggcagctacagccagcccagcgccaccttcagcctggccaagctgcagcagctgaccaacaccatcatggacccccacgccatgccctacagccacagccccgccgtgaccagctacgccaccagcgtgagcctgagcaacaccggcctggcccagctggcccccagccaccccctggccggcaccccccaggcccaggccaccatgacccccccccccaacctggccagcaccaccatgaacctgaccagccccctgctgcagtgcaacatgagcgccaccaacatcggcatcccccacacccagagactgcagggccagatgcccgtgaagggccacatcagcatcagaagcaagagcgcccccctgcccagcgccgccgcccaccagcagcagctgtacggcagaagccccagcgccgtggccatgcaggccggccccagagccctggccgtgcagagaggcatgaacatgggcgtgaacctgatgcccacccccgcctacaacgtgaacagcatgaacatgaacaccctgaacgccatgaacagctacagaatgacccagcccatgatgaacagcagctaccacagcaaccccgcctacatgaaccagaccgcccagtaccccatgcagatgcagatgggcatgatgggcagccaggcctacacccagcagcccatgcagcccaacccccacggcaacatgatgtacaccggccccagccaccacagctacatgaacgccgccggcgtgcccaagcagagcctgaacggcccctacatgagaagatag

SEQ ID NO: 167775 - DNA, 2448 bp, Artificial Sequence
  derived and/or modified sequence
atggtgaagctggccaaccccctgtacaccgagtggatcctggaggccatcaagaaggtgaagaagcagaagcagagacccagcgaggagagaatctgcaacgccgtgagcagcagccacggcctggacagaaagaccgtgctggagcagctggagctgagcgtgaaggacggcaccatcctgaaggtgagcaacaagggcctgaacagctacaaggaccccgacaaccccggcagaatcgccctgcccaagcccagaaaccacggcaagctggacaacaagcagaacgtggactggaacaagctgatcaagagagccgtggagggcctggccgagagcggcggcagcaccctgaagagcatcgagagattcctgaagggccagaaggacgtgagcgccctgttcggcggcagcgccgccagcggcttccaccagcagctgagactggccatcaagagagccatcggccacggcagactgctgaaggacggccccctgtacagactgaacaccaaggccaccaacgtggacggcaaggagagctgcgagagcctgagctgcctgccccccgtgagcctgctgccccacgagaaggacaagcccgtggccgagcccatccccatctgcagcttctgcctgggcaccaaggagcagaacagagagaagaagcccgaggagctgatcagctgcgccgactgcggcaacagcggccaccccagctgcctgaagttcagccccgagctgaccgtgagagtgaaggccctgagatggcagtgcatcgagtgcaagacctgcagcagctgcagagaccagggcaagaacgccgacaacatgctgttctgcgacagctgcgacagaggcttccacatggagtgctgcgacccccccctgaccagaatgcccaagggcatgtggatctgccagatctgcagacccagaaagaagggcagaaagctgctgcagaagaaggccgcccagatcaagagaagatacaccaaccccatcggcagacccaagaacagactgaagaagcagaacaccgtgagcaagggccccttcagcaaggtgagaaccggccccggcagaggcagaaagagaaagatcaccctgagcagccagagcgccagcagcagcagcgaggagggctacctggagagaatcgacggcctggacttctgcagagacagcaacgtgagcctgaagttcaacaagaagaccaagggcctgatcgacggcctgaccaagttcttcacccccagccccgacggcagaaaggccagaggcgaggtggtggactacagcgagcagtacagaatcagaaagagaggcaacagaaagagcagcaccagcgactggcccaccgacaaccaggacggctgggacggcaagcaggagaacgaggagagactgttcggcagccaggagatcatgaccgagaaggacatggagctgttcagagacatccaggagcaggccctgcagaaggtgggcgtgaccggcccccccgacccccaggtgagatgccccagcgtgatcgagttcggcaagtacgagatccacacctggtacagcagcccctacccccaggagtacagcagactgcccaagctgtacctgtgcgagttctgcctgaagtacatgaagagcagaaccatcctgcagcagcacatgaagaagtgcggctggttccacccccccgccaacgagatctacagaaagaacaacatcagcgtgttcgaggtggacggcaacgtgagcaccatctactgccagaacctgtgcctgctggccaagctgttcctggaccacaagaccctgtactacgacgtggagcccttcctgttctacgtgctgacccagaacgacgtgaagggctgccacctggtgggctacttcagcaaggagaagcactgccagcagaagtacaacgtgagctgcatcatgatcctgccccagtaccagagaaagggctacggcagattcctgatcgacttcagctacctgctgagcaagagagagggccaggccggcagccccgagaagcccctgagcgacctgggcagactgagctacatggcctactggaagagcgtgatcctggagtgcctgtaccaccagaacgacaagcagatcagcatcaagaagctgagcaagctgaccggcatctgcccccaggacatcaccagcaccctgcaccacctgagaatgctggacttcagaagcgaccagttcgtgatcatcagaagagagaagctgatccaggaccacatggccaagctgcagctgaacctgagacccgtggacgtggaccccgagtgcctgagatggacccccgtgatcgtgagcaacagcgtggtgagcgaggaggaggaggaggaggccgaggagggcgagaacgaggagccccagtgccaggagagagagctggagatcagcgtgagagcctag

SEQ ID NO: 167776 - DNA, 507 bp, Artificial Sequence
  derived and/or modified sequence
atggaggagcagctggtgctgaagggcggccagcacccccaccagcccgtgtggcacgacggcagagccgtggccggccagcccctgcacccccactgggccccccagcccagacccagaggcagcctgggccagcacctgctgagaggcagcctgctggccgagagcctgcagcccctgagcgccggccaggtgtgcagcagaaagcccagaagcagactgagaaagtgccccagcagaagcctgagaagcgagcccatcagcgtgcccaccctgtggaccggccacgccgagagaggccagtgccccctgctgccccccgcccccacccacggccccctgctggacgactgctacagcttcttcagaagactgggcctgagccaggtgaagcccttcgtgcccagactgcacctgaagggctgcagactggcctgggagagcctgttccaggtgctgacctgcagacagtgcagcctgaccggccccagccagctgctgaactag

SEQ ID NO: 167777 - protein, 840 aa, Artificial Sequence
  derived and/or modified sequence
MAGPGSTGGQIGAAALAGGARSKVAPSVDFDHSCSDSVEYLTLNFGPFETVHRWRRLPPCDEFVGARRSKHTVVAYKDAIYVFGGDNGKTMLNDLLRFDVKDCSWCRAFTTGTPPAPRYHHSAVVYGSSMFVFGGYTGDIYSNSNLKNKNDLFEYKFATGQWTEWKIEGRLPVARSAHGATVYSDKLWIFAGYDGNARLNDMWTIGLQDRELTCWEEVAQSGEIPPSCCNFPVAVCRDKMFVFSGQSGAKITNNLFQFEFKDKTWTRIPTEHLLRGSPPPPQRRYGHTMVAFDRHLYVFGGAADNTLPNELHCYDVDFQTWEVVQPSSDSEVGGAEVPERACASEEVPTLTYEERVGFKKSRDVFGLDFGTTSAKQPTQPASELPSGRLFHAAAVISDAMYIFGGTVDNNIRSGEMYRFQFSCYPKCTLHEDYGRLWESRQFCDVEFVLGEKEECVQGHVAIVTARSRWLRRKITQARERLAQKLEQEAAPVPREAPGVAAGGARPPLLHVAIREAEARPFEVLMQFLYTDKIKYPRKGHVEDVLLIMDVYKLALSFQLCRLEQLCRQYIEASVDLQNVLVVCESAARLQLSQLKEHCLNFVVKESHFNQVIMMKEFERLSSPLIVEIVRRKQQPPPRTPLDQPVDIGTSLIQDMKAYLEGAGAEFCDITLLLDGHPRPAHKAILAARSSYFEAMFRSFMPEDGQVNISIGEMVPSRQAFESMLRYIYYGEVNMPPEDSLYLFAAPYYYGFYNNRLQAYCKQNLEMNVTVQNVLQILEAADKTQALDMKRHCLHIIVHQFTKVSKLPTLRSLSQQLLLDIIDSLASHISDKQCAELGADI

SEQ ID NO: 167778 - protein, 821 aa, Artificial Sequence
  derived and/or modified sequence
MAGPGSTGGQIGAAALAGGARSKVAPSVDFDHSCSDSVEYLTLNFGPFETVHRWRRLPPCDEFVGARRSKHTVVAYKDAIYVFGGDNGAFTTGTPPAPRYHHSAVVYGSSMFVFGGYTGDIYSNSNLKNKNDLFEYKFATGQWTEWKIEGRLPVARSAHGATVYSDKLWIFAGYDGNARLNDMWTIGLQDRELTCWEEVAQSGEIPPSCCNFPVAVCRDKMFVFSGQSGAKITNNLFQFEFKDKTWTRIPTEHLLRGSPPPPQRRYGHTMVAFDRHLYVFGGAADNTLPNELHCYDVDFQTWEVVQPSSDSEVGGAEVPERACASEEVPTLTYEERVGFKKSRDVFGLDFGTTSAKQPTQPASELPSGRLFHAAAVISDAMYIFGGTVDNNIRSGEMYRFQFSCYPKCTLHEDYGRLWESRQFCDVEFVLGEKEECVQGHVAIVTARSRWLRRKITQARERLAQKLEQEAAPVPREAPGVAAGGARPPLLHVAIREAEARPFEVLMQFLYTDKIKYPRKGHVEDVLLIMDVYKLALSFQLCRLEQLCRQYIEASVDLQNVLVVCESAARLQLSQLKEHCLNFVVKESHFNQVIMMKEFERLSSPLIVEIVRRKQQPPPRTPLDQPVDIGTSLIQDMKAYLEGAGAEFCDITLLLDGHPRPAHKAILAARSSYFEAMFRSFMPEDGQVNISIGEMVPSRQAFESMLRYIYYGEVNMPPEDSLYLFAAPYYYGFYNNRLQAYCKQNLEMNVTVQNVLQILEAADKTQALDMKRHCLHIIVHQFTKVSKLPTLRSLSQQLLLDIIDSLASHISDKQCAELGADI

SEQ ID NO: 167779 - protein, 799 aa, Artificial Sequence
  derived and/or modified sequence
MNYDPIVSKVAEVLASGRAIRKREVERSKHTVVAYKDAIYVFGGDNGKTMLNDLLRFDVKDCSWCRAFTTGTPPAPRYHHSAVVYGSSMFVFGGYTGDIYSNSNLKNKNDLFEYKFATGQWTEWKIEGRLPVARSAHGATVYSDKLWIFAGYDGNARLNDMWTIGLQDRELTCWEEVAQSGEIPPSCCNFPVAVCRDKMFVFSGQSGAKITNNLFQFEFKDKTWTRIPTEHLLRGSPPPPQRRYGHTMVAFDRHLYVFGGAADNTLPNELHCYDVDFQTWEVVQPSSDSEVGGAEVPERACASEEVPTLTYEERVGFKKSRDVFGLDFGTTSAKQPTQPASELPSGRLFHAAAVISDAMYIFGGTVDNNIRSGEMYRFQFSCYPKCTLHEDYGRLWESRQFCDVEFVLGEKEECVQGHVAIVTARSRWLRRKITQARERLAQKLEQEAAPVPREAPGVAAGGARPPLLHVAIREAEARPFEVLMQFLYTDKIKYPRKGHVEDVLLIMDVYKLALSFQLCRLEQLCRQYIEASVDLQNVLVVCESAARLQLSQLKEHCLNFVVKESHFNQVIMMKEFERLSSPLIVEIVRRKQQPPPRTPLDQPVDIGTSLIQDMKAYLEGAGAEFCDITLLLDGHPRPAHKAILAARSSYFEAMFRSFMPEDGQVNISIGEMVPSRQAFESMLRYIYYGEVNMPPEDSLYLFAAPYYYGFYNNRLQAYCKQNLEMNVTVQNVLQILEAADKTQALDMKRHCLHIIVHQFTKVSKLPTLRSLSQQLLLDIIDSLASHISDKQCAELGADI

SEQ ID NO: 167780 - DNA, 2523 bp, Artificial Sequence
  derived and/or modified sequence
atggccggcccagggagtacaggcggccagatcggggcggcggcactggcaggtggagcgaggtccaaggtggccccaagtgtcgacttcgatcatagctgctcagactctgttgagtacctcacccttaactttggtccgtttgagaccgtacaccggtggcgccggctgccaccttgcgatgagttcgtcggggcccgtcgttccaagcatacagtggtcgcctacaaagacgcaatttatgtgtttggaggggataacgggaagaccatgcttaacgaccttctcaggtttgatgtgaaggactgcagttggtgtcgggccttcaccaccggaacaccaccggccccgcgttaccatcattctgcagtggtgtacggatcctccatgttcgtgtttggaggctacactggggatatttacagcaactcaaacctgaaaaataaaaatgaccttttcgaatataagttcgctacaggtcagtggaccgaatggaagatcgaggggcgactaccggtggctagatctgctcatggagctacagtgtacagcgacaagctgtggatctttgccgggtatgatggcaacgccaggctgaacgacatgtggactattgggcttcaggatcgggagctcacttgttgggaagaggtcgcccagtcgggtgagatcccgccatcatgctgcaatttccccgttgctgtgtgcagggataaaatgtttgtgtttagtgggcaatccggcgcaaagatcactaacaatttgttccagttcgagttcaaggacaagacttggacgcggatccccaccgaacatttgctccgcggcagccccccacccccccagcggaggtacggacacacgatggtcgcgttcgacagacacctctatgtgttcgggggcgccgcagacaacacactgcccaacgagctccactgctacgacgttgactttcagacgtgggaggtggtccagccaagttcagacagcgaggtcggtggcgccgaggttcctgaacgcgcttgcgcctccgaagaagtgccaaccctaacctacgaggagcgcgtaggcttcaagaaaagccgcgatgtcttcggcctggattttgggactacctccgctaagcagcccacgcaacctgcttcagagctgccatccgggcgcctgtttcatgccgccgctgtgatcagtgatgcaatgtacattttcggtggaaccgtggataataacatccgctcaggcgagatgtatcgctttcaattcagctgctaccccaagtgcactctgcatgaggactatgggagactgtgggaaagtcggcagttctgcgacgtagaatttgtactgggagagaaggaggaatgtgtccaaggacacgtggcaattgtgaccgcacggtcccgctggctgcggaggaagatcacacaggctagggagcggcttgcccaaaaattagaacaggaggccgctccggttcctagggaggcccctggggtcgccgcaggaggcgcacggccgcctctcttgcatgttgccattagagaagctgaagcccgcccttttgaagtattgatgcagtttctttatactgacaagatcaagtacccacgcaaagggcatgtggaagacgtgttgctgattatggacgtgtataagctcgccctaagcttccaactatgccgtcttgaacagctatgcaggcagtatatcgaggcttctgtggatctgcaaaacgtgctggtcgtgtgtgagtcagcagcccggcttcagctgagtcagcttaaggagcactgcctgaatttcgttgtcaaggaatcccacttcaaccaggtgatcatgatgaaggaatttgagcgcctctcgagccccctgatcgtggaaattgtccgcaggaaacagcaaccccctcctcggacacctctcgatcagcctgtagatataggcaccagcttgatccaggacatgaaagcttatctcgagggagctggagctgaattttgcgatattactctgctgctcgacggacaccccaggccggctcacaaggcaatcttggctgcccggagtagctatttcgaggccatgttcagaagctttatgccagaggatggccaggtgaacatttccattggggaaatggtgcctagtaggcaggctttcgagtccatgcttagatacatatactatggagaggtgaacatgccacccgaagattcactttatctttttgcagccccatattattatggattttacaacaaccgtttgcaggcgtactgtaaacaaaacctggaaatgaatgtgaccgtgcagaacgtgctgcaaatcctcgaagccgcggataaaactcaggcacttgatatgaagaggcactgcttgcatattattgtgcatcagttcacgaaggtcagcaagctccccacactgcgctccctgtcgcagcagttgctcctagatatcatcgactctcttgcatctcacatctccgataaacagtgcgcagaactaggcgccgatatatag

SEQ ID NO: 167781 - DNA, 2523 bp, Artificial Sequence
  derived and/or modified sequence
atggccggccctggcagcactggaggccagattggagctgctgccctggccggcggggcccggagcaaggtggcccccagcgtggactttgaccacagctgcagcgacagcgtggagtacctgaccctgaactttggcccctttgagaccgtgcaccgctggaggcggctgcccccctgtgatgaatttgtgggcgcccggcgcagcaagcacacagtggtggcctacaaggatgccatctacgtgtttggaggagacaatggcaagaccatgctgaatgacctgctgcgctttgatgtgaaggactgctcctggtgccgggccttcaccaccggcaccccaccagccccccgctaccaccacagcgctgtggtgtatggcagctccatgtttgtgtttggaggctacacaggagacatctacagcaacagcaacctgaagaacaagaatgacctgtttgagtacaagtttgccaccggccagtggacagagtggaagattgagggccgcctgcctgtggcccggagcgcccacggggccaccgtgtacagcgacaagctgtggatctttgctggctatgatggaaatgcccggctgaatgacatgtggaccatcggcctgcaggaccgggagctgacctgctgggaggaggtggcccagagcggggagatcccccccagctgctgcaacttccctgtggccgtgtgccgggacaagatgtttgtgttcagcggccagagcggggccaagatcaccaacaacctcttccagtttgagttcaaggacaagacctggacccgcatccccacagagcacctgctgcggggcagccccccaccaccccagaggagatatggccacaccatggtggcctttgacagacacctgtatgtgtttggaggagctgctgacaacaccctgcccaatgagctgcactgctatgatgtggacttccagacctgggaggtggtgcagcccagcagtgacagcgaggtgggcggcgctgaggtgcctgagcgggcctgtgccagcgaggaggtgcccaccctgacctatgaggagcgggtgggcttcaagaagagcagagatgtgtttggcctggactttggcaccaccagcgccaagcagcccacccagcctgccagcgagctgcccagcggccgcctcttccacgccgccgccgtcatcagtgatgccatgtacatctttggaggcaccgtggacaacaacatccgctctggagagatgtaccgcttccagttcagctgctaccccaagtgcaccctgcatgaagattatggccgcctgtgggagagccggcagttctgtgatgtggagtttgtgctgggggagaaggaggagtgtgtgcagggccacgtggccatcgtgacagcccggagccgctggctgcggaggaagatcacccaggcccgggagcggctggcccagaagctggagcaggaggccgcccctgtgccccgggaggcccctggggtggccgccggcggggcccggccccccctgctgcacgtggccatccgggaggccgaggcccggccctttgaggtgctgatgcagttcctgtacacagacaagatcaagtaccccaggaagggccacgtggaggatgtgctgctgatcatggatgtgtacaagctggccctgtccttccagctgtgccgcctggagcagctgtgccggcagtacatcgaggcctctgtggacctgcagaatgtgctggtggtgtgtgagagcgctgcccggctgcagctgagccagctgaaggagcactgcctgaactttgtggtgaaggagagccacttcaaccaggtgatcatgatgaaggagtttgagcggctgagcagccccctgattgtggagatcgtgcggaggaagcagcagcccccacccaggacccccctggaccagcctgtggacatcggcaccagcctcatccaggacatgaaggcctacctggagggcgctggagctgagttctgtgacatcaccctgctgctggatggccaccccaggcctgcccacaaggccatcctggccgcccggagcagctactttgaggccatgttccgctccttcatgccagaagatggccaggtgaacatcagcatcggggagatggtgcccagccggcaggcctttgagagcatgctgcgctacatctactatggagaggtgaacatgcccccagaggacagcctgtacctgtttgctgccccctactactacggcttctacaacaaccggctgcaggcctactgcaagcagaacctggagatgaatgtgacagtgcagaatgtgctgcagatcctggaggccgctgacaagacccaggccctggacatgaagaggcactgcctgcacatcatcgtgcaccagttcaccaaggtgtccaagctgcccaccctgcggagcctgagccagcagctgctgctggacatcatcgacagcctggccagccacatcagtgacaagcagtgtgccgagctgggcgctgacatctag

SEQ ID NO: 167782 - DNA, 2523 bp, Artificial Sequence
  derived and/or modified sequence
atggccggccccggcagcaccggcggccagatcggcgccgccgccctcgccgggggtgcaagatccaaagtcgctcctagtgtggacttcgaccattcttgcagcgattcggtcgaatacctcactctgaatttcggaccctttgagaccgtgcataggtggcgtcgcctgccaccttgcgatgagttcgtcggggctcggaggagtaagcacacggtggttgcttacaaagacgcgatatatgtgttcggaggagacaacgggaaaaccatgctgaatgacctacttcgcttcgacgtgaaagattgctcctggtgtcgagccttcactacaggaacccctcctgccccacggtaccaccactccgccgtcgtgtatggttcttccatgtttgtgttcggcggttacacaggcgacatctactccaatagcaatctcaagaacaagaacgaccttttcgagtacaaattcgctactggtcaatggacggaatggaagattgagggccgcctgccagtcgcgcggtcggcacacggcgctacagtctactcagacaaactctggattttcgccggctatgacggtaatgcccgactcaatgacatgtggaccataggcttgcaggaccgggagctcacctgctgggaagaggttgctcaatctggtgagatacccccctcttgctgcaacttccctgtcgcggtatgcagggacaaaatgttcgtgttcagcgggcagtccggtgccaaaataacaaataacttgtttcagttcgagttcaaggataagacttggacaaggattcctacggagcacctgcttcgcggttctccccctcccccacagaggcgctacggccacactatggttgcattcgacagacacctgtatgtttttggcggggcggctgataataccctcccaaatgagttgcattgttatgatgttgacttccaaacttgggaagtcgtacaaccaagcagcgactccgaggtagggggggccgaggtgcccgagagagcctgcgcctccgaagaggtgcccacactgacctacgaagaacgtgtgggctttaaaaagagcagagatgtgtttggcctcgactttggaaccacatccgctaaacagcccactcaacccgcgtcagaactgccctccggtcggctctttcatgccgctgcagtgattagcgacgcaatgtacatttttggtggaaccgtcgataacaatatccgaagcggggaaatgtaccggtttcagttcagttgctacccaaagtgtacgctccacgaagattacgggcgactttgggaatcgagacaattttgtgacgtggagttcgtcctcggcgaaaaggaggaatgtgtccagggtcatgtggccatcgtaaccgcacgcagcaggtggctgaggcggaaaattacacaggcacgagaacgcctcgcacagaagttggagcaagaggctgccccagtaccccgcgaggcaccaggagttgccgcaggaggagcacggcccccattactccacgtggccattcgggaggctgaggcacgtccttttgaagtgctgatgcaatttctctataccgataaaattaagtaccctaggaagggccacgtcgaggacgtgttgctgataatggacgtgtacaagctggccctgagctttcaactgtgtcgtctcgaacaactctgtcggcagtatatagaggcttccgttgacttgcagaacgtattggtggtatgcgagagcgctgcacgactccaactgtcccagctgaaggagcactgcctaaacttcgttgtgaaagagagccattttaaccaggtgatcatgatgaaagagttcgagaggctgtccagtcctctcattgtggaaattgtgcgcagaaagcagcagccccccccccgcacccccctagatcagccggtggatatagggacatcattaatccaggatatgaaagcctaccttgaaggagccggagccgaattttgtgacattaccctgctgcttgatgggcacccaagacctgcccacaaagctattcttgcggcgcgaagcagttatttcgaagcgatgtttcggagttttatgcccgaggacggacaggtcaacatttcgatcggagagatggtgccctcccgacaggccttcgaaagcatgctcagatatatctactatggagaagttaatatgccacccgaagatagtctttatttatttgctgctccttattattacggattttataataacagactacaggcatattgtaaacagaatctggagatgaacgtcacagtgcaaaacgttctgcagattctggaagcggccgataagacacaggctctggatatgaaacggcactgcctccacattattgtccaccagttcacaaaggtcagcaagctgccaactttaaggtccctctctcaacaactgctcctggatatcatcgactcactggcatcacacattagcgataagcagtgcgccgaactgggggctgacatctag

SEQ ID NO: 167783 - DNA, 2523 bp, Artificial Sequence
  derived and/or modified sequence
atggcaggccctggttcaacaggcggtcagattggggctgccgcattggctggtggtgcccgatctaaggttgccccttccgtggatttcgaccactcctgctccgatagcgtcgagtatctgaccctcaattttggtccatttgaaactgtgcatcgatggcggaggctgccgccttgcgacgagtttgtgggtgctaggcgatctaagcatactgtcgtggcatataaggatgccatctatgtgtttggcggagataatggaaaaaccatgctgaatgatttgctccggtttgatgtaaaggactgttcctggtgccgcgcattcacaactggcactccgccagctccacgatatcaccatagtgcagttgtgtacggcagttctatgttcgtctttggtggatatacaggtgacatctactctaacagcaacctcaagaataagaacgatctgtttgagtacaagttcgccactggacaatggaccgaatggaagatcgagggaaggctgcctgtggcccgatcagcccatggagcaacagtgtattccgacaaactctggattttcgccggttatgatgggaatgcccgacttaatgatatgtggacgattggactccaggacagggagctcacctgctgggaagaggtcgcccaatccggagagattccacctagttgctgcaacttccctgtagcagtgtgccgagacaaaatgtttgtctttagcggccaatctggtgcaaaaatcaccaacaatctgtttcagtttgagttcaaagataaaacttggacccgtattcccacagagcatcttctgcgaggcagccctcctcctccacagagaagatacggccatactatggtagccttcgatcgccatctttacgtcttcggtggcgcagctgacaacaccttgcccaatgaactccattgctatgacgtggattttcagacttgggaagtggttcagccaagctccgactctgaagtgggcggagcagaagtgcctgaacgcgcttgtgccagcgaagaggtgccaactttgacatatgaggagcgcgtgggcttcaagaaatcgcgagatgtgttcggactcgattttgggactacctctgccaaacaacctactcagcctgcctccgaattgcctagcggcaggctatttcacgccgctgccgtgatctcagacgccatgtatatatttggtgggaccgtcgacaacaatatcagatctggcgagatgtataggttccaattctcctgctacccgaagtgcactcttcacgaagattatggcagactttgggaaagccgccagttctgtgacgtggagtttgtcctgggggagaaggaggaatgcgtgcaaggacacgtagcaatcgtcacagccaggagtagatggctgagacgaaagattacacaagccagggagaggctggcgcagaagttagaacaggaagcggcaccggtgcccagagaggccccaggtgtggctgcaggaggcgctcgccctcccttgctccatgtcgcaatcagagaggctgaggctcggcctttcgaggtgttgatgcagttcctgtacaccgataaaattaagtacccgcgtaaggggcatgtggaagacgtcttactgattatggacgtttacaagctcgctctctcatttcagctctgtaggctcgagcaactctgtagacagtacatcgaggcctccgtcgacctgcaaaacgtgctggtcgtctgtgagagtgcggctcgtctccaactgtcccaacttaaggagcactgcctgaacttcgtggtgaaggagtcccatttcaatcaggtgattatgatgaaagagtttgaacgactgtcttctccgctaatcgtggaaatcgtgcggagaaagcagcagcctcctccaagaactcccctggaccagcccgtggacatcggcactagtctgattcaggatatgaaagcgtacctggagggcgcaggggcagagttttgcgacatcacactcctcctagatggccacccacggcctgctcacaaagccatcctagccgctcgctcctcctatttcgaggcgatgtttcgcagtttcatgccagaagacgggcaggtcaacatcagcattggtgagatggtgccctctaggcaggcattcgagtccatgttacgctatatatactatggcgaggtgaatatgcctcccgaagatagtttatatctgtttgccgctccctattactacggattttataacaaccggctgcaggcatactgcaagcagaacttagagatgaacgtgaccgtgcagaatgtgctgcagatcctcgaggcagccgataaaacacaggcactggacatgaaaaggcactgtctccatattatcgtgcaccagtttactaaggtgagtaagctgcctaccctcagatccctaagtcagcaactgttgctcgacatcattgacagcttagccagccacatatccgacaagcagtgcgcggaactcggagccgacatctag

SEQ ID NO: 167784 - DNA, 2523 bp, Artificial Sequence
  derived and/or modified sequence
atggccggccccggcagcaccggcggccagatcggcgccgccgccctggccggcggcgccagaagcaaggtggcccccagcgtggacttcgaccacagctgcagcgacagcgtggagtacctgaccctgaacttcggccccttcgagaccgtgcacagatggagaagactgcccccctgcgacgagttcgtgggcgccagaagaagcaagcacaccgtggtggcctacaaggacgccatctacgtgttcggcggcgacaacggcaagaccatgctgaacgacctgctgagattcgacgtgaaggactgcagctggtgcagagccttcaccaccggcaccccccccgcccccagataccaccacagcgccgtggtgtacggcagcagcatgttcgtgttcggcggctacaccggcgacatctacagcaacagcaacctgaagaacaagaacgacctgttcgagtacaagttcgccaccggccagtggaccgagtggaagatcgagggcagactgcccgtggccagaagcgcccacggcgccaccgtgtacagcgacaagctgtggatcttcgccggctacgacggcaacgccagactgaacgacatgtggaccatcggcctgcaggacagagagctgacctgctgggaggaggtggcccagagcggcgagatcccccccagctgctgcaacttccccgtggccgtgtgcagagacaagatgttcgtgttcagcggccagagcggcgccaagatcaccaacaacctgttccagttcgagttcaaggacaagacctggaccagaatccccaccgagcacctgctgagaggcagccccccccccccccagagaagatacggccacaccatggtggccttcgacagacacctgtacgtgttcggcggcgccgccgacaacaccctgcccaacgagctgcactgctacgacgtggacttccagacctgggaggtggtgcagcccagcagcgacagcgaggtgggcggcgccgaggtgcccgagagagcctgcgccagcgaggaggtgcccaccctgacctacgaggagagagtgggcttcaagaagagcagagacgtgttcggcctggacttcggcaccaccagcgccaagcagcccacccagcccgccagcgagctgcccagcggcagactgttccacgccgccgccgtgatcagcgacgccatgtacatcttcggcggcaccgtggacaacaacatcagaagcggcgagatgtacagattccagttcagctgctaccccaagtgcaccctgcacgaggactacggcagactgtgggagagcagacagttctgcgacgtggagttcgtgctgggcgagaaggaggagtgcgtgcagggccacgtggccatcgtgaccgccagaagcagatggctgagaagaaagatcacccaggccagagagagactggcccagaagctggagcaggaggccgcccccgtgcccagagaggcccccggcgtggccgccggcggcgccagaccccccctgctgcacgtggccatcagagaggccgaggccagacccttcgaggtgctgatgcagttcctgtacaccgacaagatcaagtaccccagaaagggccacgtggaggacgtgctgctgatcatggacgtgtacaagctggccctgagcttccagctgtgcagactggagcagctgtgcagacagtacatcgaggccagcgtggacctgcagaacgtgctggtggtgtgcgagagcgccgccagactgcagctgagccagctgaaggagcactgcctgaacttcgtggtgaaggagagccacttcaaccaggtgatcatgatgaaggagttcgagagactgagcagccccctgatcgtggagatcgtgagaagaaagcagcagcccccccccagaacccccctggaccagcccgtggacatcggcaccagcctgatccaggacatgaaggcctacctggagggcgccggcgccgagttctgcgacatcaccctgctgctggacggccaccccagacccgcccacaaggccatcctggccgccagaagcagctacttcgaggccatgttcagaagcttcatgcccgaggacggccaggtgaacatcagcatcggcgagatggtgcccagcagacaggccttcgagagcatgctgagatacatctactacggcgaggtgaacatgccccccgaggacagcctgtacctgttcgccgccccctactactacggcttctacaacaacagactgcaggcctactgcaagcagaacctggagatgaacgtgaccgtgcagaacgtgctgcagatcctggaggccgccgacaagacccaggccctggacatgaagagacactgcctgcacatcatcgtgcaccagttcaccaaggtgagcaagctgcccaccctgagaagcctgagccagcagctgctgctggacatcatcgacagcctggccagccacatcagcgacaagcagtgcgccgagctgggcgccgacatctag

SEQ ID NO: 167785 - DNA, 2466 bp, Artificial Sequence
  derived and/or modified sequence
atggctgggccagggtcaaccgggggccagatcggcgctgcggccctggccggcggtgctcggagcaaggtcgccccatctgttgattttgatcatagttgcagcgattcagttgaatatttgacactcaactttgggcccttcgagactgtccaccggtggagaaggttaccaccatgtgacgagtttgtaggcgccagaaggtccaagcacacggtggtcgcttacaaggacgccatttacgtcttcggaggggataatggagcttttacaactggaacgccacccgctccacggtatcatcacagcgctgtggtgtacggtagctctatgttcgtttttggcgggtatacaggtgacatttattcaaattcgaatttgaaaaataagaacgacttgttcgaatataagtttgctactggccaatggacagagtggaaaatcgagggacgcctacccgtcgcaagaagtgcgcacggagccactgtgtatagcgataaactgtggatttttgcaggatatgacggcaacgcccggctgaatgatatgtggactatcggattacaagatagggagttgacttgttgggaggaggtggctcagtctggcgagataccgccctcttgctgtaactttcctgtggctgtatgtcgggacaagatgttcgtgttctccggccagtctggcgcaaagatcactaataacctgttccagttcgagttcaaagataaaacatggacgagaatcccaacagagcatctgcttcggggcagtcccccacccccccagcggcgatacggacacaccatggtggcatttgatcggcacttatatgtcttcgggggggcggctgacaacacactcccaaatgagctgcactgctacgatgttgacttccagacgtgggaggttgtgcagccgagtagcgacagcgaagtcgggggggcagaggttcccgagagagcttgcgctagcgaggaggtgcctacacttacctacgaggaaagagtcggcttcaagaagagtagggatgtgtttggacttgactttggtactacaagtgctaagcagccaacacagcccgcctctgagcttcccagcggaagactgtttcatgccgccgccgtgatttcggacgcgatgtacattttcggaggcaccgtggataacaacatcaggtctggcgagatgtaccggtttcagttctcctgttaccctaagtgtactctccatgaggattacggccgtctgtgggagtccagacaattttgtgacgtcgagtttgtgttgggggagaaggaggagtgtgtccagggacacgtagctatcgtgacagctcgcagcagatggttgcgacgtaagatcacgcaggcacgtgaacggctggcccaaaagctcgagcaggaagcggcccccgtacctcgagaggcccccggcgttgccgccggcggtgcccggccgcccttgctgcacgtggcgatcagagaggccgaagcccgcccgttcgaggtgcttatgcagttcctctatactgacaagatcaaatacccccgcaaagggcatgtcgaggacgtgctgcttataatggatgtctataagctggctctcagcttccagctatgcagactggagcagttgtgccgccagtacattgaggctagcgtggacctacagaacgtgctcgtggtttgcgagtctgccgcccgactgcagctaagccagctcaaggagcattgtctgaacttcgttgtcaaggagagtcactttaatcaagtgatcatgatgaaagagttcgagagactatcttcaccactaattgtggagatagtccgcagaaagcaacaacccccaccacgcacccctcttgaccagccagtcgacattggaacaagcttaatccaggacatgaaggcctacctcgagggagctggggcggaattctgtgacatcactcttctgctggacggacaccctcggcccgcacacaaggcgatcctggctgctagaagttcctacttcgaggcaatgtttagaagctttatgccagaagacgggcaggtgaacattagcattggggaaatggtgccatcccgccaggctttcgagtcaatgctgcgctacatttactacggtgaagtgaatatgcccccagaagatagcctatacctcttcgcggctccatactactatggattttataataaccgcttgcaggcctattgtaaacagaatctagagatgaatgtgacggtccagaatgtcctgcagattctggaggctgcagataagactcaagccctcgatatgaaacgacactgcctccacattatagtgcaccagtttaccaaagtgagcaagctgcctaccctgaggtcactgagccagcagctgcttctggacattattgatagcctggcctctcacatttctgataaacagtgtgcagaattgggagccgacatctag

SEQ ID NO: 167786 - DNA, 2400 bp, Artificial Sequence
  derived and/or modified sequence
atgaattacgatcctattgtctctaaagtggctgaagtgttagcttccggaagggctatcaggaagcgtgaggttgaacgctcaaagcataccgtcgtcgcctacaaagacgcaatttatgtgtttgggggagataacggcaaaactatgctcaacgacttgctgagattcgacgtgaaggactgcagttggtgccgtgcatttaccacagggactccacctgccccccgataccaccatagtgccgtggtttacggctcctccatgtttgtgttcggtggatatacaggggatatttattccaactccaatctcaagaacaaaaacgacctgtttgaatataagtttgctaccggccagtggacagagtggaaaatagagggtaggctgccagtggctcgatctgctcacggagctactgtgtacagtgataaactgtggatttttgcagggtatgatgggaatgcaagacttaatgacatgtggacaatcggcctgcaggatcgggagctgacttgctgggaggaagtcgcccaatccggagaaattcctcctagctgctgtaattttcccgtggccgtgtgtagggacaaaatgttcgtcttctctgggcaaagtggagcaaaaattaccaacaacctctttcaatttgagtttaaggataagacttggactcgtataccgaccgaacaccttctgcgcggcagtccaccacccccacaacgccgatatggacatacgatggtcgccttcgatcggcacctgtatgtgtttggaggtgcagcagacaataccctgccaaacgaactgcattgttatgacgtcgatttccagacatgggaggttgtccaaccctcctccgatagtgaggttgggggggctgaggtcccagaacgcgcttgtgccagcgaggaagtccccacattgacttacgaagagcgggtgggattcaagaagtctcgcgacgtgtttggcttagacttcggcaccacttctgcaaagcaacccacccagcctgcaagtgagcttcctagcgggcgactattccacgcggccgccgttatatctgacgccatgtatattttcggaggcacagtggataacaacatacggtctggggaaatgtaccggtttcagtttagttgttaccccaagtgcaccctacatgaggactacgggaggctgtgggagagtcgccagttctgcgacgtggaattcgtgctgggggagaaggaagaatgcgtgcagggccatgttgctattgtgactgccagaagtcgctggctacggagaaagatcacacaggccagagagagactcgcacagaaactggagcaggaagctgcaccggttccgagagaagctccaggcgttgctgcaggaggagccaggcctccacttctgcatgtggccatcagagaagctgaggcacgacccttcgaagtgttgatgcagttcctgtatactgacaagattaagtatcctaggaagggccacgtggaggacgtgcttttgattatggatgtatacaagctggccttgagtttccaactgtgtcggctggaacagctatgcaggcagtatatagaggcctccgttgatctacagaacgttctagtggtgtgcgaatctgccgcccggttgcaattgtcacagctcaaggaacattgtctcaatttcgtcgtgaaagagagccattttaatcaggtcataatgatgaaggaatttgagaggctctcgagcccactgatcgtagagatcgttaggcggaaacagcaaccaccgccgcgtacaccactggaccagcctgtagacattggcacttcgctgatacaggatatgaaggcatacctggaaggagccggggcagaattttgcgatataaccctgcttctggatggacacccgagaccagctcataaggccattctagccgcaagatcaagttattttgaggccatgtttcgaagcttcatgcccgaagatggccaggtaaacatctccatcggagaaatggtgccttcccgacaagcctttgaatccatgctgaggtatatctactatggagaggtgaacatgccacctgaagactcactatatctgtttgccgcgccctactactatggattctacaataaccgtttacaggcctattgtaagcagaatctggaaatgaacgttactgttcagaacgtattgcaaattctcgaggccgccgataagacccaggcccttgatatgaagcgacactgcttgcatattatcgtccaccagttcaccaaggtgtccaagttgccaacactccgttccctgtcgcagcaactgttgttggacataatcgactcactcgcttctcatattagcgacaaacaatgcgccgagctaggggccgatatttag

SEQ ID NO: 167787 - DNA, 2466 bp, Artificial Sequence
  derived and/or modified sequence
atggccggccctggcagcactggaggccagattggagctgctgccctggccggcggggcccggagcaaggtggcccccagcgtggactttgaccacagctgcagcgacagcgtggagtacctgaccctgaactttggcccctttgagaccgtgcaccgctggaggcggctgcccccctgtgatgaatttgtgggcgcccggcgcagcaagcacacagtggtggcctacaaggatgccatctacgtgtttggaggagacaatggagccttcaccaccggcaccccaccagccccccgctaccaccacagcgctgtggtgtatggcagctccatgtttgtgtttggaggctacaccggggacatctacagcaacagcaacctgaagaacaagaatgacctgtttgagtacaagtttgccaccggccagtggacagagtggaagattgagggccgcctgcctgtggcccggagcgcccatggagccaccgtgtacagcgacaagctgtggatctttgctggctatgatggaaatgcccggctgaatgacatgtggaccatcggcctgcaggaccgggagctgacctgctgggaggaggtggcccagagcggggagatcccccccagctgctgcaacttccctgtggccgtgtgccgggacaagatgtttgtgttttctggccagagcggggccaagatcaccaacaacctcttccagtttgagttcaaggacaagacctggacccgcatccccacagagcacctgctgcggggcagccccccaccaccccagaggagatatggccacaccatggtggcctttgacagacacctgtatgtgtttggaggagctgctgacaacaccctgcccaatgagctgcactgctatgatgtggacttccagacctgggaggtggtgcagcccagcagtgacagcgaggtgggcggcgctgaggtgcctgagcgggcctgtgccagcgaggaggtgcccaccctgacctatgaggagcgggtgggcttcaagaagagcagagatgtgtttggcctggactttggcaccaccagcgccaagcagcccacccagcctgccagcgagctgcccagcggccgcctcttccacgccgctgctgtgatcagtgatgccatgtacatctttggaggcaccgtggacaacaacatccgcagcggggagatgtaccgcttccagttcagctgctaccccaagtgcaccctgcacgaggactatggccgcctgtgggagagccggcagttctgtgatgtggagtttgtgctgggggagaaggaggagtgtgtgcagggccacgtggccatcgtgacagcccggagccgctggctgcggaggaagatcacccaggcccgggagcggctggcccagaagctggagcaggaggccgcccctgtgccccgggaggcccctggggtggccgccggcggggcccggccccccctgctgcacgtggccatccgggaggccgaggcccggccctttgaggtgctgatgcagttcctgtacacagacaagatcaagtaccccaggaaaggacatgtggaggatgtgctgctgatcatggatgtgtacaagctggccctgtccttccagctgtgccgcctggagcagctgtgccggcagtacatcgaggcctctgtggacctgcagaatgtgctggtggtgtgtgagagcgctgcccggctgcagctgagccagctgaaggagcactgcctgaactttgtggtgaaggagagccacttcaaccaggtgatcatgatgaaggagtttgagcggctgagcagccccctcatcgtggagatcgtgcggaggaagcagcagcccccacccaggacccccctggaccagcctgtggacatcggcaccagcctcatccaggacatgaaggcctacctggagggcgctggagctgagttctgtgacatcaccctgctgctggatggccaccccaggcctgcccacaaggccatcctggccgcccggagcagctactttgaggccatgttccgctccttcatgccagaagatggccaggtgaacatcagcattggagagatggtgcccagccggcaggcctttgagagcatgctgcgctacatctactacggggaggtgaacatgcctcctgaggacagcctgtacctgtttgctgccccctactactacggcttctacaacaaccggctgcaggcctactgcaagcagaacctggagatgaatgtgacagtgcagaatgtgctgcagatcctggaggccgctgacaagacccaggccctggacatgaagaggcactgcctgcacatcatcgtgcaccagttcaccaaggtgtccaagctgcccaccctgcggagcctgagccagcagctgctgctggacatcatcgacagcctggccagccacatcagtgacaagcagtgtgccgagctgggcgctgacatctag

SEQ ID NO: 167788 - DNA, 2400 bp, Artificial Sequence
  derived and/or modified sequence
atgaactatgaccccatcgtgtccaaggtggccgaggtgctggccagcggccgggccatcaggaagcgggaggtggagaggagcaagcacacagtggtggcctacaaggatgccatctacgtgtttggaggagacaacgggaagaccatgctgaatgacctgctgcgctttgatgtgaaggactgctcctggtgccgggccttcaccaccggcaccccaccagccccccgctaccaccacagcgctgtggtgtatggcagctccatgtttgtgtttggaggctacaccggggacatctacagcaacagcaacctgaagaacaagaatgacctgtttgagtacaagtttgccaccggccagtggacagagtggaagattgagggccgcctgcctgtggcccggagcgcccatggagccaccgtgtacagcgacaagctgtggatctttgctggctatgatggaaatgcccggctgaatgacatgtggaccatcggcctgcaggaccgggagctgacctgctgggaggaggtggcccagagcggggagatcccccccagctgctgcaacttccctgtggccgtgtgccgggacaagatgtttgtgttttctggccagagcggggccaagatcaccaacaacctcttccagtttgagttcaaggacaagacctggacccgcatccccacagagcacctgctgcggggcagccccccaccaccccagaggagatatggccacaccatggtggcctttgacagacacctgtatgtgtttggaggagctgctgacaacaccctgcccaatgagctgcactgctatgatgtggacttccagacctgggaggtggtgcagcccagcagtgacagcgaggtgggcggcgctgaggtgcctgagcgggcctgtgccagcgaggaggtgcccaccctgacctatgaggagcgggtgggcttcaagaagagcagagatgtgtttggcctggactttggcaccaccagcgccaagcagcccacccagcctgccagcgagctgcccagcggccgcctcttccacgccgctgctgtgatcagtgatgccatgtacatctttggaggcaccgtggacaacaacatccgcagcggggagatgtaccgcttccagttcagctgctaccccaagtgcaccctgcacgaggactatggccgcctgtgggagagccggcagttctgtgatgtggagtttgtgctgggggagaaggaggagtgtgtgcagggccacgtggccatcgtgacagcccggagccgctggctgcggaggaagatcacccaggcccgggagcggctggcccagaagctggagcaggaggccgcccctgtgccccgggaggcccctggggtggccgccggcggggcccggccccccctgctgcacgtggccatccgggaggccgaggcccggccctttgaggtgctgatgcagttcctgtacacagacaagatcaagtaccccaggaaaggacatgtggaggatgtgctgctgatcatggatgtgtacaagctggccctgtccttccagctgtgccgcctggagcagctgtgccggcagtacatcgaggcctctgtggacctgcagaatgtgctggtggtgtgtgagagcgctgcccggctgcagctgagccagctgaaggagcactgcctgaactttgtggtgaaggagagccacttcaaccaggtgatcatgatgaaggagtttgagcggctgagcagccccctcatcgtggagatcgtgcggaggaagcagcagcccccacccaggacccccctggaccagcctgtggacatcggcaccagcctcatccaggacatgaaggcctacctggagggcgctggagctgagttctgtgacatcaccctgctgctggatggccaccccaggcctgcccacaaggccatcctggccgcccggagcagctactttgaggccatgttccgctccttcatgccagaagatggccaggtgaacatcagcattggagagatggtgcccagccggcaggcctttgagagcatgctgcgctacatctactacggggaggtgaacatgcctcctgaggacagcctgtacctgtttgctgccccctactactacggcttctacaacaaccggctgcaggcctactgcaagcagaacctggagatgaatgtgacagtgcagaatgtgctgcagatcctggaggccgctgacaagacccaggccctggacatgaagaggcactgcctgcacatcatcgtgcaccagttcaccaaggtgtccaagctgcccaccctgcggagcctgagccagcagctgctgctggacatcatcgacagcctggccagccacatcagtgacaagcagtgtgccgagctgggcgctgacatctag

SEQ ID NO: 167789 - DNA, 4572 bp, Artificial Sequence
  derived and/or modified sequence
ggccgcgggtcttcgggctgcgtgggcctgggaggcgccgggaagagcagtcgcgacggggctagggacgacacactgcattcactggaagggacaacgcagcgccagtacatagcctgaaacgctccccagaaggtcccacgctcgccgcgcggtcgacaaccgcatcctgcgctcgcccgcggtgtctcggcaagcggtaggcttgtcgggaagagctggagggcgcaagtgcggcgctggccggacgtgccgcaccgtcagcgcagggctcgccgggaaatgtggtttctccagccggcccggggcggtggccgcaagttgggcttacagcgcggccgatccggcgtggacccgggatggctggaccgggcagcacgggggggcagatcggggctgcggccctggcaggcggcgcgcggtccaaggtagccccgagcgtggacttcgaccatagctgctcggacagtgtcgagtacctgacgctcaacttcgggcccttcgaaacagtgcatcgctggcggcgcctcccgccctgcgacgagttcgtgggtgcccggcgcagcaagcacacagtggtggcctataaagatgccatttatgtatttggtggagacaatgggaagaccatgctcaatgacctcctgcggttcgatgtgaaagactgctcctggtgcagggcctttaccactgggaccccaccggccccccgttaccaccactcggccgtcgtctatgggagcagcatgtttgtctttgggggttacactggggacatttattccaattctaacttgaagaataaaaacgacctctttgaatacaagtttgcaactggccagtggacggagtggaaaattgaaggacggttgccagtcgctaggtcagcccatggggccacggtgtacagtgacaagctgtggatctttgctggctatgacggcaacgccaggttgaatgacatgtggacaattggcctccaggaccgagagctcacctgctgggaggaggtggcccagagtggcgagatccccccatcttgctgcaacttccccgtggctgtgtgccgggacaagatgtttgtattctctgggcaaagcggagccaaaataaccaacaacctcttccagtttgaattcaaggacaagacgtggacacgcatcccaactgaacacctgctccggggctccccaccacccccgcagcggcgctacgggcataccatggtggcctttgaccgccacctctatgtgtttgggggtgcggccgacaacacgctgcccaacgagctgcactgctatgacgtggacttccagacctgggaggtcgtccagcccagctccgacagcgaggttggtggggctgaagtgcccgagcgagcctgtgcttccgaggaggtgcccaccctgacctatgaggagcgggttggcttcaagaagtcccgagatgtgtttggcctggactttggcaccacctcagccaagcagcccacccagcctgcctcggagctgcccagtgggaggctcttccacgcggctgctgtcatctcggacgccatgtacatcttcgggggcacggtggacaacaacatccgcagcggggagatgtacaggttccagttctcctgttaccctaaatgcacgctgcacgaggactacgggcggctgtgggagagccgccagttctgcgacgtggagttcgtgctgggtgagaaggaggagtgcgtgcagggccacgtagccattgtcacagcgcggagccgctggcttcgcaggaagatcacgcaggcgcgggagaggctggcccagaagctggagcaggaggccgccccagttcccagggaggcccccggcgtggctgctggtggggcccggccgcccctgctgcacgtggccatccgggaggccgaggcccggcccttcgaggtgctcatgcagttcctctacaccgacaagatcaaatacccacggaaaggccatgtggaggatgtgctgctcatcatggatgtgtacaaactggcactgagcttccagttgtgccgcctggagcagctgtgccgccagtacatcgaggcctccgtggacctgcagaacgtgctggttgtgtgcgagagtgccgcccggctgcagctgagccaactcaaggagcactgcctgaacttcgtggtaaaggagtcccacttcaaccaggtgatcatgatgaaggagttcgagcgcctctcctctccactgatagtggagattgtgcggcggaagcagcagccgccccctcgcactcccttggaccagccagtggacattggcacatctctgatccaggacatgaaggcatacctggagggagcgggcgcggaattctgtgacatcactctgttgcttgacgggcacccacggccagcccacaaggctatcctggccgcccgctccagctactttgaagccatgttccggtccttcatgcccgaagatgggcaggtgaacatctccatcggggagatggtgcccagcaggcaggccttcgagtccatgctgcgctacatctactacggcgaggtcaacatgccgcccgaggactcgctctacttgtttgcggccccctactactacggcttctacaacaaccggctgcaggcgtactgcaagcagaacctggagatgaacgtgacggtgcagaacgtgctgcagatcctggaggcagctgacaaaacgcaggcactggacatgaagcggcactgcctgcacatcattgtgcaccagttcaccaaggtctccaagttgcccaccctgcggtcgctgagccagcagctgctgctggacatcatagactccctggcctcccacatctcagacaagcagtgcgcagagctgggcgccgacatctgaggccctgtggcgcctgcccattgtgaagaatcgccgtgcctgcctgccctgcctactgagaagactaccggctatgcgcatgcctatggcagtgggtgcacctgccaggccaagggtcagggtgcccagagcctccaaagagagctgaggggatgtggggccccaaactcattaattcactgaagacacaggtcccacagggagcggatgatgaagcagaccccctcctgtcatcaccctctcctggtgtagtgtggatgcgaggccacggctcagtgatgggctcaccacccagaagtggggagagactttgggcctcccacccagtggggcttggcctggcttctgtggcctgggcgtgttgtggactcaggcactggggcctgtcaccaaggctcctccaacatgcgggaggaggcttagcagacttgcgctgcaccagcgaatctgcctgggctgctcctgtcccacccaccctcactgagatccatgtaaggggctcctcttcccacctggaacttgtgagtggggacccatgatgtatgggtctcacctgacttgaggtgaattttggagtgaagggccctgaggtcagctcccaggtcggtcgtgctgggccaggcctggttttcacaggggctgaaggatcccagtccacctgtgtgcatgtcagggctcggccgggaagaagccagcaaagtcccccgtgtcccttgctgagtattctgtcacagacaagcctccattaaagccacagcagtgctacccaccacacacaccttgctggcccggccaccactgctggcttcagccccttgagcagcccatggcttagcagacccccagatgtaggtcagtggccttacctgtctctatccatgctgtcaactcctgcctccacctggggtcacccagtcacattgggaagggctgtgaaggcctccaggctggccccttccaggggaatcctggaggcctggggtgggctcctgccccttctgccctgccttgcccctgcactatgctcttggctcctgtggaaggagggctgccctcttgccctagtgagggccccatgtggatccactctagtgctgggagccagcgctcccttactgggaacaggattccaggacccctttcttgttgtggctgccatgaagccacagctccttggggaagtgacctgctctcctttgggtgtatgcaggtgtgtggggggccctgagtggcaagttgcttagctaacaggagatccataggcagcctgcaggctaggaagtggcctagtgcaagatgagctgggaacaagggaggagagagcaggagctggggcagaggctgagccgggaggcccttgaggtgaggacacagcaggcccaggaccatggctggggaggatatgtcagcacctggaagtggagtgcaggctgcagcgcccagccatgtgggccaggtgcattcactcagagtggggccacacacccatctacccagtttccacaagatgtggctcctgccacacccacagggcagcctcctccaaatccctcctggaggggcctacccagaagcctccttgaaccagtctgcaaccctgctctatgctgacccttgtcactgaaccctgatctagacttatatgaataaatgaaattacatgccaagggccctaaaaagcaaattttac

SEQ ID NO: 167790 - DNA, 2625 bp, Artificial Sequence
  derived and/or modified sequence
aagttgggcttacagcgcggccgatccggcgtggacccgggatggctggaccgggcagcacgggggggcagatcggggctgcggccctggcaggcggcgcgcggtccaaggtagccccgagcgtggacttcgaccatagctgctcggacagtgtcgagtacctgacgctcaacttcgggcccttcgaaacagtgcatcgctggcggcgcctcccgccctgcgacgagttcgtgggtgcccggcgcagcaagcacacagtggtggcctataaagatgccatttatgtatttggtggagacaatggggcctttaccactgggaccccaccggccccccgttaccaccactcggccgtcgtctatgggagcagcatgtttgtctttgggggttacactggggacatttattccaattctaacttgaagaataaaaacgacctctttgaatacaagtttgcaactggccagtggacggagtggaaaattgaaggacggttgccagtcgctaggtcagcccatggggccacggtgtacagtgacaagctgtggatctttgctggctatgacggcaacgccaggttgaatgacatgtggacaattggcctccaggaccgagagctcacctgctgggaggaggtggcccagagtggcgagatccccccatcttgctgcaacttccccgtggctgtgtgccgggacaagatgtttgtattctctgggcaaagcggagccaaaataaccaacaacctcttccagtttgaattcaaggacaagacgtggacacgcatcccaactgaacacctgctccggggctccccaccacccccgcagcggcgctacgggcataccatggtggcctttgaccgccacctctatgtgtttgggggtgcggccgacaacacgctgcccaacgagctgcactgctatgacgtggacttccagacctgggaggtcgtccagcccagctccgacagcgaggttggtggggctgaagtgcccgagcgagcctgtgcttccgaggaggtgcccaccctgacctatgaggagcgggttggcttcaagaagtcccgagatgtgtttggcctggactttggcaccacctcagccaagcagcccacccagcctgcctcggagctgcccagtgggaggctcttccacgcggctgctgtcatctcggacgccatgtacatcttcgggggcacggtggacaacaacatccgcagcggggagatgtacaggttccagttctcctgttaccctaaatgcacgctgcacgaggactacgggcggctgtgggagagccgccagttctgcgacgtggagttcgtgctgggtgagaaggaggagtgcgtgcagggccacgtagccattgtcacagcgcggagccgctggcttcgcaggaagatcacgcaggcgcgggagaggctggcccagaagctggagcaggaggccgccccagttcccagggaggcccccggcgtggctgctggtggggcccggccgcccctgctgcacgtggccatccgggaggccgaggcccggcccttcgaggtgctcatgcagttcctctacaccgacaagatcaaatacccacggaaaggccatgtggaggatgtgctgctcatcatggatgtgtacaaactggcactgagcttccagttgtgccgcctggagcagctgtgccgccagtacatcgaggcctccgtggacctgcagaacgtgctggttgtgtgcgagagtgccgcccggctgcagctgagccaactcaaggagcactgcctgaacttcgtggtaaaggagtcccacttcaaccaggtgatcatgatgaaggagttcgagcgcctctcctctccactgatagtggagattgtgcggcggaagcagcagccgccccctcgcactcccttggaccagccagtggacattggcacatctctgatccaggacatgaaggcatacctggagggagcgggcgcggaattctgtgacatcactctgttgcttgacgggcacccacggccagcccacaaggctatcctggccgcccgctccagctactttgaagccatgttccggtccttcatgcccgaagatgggcaggtgaacatctccatcggggagatggtgcccagcaggcaggccttcgagtccatgctgcgctacatctactacggcgaggtcaacatgccgcccgaggactcgctctacttgtttgcggccccctactactacggcttctacaacaaccggctgcaggcgtactgcaagcagaacctggagatgaacgtgacggtgcagaacgtgctgcagatcctggaggcagctgacaaaacgcaggcactggacatgaagcggcactgcctgcacatcattgtgcaccagttcaccaaggtctccaagttgcccaccctgcggtcgctgagccagcagctgctgctggacatcatagactccctggcctcccacatctcagacaagcagtgcgcagagctgggcgccgacatctgaggccctgtggcgcctgcccattgtgaagaatcgccgtgcctgcctgccctgcctactgagaagactaccggctatgcgcatgcctatggcagtgggtgcacctgccaggccaagggtc

SEQ ID NO: 167791 - DNA, 4223 bp, Artificial Sequence
  derived and/or modified sequence
caggtcctagagcagctccagcaggatggcggctccagcgtctctaaggcctgcagggggtccagccccatggggggcgccctaggcctccgacagctccccatctgtgctcctgcctgccggccatcctcaggccactcgccatgggcggctgcttctccaaacccaaaccagtggagctcaagatcgaggtggtgctgcctgagaaggagcgaggcaaggaggagctgtcggccagtgggaagggcagcccccgggcctaccagggcaatggcacggcccgccacttccacacggaggagcgcctgtccacccctcacccctaccccagccctcaggattgcgtggaggctgctgtctgccacgtcaaggacctcgagaatggccagatgcgggaagtggagctgggctgggggaaggtgttgctggtgaaggacaatggggagttccacgccctgggccataagtgtccgcactacggcgcacccctggtgaaaggcgttctgtcccgtggtcgggtgcgctgcccctggcacggcgcctgcttcaacatcagcactggggacctggaggacttccctggcctggacagtctacacaagttccaggtgaagattgagaaggagaaggtgtacgtccgggccagcaagcaggccctacagctgcagcgaaggaccaaggtgatggccaagtgtatctctccaagtgctgggtacagcagtagcaccaatgtgctcattgtgggtgcaggtgcagctggcctggtgtgtgcagagacactgcggcaggagggcttctccgaccggatcgtcctgtgcacgctagaccggcaccttccctacgaccgtcccaagctcagcaagtccctggacacacagcctgagcagctggccctgaggcccaaggagtttttccgagcctatggcatcgaggtgctcaccgaggctcaggtggtcacagtggacgtgagaactaagaaggtcgtgttcaaggatggcttcaagctggagtacagcaagctgctgctggcaccagggagcagccccaagactctgagctgcaaaggcaaagaagtggagaacgtgttcactatccggacgccagaggatgccaatcgcgtggtgaggctggcccgaggccgcaacgtggtcgtcgtgggagccggcttcctggggatggaggtggccgcttacctgacggagaaggcccactctgtgtctgtggtggagctggaggagacgcccttcaggaggttcctgggggagcgcgtgggtcgagccctcatgaagatgtttgagaacaaccgggtgaagttctacatgcagacggaggtgtctgagctgcggggccaggagggaaagctgaaggaggttgtgctgaagagcagcaaggtcgtgcgggctgacgtctgcgtggtgggcattggtgcagtgcccgccacaggcttcctgaggcaaagcggcatcggtttggattcccgaggcttcatccctgtcaacaagatgatgcagaccaatgtcccaggcgtgtttgcagctggcgatgctgtcaccttcccccttgcctggaggaacaaccgcaaagtgaacattccacattggcagatggctcatgctcaggggcgcgtggcagcccagaacatgttggcgcaggaggcggagatgagcactgtgccctacctctggaccgccatgtttggcaagagcctgcgctacgcgggctacggagaaggcttcgacgacgtcatcatccagggggatctggaggagctgaagtttgtggctttttacactaaaggcgacgaggtgatcgccgtggccagcatgaactacgatcccattgtgtccaaggtcgctgaggtgctggcctcaggccgtgccatccggaagcgggaggtggagcgcagcaagcacacagtggtggcctataaagatgccatttatgtatttggtggagacaatgggaagaccatgctcaatgacctcctgcggttcgatgtgaaagactgctcctggtgcagggcctttaccactgggaccccaccggccccccgttaccaccactcggccgtcgtctatgggagcagcatgtttgtctttgggggttacactggggacatttattccaattctaacttgaagaataaaaacgacctctttgaatacaagtttgcaactggccagtggacggagtggaaaattgaaggacggttgccagtcgctaggtcagcccatggggccacggtgtacagtgacaagctgtggatctttgctggctatgacggcaacgccaggttgaatgacatgtggacaattggcctccaggaccgagagctcacctgctgggaggaggtggcccagagtggcgagatccccccatcttgctgcaacttccccgtggctgtgtgccgggacaagatgtttgtattctctgggcaaagcggagccaaaataaccaacaacctcttccagtttgaattcaaggacaagacgtggacacgcatcccaactgaacacctgctccggggctccccaccacccccgcagcggcgctacgggcataccatggtggcctttgaccgccacctctatgtgtttgggggtgcggccgacaacacgctgcccaacgagctgcactgctatgacgtggacttccagacctgggaggtcgtccagcccagctccgacagcgaggttggtggggctgaagtgcccgagcgagcctgtgcttccgaggaggtgcccaccctgacctatgaggagcgggttggcttcaagaagtcccgagatgtgtttggcctggactttggcaccacctcagccaagcagcccacccagcctgcctcggagctgcccagtgggaggctcttccacgcggctgctgtcatctcggacgccatgtacatcttcgggggcacggtggacaacaacatccgcagcggggagatgtacaggttccagttctcctgttaccctaaatgcacgctgcacgaggactacgggcggctgtgggagagccgccagttctgcgacgtggagttcgtgctgggtgagaaggaggagtgcgtgcagggccacgtagccattgtcacagcgcggagccgctggcttcgcaggaagatcacgcaggcgcgggagaggctggcccagaagctggagcaggaggccgccccagttcccagggaggcccccggcgtggctgctggtggggcccggccgcccctgctgcacgtggccatccgggaggccgaggcccggcccttcgaggtgctcatgcagttcctctacaccgacaagatcaaatacccacggaaaggccatgtggaggatgtgctgctcatcatggatgtgtacaaactggcactgagcttccagttgtgccgcctggagcagctgtgccgccagtacatcgaggcctccgtggacctgcagaacgtgctggttgtgtgcgagagtgccgcccggctgcagctgagccaactcaaggagcactgcctgaacttcgtggtaaaggagtcccacttcaaccaggtgatcatgatgaaggagttcgagcgcctctcctctccactgatagtggagattgtgcggcggaagcagcagccgccccctcgcactcccttggaccagccagtggacattggcacatctctgatccaggacatgaaggcatacctggagggagcgggcgcggaattctgtgacatcactctgttgcttgacgggcacccacggccagcccacaaggctatcctggccgcccgctccagctactttgaagccatgttccggtccttcatgcccgaagatgggcaggtgaacatctccatcggggagatggtgcccagcaggcaggccttcgagtccatgctgcgctacatctactacggcgaggtcaacatgccgcccgaggactcgctgtacttgtttgcggccccctactactacggcttctacaacaaccggctgcaggcgtactgcaagcagaacctggagatgaacgtgacggtgcagaacgtgctgcagatcctggaggcagctgacaaaacgcaggcactggacatgaagcggcactgcctgcacatcattgtgcaccagttcaccaaggtctccaagttgcccaccctgcggtcgctgagccagcagctgctgctggacatcatagactccctggcctcccacatctcagacaagcagtgcgcagagctgggcgccgacatctga

SEQ ID NO: 167792 - DNA, 2466 bp, Artificial Sequence
  derived and/or modified sequence
atggccggccccggcagcaccggcggccagatcggcgccgccgccttggccggcggagctcgttctaaggtcgctcccagcgtggattttgaccactcctgcagcgattccgtggaatatcttaccctcaacttcggccccttcgagacagttcataggtggaggcggctcccaccatgcgatgagtttgtcggtgcccggcgaagcaagcacacagtggttgcatataaggacgcgatctacgtattcggcggcgataacggcgctttcaccaccggcactcctccagcccccaggtaccatcacagtgctgtcgtgtacggtagttctatgttcgtgttcggaggatacacaggagatatttattcaaacagcaatctcaaaaacaaaaatgatttattcgagtacaagtttgccacaggtcagtggaccgagtggaagatagaggggcgtcttcccgtagcgaggtctgctcatggggccactgtttattccgacaagctgtggatttttgccggttacgacggtaatgcacgccttaatgacatgtggaccatcggattgcaagatagagagcttacttgctgggaagaggtggcccaatctggggaaatcccaccctcctgttgcaatttccccgtagccgtgtgtagagataaaatgtttgtattctctgggcagagcggcgctaagatcaccaataatctctttcagtttgaatttaaggacaagacctggactcggattccgactgagcacctcttaaggggaagcccaccccctccccagcggagatatggccacactatggtggctttcgatcgacacttgtatgtttttggtggcgctgcagacaacactcttccaaacgaactccactgttacgacgtagacttccagacctgggaagttgtccaaccaagttccgacagcgaagtgggtggagccgaggttcctgagcgggcttgcgccagtgaggaggttccgactctcacttacgaggagagagtaggatttaagaagtcccgtgacgtctttgggttggatttcggaaccacctccgcgaagcagccaacacagcctgcttcggaattgccgtcaggccggctgttccatgccgcggctgtgatatctgatgccatgtatatattcggcggcaccgtggataataacattcggagcggcgagatgtacaggtttcagttcagctgctacccgaaatgtaccctacacgaagattatgggcggctttgggaaagcagacaattttgtgacgtggagttcgtgctcggtgagaaggaggaatgcgtccaaggtcacgtcgccatcgtaaccgcccgtagcaggtggctgagaaggaagatcacccaggcccgcgaacgcctcgcgcagaagttggaacaagaggctgcacctgtcccgcgtgaagcaccaggggtggcagcgggcggggctcgcccacccctactccacgtggcaatcagagaggcagaggctcggcctttcgaggtgcttatgcagtttctgtatacagacaagatcaaatacccccgaaagggtcacgttgaggacgtgctacttataatggacgtctataagctggcattgtcctttcagctgtgccgactggagcagctctgcagacagtacatcgaggcgtctgtggacctgcagaatgtgctagtcgtatgtgaaagcgccgcacgcttacaactctcccagcttaaagagcactgcttaaacttcgttgtcaaggagtctcactttaaccaggtgataatgatgaaggagttcgaaaggttaagctcgccacttatcgtagaaatagtacgacggaagcaacagcctcctcctcgcactccgttagaccaaccagtggacataggaacatcccttattcaggatatgaaggcgtacctggagggcgcaggggcggaattctgtgacataacgctgctcctcgatggccacccccgccccgcccataaggcaattctcgccgcacggagttcttacttcgaggctatgttcaggagtttcatgccggaagacggacaggtgaacatctcaatcggcgagatggtgccaagccggcaggccttcgagtccatgctgcgctacatctattacggcgaggtaaacatgccccccgaagactcactgtacttgttcgcggccccctattactatgggttttacaacaacaggctgcaggcctactgtaaacagaacttggagatgaacgtaactgtacagaatgtgttgcagatactagaggctgcagacaagactcaggccctggacatgaagcgtcactgtcttcatattattgtgcatcaatttacaaaagtctcgaagctgccaaccctgcgttccctgtcacagcagcttctgcttgatattattgacagcttagcatctcatatttctgataaacagtgtgcagaattaggggctgacatctag

SEQ ID NO: 167793 - DNA, 2400 bp, Artificial Sequence
  derived and/or modified sequence
atgaactacgaccccatcgtgagcaaggtggccgaggtgctggcctcgggacgcgcaatccgcaagcgcgaggttgagagatccaaacacacggttgttgcttataaggatgccatatacgtgttcggcggagacaatggcaagacaatgctgaacgatctactacggtttgatgtcaaagactgctcttggtgccgcgcctttaccacaggcactcctcctgctccccgctatcaccactccgcagtggtatatggctcttccatgtttgtctttggcggttatacaggcgatatatatagcaatagcaaccttaaaaacaaaaacgacctgttcgaatataaatttgcgaccggtcagtggaccgaatggaagatcgagggcagacttcccgtagcacgctcagcccatggcgccacagtatattcagacaaactgtggatattcgcagggtacgatggaaacgctcggctgaatgacatgtggacgatcggccttcaggacagggaattgacctgttgggaggaggtggctcagagtggcgaaattcctccatcttgctgtaatttccccgttgccgtgtgtcgagacaagatgtttgtcttctcaggccagtcgggtgctaagatcactaataacttgttccaattcgagtttaaggacaaaacctggacgcgtatacctaccgagcacctgctacgtggatctcctccgcccccccaacggcgatatgggcatacaatggtggctttcgaccgccacctctacgtctttggaggggctgcggacaacaccttacccaatgaactacactgttacgatgtggatttccaaacttgggaggtcgtccagccaagttctgattcagaggttggaggcgccgaagtgcccgagagggcatgtgcgtcggaggaggtccctacactcacttatgaagagcgggtcggttttaagaagtctagggatgtttttggactcgatttcgggactacaagcgccaagcagccaactcagcctgcgtctgaactcccaagtgggaggctgtttcatgcggctgctgtgatcagtgatgcaatgtatattttcggaggtactgtagacaacaatatcagatctggagaaatgtatagattccagtttagctgttaccccaagtgtactttgcacgaggattatgggcgtctatgggagagcaggcaattctgcgacgtggaattcgtgcttggcgagaaagaagaatgcgtccaaggccacgttgctattgtaacagcccggagccgctggctccgacgaaagattacgcaggcgagagagagactagcgcagaaactggagcaagaggccgccccagtgcctagggaagccccaggggtggccgcggggggagcccggccccctctgctgcacgtggcaattagggaggctgaggccagaccttttgaagtactcatgcagtttttatatacagacaagatcaaatacccacgaaagggccacgtcgaggacgtcctattgatcatggacgtttacaagctcgccctaagctttcaactgtgccgactggagcagctctgcaggcagtatattgaggcatccgtagatttgcagaatgtgcttgtggtttgcgagtccgctgccaggctccagctcagtcagctaaaagagcactgcctcaatttcgttgtcaaggagtcacattttaatcaggttattatgatgaaggagtttgaacgtttgtcatcgcccctgatcgtcgagatcgttcggagaaaacagcagccacccccacggactcctctcgaccagccagtagacatcggcactagcctgattcaagatatgaaggcctaccttgagggcgctggggccgagttttgcgatattacactcctcttggacggtcacccccgccctgcccataaagccatcttagccgcccgttcttcgtacttcgaggccatgtttaggtctttcatgccagaggacggacaagtcaatattagcattggggagatggtgccttcccgacaagccttcgaaagcatgctgaggtatatttactatggcgaagtcaacatgcctcctgaggactcgctttacctgttcgcagccccttattactacgggttctacaataaccgcctgcaggcttattgcaagcagaacctcgagatgaatgtgacagtgcagaatgtgcttcagatcttggaagccgccgataaaacccaggctctggacatgaagcggcactgcttgcacataattgttcatcaatttactaaagtgagtaaattacccacattaagaagtctgtcgcagcagctgctgttggatatcatagattccctggcttcacacatctctgacaaacagtgtgccgagctgggagcagacatatag

SEQ ID NO: 167794 - DNA, 2466 bp, Artificial Sequence
  derived and/or modified sequence
atggcaggcccagggtcaacgggcggtcagatcggagcggctgcgctggctggaggagctcgctctaaagtagcccctagtgtggatttcgaccactcatgctctgatagcgtcgaatatctcacactgaactttggaccttttgagacagtgcaccgctggagacgactccccccttgtgacgagttcgttggagcacggaggtcgaaacatacagtcgtggcctacaaagacgccatatatgtgtttggcggagacaacggtgcatttacaacaggaaccccccctgcccctcggtaccaccactccgccgtcgtgtacggatcctccatgtttgtattcggcggatacaccggcgacatttattcaaactcaaatctcaagaataaaaacgatctgttcgagtataagttcgccaccggacagtggactgagtggaaaatagagggccgattaccggtcgccaggtctgcacatggcgctacagtttattcagataagctttggatattcgccggatacgatggcaacgctcggttgaatgacatgtggactatcggattgcaggaccgcgagcttacatgttgggaggaagtcgctcagtctggggagattcccccatcttgctgtaacttccccgtggcagtgtgcagggataaaatgttcgtgttcagcggccaaagtggggctaagatcacaaacaacctttttcaattcgagtttaaggataaaacatggacccggattcccacagagcatctcttgagaggctctccacctccgcctcagcgtcggtatggccacacaatggttgcgtttgaccgccacctgtacgtatttggtggcgctgccgataacactctccctaacgaattacattgctatgatgtggatttccagacttgggaagtggtccaacccagctcggattcagaggttggaggcgcagaggtgccagagcgagcatgtgctagcgaggaggtgcccacgctcacttacgaggaacgggtcgggtttaaaaagtcgcgtgatgtctttggactcgattttggaacaaccagcgctaaacagccgacccaacctgcgtcggaactgcctagcgggagactgttccacgccgctgcagtcattagcgatgccatgtatatctttggagggaccgtggataacaacatacgttcgggcgagatgtaccggtttcagttttcatgctaccctaaatgcacactccacgaggattatgggagactttgggagtctagacagttctgtgacgttgagtttgtgctgggagagaaagaagagtgtgttcagggtcacgttgcaattgttactgcaagaagtcggtggctcaggcggaagatcacacaagcacgcgagaggctggctcagaaactggaacaggaggccgctcctgtgcccagggaggccccaggagtcgccgcaggtggggctcgccctcctctgttacatgttgccatccgggaagctgaggccaggccctttgaggtactgatgcaatttctgtacactgataagattaagtatccccgaaaaggccatgtagaggacgtgttactcatcatggacgtctacaagcttgcgctcagcttccagttgtgccgccttgagcagttgtgtcggcagtacatcgaggcctcggtagatttgcagaacgtgctagtggtgtgtgagagcgccgctcggctgcaattgagccagttgaaagagcactgtttgaacttcgtggttaaggagtcgcacttcaaccaggttatcatgatgaaagaatttgagcggctgtcttctccactgattgtggagatagttcggagaaaacagcaacctccgcctcgcacacctttggaccagcccgtggacatcggtacttcgttgatccaggatatgaaggcgtatctggaaggggctggggctgagttctgtgacatcaccctgttgctggatggtcatccgcgtcccgctcataaggctattttggcagcccgatcctcctacttcgaggctatgttccgaagctttatgcctgaggatggacaggtgaacataagcatcggagaaatggtgccttctcgacaagcatttgagagcatgctacgttacatttactatggggaagtgaacatgcctccagaagatagcctgtatctgttcgcagccccatattattatggcttctataataaccgactccaggcctactgcaaacagaatctggagatgaatgtgactgtgcaaaatgtactgcagattcttgaggctgcagataaaacccaggcgctggatatgaagcggcactgcttacatattattgtccaccagtttactaaagtgtccaagctcccaacactacggtcactcagccagcaactactcctggacattatcgacagcttggccagtcacatctccgacaagcaatgtgctgaactgggcgctgatatttag

SEQ ID NO: 167795 - DNA, 2400 bp, Artificial Sequence
  derived and/or modified sequence
atgaattacgaccccatcgtctccaaggtggcagaagtgctagcaagcggcagagccattcgcaagcgcgaggttgagaggagtaagcacactgttgtagcttataaggacgccatctatgtgtttggcggagacaatgggaaaacaatgctgaacgatcttctcaggttcgacgtaaaggactgcagctggtgccgggcatttaccacaggcactcctccggctccaagataccatcattctgcggtcgtatacggaagttctatgttcgtgttcggcggatatacgggagacatctatagcaacagcaacttgaaaaataagaacgatctgttcgagtataaattcgccactggacagtggacagagtggaaaattgaaggcaggttgccagtcgccagaagcgctcatggcgcaaccgtgtacagtgataagctgtggatcttcgcgggatatgatggcaacgctcgtctgaatgacatgtggacgatcggtctgcaagatcgtgaactcacgtgttgggaagaggttgctcaatctggtgagattcccccatcgtgttgtaacttcccagtggccgtctgccgagacaagatgttcgtgttctctggccagtcaggagccaagattaccaacaatctcttccaatttgagtttaaggacaaaacctggacacggattcccaccgagcacctgctgaggggtagtccaccccctccacagcggaggtatggacatacgatggtggcctttgacagacacctctatgtgtttggcggtgccgcagataacacactgcctaacgagctgcattgctacgatgtggatttccagacttgggaagtcgtccagccgtccagcgatagcgaggttggcggagcagaggtgccagagcgcgcatgcgcctccgaagaggttcctacgttaacctatgaggaaagggtcgggttcaagaaaagtagggatgtgttcggattagactttggcaccacgagcgccaaacaaccgacacagcccgcatccgaattaccctctggcagactcttccacgctgcggctgtgatctccgacgccatgtacatctttggagggactgtcgacaacaacattagatctggggagatgtatcgatttcagttcagctgctaccccaaatgtacccttcacgaggactacgggagattgtgggaatcccgtcagttttgtgatgttgagtttgtcctcggcgagaaagaggagtgcgtacagggtcacgtggcaatcgtcaccgctcgatctagatggctccggcgtaaaataactcaggcccgtgaaaggctggcacagaagctggagcaggaagccgcaccggtaccccgagaagcgcctggggtggcggcaggaggcgcacggccaccgctgcttcatgtcgctattcgagaggcggaagccaggcccttcgaggtgctgatgcagtttctctatacagacaaaattaagtatcctaggaagggtcacgtggaggacgtgctacttatcatggacgtatataaattagcactgtcattccagctgtgtcggctggagcagctttgccgccagtacattgaagccagcgtcgacttacaaaacgtgctggtcgtgtgcgaatccgctgcccgactccagctctctcagctgaaagaacattgcctgaactttgtggtgaaggagagtcattttaatcaagttattatgatgaaggagttcgagcggttgagtagtcctctgatcgtggagattgtgcgacgtaaacaacaaccacctccgaggacccctttggatcagccagtggacattggtacctcactgattcaggatatgaaggcctatttagagggcgctggcgctgaattttgtgacattacgctcctcttggacggacatcctaggccagctcataaggctatcctcgcggctaggtccagctattttgaagcgatgtttcggtcattcatgcccgaggacggccaggtaaacatcagtattggtgagatggtgccttcccggcaggccttcgagtctatgctccgatacatctattatggagaagttaacatgcctcccgaggacagcctctacctgttcgccgctccttattactacggcttctacaacaacagattgcaagcctactgcaaacagaaccttgagatgaatgtcactgtccagaatgttttacagatattagaagctgctgataaaacacaggcgctcgatatgaagaggcactgtctgcacatcattgtgcaccagtttacaaaagtgagcaagctgcccacgctgcgatctttgtctcagcagctcttactggacatcattgattcgctggcctctcacatctcagacaaacaatgtgcggagctgggggctgatatctag

SEQ ID NO: 167796 - DNA, 2466 bp, Artificial Sequence
  derived and/or modified sequence
atggccggccccggcagcaccggcggccagatcggcgccgccgccctggccggcggcgccagaagcaaggtggcccccagcgtggacttcgaccacagctgcagcgacagcgtggagtacctgaccctgaacttcggccccttcgagaccgtgcacagatggagaagactgcccccctgcgacgagttcgtgggcgccagaagaagcaagcacaccgtggtggcctacaaggacgccatctacgtgttcggcggcgacaacggcgccttcaccaccggcaccccccccgcccccagataccaccacagcgccgtggtgtacggcagcagcatgttcgtgttcggcggctacaccggcgacatctacagcaacagcaacctgaagaacaagaacgacctgttcgagtacaagttcgccaccggccagtggaccgagtggaagatcgagggcagactgcccgtggccagaagcgcccacggcgccaccgtgtacagcgacaagctgtggatcttcgccggctacgacggcaacgccagactgaacgacatgtggaccatcggcctgcaggacagagagctgacctgctgggaggaggtggcccagagcggcgagatcccccccagctgctgcaacttccccgtggccgtgtgcagagacaagatgttcgtgttcagcggccagagcggcgccaagatcaccaacaacctgttccagttcgagttcaaggacaagacctggaccagaatccccaccgagcacctgctgagaggcagccccccccccccccagagaagatacggccacaccatggtggccttcgacagacacctgtacgtgttcggcggcgccgccgacaacaccctgcccaacgagctgcactgctacgacgtggacttccagacctgggaggtggtgcagcccagcagcgacagcgaggtgggcggcgccgaggtgcccgagagagcctgcgccagcgaggaggtgcccaccctgacctacgaggagagagtgggcttcaagaagagcagagacgtgttcggcctggacttcggcaccaccagcgccaagcagcccacccagcccgccagcgagctgcccagcggcagactgttccacgccgccgccgtgatcagcgacgccatgtacatcttcggcggcaccgtggacaacaacatcagaagcggcgagatgtacagattccagttcagctgctaccccaagtgcaccctgcacgaggactacggcagactgtgggagagcagacagttctgcgacgtggagttcgtgctgggcgagaaggaggagtgcgtgcagggccacgtggccatcgtgaccgccagaagcagatggctgagaagaaagatcacccaggccagagagagactggcccagaagctggagcaggaggccgcccccgtgcccagagaggcccccggcgtggccgccggcggcgccagaccccccctgctgcacgtggccatcagagaggccgaggccagacccttcgaggtgctgatgcagttcctgtacaccgacaagatcaagtaccccagaaagggccacgtggaggacgtgctgctgatcatggacgtgtacaagctggccctgagcttccagctgtgcagactggagcagctgtgcagacagtacatcgaggccagcgtggacctgcagaacgtgctggtggtgtgcgagagcgccgccagactgcagctgagccagctgaaggagcactgcctgaacttcgtggtgaaggagagccacttcaaccaggtgatcatgatgaaggagttcgagagactgagcagccccctgatcgtggagatcgtgagaagaaagcagcagcccccccccagaacccccctggaccagcccgtggacatcggcaccagcctgatccaggacatgaaggcctacctggagggcgccggcgccgagttctgcgacatcaccctgctgctggacggccaccccagacccgcccacaaggccatcctggccgccagaagcagctacttcgaggccatgttcagaagcttcatgcccgaggacggccaggtgaacatcagcatcggcgagatggtgcccagcagacaggccttcgagagcatgctgagatacatctactacggcgaggtgaacatgccccccgaggacagcctgtacctgttcgccgccccctactactacggcttctacaacaacagactgcaggcctactgcaagcagaacctggagatgaacgtgaccgtgcagaacgtgctgcagatcctggaggccgccgacaagacccaggccctggacatgaagagacactgcctgcacatcatcgtgcaccagttcaccaaggtgagcaagctgcccaccctgagaagcctgagccagcagctgctgctggacatcatcgacagcctggccagccacatcagcgacaagcagtgcgccgagctgggcgccgacatctag

SEQ ID NO: 167797 - DNA, 2400 bp, Artificial Sequence
  derived and/or modified sequence
atgaactacgaccccatcgtgagcaaggtggccgaggtgctggccagcggcagagccatcagaaagagagaggtggagagaagcaagcacaccgtggtggcctacaaggacgccatctacgtgttcggcggcgacaacggcaagaccatgctgaacgacctgctgagattcgacgtgaaggactgcagctggtgcagagccttcaccaccggcaccccccccgcccccagataccaccacagcgccgtggtgtacggcagcagcatgttcgtgttcggcggctacaccggcgacatctacagcaacagcaacctgaagaacaagaacgacctgttcgagtacaagttcgccaccggccagtggaccgagtggaagatcgagggcagactgcccgtggccagaagcgcccacggcgccaccgtgtacagcgacaagctgtggatcttcgccggctacgacggcaacgccagactgaacgacatgtggaccatcggcctgcaggacagagagctgacctgctgggaggaggtggcccagagcggcgagatcccccccagctgctgcaacttccccgtggccgtgtgcagagacaagatgttcgtgttcagcggccagagcggcgccaagatcaccaacaacctgttccagttcgagttcaaggacaagacctggaccagaatccccaccgagcacctgctgagaggcagccccccccccccccagagaagatacggccacaccatggtggccttcgacagacacctgtacgtgttcggcggcgccgccgacaacaccctgcccaacgagctgcactgctacgacgtggacttccagacctgggaggtggtgcagcccagcagcgacagcgaggtgggcggcgccgaggtgcccgagagagcctgcgccagcgaggaggtgcccaccctgacctacgaggagagagtgggcttcaagaagagcagagacgtgttcggcctggacttcggcaccaccagcgccaagcagcccacccagcccgccagcgagctgcccagcggcagactgttccacgccgccgccgtgatcagcgacgccatgtacatcttcggcggcaccgtggacaacaacatcagaagcggcgagatgtacagattccagttcagctgctaccccaagtgcaccctgcacgaggactacggcagactgtgggagagcagacagttctgcgacgtggagttcgtgctgggcgagaaggaggagtgcgtgcagggccacgtggccatcgtgaccgccagaagcagatggctgagaagaaagatcacccaggccagagagagactggcccagaagctggagcaggaggccgcccccgtgcccagagaggcccccggcgtggccgccggcggcgccagaccccccctgctgcacgtggccatcagagaggccgaggccagacccttcgaggtgctgatgcagttcctgtacaccgacaagatcaagtaccccagaaagggccacgtggaggacgtgctgctgatcatggacgtgtacaagctggccctgagcttccagctgtgcagactggagcagctgtgcagacagtacatcgaggccagcgtggacctgcagaacgtgctggtggtgtgcgagagcgccgccagactgcagctgagccagctgaaggagcactgcctgaacttcgtggtgaaggagagccacttcaaccaggtgatcatgatgaaggagttcgagagactgagcagccccctgatcgtggagatcgtgagaagaaagcagcagcccccccccagaacccccctggaccagcccgtggacatcggcaccagcctgatccaggacatgaaggcctacctggagggcgccggcgccgagttctgcgacatcaccctgctgctggacggccaccccagacccgcccacaaggccatcctggccgccagaagcagctacttcgaggccatgttcagaagcttcatgcccgaggacggccaggtgaacatcagcatcggcgagatggtgcccagcagacaggccttcgagagcatgctgagatacatctactacggcgaggtgaacatgccccccgaggacagcctgtacctgttcgccgccccctactactacggcttctacaacaacagactgcaggcctactgcaagcagaacctggagatgaacgtgaccgtgcagaacgtgctgcagatcctggaggccgccgacaagacccaggccctggacatgaagagacactgcctgcacatcatcgtgcaccagttcaccaaggtgagcaagctgcccaccctgagaagcctgagccagcagctgctgctggacatcatcgacagcctggccagccacatcagcgacaagcagtgcgccgagctgggcgccgacatctag

SEQ ID NO: 167798 - protein, 592 aa, Artificial Sequence
  derived and/or modified sequence
MSVSLVVIRLELAEHSPVPAGFGFSAAAGEMSDEEIKKTTLASAVACLEGKSPGEKVAIIHQHLGRREMTDVIIETMKSNPDELKTTVEERKSSEASPTAQRSKDHSKECINAAPDSPSKQLPDQISFFSGNPSVEIVHGIMHLYKTNKMTSLKEDVRRSAMLCILTVPAAMTSHDLMKFVAPFNEVIEQMKIIRDSTPNQYMVLIKFRAQADADSFYMTCNGRQFNSIEDDVCQLVYVERAEVLKSEDGASLPVMDLTELPKCTVCLERMDESVNGILTTLCNHSFHSQCLQRWDDTTCPVCRYCQTPEPVEENKCFECGVQENLWICLICGHIGCGRYVSRHAYKHFEETQHTYAMQLTNHRVWDYAGDNYVHRLVASKTDGKIVQYECEGDTCQEEKIDALQLEYSYLLTSQLESQRIYWENKIVRIEKDTAEEINNMKTKFKETIEKCDNLEHKLNDLLKEKQSVERKCTQLNTKVAKLTNELKEEQEMNKCLRANQVLLQNKLKEEERVLKETCDQKDLQITEIQEQLRDVMFYLETQQKINHLPAETRQEIQEGQINIAMASASSPASSGGSGKLPSRKGRSKRGK

SEQ ID NO: 167799 - protein, 413 aa, Artificial Sequence
  derived and/or modified sequence
MHLYKTNKMTSLKEDVRRSAMLCILTVPAAMTSHDLMKFVAPFNEVIEQMKIIRDSTPNQYMVLIKFRAQGASLPVMDLTELPKCTVCLERMDESVNGILTTLCNHSFHSQCLQRWDDTTCPVCRYCQTPEPVEENKCFECGVQENLWICLICGHIGCGRYVSRHAYKHFEETQHTYAMQLTNHRVWDYAGDNYVHRLVASKTDGKIVQYECEGDTCQEEKIDALQLEYSYLLTSQLESQRIYWENKIVRIEKDTAEEINNMKTKFKETIEKCDNLEHKLNDLLKEKQSVERKCTQLNTKVAKLTNELKEEQEMNKCLRANQVLLQNKLKEEERVLKETCDQKDLQITEIQEQLRDVMFYLETQQKINHLPAETRQEIQEGQINIAMASASSPASSGGSGKLPSRKGRSKRGK

SEQ ID NO: 167800 - DNA, 1779 bp, Artificial Sequence
  derived and/or modified sequence
atgagcgtgtccctagttgtgatacgactggagctggcagagcatagcccggtcccagccggcttcggcttttctgcagcggccggagaaatgtccgatgaggagattaagaagacaactctggctagtgccgtggcttgtctggagggcaagagccctggggagaaggtggccataatccaccagcacttgggccggcgagagatgacagacgttatcattgagactatgaagagcaatccagatgaactcaagacgacagtagaagagcgcaaatcttcagaggcaagcccaactgcccagaggtccaaggatcacagcaaggaatgcatcaatgctgcaccagactctccatcaaagcagctcccagatcagatcagcttcttcagcggaaatccaagtgtggagatcgtgcatggtatcatgcacctgtacaagactaataaaatgacttcactgaaggaggatgttcgccggtctgcaatgttgtgtatcttaaccgttcctgccgccatgacatcacacgatctcatgaagttcgtggcaccctttaacgaggtgatcgagcaaatgaagatcatcagggacagcactccaaatcaatacatggtgttgattaagttccgcgcccaggccgatgccgatagcttctatatgacttgcaatggtaggcaattcaatagtattgaggatgacgtttgtcagttggtgtacgttgagcgcgccgaggtcttgaagtcagaggacggggccagcttacctgttatggatttaaccgagctacccaaatgtacagtgtgcctggagcgcatggatgaatccgtaaacggcatactgaccactctatgtaatcacagcttccactcccagtgtctgcagcgctgggacgatacaacgtgcccggtgtgtcggtattgccagacccccgagcccgttgaggaaaacaaatgttttgaatgcggggtgcaggaaaatctgtggatatgtctgatatgcggccacataggctgcggccgctacgtgagccgccatgcctacaagcatttcgaagagactcagcatacatatgcaatgcagcttacaaatcatagggtgtgggattatgccggagacaactacgtgcacagactggtggcttcaaaaactgatggtaaaatcgtccaatatgagtgcgaaggagacacatgccaggaggaaaaaattgatgctcttcagctggaatattcttatctgctgacctctcaactagagtcacaacggatatactgggagaataaaattgtgcggattgagaaagacaccgctgaagaaatcaacaacatgaagaccaagtttaaggaaaccatcgaaaaatgcgataacttggagcataagctcaatgacctgctcaaggagaagcagtctgtggaacgtaaatgtactcagcttaatactaaggtcgccaagctcacgaacgagctaaaagaagagcaggagatgaataaatgtctgagggccaatcaggtgttgctgcaaaacaagctgaaagaggaggagcgggtgttgaaggaaacttgcgatcagaaagacctacagataaccgaaattcaggaacagctacgggacgtcatgttctatctcgaaactcagcagaaaatcaaccatttgcccgccgaaacaagacaagaaattcaagagggacagatcaacatagctatggctagcgcctcatcacctgcctcttccggaggctccgggaaactgccatcccgcaagggtcgaagcaagcgcggcaagtag

SEQ ID NO: 167801 - DNA, 1242 bp, Artificial Sequence
  derived and/or modified sequence
atgcacctgtataagaccaataagatgacttccctaaaggaggatgtacgccgatccgccatgctgtgcatcttgactgtccccgcggcgatgacctctcatgatctgatgaaattcgtggccccctttaacgaggttattgagcagatgaaaataatcagagattctactccaaatcaatatatggtactaataaagttccgggctcagggtgcgagcctccccgtcatggacctcactgagctcccgaaatgcacagtgtgtctggaacggatggacgagtccgtgaatggtatccttaccacactctgtaatcatagcttccactcacagtgcctacagagatgggacgacaccacgtgtccggtgtgccgctattgccaaacacccgagcctgtggaggagaacaagtgcttcgagtgcggggtgcaggaaaatctctggatttgtcttatctgcgggcacattggctgcgggcgttatgtttcaaggcacgcttataaacatttcgaggaaacacagcatacttacgccatgcagctaaccaaccatagggtatgggactacgctggagacaattatgtacaccgtctggtggcaagtaagacagacgggaagatagtccagtacgagtgtgagggtgatacctgccaggaagagaagatagatgccctacagcttgagtactcttatctcctgacatctcagctggagtcccagagaatttattgggaaaacaagatcgtgcgcatcgaaaaggacacagcggaggagattaataacatgaaaactaagttcaaggaaaccatcgaaaagtgtgataatttagaacacaaactgaacgacctactcaaagagaaacaatcagttgagcgtaagtgtacccagctcaacacaaaagtggcaaagctgaccaatgagttaaaggaagagcaggagatgaacaaatgcttacgcgcaaaccaggtgcttctccagaataaactgaaggaagaagagagagtcttgaaggagacctgtgatcaaaaggacctgcaaatcacagagattcaggagcaactcagagacgtgatgttctatttagaaacacagcagaagataaatcacttgcccgctgagaccaggcaggaaattcaagaaggccagatcaacattgcaatggctagcgcctcctctccagccagtagcggagggtccggcaagctgccttcccggaaagggagatccaagcgcggcaaatag

SEQ ID NO: 167802 - DNA, 1779 bp, Artificial Sequence
  derived and/or modified sequence
atgtctgtgtccctggtggtgatccggctggagctggccgagcacagccctgtgcctgctggcttcggcttctctgctgctgctggggagatgtctgatgaggagatcaagaagaccaccctggccagcgctgtggcctgcctggagggcaagagccctggagagaaggtggccatcatccaccagcacctgggccggcgggagatgacagatgtgatcatcgagaccatgaagagcaacccagatgagctgaagaccaccgtggaggagaggaagagcagcgaggccagccccacagcccagaggagcaaggaccacagcaaagaatgcatcaatgctgccccagacagccccagcaagcagctgcctgaccagatctccttcttcagcggcaaccccagcgtggagatcgtgcacggcatcatgcacctgtacaagaccaacaagatgaccagcctgaaggaggatgtgcggcgcagcgccatgctgtgcatcctgactgtgcctgctgccatgaccagccatgacctgatgaagtttgtggcccccttcaatgaagtcatcgagcagatgaagatcatccgggacagcacccccaaccagtacatggtgctgatcaagttccgggcccaggctgatgctgacagcttctacatgacctgcaatggccggcagttcaacagcattgaagatgatgtgtgccagctggtgtatgtggagcgggcagaggtgctgaagtcagaagatggagccagcctgcctgtgatggacctgacagagctgcccaagtgcaccgtgtgcctggagaggatggatgagagcgtgaatggcatcctgaccaccctgtgcaaccacagcttccacagccagtgcctgcagcgctgggatgacaccacctgccctgtgtgccgctactgccagaccccagagcctgtggaggagaacaagtgctttgaatgtggggtgcaggagaacctgtggatctgcctgatctgtggccacatcggctgcggccgctacgtgtccagacatgcctacaagcactttgaggagacccagcacacctacgccatgcagctgaccaaccaccgggtgtgggactatgctggggacaactacgtgcaccggctggtggccagcaagacagatggcaagatcgtgcagtatgaatgtgagggggacacctgccaggaggagaagattgatgccctgcagctggagtacagctacctgctgaccagccagctggagagccagaggatctactgggagaacaagatcgtgcgcatcgagaaggacacagctgaggagatcaacaacatgaagaccaagttcaaggagaccattgaaaaatgtgacaacctggagcacaagctgaatgacctgctgaaggagaagcagagcgtggagaggaagtgcacccagctgaacaccaaggtggccaagctgaccaatgagctgaaggaggagcaggagatgaacaagtgcctgcgggccaaccaggtgctgctgcagaacaagctgaaggaggaggagcgggtgctgaaggagacctgtgaccagaaggacctgcagatcacagagatccaggagcagctgagagatgtgatgttctacctggagacccagcagaagatcaaccacctgcctgctgagacccggcaggagatccaggagggccagatcaacatcgccatggccagcgccagcagccctgccagcagcggcggcagcggcaagctgcccagcaggaagggccgcagcaagaggggcaagtag

SEQ ID NO: 167803 - DNA, 1242 bp, Artificial Sequence
  derived and/or modified sequence
atgcacctgtacaagaccaacaagatgaccagcctgaaggaggatgtgagaagaagtgccatgctgtgcatcctgactgtgcctgctgccatgaccagccatgacctgatgaagtttgtggcccccttcaatgaggtgattgagcagatgaagatcatccgggacagcacccccaaccagtacatggtgctgatcaagttccgggcccagggcgccagcctgcctgtgatggacctgacagagctgcccaagtgcaccgtgtgcctggagaggatggatgaatctgtgaatggcatcctgaccaccctgtgcaaccacagcttccacagccagtgcctgcagcgctgggatgacaccacctgccctgtgtgccgctactgccagaccccagagcctgtggaggagaacaagtgctttgaatgtggggtgcaggagaacctgtggatctgcctgatctgtggccacatcggctgcggccgctacgtgtccagacatgcctacaagcactttgaggagacccagcacacctacgccatgcagctgaccaaccaccgggtgtgggactatgctggggacaactacgtgcaccggctggtggccagcaagacagatggcaagatcgtgcagtatgaatgtgagggggacacctgccaggaggagaagattgatgccctgcagctggagtacagctacctgctgaccagccagctggagagccagaggatctactgggagaacaagatcgtgagaattgagaaggacacagctgaggagatcaacaacatgaagaccaagttcaaggagaccatcgagaagtgtgacaacctggagcacaagctgaatgacctgctgaaggagaagcagagcgtggagaggaagtgcacccagctgaacaccaaggtggccaagctgaccaatgagctgaaggaggagcaggagatgaacaagtgcctgcgggccaaccaggtgctgctgcagaacaagctgaaggaggaggagcgggtgctgaaggagacctgtgaccagaaggacctgcagatcacagagatccaggagcagctgagagatgtgatgttctacctggagacccagcagaagatcaaccacctgcctgctgagacccggcaggagatccaggagggccagatcaacatcgccatggccagcgccagcagccctgccagcagcggcggcagcggcaagctgcccagcaggaagggccgcagcaagaggggcaagtag

SEQ ID NO: 167804 - DNA, 1779 bp, Artificial Sequence
  derived and/or modified sequence
atgagcgtgagcctggtggtgatccggctggagctggccgagcactctcccgtccccgccgggtttggcttttctgccgctgccggcgaaatgagtgatgaggaaatcaaaaagacaactctcgcaagtgccgttgcctgtcttgagggtaagagcccgggagagaaggtcgcaattatacaccaacatctgggtagacgtgaaatgacagacgtgatcatcgagacaatgaagtccaatcctgatgaactaaaaaccaccgttgaggagcggaagtcgtctgaggcctctccaacagcccagcgcagtaaagatcacagtaaagagtgcattaatgccgcgcccgatagcccaagcaagcaactgcctgatcagatctcctttttctcaggtaatccatctgtggagatagtgcatggcattatgcacctgtataaaaccaataagatgactagcctgaaggaggacgtccggagatctgccatgctctgcattcttacggtccctgcagcaatgacctcacacgacttgatgaagtttgtcgccccttttaatgaggttatcgaacaaatgaaaatcattagagatagcaccccgaatcagtacatggttttgataaaattcagggcccaggccgacgctgactcattctacatgacatgcaatggacggcagttcaactccattgaggacgacgtctgccaactcgtgtatgtggagcgtgcagaggtgctcaagtcagaagatggtgctagcctacctgtcatggatctcaccgaactaccgaagtgcaccgtgtgcctggagagaatggacgagtctgtgaacgggatcctgaccacactgtgtaaccattcattccacagccagtgtctgcagcgctgggacgacaccacgtgtcccgtttgcaggtattgccagacgccagagccggtcgaagagaataaatgctttgagtgtggagtccaggagaatttatggatctgcctaatttgcggacacattgggtgcggtcgctatgttagccgacatgcatataagcactttgaggaaacgcaacacacctatgccatgcagctcactaatcatcgggtatgggattacgcgggcgacaactatgtacacaggctcgtcgccagcaagacagacggcaagatagtccagtacgaatgcgagggagacacctgtcaggaagagaagatcgacgcactacagctggaatacagttacttactgactagccaactagagtcccaacggatctactgggagaacaaaattgtgaggattgagaaggacacagctgaggagatcaataacatgaaaactaaattcaaggagacgatagaaaagtgtgacaacctcgagcacaaactcaatgacctgctaaaagagaagcagtcagtggagaggaaatgtacccagctcaacacaaaagtcgcgaaactgacgaatgaactgaaagaggaacaggaaatgaacaagtgtctgagggcaaatcaggtgttactgcagaacaagctgaaggaagaagagcgtgtcctcaaggagacgtgcgaccaaaaagatcttcaaatcaccgagattcaggaacagttgcgggacgtcatgttctacctcgaaacccagcagaaaattaatcacttacccgctgaaacacgtcaggagatccaagagggacagattaatatcgcgatggccagcgcatcctcgcctgctagctccggagggtccgggaagttgcctagtcgcaaagggagatccaaacgcggcaagtag

SEQ ID NO: 167805 - DNA, 1242 bp, Artificial Sequence
  derived and/or modified sequence
atgcacctgtacaagaccaacaagatgaccagcctgaaggaggacgtgaggaggtccgctatgctttgtatcctgacagtgcctgcagccatgacttcgcacgacctgatgaaattcgtggccccttttaacgaggtgatagagcagatgaagatcatccgggacagcaccccgaatcagtatatggtgctgatcaagttcagagcccagggagcctctctgccagtgatggatttgacagaattgcccaaatgtactgtgtgcctagaaagaatggatgagtcagtgaacggcatactcactacgctgtgtaaccatagcttccattctcagtgcttgcaacgatgggatgatactacttgccccgtctgcagatattgtcagactccggaaccagtcgaggaaaacaaatgttttgaatgcggcgtgcaggaaaacctctggatctgtctaatatgtggtcacattggctgcggccgatatgtgtctcggcatgcgtacaagcactttgaagaaacccagcacacctacgcaatgcaacttacaaatcatagagtgtgggactatgcaggggacaactatgtccaccggttggtcgcctcgaagactgatggcaaaattgtgcagtatgagtgcgagggcgatacgtgtcaggaggaaaagatagacgcccttcagctggagtactcctatttgctgacatcacagttagaaagccagagaatctattgggagaataagatcgtccgaatcgaaaaagataccgcggaggagatcaacaatatgaaaaccaagtttaaggagaccattgagaagtgcgacaatctggagcacaagctaaacgatctgctaaaagaaaagcagtcagtggaacgtaaatgtacgcagctcaataccaaggtggctaagctaactaatgagctgaaagaggaacaggaaatgaacaagtgcctcagagccaaccaggtgcttctccagaataaactcaaggaagaggaaagagtcctaaaagagacttgcgaccaaaaggatcttcaaataacagagattcaggaacagctccgagacgtgatgttttatctggagacacagcaaaaaatcaatcacctccctgcagaaacgagacaggaaatacaggagggccagataaatatagctatggcctccgcctcatcccccgcttctagcggcgggagtggcaagctaccctccagaaaagggagatcaaagaggggaaagtag

SEQ ID NO: 167806 - DNA, 1779 bp, Artificial Sequence
  derived and/or modified sequence
atgtctgtcagtctggtcgtcattcgcctcgagctggccgaacattcaccagttccagcagggtttgggttttctgctgctgccggtgaaatgagcgacgaagagatcaaaaagacaacgttggcctctgcagtggcctgcctggagggcaagtccccaggcgagaaggttgccattattcatcagcacctgggacgccgagaaatgacagatgtgatcatcgaaacaatgaagtctaaccctgatgaacttaaaactacagttgaggagagaaaatcatccgaagcatccccaactgcacaaagatctaaggatcattccaaggaatgcattaatgccgctccagacagcccctccaagcagctgcctgaccagatcagtttttttagtgggaacccatccgtcgagatagtgcatggaatcatgcatttgtataagacaaacaagatgacctccctgaaggaagacgtcaggcgcagcgctatgctatgcatcctgactgtgcccgcagccatgacatcgcatgacctgatgaagtttgtagccccatttaatgaagtcatcgaacagatgaaaatcattagggacagcacgcctaaccagtacatggttctcattaaattcagagcccaggccgatgccgatagtttttatatgacctgtaatgggagacagttcaactccattgaggatgacgtttgtcaactggtgtatgttgaaagagcagaggtgctgaaaagtgaagacggcgcaagcctccccgtcatggacttgacagaactgcccaagtgcaccgtatgcctagaaagaatggatgagagcgtaaatggcatcctaacaaccctgtgcaatcattcgttccactctcagtgtctgcagcgctgggatgacaccacatgcccagtgtgcagatactgccagacacctgagccggtggaggaaaacaagtgcttcgaatgcggcgtgcaggagaatctgtggatctgtctcatttgtggccacattggatgcggccgatatgtgtcaagacacgcttacaaacacttcgaagagacgcagcatacctacgcaatgcaactaaccaaccaccgcgtctgggattatgcaggcgacaactatgtgcataggctggtggcttccaagactgatggcaaaatcgttcaatatgaatgcgagggggatacatgccaggaggagaaaatcgacgccctgcagctcgaatactcctacctactgacctcacagttagagagtcagagaatctactgggagaataaaattgtgagaatcgagaaagatacagccgaggagatcaacaatatgaagacaaaattcaaagagaccatcgaaaaatgtgataatctggagcacaagttgaacgatctgctgaaggagaagcagtctgtggagcggaaatgtactcagctaaataccaaggtggccaaactcacaaatgaattgaaagaggagcaggagatgaataaatgcctacgggctaatcaagtcctgctgcaaaacaaactcaaggaggaggagcgagtattgaaagagacatgtgaccagaaggatcttcagattacagagatccaggaacagctgcgagatgtcatgttctatctcgagacacaacaaaaaattaaccacctcccagccgagacccgacaagaaattcaggagggccaaatcaatattgcaatggcaagtgcctccagccctgcatccagcggcggatcaggaaaacttccgagccgcaaaggccgatcaaaacggggtaaatag

SEQ ID NO: 167807 - DNA, 1242 bp, Artificial Sequence
  derived and/or modified sequence
atgcatttatacaaaactaataagatgacctctcttaaggaagatgtgcgcagaagcgcaatgctgtgcatcctgactgtcccggcagccatgacctcccatgacctcatgaaatttgtggcgccttttaatgaggtgatcgagcagatgaaaattatacgcgactccacccctaatcagtatatggtgctgattaagtttagagctcagggggcttccctgccagtgatggatctgacagagctgcccaaatgtactgtgtgtttagagaggatggatgaatccgttaatgggatcttaaccacactctgtaaccattcattccatagccaatgtttacagcgctgggatgatacaacctgtcccgtctgtagatattgtcagacccctgaacctgtagaagaaaacaagtgctttgagtgcggcgtacaggagaatctttggatttgcctgatctgtggccacatcggttgtggcagatatgtgtcaagacacgcatacaaacacttcgaagagacccagcacacctacgcgatgcagctgacaaaccaccgcgtgtgggactacgctggagacaactatgtgcaccgcttggtcgcaagcaaaacagatggcaagatcgttcagtacgagtgtgagggcgacacttgccaggaagagaagatagatgcactgcagttggaatattcatatctcctaacctcacaattagagagccaaaggatttactgggagaataaaatagtgagaattgagaaagatactgcagaggaaatcaataatatgaagaccaagttcaaggaaacaatagagaagtgcgataacttggagcacaaactgaacgacctgctgaaagaaaaacagtcagtggagaggaaatgcacacagttgaacacaaaagtggcaaaactgactaatgagttgaaggaagagcaggaaatgaacaagtgcttgcgggctaaccaggttctgctgcagaacaagcttaaagaggaggagagagttttgaaggagacatgtgatcagaaagaccttcagattactgagatccaggagcagctgagggacgtgatgttttatcttgagactcaacagaagatcaatcatctgcccgctgaaacccgtcaggaaatccaggaagggcaaattaacatagctatggccagcgcaagctccccagcatcttccggtggcagcggaaagttgccatcacgaaagggcagatctaaaaggggcaaatag

SEQ ID NO: 167808 - DNA, 3179 bp, Artificial Sequence
  derived and/or modified sequence
agcgacggcggccgggaggcggaagtggaggttgttgtggctccgagggctgttcgaggagctgctgctgctgaggcggcggcaactgcattgaggtggtggcggcgctgccggccccgggccgctcggcctctcggctcgccttccagcctcgcctgagcccgccggggcccgcgccggccagcgcctgccctatgagtgtgtcactggttgttatccgattggagctcgcggaacactcgcctgtccccgccggcttcggcttcagcgccgcggccggggaaatgtctgatgaggagataaaaaagacgacactagcctcagctgtagcctgtttagaaggcaagtcaccaggagagaaagtagcgattatccatcagcatctcggccgtcgagaaatgacagatgtgatcattgagaccatgaagtccaacccagatgaactaaaaactacagtggaagaaaggaagtcttcagaagcctcccccactgcgcaaagaagtaaagatcacagtaaggaatgcataaacgctgccccagattctccgtccaaacagcttccagaccagatttcattcttcagtggaaatccatcagttgaaatagttcatggtattatgcacctatataagacaaataagatgacctccttaaaagaagatgtgcggcgcagtgccatgctgtgtattctcacagtccctgctgcaatgaccagtcatgaccttatgaagtttgttgccccatttaacgaagtaattgaacaaatgaaaattatcagagactctactcccaaccaatatatggtgctgataaagtttcgtgcacaggctgatgcggatagtttttatatgacatgcaatggccgccagttcaactcaatagaagatgacgtttgccagctagtgtatgtggaaagagctgaagtgctcaaatctgaagatggcgccagcctcccagtgatggacctgactgaactccccaagtgcacggtgtgtctggagcgcatggacgagtctgtgaatggcatcctcacaacgttatgtaaccacagcttccacagccagtgtctacagcgctgggacgataccacgtgtcctgtttgccggtactgtcaaacgcccgagccagtagaagaaaataagtgttttgagtgtggtgttcaggaaaatctttggatttgtttaatatgcggccacataggatgtggacggtatgtcagtcgacatgcttataagcactttgaggaaacgcagcacacgtatgccatgcagcttaccaaccatcgagtctgggactatgctggagataactatgttcatcgactggttgcaagtaaaacagatggaaaaatagtacagtatgaatgtgagggggatacttgccaggaagagaaaatagatgccttacagttagagtattcatatttactaacaagccagctggaatctcagcgaatctactgggaaaacaagatagttcggatagagaaggacacagcagaggaaattaacaacatgaagaccaagtttaaagaaacaattgagaagtgtgataatctagagcacaaactaaatgatctcctaaaagaaaagcagtctgtggaaagaaagtgcactcagctaaacacaaaagtggccaaactcaccaacgagctcaaagaggagcaggaaatgaacaagtgtttgcgagccaaccaagtcctcctgcagaacaagctaaaagaggaggagagggtgctgaaggagacctgtgaccaaaaagatctgcagatcaccgagatccaggagcagctgcgtgacgtcatgttctacctggagacacagcagaagatcaaccatctgcctgccgagacccggcaggaaatccaggagggacagatcaacatcgccatggcctcggcctcgagccctgcctcttcggggggcagtgggaagttgccctccaggaagggccgcagcaagaggggcaagtgaccttcagagcaacagacatccctgagactgttctccctgacactgtgagagtgtgctgggaccttcagctaaatgtgagggtgggccctaataagtacaagtgaggatcaagccacagttgtttggctctttcatttgctagtgtgtgatgtagtgaatgtaaagggtgctgactggagagctgatagaaaggcgctgcgttcgaaaaggtcttaagagttcactaacctcacattctaatgaccattttgccttcctgcttggtagaagccccaactctgctgtgcatttttccattgtatttatggagttggcgtatttgacattcagttctggggtaggtttaagatgttaagttatttcttgtaacctcaaaggtaaggttatctagcactaaagcaccaaacctctctgagggcataacagctgctttaaagagaggtttccattggctattaaggagttatgaaaactccctagcaatagtgtcatatcattatcatctcccccttcctctggggagtggaagaattgcttgaatgttatctgaaaagaggcctggtagtaaaccaggccctggctctttaccagcagtcatctcttcttgctctggggccagccaggaaaaacaaacaacccggggcacattgggtagactcagtgtaggaaaaatggtggcagctccactgtttatttttggtgacttcgtacatcattatgaaccgcaattaaggaggaggcttaatggctgttcccaaactcaaatctcagagtgggtatcctagcatctagcaagactgagtggggagatttctcatccgtgtgaaaatgtagagtgaggcctctgactagctaattgtgtattttgttgggtttagtattttctaaatgtttacaaaatattgggctgcatgttcaggttgcagctagagggagcttgggcagattttcaattacgctttcaagatataaccaaaagctgtttctaaatcctaaaattagaatttcaacagagccccctttagaacagtcatataacgcttgtgtgggccaacagaggggctgtgtactctctctggaaccataaatgtcaaataatttataacctgcagtaattgagcaaacttaaaataagacctgtgttggaatttagtttcttgaagaggtagagggataggttagtaagatgtattgttaaacaacagg

SEQ ID NO: 167809 - DNA, 1549 bp, Artificial Sequence
  derived and/or modified sequence
tttcattcttcagtggaaatccatcagttgaaatagttcatggtattatgcacctatataagacaaataagatgacctccttaaaagaagatgtgcggcgcagtgccatgctgtgtattctcacagtccctgctgcaatgaccagtcatgaccttatgaagtttgttgccccatttaacgaagtaattgaacaaatgaaaattatcagagactctactcccaaccaatatatggtgctgataaagtttcgtgcacagggcgccagcctcccagtgatggacctgactgaactccccaagtgcacggtgtgtctggagcgcatggacgagtctgtgaatggcatcctcacaacgttatgtaaccacagcttccacagccagtgtctacagcgctgggacgataccacgtgtcctgtttgccggtactgtcaaacgcccgagccagtagaagaaaataagtgttttgagtgtggtgttcaggaaaatctttggatttgtttaatatgcggccacataggatgtggacggtatgtcagtcgacatgcttataagcactttgaggaaacgcagcacacgtatgccatgcagcttaccaaccatcgagtctgggactatgctggagataactatgttcatcgactggttgcaagtaaaacagatggaaaaatagtacagtatgaatgtgagggggatacttgccaggaagagaaaatagatgccttacagttagagtattcatatttactaacaagccagctggaatctcagcgaatctactgggaaaacaagatagttcggatagagaaggacacagcagaggaaattaacaacatgaagaccaagtttaaagaaacaattgagaagtgtgataatctagagcacaaactaaatgatctcctaaaagaaaagcagtctgtggaaagaaagtgcactcagctaaacacaaaagtggccaaactcaccaacgagctcaaagaggagcaggaaatgaacaagtgtttgcgagccaaccaagtcctcctgcagaacaagctaaaagaggaggagagggtgctgaaggagacctgtgaccaaaaagatctgcagatcaccgagatccaggagcagctgcgtgacgtcatgttctacctggagacacagcagaagatcaaccatctgcctgccgagacccggcaggaaatccaggagggacagatcaacatcgccatggcctcggcctcgagccctgcctcttcggggggcagtgggaagttgccctccaggaagggccgcagcaagaggggcaagtgaccttcagagcaacagacatccctgagactgttctccctgacactgtgagagtgtgctgggaccttcagctaaatgtgagggtgggccctaataagtacaagtgaggatcaagccacagttgtttggctctttcatttgctagtgtgtgatgtagtgaatgtaaagggtgctgactggagagctgatagaaaggcgctgcgttcgaaaaggtcttaagagttcactaacctcacattctaatgaccattttgccttcctgc

SEQ ID NO: 167810 - DNA, 1779 bp, Artificial Sequence
  derived and/or modified sequence
atgagcgtgagcctggtggtgatcagactggagctggccgagcacagccccgtgcccgccggcttcggcttcagcgccgccgccggcgagatgagcgacgaggagatcaagaagaccaccctggccagcgccgtggcctgcctggagggcaagagccccggcgagaaggtggccatcatccaccagcacctgggcagaagagagatgaccgacgtgatcatcgagaccatgaagagcaaccccgacgagctgaagaccaccgtggaggagagaaagagcagcgaggccagccccaccgcccagagaagcaaggaccacagcaaggagtgcatcaacgccgcccccgacagccccagcaagcagctgcccgaccagatcagcttcttcagcggcaaccccagcgtggagatcgtgcacggcatcatgcacctgtacaagaccaacaagatgaccagcctgaaggaggacgtgagaagaagcgccatgctgtgcatcctgaccgtgcccgccgccatgaccagccacgacctgatgaagttcgtggcccccttcaacgaggtgatcgagcagatgaagatcatcagagacagcacccccaaccagtacatggtgctgatcaagttcagagcccaggccgacgccgacagcttctacatgacctgcaacggcagacagttcaacagcatcgaggacgacgtgtgccagctggtgtacgtggagagagccgaggtgctgaagagcgaggacggcgccagcctgcccgtgatggacctgaccgagctgcccaagtgcaccgtgtgcctggagagaatggacgagagcgtgaacggcatcctgaccaccctgtgcaaccacagcttccacagccagtgcctgcagagatgggacgacaccacctgccccgtgtgcagatactgccagacccccgagcccgtggaggagaacaagtgcttcgagtgcggcgtgcaggagaacctgtggatctgcctgatctgcggccacatcggctgcggcagatacgtgagcagacacgcctacaagcacttcgaggagacccagcacacctacgccatgcagctgaccaaccacagagtgtgggactacgccggcgacaactacgtgcacagactggtggccagcaagaccgacggcaagatcgtgcagtacgagtgcgagggcgacacctgccaggaggagaagatcgacgccctgcagctggagtacagctacctgctgaccagccagctggagagccagagaatctactgggagaacaagatcgtgagaatcgagaaggacaccgccgaggagatcaacaacatgaagaccaagttcaaggagaccatcgagaagtgcgacaacctggagcacaagctgaacgacctgctgaaggagaagcagagcgtggagagaaagtgcacccagctgaacaccaaggtggccaagctgaccaacgagctgaaggaggagcaggagatgaacaagtgcctgagagccaaccaggtgctgctgcagaacaagctgaaggaggaggagagagtgctgaaggagacctgcgaccagaaggacctgcagatcaccgagatccaggagcagctgagagacgtgatgttctacctggagacccagcagaagatcaaccacctgcccgccgagaccagacaggagatccaggagggccagatcaacatcgccatggccagcgccagcagccccgccagcagcggcggcagcggcaagctgcccagcagaaagggcagaagcaagagaggcaagtag

SEQ ID NO: 167811 - DNA, 1242 bp, Artificial Sequence
  derived and/or modified sequence
atgcacctgtacaagaccaacaagatgaccagcctgaaggaggacgtgagaagaagcgccatgctgtgcatcctgaccgtgcccgccgccatgaccagccacgacctgatgaagttcgtggcccccttcaacgaggtgatcgagcagatgaagatcatcagagacagcacccccaaccagtacatggtgctgatcaagttcagagcccagggcgccagcctgcccgtgatggacctgaccgagctgcccaagtgcaccgtgtgcctggagagaatggacgagagcgtgaacggcatcctgaccaccctgtgcaaccacagcttccacagccagtgcctgcagagatgggacgacaccacctgccccgtgtgcagatactgccagacccccgagcccgtggaggagaacaagtgcttcgagtgcggcgtgcaggagaacctgtggatctgcctgatctgcggccacatcggctgcggcagatacgtgagcagacacgcctacaagcacttcgaggagacccagcacacctacgccatgcagctgaccaaccacagagtgtgggactacgccggcgacaactacgtgcacagactggtggccagcaagaccgacggcaagatcgtgcagtacgagtgcgagggcgacacctgccaggaggagaagatcgacgccctgcagctggagtacagctacctgctgaccagccagctggagagccagagaatctactgggagaacaagatcgtgagaatcgagaaggacaccgccgaggagatcaacaacatgaagaccaagttcaaggagaccatcgagaagtgcgacaacctggagcacaagctgaacgacctgctgaaggagaagcagagcgtggagagaaagtgcacccagctgaacaccaaggtggccaagctgaccaacgagctgaaggaggagcaggagatgaacaagtgcctgagagccaaccaggtgctgctgcagaacaagctgaaggaggaggagagagtgctgaaggagacctgcgaccagaaggacctgcagatcaccgagatccaggagcagctgagagacgtgatgttctacctggagacccagcagaagatcaaccacctgcccgccgagaccagacaggagatccaggagggccagatcaacatcgccatggccagcgccagcagccccgccagcagcggcggcagcggcaagctgcccagcagaaagggcagaagcaagagaggcaagtag

SEQ ID NO: 167812 - protein, 520 aa, Artificial Sequence
  derived and/or modified sequence
MRNKKILKEDELLSETQQAAFHQIAMEPFEINVPKPKRRNGVNFSLAVVVIYLILLTAGAGLLVVQVLNLQARLRVLEMYFLNDTLAAEDSPSFSLLQSAHPGEHLAQGASRLQVLQAQLTWVRVSHEHLLQRVDNFTQNPGMFRIKGEQGAPGLQGHKGAMGMPGAPGPPGPPAEKGAKGAMGRDGATGPSGPQGPPGVKGEAGLQGPQGAPGKQGATGTPGPQGEKGSKGDGGLIGPKGETGTKGEKGDLGLPGSKGDRGMKGDAGVMGPPGAQGSKGDFGRPGPPGLAGFPGAKGDQGQPGLQGVPGPPGAVGHPGAKGEPGSAGSPGRAGLPGSPGSPGATGLKGSKGDTGLQGQQGRKGESGVPGPAGVKGEQGSPGLAGPKGAPGQAGQKGDQGVKGSSGEQGVKGEKGERGENSVSVRIVGSSNRGRAEVYYSGTWGTICDDEWQNSDAIVFCRMLGYSKGRALYKVGAGTGQIWLDNVQCRGTESTLWSCTKNSWGHHDCSHEEDAGVECSV

SEQ ID NO: 167813 - protein, 442 aa, Artificial Sequence
  derived and/or modified sequence
MYFLNDTLAAEDSPSFSLLQSAHPGEHLAQGASRLQVLQAQLTWVRVSHEHLLQRVDNFTQNPGMFRIKGEQGAPGLQGHKGAMGMPGAPGPPGPPAEKGAKGAMGRDGATGPSGPQGPPGVKGEAGLQGPQGAPGKQGATGTPGPQGEKGSKGDGGLIGPKGETGTKGEKGDLGLPGSKGDRGMKGDAGVMGPPGAQGSKGDFGRPGPPGLAGFPGAKGDQGQPGLQGVPGPPGAVGHPGAKGEPGSAGSPGRAGLPGSPGSPGATGLKGSKGDTGLQGQQGRKGESGVPGPAGVKGEQGSPGLAGPKGAPGQAGQKGDQGVKGSSGEQGVKGEKGERGENSVSVRIVGSSNRGRAEVYYSGTWGTICDDEWQNSDAIVFCRMLGYSKGRALYKVGAGTGQIWLDNVQCRGTESTLWSCTKNSWGHHDCSHEEDAGVECSV

SEQ ID NO: 167814 - DNA, 1563 bp, Artificial Sequence
  derived and/or modified sequence
atgagaaacaaaaagatcctgaaagaggatgagctgttgagcgagactcaacaagctgctttccatcaaatcgccatggaaccctttgaaatcaatgtccctaagcctaagcggcgcaatggtgtgaacttttccctggctgtggtagtcatttacctcatacttttgaccgcaggggccggcctgctcgtggtgcaggtgttgaacttgcaggctcggctaagagtgttggagatgtacttcttaaacgacacactggcagcagaggatagccctagttttagtcttctacagtcggcgcacccaggagagcacctggcacagggggcttcacggcttcaggtccttcaagcacagctgacctgggtgcgagtgagccatgagcacctgctgcagcgggtggataacttcactcagaaccccggaatgttccggataaagggcgagcagggcgccccaggattgcaggggcataagggcgccatgggtatgcccggtgctccaggaccgccaggccctcccgcagagaaaggcgcaaagggtgctatgggccgcgacggcgcaacaggaccaagcggcccacaaggtcctccgggcgtcaagggagaggccggactgcagggccctcagggcgctcctggaaagcagggcgctacaggaacccccggaccccagggagagaagggttctaaaggggacggaggccttattggcccgaaaggagaaacaggcactaaaggcgaaaagggtgatctgggcttacccggaagcaagggagatcgcggcatgaaaggggatgcaggagttatgggcccaccaggggcgcagggaagcaaaggggatttcgggagaccgggaccacctgggctggccggattccccggagctaagggtgaccaaggccagcctggactgcagggggtccctggacccccaggcgcagtgggccacccaggggcaaagggggagcccggcagcgccggcagtcccgggcgggccggtttgcccggaagtccggggtctccaggagcgaccggactaaagggatcgaagggggatactgggctgcagggccagcagggcagaaaaggtgagtctggggtgcccgggcccgcgggtgttaagggcgaacaagggtccccgggcctcgccggtcctaaaggggctcctggacaagctggccaaaaaggtgaccagggagtgaaaggctcttctggggaacagggcgtgaagggggagaaaggggaaaggggcgagaatagcgtgtccgtacggatcgttgggagtagcaacagagggcgggccgaggtttattacagcggcacatggggcaccatatgcgatgatgagtggcagaactctgacgcaattgtgttctgcaggatgttggggtactccaaaggccgggctctgtacaaggtcggcgcgggcacaggccagatttggctggacaatgtgcaatgcaggggcacggaatctacgctgtggtcttgcaccaaaaacagctggggccatcatgattgttcgcacgaggaggacgccggggtcgaatgctctgtgtag

SEQ ID NO: 167815 - DNA, 1563 bp, Artificial Sequence
  derived and/or modified sequence
atgaggaacaagaagatcctgaaggaggatgagctgctgtctgagacccagcaggccgccttccaccagatcgccatggagccctttgagatcaacgtgcccaagcccaagagaagaaatggagtgaacttcagcctggccgtggtggtgatctacctgatcctgctgacagctggggccggcctgctggtggtgcaggtgctgaacctgcaggcccggctgcgggtgctggagatgtacttcctgaatgacaccctggccgctgaggacagccccagcttcagcctgctgcagagcgcccaccctggagagcacctggcccagggcgccagccggctgcaggtgctgcaggcccagctgacctgggtgcgggtgtcccatgagcacctgctgcagagggtggacaacttcacccagaaccctggcatgttccgcatcaagggggagcagggcgcccctggcctgcagggccacaagggggccatgggcatgcctggggcccctggccccccaggccccccagctgagaagggggccaagggggccatgggcagagatggagccaccggccccagcggcccccagggccccccaggagtgaagggggaggccggcctgcagggcccccagggcgcccctgggaagcagggcgccaccggcaccccaggcccccagggcgagaagggcagcaaaggagatggcggcctgattggccccaagggggagaccggcaccaagggggagaagggggacctgggcctgcccggcagcaagggggaccggggcatgaagggagatgctggggtgatgggccccccaggggcccagggcagcaaaggagactttggccggcccggccccccaggcctggccggcttccctggggccaagggggaccagggccagcccggcctgcagggcgtgcccggccccccaggagctgtgggccaccctggggccaagggggagcccggcagcgctggcagccctggccgggccggcctgcccggcagccctggcagccctggggccaccggcctgaagggcagcaaaggagacaccggcctgcagggccagcagggcaggaaaggagagagcggcgtgcccggccctgctggggtgaagggggagcagggcagccctggcctggccggccccaagggggcccctggccaggccggccagaagggggaccagggcgtgaagggcagcagtggagagcagggcgtgaagggggagaagggggagagaggagaaaattctgtgtctgtgcgcatcgtgggcagcagcaacagaggccgggcagaggtgtactacagcggcacctggggcaccatctgtgatgatgagtggcagaacagtgatgccatcgtgttctgcaggatgctgggctacagcaagggccgggccctgtacaaggtgggcgccggcaccggccagatctggctggacaacgtgcagtgccggggcacagagagcaccctgtggagctgcaccaagaacagctggggccaccacgactgcagccatgaggaggatgctggggtggagtgcagcgtgtag

SEQ ID NO: 167816 - DNA, 1838 bp, Artificial Sequence
  derived and/or modified sequence
agagccaaagggaagtgctgcgaggtttacaaccagctgcagtggttcgatgggaaggatctttctccaagtggttcctcttgaggggagcatttctgctggctccaggactttggccatctataaagcttggcaatgagaaataagaaaattctcaaggaggacgagctcttgagtgagacccaacaagctgcttttcaccaaattgcaatggagcctttcgaaatcaatgttccaaagcccaagaggagaaatggggtgaacttctccctagctgtggtggtcatctacctgatcctgctcaccgctggcgctgggctgctggtggtccaagttctgaatctgcaggcgcggctccgggtcctggagatgtatttcctcaatgacactctggcggctgaggacagcccgtccttctccttgctgcagtcagcacaccctggagaacacctggctcagggtgcatcgaggctgcaagtcctgcaggcccaactcacctgggtccgcgtcagccatgagcacttgctgcagcgggtagacaacttcactcagaacccagggatgttcagaatcaaaggtgaacaaggcgccccaggtcttcaaggtcacaagggggccatgggcatgcctggtgcccctggcccgccgggaccacctgctgagaagggagccaagggggctatgggacgagatggagcaacaggcccctcgggaccccaaggcccaccgggagtcaagggagaggcgggcctccaaggaccccagggtgctccagggaagcaaggagccactggcaccccaggaccccaaggagagaagggcagcaaaggcgatgggggtctcattggcccaaaaggggaaactggaactaagggagagaaaggagacctgggtctcccaggaagcaaaggggacaggggcatgaaaggagatgcaggggtcatggggcctcctggagcccaggggagtaaaggtgacttcgggaggccaggcccaccaggtttggctggttttcctggagctaaaggagatcaaggacaacctggactgcagggtgttccgggccctcctggtgcagtgggacacccaggtgccaagggtgagcctggcagtgctggctcccctgggcgagcaggacttccagggagccccgggagtccaggagccacaggcctgaaaggaagcaaaggggacacaggacttcaaggacagcaaggaagaaaaggagaatcaggagttccaggccctgcaggtgtgaagggagaacaggggagcccagggctggcaggtcccaagggagcccctggacaagctggccagaagggagaccagggagtgaaaggatcttctggggagcaaggagtaaagggagaaaaaggtgaaagaggtgaaaactcagtgtccgtcaggattgtcggcagtagtaaccgaggccgggctgaagtttactacagtggtacctgggggacaatttgcgatgacgagtggcaaaattctgatgccattgtcttctgccgcatgctgggttactccaaaggaagggccctgtacaaagtgggagctggcactgggcagatctggctggataatgttcagtgtcggggcacggagagtaccctgtggagctgcaccaagaatagctggggccatcatgactgcagccacgaggaggacgcaggcgtggagtgcagcgtctgacccggaaaccctttcacttctctgctcccgaggtgtcctcgggctcatatgtgggaaggcagaggatctctgaggagttccctggggacaactgagcagcctctggagaggggccattaataaagctcaacatcattggc

SEQ ID NO: 167817 - DNA, 1843 bp, Artificial Sequence
  derived and/or modified sequence
ataaagcttggcaatgagaaataagaaaattctcaaggaggacgagctcttgagtgagacccaacaagctgcttttcaccaaattgcaatggagcctttcgaaatcaatggatgaggagtgtaaatttcacactgtaccctctagaagcacagtgcaacttgcatccctctttcctgccatcacctccagcctccctcattagaacaagcctccttcattccattatctgcactagaattaagttccaaagcccaagaggagaaatggggtgaacttctccctagctgtggtggtcatctacctgatcctgctcaccgctggcgctgggctgctggtggtccaagttctgaatctgcaggcgcggctccgggtcctggagatgtatttcctcaatgacactctggcggctgaggacagcccgtccttctccttgctgcagtcagcacaccctggagaacacctggctcagggtgcatcgaggctgcaagtcctgcaggcccaactcacctgggtccgcgtcagccatgagcacttgctgcagcgggtagacaacttcactcagaacccagggatgttcagaatcaaaggtgaacaaggcgccccaggtcttcaaggtcacaagggggccatgggcatgcctggtgcccctggcccgccgggaccacctgctgagaagggagccaagggggctatgggacgagatggagcaacaggcccctcgggaccccaaggcccaccgggagtcaagggagaggcgggcctccaaggaccccagggtgctccagggaagcaaggagccactggcaccccaggaccccaaggagagaagggcagcaaaggcgatgggggtctcattggcccaaaaggggaaactggaactaagggagagaaaggagacctgggtctcccaggaagcaaaggggacaggggcatgaaaggagatgcaggggtcatggggcctcctggagcccaggggagtaaaggtgacttcgggaggccaggcccaccaggtttggctggttttcctggagctaaaggagatcaaggacaacctggactgcagggtgttccgggccctcctggtgcagtgggacacccaggtgccaagggtgagcctggcagtgctggctcccctgggcgagcaggacttccagggagccccgggagtccaggagccacaggcctgaaaggaagcaaaggggacacaggacttcaaggacagcaaggaagaaaaggagaatcaggagttccaggccctgcaggtgtgaagggagaacaggggagcccagggctggcaggtcccaagggagcccctggacaagctggccagaagggagaccagggagtgaaaggatcttctggggagcaaggagtaaagggagaaaaaggtgaaagaggtgaaaactcagtgtccgtcaggattgtcggcagtagtaaccgaggccgggctgaagtttactacagtggtacctgggggacaatttgcgatgacgagtggcaaaattctgatgccattgtcttctgccgcatgctgggttactccaaaggaagggccctgtacaaagtgggagctggcactgggcagatctggctggataatgttcagtgtcggggcacggagagtaccctgtggagctgcaccaagaatagctggggccatcatgactgcagccacgaggaggacgcaggcgtggagtgcagcgtctgacccggaaaccctttcacttctctgctcccgaggtgtcctcgggctcatatgtgggaaggcagaggatctctgaggagttccctggggacaactgagcagcctctggagaggggccattaataaagctcaacatc

SEQ ID NO: 167818 - DNA, 1563 bp, Artificial Sequence
  derived and/or modified sequence
atgcggaacaagaagatcctgaaggaggacgagctgctgagcgagacccagcaggcagcattccatcagattgctatggagcctttcgagatcaatgtgcccaaacctaaacgaaggaacggagtcaacttttccttggccgtggtggttatttatcttatcctactgacagccggcgcgggcctgcttgttgttcaggtgctcaatctgcaggcacgcctcagagtgctggaaatgtattttttgaacgataccctcgctgctgaggactctcccagcttttctctccttcagtccgctcacccaggcgaacatttggcacagggagcctctagactacaagtccttcaagctcagcttacttgggtgcgggtgagtcacgaacatctattgcagcgagtggacaacttcacacaaaatccagggatgttcagaataaaaggtgagcaaggagccccaggtctccaggggcacaaaggggccatgggcatgcctggagctccaggaccaccgggtccgcccgcagagaagggcgctaagggcgcaatgggtcgagacggcgccaccgggccctccggtccgcagggccctcctggggttaaaggcgaagctggtctgcaaggaccccagggggctcctggcaagcagggggccaccggtacccctgggcctcaaggggagaaggggtcaaagggggacggcggacttatcggcccaaagggggagacaggtactaagggcgagaaaggagacctcggacttccaggctccaaaggcgatcgcgggatgaaaggtgacgcgggggtgatgggaccccctggcgcccaggggtccaaaggcgactttggccgccctggacctcccgggctagcagggttcccgggcgctaaaggcgaccagggccagccaggcctgcagggagtcccaggtcccccaggtgcagtaggccaccctggggcaaaaggagagcctgggagtgcagggtcgcctggccgtgcgggacttcctggttcgcccggctccccgggcgccaccggactcaagggctctaagggggatacagggcttcagggccagcaaggcagaaaaggcgaaagcggtgtccctggacccgccggagttaagggcgagcagggctcccccggccttgcaggacctaagggtgcccctggacaagcagggcagaagggcgatcagggcgtcaagggttcgtcaggagagcagggagttaaaggagagaaaggcgaacgtggcgagaacagcgtctcagttcgcatcgttggcagctctaatcgtggtcgcgccgaggtttactactccggcacctggggcaccatctgcgacgacgaatggcagaactctgatgcaatagtgttttgtcgaatgctgggatactccaagggacgtgccctttacaaggtgggcgctggcaccgggcagatctggctggacaacgtgcagtgcagaggaacggagagcacgctgtggtcctgtaccaaaaacagctggggccaccacgactgctcacatgaggaagacgccggggtggagtgctcagtgtag

SEQ ID NO: 167819 - DNA, 1563 bp, Artificial Sequence
  derived and/or modified sequence
atgagaaataagaaaatcctgaaagaagacgagctgttatccgagacccagcaggctgcctttcatcagattgccatggagccattcgaaattaacgtcccgaagccgaagcgcaggaacggcgtcaatttcagtctggctgtggtggtaatatatctcatactcttgaccgcgggagccggattgcttgttgtgcaggttcttaatcttcaagccaggttaagagtgttggagatgtacttcctgaacgatacactggctgccgaagattctccctccttcagcctgctgcagtcagcccatccgggagagcatctggcacagggtgcatcccggctccaggtgctgcaagcgcagctcacatgggtgcgcgtgagtcatgaacatcttttgcaaagggtggataactttacccagaaccccggaatgttccgaattaaaggtgagcagggcgcaccaggtctccaaggacacaaaggcgctatgggcatgcccggtgctccagggcctcccggtcctccggctgagaagggtgctaagggcgctatgggcagagatggggcaaccggtccctccgggccacagggacctcctggcgtgaagggtgaggccggactgcagggaccgcagggcgctccaggcaaacagggggctactggcacccccggaccacagggggagaaggggagtaaaggggatgggggactgatcggcccaaaaggcgagaccgggaccaagggagaaaagggggatttggggcttcctggcagcaagggtgaccggggaatgaagggggacgccggagttatgggcccaccaggggcacaggggtccaaaggggactttgggcgaccaggtccacctggcctggccggtttcccaggggcaaaaggggaccaggggcagcctggcctccagggcgtccccggtccgccaggtgctgtaggacacccgggagcaaaaggtgagcccggatcggctggcagtcctgggcgagctggtctgcccggttccccaggctcgccaggcgcaacaggccttaaggggtccaagggcgacaccggcttgcagggtcagcagggcaggaagggtgaaagtggagtgcctggaccggctggcgttaaaggcgaacaaggcagccccggactcgcaggaccaaaaggagctcccggacaggctggacaaaagggcgaccaaggagtcaaggggagctcgggcgagcagggtgtgaagggggagaagggagaaaggggagagaatagtgtgtccgtaagaatcgtgggatcatccaatagaggcagagccgaggtgtattactcaggaacctggggaactatttgcgacgacgagtggcagaactccgatgcaattgtgttttgccggatgctgggctactccaaggggcgtgctctctacaaggtgggtgccggtacaggacagatctggctggataacgtgcagtgtaggggaaccgagtccactctctggagctgcactaaaaatagctggggacaccacgactgctctcacgaagaggatgcaggcgttgaatgctcagtgtag

SEQ ID NO: 167820 - DNA, 1563 bp, Artificial Sequence
  derived and/or modified sequence
atgagaaacaagaagatcctgaaggaggacgagctgctgagcgagacccagcaggccgccttccaccagatcgccatggagcccttcgagatcaacgtgcccaagcccaagagaagaaacggcgtgaacttcagcctggccgtggtggtgatctacctgatcctgctgaccgccggcgccggcctgctggtggtgcaggtgctgaacctgcaggccagactgagagtgctggagatgtacttcctgaacgacaccctggccgccgaggacagccccagcttcagcctgctgcagagcgcccaccccggcgagcacctggcccagggcgccagcagactgcaggtgctgcaggcccagctgacctgggtgagagtgagccacgagcacctgctgcagagagtggacaacttcacccagaaccccggcatgttcagaatcaagggcgagcagggcgcccccggcctgcagggccacaagggcgccatgggcatgcccggcgcccccggcccccccggcccccccgccgagaagggcgccaagggcgccatgggcagagacggcgccaccggccccagcggcccccagggcccccccggcgtgaagggcgaggccggcctgcagggcccccagggcgcccccggcaagcagggcgccaccggcacccccggcccccagggcgagaagggcagcaagggcgacggcggcctgatcggccccaagggcgagaccggcaccaagggcgagaagggcgacctgggcctgcccggcagcaagggcgacagaggcatgaagggcgacgccggcgtgatgggcccccccggcgcccagggcagcaagggcgacttcggcagacccggcccccccggcctggccggcttccccggcgccaagggcgaccagggccagcccggcctgcagggcgtgcccggcccccccggcgccgtgggccaccccggcgccaagggcgagcccggcagcgccggcagccccggcagagccggcctgcccggcagccccggcagccccggcgccaccggcctgaagggcagcaagggcgacaccggcctgcagggccagcagggcagaaagggcgagagcggcgtgcccggccccgccggcgtgaagggcgagcagggcagccccggcctggccggccccaagggcgcccccggccaggccggccagaagggcgaccagggcgtgaagggcagcagcggcgagcagggcgtgaagggcgagaagggcgagagaggcgagaacagcgtgagcgtgagaatcgtgggcagcagcaacagaggcagagccgaggtgtactacagcggcacctggggcaccatctgcgacgacgagtggcagaacagcgacgccatcgtgttctgcagaatgctgggctacagcaagggcagagccctgtacaaggtgggcgccggcaccggccagatctggctggacaacgtgcagtgcagaggcaccgagagcaccctgtggagctgcaccaagaacagctggggccaccacgactgcagccacgaggaggacgccggcgtggagtgcagcgtgtag

SEQ ID NO: 167821 - protein, 1299 aa, Artificial Sequence
  derived and/or modified sequence
MSRSRASIHRGSIPAMSYAPFRDVRGPSMHRTQYVHSPYDRPGWNPRFCIISGNQLLMLDEDEIHPLLIRDRRSESSRNKLLRRTVSVPVEGRPHGEHEYHLGRSRRKSVPGGKQYSMEGAPAAPFRPSQGFLSRRLKSSIKRTKSQPKLDRTSSFRQILPRFRSADHDRARLMQSFKESHSHESLLSPSSAAEALELNLDEDSIIKPVHSSILGQEFCFEVTTSSGTKCFACRSAAERDKWIENLQRAVKPNKDNSRRVDNVLKLWIIEARELPPKKRYYCELCLDDMLYARTTSKPRSASGDTVFWGEHFEFNNLPAVRALRLHLYRDSDKKRKKDKAGYVGLVTVPVATLAGRHFTEQWYPVTLPTGSGGSGGMGSGGGGGSGGGSGGKGKGGCPAVRLKARYQTMSILPMELYKEFAEYVTNHYRMLCAVLEPALNVKGKEEVASALVHILQSTGKAKDFLSDMAMSEVDRFMEREHLIFRENTLATKAIEEYMRLIGQKYLKDAIGEFIRALYESEENCEVDPIKCTASSLAEHQANLRMCCELALCKVVNSHCVFPRELKEVFASWRLRCAERGREDIADRLISASLFLRFLCPAIMSPSLFGLMQEYPDEQTSRTLTLIAKVIQNLANFSKFTSKEDFLGFMNEFLELEWGSMQQFLYEISNLDTLTNSSSFEGYIDLGRELSTLHALLWEVLPQLSKEALLKLGPLPRLLNDISTALRNPNIQRQPSRQSERPRPQPVVLRGPSAEMQGYMMRDLNSSIDLQSFMARGLNSSMDMARLPSPTKEKPPPPPPGGGKDLFYVSRPPLARSSPAYCTSSSDITEPEQKMLSVNKSVSMLDLQGDGPGGRLNSSSVSNLAAVGDLLHSSQASLTAALGLRPAPAGRLSQGSGSSITAAGMRLSQMGVTTDGVPAQQLRIPLSFQNPLFHMAADGPGPPGGHGGGGGHGPPSSHHHHHHHHHHRGGEPPGDTFAPFHGYSKSEDLSSGVPKPPAASILHSHSYSDEFGPSGTDFTRRQLSLQDNLQHMLSPPQITIGPQRPAPSGPGGGSGGGSGGGGGGQPPPLQRGKSQQLTVSAAQKPRPSSGNLLQSPEPSYGPARPRQQSLSKEGSIGGSGGSGGGGGGGLKPSITKQHSQTPSTLNPTMPASERTVAWVSNMPHLSADIESAHIEREEYKLKEYSKSMDESRLDRVKEYEEEIHSLKERLHMSNRKLEEYERRLLSQEEQTSKILMQYQARLEQSEKRLRQQQAEKDSQIKSIIGRLMLVEEELRRDHPAMAEPLPEPKKRLLDAQLLIR

SEQ ID NO: 167822 - protein, 487 aa, Artificial Sequence
  derived and/or modified sequence
EDFLGFMNEFLELEWGSMQQFLYEISNLDTLTNSSSFEGYIDLGRELSTLHALLWEVLPQLSKEALLKLGPLPRLLNDISTALRNPNIQRQPSRQSERPRPQPVVLRGPSAEMQGYMMRDLNSSMDMARLPSPTKEKPPPPPPGGGKDLFYVSRPPLARSSPAYCTSSSDITEPEQKMLSVNKSVSMLDLQGDGPGGRLNSSSVSNLAAVGDLLHSSQASLTAALGLRPAPAGRLSQGSGSSITAAGMRLSQMGVTTDGVPAQQLRIPLSFQNPLFHMAADGPGPPGGHGGGGGHGPPSSHHHHHHHHHHRGGEPPGDTFAPFHGYSKSEDLSSGVPKPPAASILHSHSYSDEFGPSGTDFTRRQLSLQDNLQHMLSPPQITIGPQRPAPSGPGGGSGGGSGGGGGGQPPPLQRGKSQQLTVSAAQKPRPSSGNLLQSPEPSYGPARPRQQSLSKEGSIGGSGGSGGGGGGGLKPSITKQHSQTPST

SEQ ID NO: 167823 - protein, 1284 aa, Artificial Sequence
  derived and/or modified sequence
MGLRPPTPSPSGGSCSGSLPPPSRCQPLRRRCSSCCFPGEYHLGRSRRKSVPGGKQYSMEGAPAAPFRPSQGFLSRRLKSSIKRTKSQPKLDRTSSFRQILPRFRSADHDRARLMQSFKESHSHESLLSPSSAAEALELNLDEDSIIKPVHSSILGQEFCFEVTTSSGTKCFACRSAAERDKWIENLQRAVKPNKDNSRRVDNVLKLWIIEARELPPKKRYYCELCLDDMLYARTTSKPRSASGDTVFWGEHFEFNNLPAVRALRLHLYRDSDKKRKKDKAGYVGLVTVPVATLAGRHFTEQWYPVTLPTGSGGSGGMGSGGGGGSGGGSGGKGKGGCPAVRLKARYQTMSILPMELYKEFAEYVTNHYRMLCAVLEPALNVKGKEEVASALVHILQSTGKAKDFLSDMAMSEVDRFMEREHLIFRENTLATKAIEEYMRLIGQKYLKDAIGEFIRALYESEENCEVDPIKCTASSLAEHQANLRMCCELALCKVVNSHCVFPRELKEVFASWRLRCAERGREDIADRLISASLFLRFLCPAIMSPSLFGLMQEYPDEQTSRTLTLIAKVIQNLANFSKFTSKEDFLGFMNEFLELEWGSMQQFLYEISNLDTLTNSSSFEGYIDLGRELSTLHALLWEVLPQLSKEALLKLGPLPRLLNDISTALRNPNIQRQPSRQSERPRPQPVVLRGPSAEMQGYMMRDLNSSIDLQSFMARGLNSSMDMARLPSPTKEKPPPPPPGGGKDLFYVSRPPLARSSPAYCTSSSDITEPEQKMLSVNKSVSMLDLQGDGPGGRLNSSSVSNLAAVGDLLHSSQASLTAALGLRPAPAGRLSQGSGSSITAAGMRLSQMGVTTDGVPAQQLRIPLSFQNPLFHMAADGPGPPGGHGGGGGHGPPSSHHHHHHHHHHRGGEPPGDTFAPFHGYSKSEDLSSGVPKPPAASILHSHSYSDEFGPSGTDFTRRQLSLQDNLQHMLSPPQITIGPQRPAPSGPGGGSGGGSGGGGGGQPPPLQRGKSQQLTVSAAQKPRPSSGNLLQSPEPSYGPARPRQQSLSKEGSIGGSGGSGGGGGGGLKPSITKQHSQTPSTLNPTMPASERTVAWVSNMPHLSADIESAHIEREEYKLKEYSKSMDESRLDRVKEYEEEIHSLKERLHMSNRKLEEYERRLLSQEEQTSKILMQYQARLEQSEKRLRQQQAEKDSQIKSIIGRLMLVEEELRRDHPAMAEPLPEPKKRLLDAQERQLPPLGPTNPRVTLAPPWNGLAPPAPPPPPRLQITENGEFRNTADH

SEQ ID NO: 167824 - protein, 1343 aa, Artificial Sequence [sequence omitted]

SEQ ID NO: 167825 - protein, 1292 aa, Artificial Sequence
  derived and/or modified sequence
MSRSRASIHRGSIPAMSYAPFRDVRGPSMHRTQYVHSPYDRPGWNPRFCIISGNQLLMLDEDEIHPLLIRDRRSESSRNKLLRRTVSVPVEGRPHGEHEYHLGRSRRKSVPGGKQYSMEGAPAAPFRPSQGFLSRRLKSSIKRTKSQPKLDRTSSFRQILPRFRSADHDRARLMQSFKESHSHESLLSPSSAAEALELNLDEDSIIKPVHSSILGQEFCFEVTTSSGTKCFACRSAAERDKWIENLQRAVKPNKDNSRRVDNVLKLWIIEARELPPKKRYYCELCLDDMLYARTTSKPRSASGDTVFWGEHFEFNNLPAVRALRLHLYRDSDKKRKKDKAGYVGLVTVPVATLAGRHFTEQWYPVTLPTGSGGSGGMGSGGGGGSGGGSGGKGKGGCPAVRLKARYQTMSILPMELYKEFAEYVTNHYRMLCAVLEPALNVKGKEEVASALVHILQSTGKAKDFLSDMAMSEVDRFMEREHLIFRENTLATKAIEEYMRLIGQKYLKDAIGEFIRALYESEENCEVDPIKCTASSLAEHQANLRMCCELALCKVVNSHCVFPRELKEVFASWRLRCAERGREDIADRLISASLFLRFLCPAIMSPSLFGLMQEYPDEQTSRTLTLIAKVIQNLANFSKFTSKEDFLGFMNEFLELEWGSMQQFLYEISNLDTLTNSSSFEGYIDLGRELSTLHALLWEVLPQLSKEALLKLGPLPRLLNDISTALRNPNIQRQPSRQSERPRPQPVVLRGPSAEMQGYMMRDLNSSMDMARLPSPTKEKPPPPPPGGGKDLFYVSRPPLARSSPAYCTSSSDITEPEQKMLSVNKSVSMLDLQGDGPGGRLNSSSVSNLAAVGDLLHSSQASLTAALGLRPAPAGRLSQGSGSSITAAGMRLSQMGVTTDGVPAQQLRIPLSFQNPLFHMAADGPGPPGGHGGGGGHGPPSSHHHHHHHHHHRGGEPPGDTFAPFHGYSKSEDLSSGVPKPPAASILHSHSYSDEFGPSGTDFTRRQLSLQDNLQHMLSPPQITIGPQRPAPSGPGGGSGGGSGGGGGGQPPPLQRGKSQQLTVSAAQKPRPSSGNLLQSPEPSYGPARPRQQSLSKEGSIGGSGGSGGGGGGGLKPSITKQHSQTPSTLNPTMPASERTVAWVSNMPHLSADIESAHIEREEYKLKEYSKSMDESRLDREYEEEIHSLKERLHMSNRKLEEYERRLLSQEEQTSKILMQYQARLEQSEKRLRQQQAEKDSQIKSIIGRLMLVEEELRRDHPAMAEPLPEPKKRLLDAQRGSFPPWVQQTRV

SEQ ID NO: 167826 - DNA, 3900 bp, Artificial Sequence
  derived and/or modified sequence
atgagcagaagcagagccagcatccacagaggcagcatccccgccatgagctacgcccccttcagagacgtgagaggccccagcatgcacagaacccagtacgtgcacagcccctacgacagacccggctggaaccccagattctgcatcatcagcggcaaccagctgctgatgctggacgaggacgagatccaccccctgctgatcagagacagaagaagcgagagcagcagaaacaagctgctgagaagaaccgtgagcgtgcccgtggagggcagaccccacggcgagcacgagtaccacctgggcagaagcagaagaaagagcgtgcccggcggcaagcagtacagcatggagggcgcccccgccgcccccttcagacccagccagggcttcctgagcagaagactgaagagcagcatcaagagaaccaagagccagcccaagctggacagaaccagcagcttcagacagatcctgcccagattcagaagcgccgaccacgacagagccagactgatgcagagcttcaaggagagccacagccacgagagcctgctgagccccagcagcgccgccgaggccctggagctgaacctggacgaggacagcatcatcaagcccgtgcacagcagcatcctgggccaggagttctgcttcgaggtgaccaccagcagcggcaccaagtgcttcgcctgcagaagcgccgccgagagagacaagtggatcgagaacctgcagagagccgtgaagcccaacaaggacaacagcagaagagtggacaacgtgctgaagctgtggatcatcgaggccagagagctgccccccaagaagagatactactgcgagctgtgcctggacgacatgctgtacgccagaaccaccagcaagcccagaagcgccagcggcgacaccgtgttctggggcgagcacttcgagttcaacaacctgcccgccgtgagagccctgagactgcacctgtacagagacagcgacaagaagagaaagaaggacaaggccggctacgtgggcctggtgaccgtgcccgtggccaccctggccggcagacacttcaccgagcagtggtaccccgtgaccctgcccaccggcagcggcggcagcggcggcatgggcagcggcggcggcggcggcagcggcggcggcagcggcggcaagggcaagggcggctgccccgccgtgagactgaaggccagataccagaccatgagcatcctgcccatggagctgtacaaggagttcgccgagtacgtgaccaaccactacagaatgctgtgcgccgtgctggagcccgccctgaacgtgaagggcaaggaggaggtggccagcgccctggtgcacatcctgcagagcaccggcaaggccaaggacttcctgagcgacatggccatgagcgaggtggacagattcatggagagagagcacctgatcttcagagagaacaccctggccaccaaggccatcgaggagtacatgagactgatcggccagaagtacctgaaggacgccatcggcgagttcatcagagccctgtacgagagcgaggagaactgcgaggtggaccccatcaagtgcaccgccagcagcctggccgagcaccaggccaacctgagaatgtgctgcgagctggccctgtgcaaggtggtgaacagccactgcgtgttccccagagagctgaaggaggtgttcgccagctggagactgagatgcgccgagagaggcagagaggacatcgccgacagactgatcagcgccagcctgttcctgagattcctgtgccccgccatcatgagccccagcctgttcggcctgatgcaggagtaccccgacgagcagaccagcagaaccctgaccctgatcgccaaggtgatccagaacctggccaacttcagcaagttcaccagcaaggaggacttcctgggcttcatgaacgagttcctggagctggagtggggcagcatgcagcagttcctgtacgagatcagcaacctggacaccctgaccaacagcagcagcttcgagggctacatcgacctgggcagagagctgagcaccctgcacgccctgctgtgggaggtgctgccccagctgagcaaggaggccctgctgaagctgggccccctgcccagactgctgaacgacatcagcaccgccctgagaaaccccaacatccagagacagcccagcagacagagcgagagacccagaccccagcccgtggtgctgagaggccccagcgccgagatgcagggctacatgatgagagacctgaacagcagcatcgacctgcagagcttcatggccagaggcctgaacagcagcatggacatggccagactgcccagccccaccaaggagaagccccccccccccccccccggcggcggcaaggacctgttctacgtgagcagaccccccctggccagaagcagccccgcctactgcaccagcagcagcgacatcaccgagcccgagcagaagatgctgagcgtgaacaagagcgtgagcatgctggacctgcagggcgacggccccggcggcagactgaacagcagcagcgtgagcaacctggccgccgtgggcgacctgctgcacagcagccaggccagcctgaccgccgccctgggcctgagacccgcccccgccggcagactgagccagggcagcggcagcagcatcaccgccgccggcatgagactgagccagatgggcgtgaccaccgacggcgtgcccgcccagcagctgagaatccccctgagcttccagaaccccctgttccacatggccgccgacggccccggcccccccggcggccacggcggcggcggcggccacggcccccccagcagccaccaccaccaccaccaccaccaccaccacagaggcggcgagccccccggcgacaccttcgcccccttccacggctacagcaagagcgaggacctgagcagcggcgtgcccaagccccccgccgccagcatcctgcacagccacagctacagcgacgagttcggccccagcggcaccgacttcaccagaagacagctgagcctgcaggacaacctgcagcacatgctgagccccccccagatcaccatcggcccccagagacccgcccccagcggccccggcggcggcagcggcggcggcagcggcggcggcggcggcggccagcccccccccctgcagagaggcaagagccagcagctgaccgtgagcgccgcccagaagcccagacccagcagcggcaacctgctgcagagccccgagcccagctacggccccgccagacccagacagcagagcctgagcaaggagggcagcatcggcggcagcggcggcagcggcggcggcggcggcggcggcctgaagcccagcatcaccaagcagcacagccagacccccagcaccctgaaccccaccatgcccgccagcgagagaaccgtggcctgggtgagcaacatgccccacctgagcgccgacatcgagagcgcccacatcgagagagaggagtacaagctgaaggagtacagcaagagcatggacgagagcagactggacagagtgaaggagtacgaggaggagatccacagcctgaaggagagactgcacatgagcaacagaaagctggaggagtacgagagaagactgctgagccaggaggagcagaccagcaagatcctgatgcagtaccaggccagactggagcagagcgagaagagactgagacagcagcaggccgagaaggacagccagatcaagagcatcatcggcagactgatgctggtggaggaggagctgagaagagaccaccccgccatggccgagcccctgcccgagcccaagaagagactgctggacgcccagctgctgatcagatag

SEQ ID NO: 167827 - DNA, 1464 bp, Artificial Sequence
  derived and/or modified sequence
gaggacttcctgggcttcatgaacgagttcctggagctggagtggggcagcatgcagcagttcctgtacgagatcagcaacctggacaccctgaccaacagcagcagcttcgagggctacatcgacctgggcagagagctgagcaccctgcacgccctgctgtgggaggtgctgccccagctgagcaaggaggccctgctgaagctgggccccctgcccagactgctgaacgacatcagcaccgccctgagaaaccccaacatccagagacagcccagcagacagagcgagagacccagaccccagcccgtggtgctgagaggccccagcgccgagatgcagggctacatgatgagagacctgaacagcagcatggacatggccagactgcccagccccaccaaggagaagccccccccccccccccccggcggcggcaaggacctgttctacgtgagcagaccccccctggccagaagcagccccgcctactgcaccagcagcagcgacatcaccgagcccgagcagaagatgctgagcgtgaacaagagcgtgagcatgctggacctgcagggcgacggccccggcggcagactgaacagcagcagcgtgagcaacctggccgccgtgggcgacctgctgcacagcagccaggccagcctgaccgccgccctgggcctgagacccgcccccgccggcagactgagccagggcagcggcagcagcatcaccgccgccggcatgagactgagccagatgggcgtgaccaccgacggcgtgcccgcccagcagctgagaatccccctgagcttccagaaccccctgttccacatggccgccgacggccccggcccccccggcggccacggcggcggcggcggccacggcccccccagcagccaccaccaccaccaccaccaccaccaccacagaggcggcgagccccccggcgacaccttcgcccccttccacggctacagcaagagcgaggacctgagcagcggcgtgcccaagccccccgccgccagcatcctgcacagccacagctacagcgacgagttcggccccagcggcaccgacttcaccagaagacagctgagcctgcaggacaacctgcagcacatgctgagccccccccagatcaccatcggcccccagagacccgcccccagcggccccggcggcggcagcggcggcggcagcggcggcggcggcggcggccagcccccccccctgcagagaggcaagagccagcagctgaccgtgagcgccgcccagaagcccagacccagcagcggcaacctgctgcagagccccgagcccagctacggccccgccagacccagacagcagagcctgagcaaggagggcagcatcggcggcagcggcggcagcggcggcggcggcggcggcggcctgaagcccagcatcaccaagcagcacagccagacccccagcacctag

SEQ ID NO: 167828 - DNA, 3855 bp, Artificial Sequence
  derived and/or modified sequence
atgggcctgagaccccccacccccagccccagcggcggcagctgcagcggcagcctgcccccccccagcagatgccagcccctgagaagaagatgcagcagctgctgcttccccggcgagtaccacctgggcagaagcagaagaaagagcgtgcccggcggcaagcagtacagcatggagggcgcccccgccgcccccttcagacccagccagggcttcctgagcagaagactgaagagcagcatcaagagaaccaagagccagcccaagctggacagaaccagcagcttcagacagatcctgcccagattcagaagcgccgaccacgacagagccagactgatgcagagcttcaaggagagccacagccacgagagcctgctgagccccagcagcgccgccgaggccctggagctgaacctggacgaggacagcatcatcaagcccgtgcacagcagcatcctgggccaggagttctgcttcgaggtgaccaccagcagcggcaccaagtgcttcgcctgcagaagcgccgccgagagagacaagtggatcgagaacctgcagagagccgtgaagcccaacaaggacaacagcagaagagtggacaacgtgctgaagctgtggatcatcgaggccagagagctgccccccaagaagagatactactgcgagctgtgcctggacgacatgctgtacgccagaaccaccagcaagcccagaagcgccagcggcgacaccgtgttctggggcgagcacttcgagttcaacaacctgcccgccgtgagagccctgagactgcacctgtacagagacagcgacaagaagagaaagaaggacaaggccggctacgtgggcctggtgaccgtgcccgtggccaccctggccggcagacacttcaccgagcagtggtaccccgtgaccctgcccaccggcagcggcggcagcggcggcatgggcagcggcggcggcggcggcagcggcggcggcagcggcggcaagggcaagggcggctgccccgccgtgagactgaaggccagataccagaccatgagcatcctgcccatggagctgtacaaggagttcgccgagtacgtgaccaaccactacagaatgctgtgcgccgtgctggagcccgccctgaacgtgaagggcaaggaggaggtggccagcgccctggtgcacatcctgcagagcaccggcaaggccaaggacttcctgagcgacatggccatgagcgaggtggacagattcatggagagagagcacctgatcttcagagagaacaccctggccaccaaggccatcgaggagtacatgagactgatcggccagaagtacctgaaggacgccatcggcgagttcatcagagccctgtacgagagcgaggagaactgcgaggtggaccccatcaagtgcaccgccagcagcctggccgagcaccaggccaacctgagaatgtgctgcgagctggccctgtgcaaggtggtgaacagccactgcgtgttccccagagagctgaaggaggtgttcgccagctggagactgagatgcgccgagagaggcagagaggacatcgccgacagactgatcagcgccagcctgttcctgagattcctgtgccccgccatcatgagccccagcctgttcggcctgatgcaggagtaccccgacgagcagaccagcagaaccctgaccctgatcgccaaggtgatccagaacctggccaacttcagcaagttcaccagcaaggaggacttcctgggcttcatgaacgagttcctggagctggagtggggcagcatgcagcagttcctgtacgagatcagcaacctggacaccctgaccaacagcagcagcttcgagggctacatcgacctgggcagagagctgagcaccctgcacgccctgctgtgggaggtgctgccccagctgagcaaggaggccctgctgaagctgggccccctgcccagactgctgaacgacatcagcaccgccctgagaaaccccaacatccagagacagcccagcagacagagcgagagacccagaccccagcccgtggtgctgagaggccccagcgccgagatgcagggctacatgatgagagacctgaacagcagcatcgacctgcagagcttcatggccagaggcctgaacagcagcatggacatggccagactgcccagccccaccaaggagaagccccccccccccccccccggcggcggcaaggacctgttctacgtgagcagaccccccctggccagaagcagccccgcctactgcaccagcagcagcgacatcaccgagcccgagcagaagatgctgagcgtgaacaagagcgtgagcatgctggacctgcagggcgacggccccggcggcagactgaacagcagcagcgtgagcaacctggccgccgtgggcgacctgctgcacagcagccaggccagcctgaccgccgccctgggcctgagacccgcccccgccggcagactgagccagggcagcggcagcagcatcaccgccgccggcatgagactgagccagatgggcgtgaccaccgacggcgtgcccgcccagcagctgagaatccccctgagcttccagaaccccctgttccacatggccgccgacggccccggcccccccggcggccacggcggcggcggcggccacggcccccccagcagccaccaccaccaccaccaccaccaccaccacagaggcggcgagccccccggcgacaccttcgcccccttccacggctacagcaagagcgaggacctgagcagcggcgtgcccaagccccccgccgccagcatcctgcacagccacagctacagcgacgagttcggccccagcggcaccgacttcaccagaagacagctgagcctgcaggacaacctgcagcacatgctgagccccccccagatcaccatcggcccccagagacccgcccccagcggccccggcggcggcagcggcggcggcagcggcggcggcggcggcggccagcccccccccctgcagagaggcaagagccagcagctgaccgtgagcgccgcccagaagcccagacccagcagcggcaacctgctgcagagccccgagcccagctacggccccgccagacccagacagcagagcctgagcaaggagggcagcatcggcggcagcggcggcagcggcggcggcggcggcggcggcctgaagcccagcatcaccaagcagcacagccagacccccagcaccctgaaccccaccatgcccgccagcgagagaaccgtggcctgggtgagcaacatgccccacctgagcgccgacatcgagagcgcccacatcgagagagaggagtacaagctgaaggagtacagcaagagcatggacgagagcagactggacagagtgaaggagtacgaggaggagatccacagcctgaaggagagactgcacatgagcaacagaaagctggaggagtacgagagaagactgctgagccaggaggagcagaccagcaagatcctgatgcagtaccaggccagactggagcagagcgagaagagactgagacagcagcaggccgagaaggacagccagatcaagagcatcatcggcagactgatgctggtggaggaggagctgagaagagaccaccccgccatggccgagcccctgcccgagcccaagaagagactgctggacgcccaggagagacagctgccccccctgggccccaccaaccccagagtgaccctggcccccccctggaacggcctggccccccccgcccccccccccccccccagactgcagatcaccgagaacggcgagttcagaaacaccgccgaccactag

SEQ ID NO: 167829 - DNA, 4032 bp, Artificial Sequence
  derived and/or modified sequence
atgagcagaagcagagccagcatccacagaggcagcatccccgccatgagctacgcccccttcagagacgtgagaggccccagcatgcacagaacccagtacgtgcacagcccctacgacagacccggctggaaccccagattctgcatcatcagcggcaaccagctgctgatgctggacgaggacgagatccaccccctgctgatcagagacagaagaagcgagagcagcagaaacaagctgctgagaagaaccgtgagcgtgcccgtggagggcagaccccacggcgagcacgagtaccacctgggcagaagcagaagaaagagcgtgcccggcggcaagcagtacagcatggagggcgcccccgccgcccccttcagacccagccagggcttcctgagcagaagactgaagagcagcatcaagagaaccaagagccagcccaagctggacagaaccagcagcttcagacagatcctgcccagattcagaagcgccgaccacgacagagccagactgatgcagagcttcaaggagagccacagccacgagagcctgctgagccccagcagcgccgccgaggccctggagctgaacctggacgaggacagcatcatcaagcccgtgcacagcagcatcctgggccaggagttctgcttcgaggtgaccaccagcagcggcaccaagtgcttcgcctgcagaagcgccgccgagagagacaagtggatcgagaacctgcagagagccgtgaagcccaacaaggacaacagcagaagagtggacaacgtgctgaagctgtggatcatcgaggccagagagctgccccccaagaagagatactactgcgagctgtgcctggacgacatgctgtacgccagaaccaccagcaagcccagaagcgccagcggcgacaccgtgttctggggcgagcacttcgagttcaacaacctgcccgccgtgagagccctgagactgcacctgtacagagacagcgacaagaagagaaagaaggacaaggccggctacgtgggcctggtgaccgtgcccgtggccaccctggccggcagacacttcaccgagcagtggtaccccgtgaccctgcccaccggcagcggcggcagcggcggcatgggcagcggcggcggcggcggcagcggcggcggcagcggcggcaagggcaagggcggctgccccgccgtgagactgaaggccagataccagaccatgagcatcctgcccatggagctgtacaaggagttcgccgagtacgtgaccaaccactacagaatgctgtgcgccgtgctggagcccgccctgaacgtgaagggcaaggaggaggtggccagcgccctggtgcacatcctgcagagcaccggcaaggccaaggacttcctgagcgacatggccatgagcgaggtggacagattcatggagagagagcacctgatcttcagagagaacaccctggccaccaaggccatcgaggagtacatgagactgatcggccagaagtacctgaaggacgccatcggcgagttcatcagagccctgtacgagagcgaggagaactgcgaggtggaccccatcaagtgcaccgccagcagcctggccgagcaccaggccaacctgagaatgtgctgcgagctggccctgtgcaaggtggtgaacagccactgcgtgttccccagagagctgaaggaggtgttcgccagctggagactgagatgcgccgagagaggcagagaggacatcgccgacagactgatcagcgccagcctgttcctgagattcctgtgccccgccatcatgagccccagcctgttcggcctgatgcaggagtaccccgacgagcagaccagcagaaccctgaccctgatcgccaaggtgatccagaacctggccaacttcagcaagttcaccagcaaggaggacttcctgggcttcatgaacgagttcctggagctggagtggggcagcatgcagcagttcctgtacgagatcagcaacctggacaccctgaccaacagcagcagcttcgagggctacatcgacctgggcagagagctgagcaccctgcacgccctgctgtgggaggtgctgccccagctgagcaaggaggccctgctgaagctgggccccctgcccagactgctgaacgacatcagcaccgccctgagaaaccccaacatccagagacagcccagcagacagagcgagagacccagaccccagcccgtggtgctgagaggccccagcgccgagatgcagggctacatgatgagagacctgaacagcagcatcgacctgcagagcttcatggccagaggcctgaacagcagcatggacatggccagactgcccagccccaccaaggagaagccccccccccccccccccggcggcggcaaggacctgttctacgtgagcagaccccccctggccagaagcagccccgcctactgcaccagcagcagcgacatcaccgagcccgagcagaagatgctgagcgtgaacaagagcgtgagcatgctggacctgcagggcgacggccccggcggcagactgaacagcagcagcgtgagcaacctggccgccgtgggcgacctgctgcacagcagccaggccagcctgaccgccgccctgggcctgagacccgcccccgccggcagactgagccagggcagcggcagcagcatcaccgccgccggcatgagactgagccagatgggcgtgaccaccgacggcgtgcccgcccagcagctgagaatccccctgagcttccagaaccccctgttccacatggccgccgacggccccggcccccccggcggccacggcggcggcggcggccacggcccccccagcagccaccaccaccaccaccaccaccaccaccacagaggcggcgagccccccggcgacaccttcgcccccttccacggctacagcaagagcgaggacctgagcagcggcgtgcccaagccccccgccgccagcatcctgcacagccacagctacagcgacgagttcggccccagcggcaccgacttcaccagaagacagctgagcctgcaggacaacctgcagcacatgctgagccccccccagatcaccatcggcccccagagacccgcccccagcggccccggcggcggcagcggcggcggcagcggcggcggcggcggcggccagcccccccccctgcagagaggcaagagccagcagctgaccgtgagcgccgcccagaagcccagacccagcagcggcaacctgctgcagagccccgagcccagctacggccccgccagacccagacagcagagcctgagcaaggagggcagcatcggcggcagcggcggcagcggcggcggcggcggcggcggcctgaagcccagcatcaccaagcagcacagccagacccccagcaccctgaaccccaccatgcccgccagcgagagaaccgtggcctgggtgagcaacatgccccacctgagcgccgacatcgagagcgcccacatcgagagagaggagtacaagctgaaggagtacagcaagagcatggacgagagcagactggacagagtgaaggagtacgaggaggagatccacagcctgaaggagagactgcacatgagcaacagaaagctggaggagtacgagagaagactgctgagccaggaggagcagaccagcaagatcctgatgcagtaccaggccagactggagcagagcgagaagagactgagacagcagcaggccgagaaggacagccagatcaagagcatcatcggcagactgatgctggtggaggaggagctgagaagagaccaccccgccatggccgagcccctgcccgagcccaagaagagactgctggacgcccaggagagacagctgccccccctgggccccaccaaccccagagtgaccctggcccccccctggaacggcctggccccccccgcccccccccccccccccagactgcagatcaccgagaacggcgagttcagaaacaccgccgaccactag

SEQ ID NO: 167830 - DNA, 3879 bp, Artificial Sequence
  derived and/or modified sequence
atgagcagaagcagagccagcatccacagaggcagcatccccgccatgagctacgcccccttcagagacgtgagaggccccagcatgcacagaacccagtacgtgcacagcccctacgacagacccggctggaaccccagattctgcatcatcagcggcaaccagctgctgatgctggacgaggacgagatccaccccctgctgatcagagacagaagaagcgagagcagcagaaacaagctgctgagaagaaccgtgagcgtgcccgtggagggcagaccccacggcgagcacgagtaccacctgggcagaagcagaagaaagagcgtgcccggcggcaagcagtacagcatggagggcgcccccgccgcccccttcagacccagccagggcttcctgagcagaagactgaagagcagcatcaagagaaccaagagccagcccaagctggacagaaccagcagcttcagacagatcctgcccagattcagaagcgccgaccacgacagagccagactgatgcagagcttcaaggagagccacagccacgagagcctgctgagccccagcagcgccgccgaggccctggagctgaacctggacgaggacagcatcatcaagcccgtgcacagcagcatcctgggccaggagttctgcttcgaggtgaccaccagcagcggcaccaagtgcttcgcctgcagaagcgccgccgagagagacaagtggatcgagaacctgcagagagccgtgaagcccaacaaggacaacagcagaagagtggacaacgtgctgaagctgtggatcatcgaggccagagagctgccccccaagaagagatactactgcgagctgtgcctggacgacatgctgtacgccagaaccaccagcaagcccagaagcgccagcggcgacaccgtgttctggggcgagcacttcgagttcaacaacctgcccgccgtgagagccctgagactgcacctgtacagagacagcgacaagaagagaaagaaggacaaggccggctacgtgggcctggtgaccgtgcccgtggccaccctggccggcagacacttcaccgagcagtggtaccccgtgaccctgcccaccggcagcggcggcagcggcggcatgggcagcggcggcggcggcggcagcggcggcggcagcggcggcaagggcaagggcggctgccccgccgtgagactgaaggccagataccagaccatgagcatcctgcccatggagctgtacaaggagttcgccgagtacgtgaccaaccactacagaatgctgtgcgccgtgctggagcccgccctgaacgtgaagggcaaggaggaggtggccagcgccctggtgcacatcctgcagagcaccggcaaggccaaggacttcctgagcgacatggccatgagcgaggtggacagattcatggagagagagcacctgatcttcagagagaacaccctggccaccaaggccatcgaggagtacatgagactgatcggccagaagtacctgaaggacgccatcggcgagttcatcagagccctgtacgagagcgaggagaactgcgaggtggaccccatcaagtgcaccgccagcagcctggccgagcaccaggccaacctgagaatgtgctgcgagctggccctgtgcaaggtggtgaacagccactgcgtgttccccagagagctgaaggaggtgttcgccagctggagactgagatgcgccgagagaggcagagaggacatcgccgacagactgatcagcgccagcctgttcctgagattcctgtgccccgccatcatgagccccagcctgttcggcctgatgcaggagtaccccgacgagcagaccagcagaaccctgaccctgatcgccaaggtgatccagaacctggccaacttcagcaagttcaccagcaaggaggacttcctgggcttcatgaacgagttcctggagctggagtggggcagcatgcagcagttcctgtacgagatcagcaacctggacaccctgaccaacagcagcagcttcgagggctacatcgacctgggcagagagctgagcaccctgcacgccctgctgtgggaggtgctgccccagctgagcaaggaggccctgctgaagctgggccccctgcccagactgctgaacgacatcagcaccgccctgagaaaccccaacatccagagacagcccagcagacagagcgagagacccagaccccagcccgtggtgctgagaggccccagcgccgagatgcagggctacatgatgagagacctgaacagcagcatggacatggccagactgcccagccccaccaaggagaagccccccccccccccccccggcggcggcaaggacctgttctacgtgagcagaccccccctggccagaagcagccccgcctactgcaccagcagcagcgacatcaccgagcccgagcagaagatgctgagcgtgaacaagagcgtgagcatgctggacctgcagggcgacggccccggcggcagactgaacagcagcagcgtgagcaacctggccgccgtgggcgacctgctgcacagcagccaggccagcctgaccgccgccctgggcctgagacccgcccccgccggcagactgagccagggcagcggcagcagcatcaccgccgccggcatgagactgagccagatgggcgtgaccaccgacggcgtgcccgcccagcagctgagaatccccctgagcttccagaaccccctgttccacatggccgccgacggccccggcccccccggcggccacggcggcggcggcggccacggcccccccagcagccaccaccaccaccaccaccaccaccaccacagaggcggcgagccccccggcgacaccttcgcccccttccacggctacagcaagagcgaggacctgagcagcggcgtgcccaagccccccgccgccagcatcctgcacagccacagctacagcgacgagttcggccccagcggcaccgacttcaccagaagacagctgagcctgcaggacaacctgcagcacatgctgagccccccccagatcaccatcggcccccagagacccgcccccagcggccccggcggcggcagcggcggcggcagcggcggcggcggcggcggccagcccccccccctgcagagaggcaagagccagcagctgaccgtgagcgccgcccagaagcccagacccagcagcggcaacctgctgcagagccccgagcccagctacggccccgccagacccagacagcagagcctgagcaaggagggcagcatcggcggcagcggcggcagcggcggcggcggcggcggcggcctgaagcccagcatcaccaagcagcacagccagacccccagcaccctgaaccccaccatgcccgccagcgagagaaccgtggcctgggtgagcaacatgccccacctgagcgccgacatcgagagcgcccacatcgagagagaggagtacaagctgaaggagtacagcaagagcatggacgagagcagactggacagagagtacgaggaggagatccacagcctgaaggagagactgcacatgagcaacagaaagctggaggagtacgagagaagactgctgagccaggaggagcagaccagcaagatcctgatgcagtaccaggccagactggagcagagcgagaagagactgagacagcagcaggccgagaaggacagccagatcaagagcatcatcggcagactgatgctggtggaggaggagctgagaagagaccaccccgccatggccgagcccctgcccgagcccaagaagagactgctggacgcccagagaggcagcttccccccctgggtgcagcagaccagagtgtag

SEQ ID NO: 167831 - DNA, 3900 bp, Artificial Sequence
  derived and/or modified sequence
atgtccaggtctcgcgcatccattcacaggggcagcatacccgcgatgagttacgctccttttagggacgtccggggaccaagcatgcacagaacccaatacgttcattcaccttacgaccgtcccggatggaacccgcgtttctgcattatatccggtaaccagctgttgatgctggacgaagacgaaatccatccgctacttattcgcgacaggcgaagtgaatcctcaaggaataagctgttgcgaaggacggtgtcagtacccgtggagggccgcccccatggcgaacacgaatatcacctcggacgctccaggcgcaaatcagtgccaggcggtaagcagtactcaatggagggggcaccagcagctccttttaggcccagccagggcttcctcagtcggcgcttgaagtctagtataaagaggacaaaatcacaacccaagctggatcggacgagctcatttcggcagattttgcccaggtttaggtcggcagatcatgatagagcccggctgatgcaatccttcaaagaatctcactcccacgagtccctgctgtctcctagcagcgctgctgaggccttggagttaaatctcgacgaagacagtataattaagcctgtacactcctccatcttaggccaagagttttgtttcgaggtgacgacatcctccggcacaaaatgcttcgcttgtcgcagtgctgccgagcgagataagtggatagaaaatttacaaagggccgttaagccgaacaaggacaacagccggcgtgtggacaacgttctcaagctgtggattatcgaggcccgggagttgcctcccaaaaaaaggtactattgcgagttatgcctggacgatatgctctatgcccgcacaacaagcaaacctaggagcgcctcaggcgacaccgttttttggggcgaacacttcgagtttaataatctcccggccgtccgggcgcttcgtctccacctgtatagggactccgacaagaagcgcaagaaagacaaggccggatacgtgggtctggtgactgttccggtagccacgctagctgggcgtcattttacggagcagtggtacccagtcacccttcccacaggctccggcggttccggaggcatgggctccggcggcggtggcgggtcaggaggcggtagtggcgggaagggtaagggaggctgcccggccgttcggttgaaagcacgttaccagaccatgtccatcctacctatggagctgtacaaggagtttgccgagtatgtgactaatcactacagaatgctgtgtgcggtgctggagcccgccctcaacgtgaagggcaaagaggaggttgctagcgcgcttgtacacattctccaatctaccggcaaggccaaagactttctatccgatatggccatgagtgaagtggaccgctttatggaaagggaacatctgatcttccgggaaaatacgttggctactaaggccatcgaagagtacatgaggctgatcggccagaaatacctcaaggatgctattggggagtttatacgggcgttatatgaaagcgaggagaactgtgaggtggacccgatcaagtgcacagcaagtagtttggcagagcaccaagccaatctaaggatgtgctgtgaactcgcgctgtgtaaggtggtcaacagccattgcgtgttcccaagagagctcaaagaggttttcgcatcatggcgacttagatgcgctgaacgaggccgagaggatattgcagaccggctgatctcagcctctctgttccttaggtttctctgtcctgctattatgtctccctccctatttgggctgatgcaagagtatcccgacgagcaaacgtctcggaccctgaccctgattgccaaggttattcaaaaccttgctaatttcagtaagttcactagtaaagaagacttcttgggctttatgaatgaatttctggagctggagtggggatctatgcagcagttcctttacgagatctctaatcttgatactctgaccaattctagttcattcgaagggtatatcgatctggggcgagagctgtcaaccctacacgctcttctttgggaagtgctgccccaactctcgaaggaagccctactcaagttgggtccactgcccagactactcaacgacatttctactgctttgaggaacccaaacatccaacgccagccatcacggcaaagtgagaggcctagaccacagcctgtcgtgttgagaggacctagcgccgaaatgcagggatacatgatgagagacctgaattcatcaatagacctgcagtcatttatggccagggggttaaattcttctatggacatggctcgcttaccctcgccaaccaaagagaagccacccccccctcccccgggggggggcaaggacctgttctatgtttcccggcctccccttgcccggagctcaccagcctactgcacctctagctccgacatcactgagcctgagcagaagatgttaagtgtgaataagtctgtgtcgatgctagacttacagggcgatggacctggagggagactgaattcttcttctgtatcgaatttggccgccgtcggcgacctgctccattccagccaggccagtctgacggctgccctggggctgagacccgcccctgccgggcggctgagccaggggagcggatccagtatcacagcagcaggaatgcgcctcagtcaaatgggggtgacgactgacggggtgccggcccagcagttgagaatcccattaagctttcagaacccactctttcatatggccgccgacggtcctggacctcccggggggcatggggggggaggcggccatggccccccatcctcccaccatcaccaccatcatcaccaccatcatcgaggaggggagcctcctggtgacacctttgcaccttttcatgggtattctaaatctgaagatctgtcttcgggtgtccctaaacctccggccgcctccattctccactcccactcatacagcgatgagttcggtcccagcggcacagatttcacccgtcgtcagctaagcctgcaagacaatctccagcatatgctgtcaccacctcagattacaatcggccctcagagacccgcacctagcggcccaggtggagggtcaggcggcgggagcggcggtggcggggggggccagcctcccccccttcagaggggcaagtcgcagcagctcactgtttctgctgcacaaaaacccaggccctcttccggtaacctgctgcagagcccggagccatcttacggacccgctagaccaaggcagcaatcattgtctaaggagggctcaatcggggggtctgggggctcaggtggagggggaggtggagggttgaaaccttcaatcacaaagcagcactctcaaactccttccaccctgaatccgactatgcctgcgtcagagaggaccgtcgcgtgggtgtcaaatatgccccacctatcagctgacattgagagcgctcacatcgagcgggaggaatataaactgaaggagtattccaagtctatggacgagagtcgtttagaccgggtcaaagagtatgaggaagagatccacagtctgaaggagcgtcttcacatgtctaatcgaaagctagaagaatatgagcgccggctgttgagccaggaagaacagacctcaaaaatcctgatgcaatatcaagcccgacttgagcagtcagagaagcgtctccgacagcagcaggcagaaaaagactcccagatcaaatccattattgggaggctgatgctggtggaggaggagctccgccgcgatcatccagccatggctgagccgttacctgagcccaagaaaaggttactggacgctcagttattaatccggtag

SEQ ID NO: 167832 - DNA, 1464 bp, Artificial Sequence
  derived and/or modified sequence
gaggacttcttgggttttatgaatgaattcctggaattggagtggggaagcatgcagcagtttctctacgaaatttctaatttggacactttgaccaactcttcgtcgttcgaaggctatatcgatctggggcgggagctaagtaccctgcacgctctactttgggaagtgctgcctcagttatcgaaggaggccctgctgaagctaggacccctcccacggttgctcaatgatatctctaccgcactgaggaatccaaatattcagaggcagcccagtagacagagcgagaggcctcggccacagcccgtcgtgctgagaggcccgagtgccgaaatgcaaggatatatgatgagagacctgaactcatcgatggacatggcgcggctgccgagtccaacaaaggagaagcccccgcctcccccaccgggaggcggcaaagatttattttatgtgagtaggccacccctggccaggagttcacccgcatactgtacctcgtctagcgatataacggagcccgaacaaaagatgttaagcgtgaacaaatccgtttccatgctggatctgcaaggcgatggtcccgggggccgtctcaattcaagctcagttagcaatttggcagccgtgggcgacctcttgcactccagtcaagctagtctgacagctgccctgggattgcggccagcaccagctggtagactaagccaggggtctgggtctagtattacggcggctggcatgaggctgagccaaatgggagtcacaaccgatggggtccctgcgcagcaactaagaatacccctctcgttccagaacccacttttccatatggcagcagacgggccgggcccccccggtggacacggcggcggcggagggcacggacctccgagcagccatcatcaccatcaccatcatcatcaccaccggggcggagagcctccaggagacacgttcgccccctttcacggttactcaaagtccgaggatctgagtagcggcgttccaaagccccccgcagcctctatcctccattcccattcatattcagacgagtttgggcccagtggcacagactttacccggcgccagctgtccctgcaggacaacctccagcatatgctaagccctccccaaatcacgatcggtccacagcggcctgcaccgagtggccctggcgggggctccggtggtggctcgggcgggggaggggggggacagccccctcctctccagcggggcaaatctcaacagctaaccgtgtccgcagcccagaagccccgaccatcctcaggcaatttactgcagagcccggagccaagctacggtccagccagaccgaggcagcagtcactgtccaaggaggggagtattggcggatccggcggaagcggagggggaggcgggggtgggctaaaaccttccattacaaagcagcactcccagacgccatccacctag

SEQ ID NO: 167833 - DNA, 3900 bp, Artificial Sequence
  derived and/or modified sequence
atgagtcgctcaagggcctcgattcatcgcggctctattcccgccatgtcttatgcacccttccgcgacgtgcgaggaccatccatgcaccgaacgcagtacgttcactccccctatgaccggcctgggtggaatccccgcttttgtattatctctggtaatcagctgctgatgcttgacgaggatgaaattcacccacttttgataagagacaggcgatctgaaagctctcggaataaattactcaggcgcactgtctccgttccagtcgagggtagaccccacggcgaacacgaataccacctcggtcggagtcgtaggaaaagcgtccccggaggcaaacagtattctatggagggagctccagcagccccttttcggccctcccaaggctttctctccaggcgcctcaagtcttcaatcaagcggaccaagagccaaccaaaattagatcgaacaagctcatttcgccaaatccttcctcggtttcgatcagccgatcacgaccgggcccgtctgatgcagtcatttaaggaaagccattctcatgagtcgcttctttccccatccagtgctgctgaggccctagagttgaacttagatgaagactctataatcaaacccgtccatagtagtattcttggtcaggagttttgctttgaggttaccacgtcttcaggaaccaagtgtttcgcttgcagaagtgccgccgagcgggacaaatggatagagaatctccaaagagctgttaagcccaacaaggacaattcgagaagggtggataacgtacttaagctttggatcattgaggcccgggaactcccgcccaagaaacgatactactgcgaactttgtttggatgatatgttgtatgcccgcactacttctaaaccccgctctgcatccggagataccgtgttctggggagaacatttcgagttcaataacctcccagctgttcgggctctccgtctgcacctgtacagagatagcgataagaaaaggaagaaagataaggccggctacgtggggctggtgaccgtcccagttgccaccttagcggggagacactttactgaacagtggtatcctgtgacacttcctaccggctccgggggctcaggtggcatggggtccgggggtggtggtggaagcggcggaggctctggcgggaaagggaagggagggtgccctgccgttcgcttgaaggccagataccagaccatgtcaatccttcctatggagctttataaagaattcgccgaatatgtgactaatcattaccgaatgctgtgtgctgtgctcgaacctgctttgaatgtcaaaggaaaagaagaggtcgcctcggctctggtacatatcctccagtctacgggcaaagcaaaagacttcctgtccgatatggctatgtctgaggttgaccggtttatggagcgcgaacaccttatcttccgcgaaaatacactcgcgaccaaggctatcgaggagtatatgcgacttatcgggcagaagtatttgaaagatgctattggagagttcatcagggcgctctatgagtccgaggaaaactgtgaggtggaccctataaaatgcactgcaagctctctggctgaacatcaggctaatctgaggatgtgctgcgaactggctctgtgtaaggtggtgaactctcactgtgtcttcccgcgggagctgaaagaggtctttgctagctggaggctgcgctgcgcagagcgcggcagggaagatatcgctgaccgactgatctccgctagcctcttcctacgctttctctgccccgccataatgtccccgtcactgttcggactgatgcaagaatatccagatgagcagacctctagaactttgaccttgatagcaaaagtgatccagaaccttgctaacttcagcaagttcacatccaaagaagatttcctgggattcatgaatgagtttcttgaacttgagtggggttctatgcagcaatttctgtacgaaatatccaatctcgacactcttaccaacagctcatcgtttgagggctacatagatctaggaagggaactgtcaactctgcacgccttgctttgggaagttttgccacagctgagcaaggaagcacttttgaaactgggacccctcccaagattacttaacgacatttccactgctctaaggaacccaaacattcagcggcagccatcccgccagtctgaaaggccccgtccccagccagtggtgttgaggggaccttcagccgagatgcagggttacatgatgcgagatttgaacagttccatcgatctacaaagttttatggcgcgcgggcttaattcttctatggatatggcacggctcccaagccctactaaagaaaaaccacctcctccaccccctggcggcgggaaagacctgttctacgtcagccggccacctcttgctcgctcttcacccgcttactgtacttcttctagcgacataactgagccagagcagaaaatgcttagcgtaaataagtcggtaagtatgctcgatctacagggagacggaccaggcggcagacttaatagcagctctgtcagcaacctggcagcggtgggagacctgttacatagcagccaggcctccctcactgctgccctgggactgcgccccgcgcccgctgggaggctaagtcagggtagtggctcaagcattacagctgctggcatgcgactgtcccagatgggggtcaccaccgatggtgtgcccgctcagcaactgcggatccccttgtcttttcagaaccctctattccacatggcagcggacggtcctggacctccagggggccacggagggggcggcgggcatggccctccatcttcccatcatcatcaccaccaccaccatcatcacagagggggggagccccctggggataccttcgctccattccatggctacagtaagtccgaggacctgagctctggcgtaccaaaaccacccgcagcgtcaattctgcattcgcatagctactctgacgagtttggcccctcaggaactgatttcacaaggcgacagctaagcctccaggacaacttgcaacacatgttgagcccaccgcagattactattggcccccagaggcccgccccctcgggacctggcggcggcagcggaggaggctccggaggaggcggcgggggccagccacctccccttcagcgaggtaagagccagcagctgacagtgtccgctgcacagaagcctagaccatcttccggtaaccttctgcaatcaccggaaccgagttacggcccggcgagaccaagacagcagagtctctcaaaggaaggctcgattgggggcagcgggggctctggcggaggcggtggcggggggctgaagccgtctattaccaaacaacattcccaaacacctagcacgcttaatcccactatgcctgctagcgaacgaacagttgcctgggtgtcaaacatgccacacctgagcgcagatatcgaatccgcccacatcgagcgggaagagtacaagttgaaagaatatagcaaaagtatggacgagtcccggttggatagggtgaaggagtacgaagaggagatccacagtctgaaagagcgtctgcacatgtcaaatcgcaaattagaagaatatgagaggcggctgctcagtcaagaggaacagacaagtaagatcctgatgcaataccaggcccgcctagaacagagcgagaaacgcttgagacagcagcaagcagaaaaagattcacagatcaagagcatcattgggaggctgatgttagtagaagaagagttgaggcgtgaccaccccgccatggcagagccccttccagagcctaagaagagattgctcgatgcacagctgcttattcggtag

SEQ ID NO: 167834 - DNA, 3855 bp, Artificial Sequence
  derived and/or modified sequence
atgggcttacggccacccaccccttctccctccggaggtagctgctctgggtcactgcctcccccgagccgctgccagcccctgaggcgccgttgcagctcttgttgctttccaggcgaatatcatctgggtcgttccaggaggaaaagtgtgccgggaggcaagcaatattctatggagggagccccggcagcacctttcagaccttcgcaagggtttctctccaggaggctgaagagttcaatcaagcggacaaaaagccagcccaagctggatcggacaagctcctttcgccagatcttgccgcgctttagaagtgccgaccacgatagggctagactaatgcagtctttcaaggagagccactcacatgagagcctgctgtctccctcttccgccgctgaggccctcgagctgaacctcgacgaggactctattatcaagcccgttcactcttccattcttggacaggagttctgtttcgaggtcaccacttcctctggtaccaaatgcttcgcttgcaggagcgccgcagaacgggataaatggattgaaaaccttcagagagcggtgaagccaaacaaggacaactctcgccgcgtagataatgtcctgaagctgtggatcatcgaggctcgggaattaccccctaagaagcgttactattgtgagctctgtctggatgatatgctgtatgcaagaactaccagtaagccgcgcagtgccagcggcgatacggttttctggggcgaacactttgagttcaacaatctgcccgctgtacgtgctctgcggcttcacctatacagggattctgacaaaaaaaggaaaaaggataaggccggatacgtggggctggtcacggtgcccgtcgcaacattagccggtcgccattttaccgagcaatggtaccccgttaccttgccgaccgggagcggggggtctggggggatgggttccggaggtggaggggggagtggcggaggatccggcggcaaagggaaaggcggctgcccagctgtgcgcttgaaggccagatatcagactatgagcattctgccaatggaattgtataaggagtttgcagagtacgttaccaatcattatcggatgttgtgcgcggtgctcgaacctgcattgaacgtgaaaggcaaagaggaagtggcctcagcgctagtacacattctgcaaagcacgggaaaggctaaagattttttgagcgacatggccatgagtgaggtcgatcggtttatggagagggagcacttaatcttcagagagaacaccctggcaacaaaggcgattgaggaatatatgcggcttatcggccagaagtatttgaaggacgctattggggagtttattcgcgccctgtatgaatccgaggaaaactgtgaagttgacccaattaaatgtaccgcatcctcattagcagagcaccaggcaaacttgcggatgtgttgtgaactggctctgtgtaaggtcgtaaattcccactgtgtattccctagggaactaaaagaggtattcgctagctggcgactgcggtgcgcagagcgcgggcgggaggacatcgccgatagattgatttctgcgtccttgtttctgcgatttctctgccctgcaattatgtccccatcattgtttggactcatgcaggaatacccggatgaacagactagccgcacactaactctcatagcaaaggtcattcagaatctggcaaatttttccaaattcacgtcaaaagaggatttcttgggattcatgaatgagttccttgaactcgaatggggcagcatgcaacaattcctgtacgagatcagcaacctggatactctcacaaacagtagcagtttcgagggatacatagatctgggacgtgaactgagtaccctgcacgcactgctgtgggaggtactgccacagttgagcaaagaggctctactaaaactgggacctctgcctaggttgctcaacgacattagtacagctttgaggaatccaaatatccagcggcagccatcccgacaatcagaacggccaagaccccaacctgttgtcctgagagggccttcagccgagatgcaggggtacatgatgcgcgatctgaatagtagtatagatctgcaatcttttatggcccggggactcaactcatctatggacatggctcgcctacccagtccgactaaagagaagcccccacctccaccacctgggggcggtaaagatcttttttacgtttctagaccgcccctcgcacggtcttccccagcgtattgcactagctccagtgatataactgaacctgagcagaaaatgctgtctgtcaataagtccgtgtctatgctcgacctgcagggagacggcccgggcggtaggttaaattcctcctcagtaagtaatctcgctgctgtgggcgacctcctacactcttcccaggccagcttaaccgcggcactggggctgaggcccgcccctgcagggcgcctgagccagggtagcggatcttcaatcaccgccgctggcatgagactttctcagatgggcgtaacgactgatggcgtgcctgcgcagcagctgcgtattccgctcagctttcaaaacccactgtttcacatggcagcagatgggcctggaccaccaggagggcacggtggtggaggaggacacgggcctccttccagtcaccaccatcaccaccatcaccaccaccaccgggggggagaaccccccggtgacacatttgcacccttccatggttacagtaagagtgaggacttgagctcgggcgtgcccaagcctcccgcagcgagtatactgcactcacatagttactctgatgaattcggccccagtggtacggactttaccaggcgtcagctgagcctccaggacaacctgcagcatatgctgtccccacctcagattacaatcgggccccaacgccctgcccctagcgggcctgggggaggctctggtggaggatccgggggaggtggcggggggcagcctcccccactccagcggggcaagagtcagcagctgacagtatctgcggcccagaagccaaggccctcatcaggcaacctgctccagtctcccgagccaagctatggacccgcccgccctcggcagcagagcctgagtaaagaagggtctattggcgggtctggcggctcagggggagggggggggggcgggcttaaaccaagtatcaccaaacagcacagccagactcccagtactttgaacccgacaatgcctgcaagtgagcggaccgttgcttgggtgagcaacatgccgcacctgtcagcagacattgagagcgcacacattgagcgtgaggagtacaagttaaaagagtatagcaagtctatggacgaatctcggctggatcgggtcaaggaatacgaagaagagatccactctttgaaggagcggctgcatatgtctaaccgcaaactggaagaatacgagcggagactgctgagtcaggaagaacagacaagcaagatcctgatgcagtaccaggcacggcttgaacagtctgagaagcggttgcgccaacagcaggcagagaaagactctcagattaagtccatcatcggcaggctgatgctggtggaggaagaactgaggcgtgaccacccggccatggcagaaccattgcccgagcctaagaaacgcctgttggacgctcaggaacggcaactgccgcctctggggccgactaatccccgagtgacactggcccctccctggaacggcttggcgcctcccgctccacctccaccacctcgcctgcagatcacagaaaacggagagtttcgcaacaccgcggaccactag

SEQ ID NO: 167835 - DNA, 4032 bp, Artificial Sequence
  derived and/or modified sequence
atgagcagatcccgggccagcatacacaggggttccatcccagccatgtcatacgccccctttcgggacgtgcggggccccagtatgcatcggacccagtacgttcactctccatacgaccgcccaggatggaacccaagattctgtattattagtggaaaccagctgctgatgctggatgaagatgagattcacccacttttgatccgtgatcggcggtcagagtcaagcagaaacaaactgctgaggagaaccgtaagtgtgcccgtggaaggacgtccccatggagaacacgaatatcaccttgggcgctcgcggcggaagagcgttcccggaggaaaacagtattccatggagggggctcctgctgcccccttccgacccagccaggggttcctctcacgaagactcaaatcctccattaaaaggaccaaaagccagccaaaactggatcggacaagctccttccgtcagatcctgccccgtttcagatccgccgatcacgatcgggcaagactgatgcaatccttcaaagagtcccatagccatgagagcctactgtccccatcatccgccgcagaagctctggagttgaatctggacgaggactcaattattaagccagtgcattctagcattcttggccaggagttttgctttgaggtcactacctcaagcgggactaaatgcttcgcttgcagatccgcagccgagcgggataaatggatcgaaaatctccagagggccgtgaagccaaataaagataacagccgccgggtggataacgtcttgaaactgtggattattgaggcccgcgaactgcctccaaagaagcggtactactgtgaactgtgtttggacgacatgctctacgcaaggactacgtctaagcccagaagcgctagtggcgatactgtgttctggggcgagcatttcgagttcaataatctccccgctgtccgcgccctgagacttcacctttaccgcgatagtgacaagaaacgcaagaaggacaaggctggctacgtggggcttgtgacagttcccgtcgcaacccttgcagggcggcacttcactgaacagtggtatccggtgactttgcctaccggcagtgggggatcaggaggcatgggtagtggtggcggtggaggatctggtggcgggtctggtgggaaaggaaaagggggctgccctgccgtcaggctgaaagccaggtaccaaactatgagtatcctacccatggagctgtataaagaattcgctgaatatgtgacaaatcactatagaatgttatgcgccgtgttggagccggccttaaacgtgaagggcaaggaggaggtggcatcagcactggtacacatcctgcaatctacaggaaaggccaaagactttctcagtgacatggctatgtccgaggtggaccgctttatggagcgggaacacttgatctttcgggagaatacacttgccacgaaagccattgaggaatacatgaggctgattgggcaaaaatacctgaaggatgctatcggtgagtttatcagagcattatacgagtccgaggaaaactgtgaggtcgatccaatcaagtgcactgcttcgagtcttgcagaacatcaggccaatctgaggatgtgctgtgagcttgcactgtgcaaagtggtgaactcgcattgtgtcttcccccgcgagctgaaggaggtctttgcctcatggaggctacgctgcgcagagcgtggcagggaagacatcgctgaccggctgattagtgcatcactcttcctccgatttctctgccctgctatcatgtcaccctcattgtttggcctgatgcaggagtacccagacgaacagacaagcagaacactgacacttattgccaaggtaatccaaaacctcgccaatttcagcaaatttacaagcaaggaagactttttgggtttcatgaatgagttcctcgaactggaatggggctcaatgcagcagttcctttatgagattagtaacctggacaccctgacgaatagtagcagcttcgagggctacatagatctaggccgcgagctaagcacgctgcacgccctgctctgggaggtcttgcctcaactctccaaagaagcactactgaaattgggtcctcttccccgcctactgaatgacatctccactgctcttcgtaaccccaatattcagcgccaacctagccgtcagtctgagcgaccacgaccgcaacctgtggttctgcgtggccccagtgcagaaatgcaaggatacatgatgagggatctcaactcctcaatagatctgcagtcttttatggcgaggggcttgaactccagtatggacatggcaagactcccctctcctacaaaggaaaagccaccgcccccccctccgggcgggggaaaagacctcttctatgtgtcccgacctcctctggcacgatcttcccccgcttactgtacttcatcgtcagatatcacagagcccgagcaaaaaatgctgtctgttaacaagtcagtttctatgctggatctgcagggggacggcccgggagggcgcctgaattcctctagcgtgtctaacctggccgctgtcggggacctgctccattcgtctcaggcatccctgactgccgctctcggcctccgcccagctcctgccggacgacttagtcagggaagcggctcaagtataacagcggcagggatgaggctctctcagatgggggtaaccactgacggcgtgcccgcgcagcagctgaggatccctctatcctttcagaatccactgttccacatggctgctgacgggccagggcctccaggtggtcacggtgggggcggcggacacgggccaccatcctcccaccaccaccaccatcatcaccaccatcatagaggtggtgagcccccaggcgacacctttgccccattccacggttattctaaaagcgaggacctctccagcggtgtgccgaagccaccggctgcatcgatccttcactcacattcgtattcagatgagtttggcccaagtggcactgattttacgagaagacagctgagcctgcaagacaatctacagcacatgctgagcccaccacagataaccatcggcccccaacggccagctcccagcgggcctggcgggggcagcggcggcgggtctggaggggggggcggaggtcagccacctccacttcagagaggcaagtcccaacagctgacagtgtccgccgcacaaaagccgcgaccatcaagtgggaaccttcttcaatcaccagagccctcttacggcccagcacgcccaaggcaacagagcctatcaaaagaggggtcaatcgggggaagcggcggtagcggaggagggggcggaggcggactaaaaccgagcataaccaagcagcatagccagaccccaagcacccttaatcctactatgcccgcgtcagaaaggactgtcgcctgggtctccaacatgccacacctcagcgccgatatcgagtccgctcacatcgagagagaagagtataagttaaaagagtattccaagtcaatggacgaatctagattggacagagtgaaggaatacgaggaggagatccatagcctcaaggagcgactacatatgtcaaataggaagctcgaagaatacgagcgccggttactctctcaagaagaacaaacatccaagattcttatgcaataccaagccaggctggaacagtccgagaagcgattgcggcaacagcaggccgagaaggatagccaaattaagtccattattgggcgcttgatgctggttgaagaagagttgcgcagggaccacccagcaatggctgagcccctacctgagcccaaaaaacgcctattggacgcacaggaaagacaactacccccattgggaccgaccaatccaagagtcacacttgctccaccctggaacggactcgcaccaccagccccacctccccccccgcgtttgcaaatcactgagaatggagaattccgtaatacagccgaccactag

SEQ ID NO: 167836 - DNA, 3879 bp, Artificial Sequence
  derived and/or modified sequence
atgagccggtctagagcctcaatccacaggggttccatcccagccatgtcttatgccccattcagagacgtgcgcggaccgagtatgcaccgaacacaatatgttcactccccctatgatcgtcccggctggaatccgagattttgtattatttcaggaaaccaactgctgatgctggatgaggacgaaattcaccctctgctaataagggatcgccggtcagagtccagtcggaataagctgctccggcggaccgtcagcgtccccgtcgagggtcgcccacacggggaacacgagtaccatctgggacgcagcaggcggaaaagcgtgccaggcggcaaacagtacagtatggaaggggcaccagccgcccctttcaggcccagccagggcttcctttcgcggcggctcaagtcttcaatcaaacgaactaaaagccagccaaagttggaccgcacatcaagctttagacaaatcctgcctagatttaggtcagctgaccacgaccgggcgaggttaatgcaaagttttaaggagagtcattcacacgagtccctcttgtccccctcctcggccgcagaggcactggagctaaatttggacgaggattctatcattaagcccgtgcattcctccatcttgggtcaggagttctgtttcgaagtgactacgtccagcggtacgaaatgttttgcctgccgctccgccgctgaaagggacaaatggatagagaatctgcagagggccgtgaagcccaacaaagataattcccgacgggttgataatgtgctaaagttgtggatcattgaggcaagggaactgccaccgaagaaacgttactactgtgagctttgtttggatgatatgctgtacgcccgcacgactagcaaaccacgcagtgcttccggtgacaccgtcttctggggagaacatttcgagttcaataatttgccggccgtcagagccctccgcctgcatctgtatcgcgactcagacaagaagaggaagaaggacaaggccgggtatgtcggcctggtgactgtgcctgttgctaccctggctgggcggcatttcactgagcagtggtatcctgtaactctgcctacaggatctgggggctctggcggtatggggtctgggggtgggggtggcagtggagggggtagtggaggcaaagggaagggcggttgcccagccgttcgactcaaggccaggtaccaaacaatgtccatcctgcctatggagctctacaaggaattcgcagagtatgtaactaaccattacaggatgctgtgcgctgtgttggagcctgccctgaacgtgaaaggtaaggaagaggtcgcatctgcgctggtccacatcctgcaaagtacaggcaaggccaaggactttctctcggacatggcgatgagtgaagtggaccgttttatggagcgggagcatttgattttcagagagaatacactggctaccaaagccatcgaggagtacatgcgacttataggccagaagtacctgaaagacgcgataggcgaatttataagggcactgtatgaaagcgaggagaattgtgaggtggacccaattaagtgtactgccagtagccttgctgagcatcaagccaatctgagaatgtgttgtgaattagctttgtgtaaggtcgtgaatagccactgtgtgttcccacgggagctgaaagaagtcttcgccagttggagactacggtgcgcggaacgcggtagagaggatattgctgaccgattgatctctgcttcactgttcctccggtttctttgccccgccatcatgtccccgtccctcttcggccttatgcaagagtacccggacgaacagacctcccgcaccctgaccttgattgccaaagtgatccagaacctcgcgaacttcagcaagttcacctctaaagaagacttcctggggttcatgaacgaatttttagagttggagtggggctctatgcagcagttcctgtacgaaatttccaacttggacacgcttaccaattccagctcctttgagggatacatcgacctgggcagggagctatccacgttacacgcactactctgggaagtgcttccccagctgagcaaggaggctctgctgaagcttggcccactgccccgtctgctgaatgacatttccaccgccctccgaaatccgaacattcagaggcaacccagcaggcagtccgagcgccctagaccgcagcccgtggtgctgcggggccctagtgctgaaatgcagggatatatgatgagagacctaaattcaagcatggacatggcccgtctgccgtctccaactaaggaaaaacctcctccaccaccacctgggggcgggaaggatctgttctatgtgagccgcccgcctctcgccagatctagccctgcatattgcacaagtagctcagacatcactgaaccagagcaaaaaatgctttctgtgaataagagtgtgtcaatgttagatctgcagggcgacggaccaggcggccggttgaattctagcagcgtcagcaacctcgccgccgtcggagatctgctacatagtagtcaggcaagcttaaccgctgcattgggcctgagaccggcacccgcaggtcgccttagccagggctccggatctagcatcacggccgcaggcatgagattgagccaaatgggagtgacaactgatggggtgcctgcacagcaattgcgtattcccctcagctttcagaaccccctgtttcacatggcagccgacggccccggtcctccggggggacacggaggcggaggtggtcatggcccccccagctcgcatcaccatcatcaccaccatcatcaccatagaggcggagagcctccaggggatacatttgcacctttccatggctactccaaaagtgaagaccttagcagtggcgtgcccaaaccacctgccgcctccattctacacagccatagctactcagatgagttcgggccatcaggcacagactttactcgcagacagctgagtttgcaggacaatctccagcacatgctaagtccgcctcagataacaatcggtccacaacggcccgcgccatctgggcctggtggcggctccggcggtgggtccggaggaggtggcgggggacagccaccacctcttcagcgggggaaatcccagcagctcactgtctcagccgctcagaagcctaggccaagtagcggcaatctcctgcagtcccctgaaccctcatatggcccagctcgcccccgacagcagtcactaagcaaggaaggtagtatcgggggtagcggtggaagtggcggcggcgggggtggcggcttgaagcctagtatcaccaaacagcatagccagacgccctctaccctgaaccccactatgcccgcaagcgaacgtaccgtggcttgggtgtccaatatgccacacctgtctgccgatatagaaagtgctcacatcgaaagggaagaatataaactgaaggaatattctaaatcgatggatgaaagccgactggaccgagagtatgaagaagagattcatagcttaaaggaaagacttcacatgtcaaatcgaaagctggaggagtacgaacggcgcctgcttagtcaggaggagcagacttccaaaattctgatgcaataccaggccagactagagcaatctgagaagaggctgcgacagcagcaggcagagaaagattcccagataaagagcatcatcgggcgactcatgttggtggaagaagaactgcgcagagaccaccctgcaatggccgaacccctgcccgagccgaagaagcggttgcttgatgcccagcggggctcgtttcccccatgggtgcagcagaccagggtgtag

SEQ ID NO: 167837 - DNA, 4032 bp, Artificial Sequence
  derived and/or modified sequence
atgagccggtcacgtgctagcatccaccgcgggagtattccagccatgtcatatgcacccttcagggatgtgcggggtcctagcatgcatagaacacagtacgttcactcgccatatgatcgtccagggtggaacccaagattctgcatcatatcaggaaatcagctcctgatgttggacgaagacgagatccaccccctgcttatccgtgatagacggtccgagtcttcgagaaacaagctgctgcgacgaaccgtctctgtccctgtggaaggcaggcctcatggtgaacatgagtatcacttgggccggagccgtagaaagtctgttcctggagggaagcagtattctatggaaggcgcgccagccgccccttttaggccgtcccagggctttctcagcagaaggcttaagtcctctataaagaggaccaagtcgcagcccaaactggaccggacctccagctttcgacaaatccttcccagattcagatctgccgaccacgatcgggctcgactgatgcagtcattcaaggaatctcattcccacgaatcgctgctgtctccatctagcgctgccgaggcattggaattaaatcttgacgaggattcaattattaaacctgtccatagttctattctggggcaagaattttgcttcgaagtgactacttcctccggaacaaaatgctttgcttgtcgatcagcggctgaacgcgacaagtggatagagaacctccagcgggctgttaaacccaacaaggataactctcgccgggtagataatgtgctgaagctgtggatcattgaagcacgggagctgccaccgaagaagcgatactactgcgaactgtgcctggacgacatgctgtacgcccggacaacttctaagccccgcagtgctagtggtgacaccgttttctggggtgagcatttcgagttcaataatctccctgctgtaagagcgctgaggttgcatctctaccgggactctgataaaaaaaggaagaaggacaaagctggatacgttggacttgttactgtcccagtcgccaccctcgccggcagacatttcaccgaacagtggtatcctgttacattaccaactggtagcggcggttccggcggaatgggcagcggtggcggtggtggcagtggtggtggctctggcggcaaaggaaagggcgggtgtccagccgtccggctgaaagcgcgttatcagacgatgagtattctgcctatggaactatacaaggaattcgctgaatacgtgacaaatcactatcgaatgctctgcgcagtcctggaacctgccctcaatgtgaaggggaaggaagaagtggcatccgccttggttcacatcctgcagagtaccggaaaggctaaagatttcctctccgacatggccatgtccgaggtggacaggttcatggagagagagcacctcatttttcgcgaaaacacattagcaacaaaagccattgaagagtacatgagattaatcggacaaaaatatttaaaggacgccattggtgaattcatccgggccttgtacgagtccgaggaaaattgcgaagtggaccccatcaagtgtactgcaagctctctcgccgagcaccaggccaacctgaggatgtgctgtgaacttgctctctgtaaggtggtcaattcccattgcgtttttccacgcgaactgaaagaagtctttgcgtcctggcgcctgagatgtgcagaacgcggaagggaagatatcgctgatcggctgattagcgcatccctattcctgaggtttctatgcccagctattatgagtcctagcctcttcggacttatgcaggaataccctgatgaacaaacatcaagaaccctgactctgatcgcgaaggtgattcagaatctggctaatttcagcaagtttactagtaaggaagactttctgggattcatgaacgagtttctggaacttgagtggggcagcatgcagcaatttctgtatgagatcagcaatttggacactcttacaaattcttcatccttcgagggctacattgatcttggccgagagctctctactttacatgccctgttgtgggaagtcttgccccagcttagtaaggaagccttgctgaaacttgggccactccccaggctgctcaatgacattagcacggctctgagaaatccaaatattcaaagacagccttctaggcagagtgaaagaccacgccctcagcccgtggtgctgcgcggccccagcgccgagatgcaaggatatatgatgagggacctcaattcctctatcgatctccagagttttatggctcgtgggctgaattcctccatggacatggcacgattaccttcaccaacgaaggagaaaccaccacctccccctcccggtggtggaaaggatctattctacgtgagccgcccacccctggccaggagctcacccgcatattgcacctcatcgtctgacattactgaaccagaacagaagatgttgtccgtgaataagagcgtgagtatgctggatcttcagggcgatggccctggaggtcgacttaacagttcatctgtttccaatctcgcagctgtcggagacctgcttcatagcagtcaggcctcactgaccgctgcactcggactgaggccggctccagctggacgactctcgcaaggatctggatcgtccatcacggccgccgggatgcgcttgtctcagatgggtgtgactaccgacggggtacctgcccagcagctcaggattcctctgtccttccaaaaccccctgtttcacatggcagccgatggccctggcccgcctggagggcacggcggtgggggaggtcacggtccaccctcctcgcaccaccaccaccaccaccatcaccaccataggggcggggagccgcccggggatacctttgctccattccacggatactcaaagtcggaagatttatcttctggcgtcccaaagccacctgcagccagcattctgcacagtcactcctatagcgacgaattcggtccctctggaacagactttactaggagacagctgagcctacaagacaatctgcagcacatgctgagtcccccccagatcacaattggtccacagcgtccggctcctagcggcccagggggcggcagtggggggggatctggcggcggcggcggaggccaaccccctccgctgcagagaggaaagagccaacagctcacggtgagcgcagcacagaagcctcgcccctccagtggaaatctcctccagtcgcctgagccatcctacggacctgcccgacccaggcagcagtcactgagtaaggagggtagtatcggcggaagtggcggatctggcggcggaggtggtgggggcctgaaacctagtataacaaaacagcactcccaaactccttccacactgaaccccacgatgcccgctagtgagcgcacagtcgcctgggttagtaacatgccacatctgagtgccgacatcgagagcgcacacatcgaacgcgaagagtacaaactcaaagagtattctaaatcgatggatgagtcaagactagacagagtcaaagagtacgaggaggaaatccactcactgaaggagcggctgcacatgtcaaaccgtaaacttgaggaatatgaacgaaggctgctctcccaggaggaacagacttcaaagattcttatgcagtatcaggcgaggcttgagcagagcgagaaacggctgcgacagcagcaggcagagaaagactcccagatcaagagcattataggcaggctgatgttggtggaggaggagcttcggcgggatcaccctgctatggccgagcctctccctgagcccaaaaagaggctcttggatgctcaagaacgccagttgccaccactagggccgaccaacccaagagtcactctcgcccccccatggaatggactggctccaccagctccccctcctcctccgagattgcagattacagagaacggagaattccgaaacaccgccgatcactag

SEQ ID NO: 167838 - DNA, 3900 bp, Artificial Sequence
  derived and/or modified sequence
atgtcaaggtcacgcgcctcaatccaccggggcagtattccagctatgagctatgccccatttcgggacgttcgcggaccgtcgatgcatcggacccagtatgtccattctccttacgaccgccccgggtggaacccaaggttctgcatcatctcaggtaaccagctactcatgctcgatgaggatgagatccacccattgttaatccgggatagacgctcagaatcctccaggaataagctcctgaggcgtaccgtgtccgtgcccgttgagggtagaccacacggagagcacgagtaccatctggggcgtagccgacggaagagcgtcccgggggggaaacagtacagcatggaaggcgcccccgcagcccctttcagaccatctcaaggattcctttccaggcgcctaaagtccagcattaaaagaaccaagtcccagcctaagctggaccgaacatcatcctttaggcaaatcctgccaagatttaggtcggctgatcacgatagggcgcgccttatgcaaagttttaaagaatcccactcgcatgagtccctgttaagcccctcttccgcagctgaggctctagaactgaacctcgatgaagatagcataattaagcccgtgcatagcagcattctgggacaggagttctgcttcgaagtgaccacgagcagcggtacaaagtgtttcgcctgccggagtgccgcggagcgggataaatggatcgagaatctgcagagagccgtgaaacccaataaagacaactcacggcgggtggacaacgtcttaaagctgtggattatcgaggctcgcgagctacctcccaagaagagatactattgtgagctgtgcctggacgatatgctatatgcccgaactacctccaagcccagatccgccagcggagacacggttttttggggagaacacttcgaatttaacaatctgcctgctgttagggcattgaggttgcacttgtacagggatagcgacaagaagcggaagaaagacaaagcagggtacgtagggctggttacagtcccagttgccaccctagccggcagacacttcacggaacaatggtaccccgtgactctgcccaccggctctgggggttccggaggcatggggtctgggggcggaggaggaagcgggggcgggagtggaggcaaaggaaagggcggctgtcctgccgtaagactgaaggctcgataccaaaccatgagcattctccccatggagctgtacaaggaattcgccgaatacgtgactaatcactataggatgctatgtgcagtcctagagcctgccctaaatgtgaaagggaaggaagaggtggcttctgctttggtccacatcctccagagcacaggcaaggcaaaggacttcttgagtgatatggctatgtctgaggttgacaggtttatggagagggagcatctgatttttcgagaaaacaccttagccactaaagcgattgaggagtatatgaggctcataggacaaaagtacctgaaggacgcgatcggggaatttataagagcactctacgaatctgaggaaaattgcgaagtcgaccctatcaagtgcaccgcctcaagtctggcagagcaccaggctaatcttagaatgtgctgtgagctcgccctttgtaaagtggtgaactcacattgcgtatttcctcgggaactgaaggaagtgttcgcgagctggaggctgagatgcgcagaaagaggccgggaggatatcgcagacaggttgattagcgcctctctgtttttgagattcctctgtccagccatcatgagcccttcgctgttcggacttatgcaagagtatcctgacgagcagacttcgcgtaccctgactctgatcgccaaagtgattcagaacctcgccaattttagtaagtttaccagcaaggaagacttcctgggatttatgaatgagttcctggaacttgaatgggggagcatgcagcagttcttgtatgagatctccaacctcgacacattgacgaattcaagctcttttgagggatatattgatctcggtcgggaactctcaacgctgcacgctctgttgtgggaagtgctgccccaactcagtaaggaagcactcctgaaactgggcccactgccccgtctgctgaacgacattagcaccgctttacgaaaccccaacatccagcgccagccttcgagacagtcggaacggccccggccccagcctgtggttcttagaggaccgtccgccgaaatgcagggttatatgatgcgggatctcaatagcagcattgatcttcagtcctttatggctagaggcctgaattcctccatggacatggccaggttaccatcaccaaccaaggagaagcctccaccgccgcctccaggtggtggcaaggaccttttctacgtttcgcgcccacccttggctcggagcagcccagcttactgtacttcatcatcagatatcacagagcctgaacagaaaatgttgtccgtgaataagtccgtgagcatgctcgatctgcagggggacggtcccggtggcaggctcaattcgagctcagtttctaatctggcggctgtgggggatctgctgcactcgtcacaggcttccctcacagctgctctgggcctcagacctgctccagcaggcaggctaagccagggcagtggcagttcaataacagcagctggcatgagactcagccaaatgggcgtgaccaccgatggagtgccggcccaacagctgcgcatccccctcagcttccaaaaccccctgttccatatggctgccgacggcccagggccgccaggaggccatggggggggtggtggtcacggacctcccagttctcatcatcaccaccatcatcaccaccaccaccgcgggggggagcctccaggagacacctttgccccattccacgggtactccaagtccgaagatcttagttcgggcgtgccaaagccacccgctgcgagcatccttcattcacacagctatagtgacgagtttgggccatctgggaccgattttacccgtcggcaactgtccttgcaagataatctccaacatatgttatcccccccccagatcacaatcggaccgcagcgccccgctccttcaggccctggcggcggctctggcggaggcagtggtggaggcggcggcgggcagcctccccccttacagaggggcaagagccagcagctgactgtgtccgccgcgcaaaaacccagaccctcaagtgggaatctattgcaatctcccgagccatcttacggtcctgcacgccctcgtcaacagtccctctcgaaggaaggctctattggaggctcaggcggatccggtggcgggggaggtggtggactgaaacctagtatcaccaagcagcactcccagacacctagcactctcaaccctaccatgccagcttctgaacggacagttgcctgggtttctaatatgccccatcttagcgcagatatcgagtccgcccatattgagagagaagaatacaagctgaaggaatacagcaagagcatggatgaatcaagattagacagggtgaaagaatatgaggaggagatccactccctgaaggaaaggctacacatgtcaaacaggaagctcgaagaatacgagcgaaggctcctgtcccaagaggaacaaacatctaagattctaatgcaataccaggccaggctggagcagtccgaaaaacgattacgtcaacaacaggcggaaaaagattcccaaatcaaatccattatcggaaggttgatgctggtggaggaggaacttaggcgggatcatccggccatggccgaaccactgccggagcctaaaaaaagattgctggacgcccagctgctgattaggtag

SEQ ID NO: 167839 - DNA, 3900 bp, Artificial Sequence
  derived and/or modified sequence
atgagccgcagccgggccagcatccaccggggcagcatcccagccatgtcctatgcccccttcagagatgtgcggggccccagcatgcacaggacccagtatgtgcacagcccctatgaccggcccggctggaacccccgcttctgcatcatcagcggcaaccagctgctgatgctggatgaagatgagatccaccccctgctgatccgggaccggcgctctgagagcagcaggaacaagctgctgcggaggacagtgtctgtgcctgtggagggccggccccatggagagcacgagtaccacctgggccgcagcaggaggaagtctgtgcctgggggcaagcagtacagcatggagggcgccccagctgcccccttccggcccagccagggcttcctgagccggcggctgaagagcagcatcaagaggaccaagagccagcccaagctggacaggaccagcagcttccggcagatcctgccccgcttccgctctgctgaccatgaccgggcccggctgatgcagagcttcaaggagagccacagccatgagagcctgctgagccccagcagcgctgctgaggccctggagctgaacctggatgaggacagcatcatcaagcctgtgcacagcagcatcctgggccaggagttctgctttgaggtgaccaccagcagcggcaccaagtgctttgcctgccgctctgctgctgagcgggacaagtggattgagaacctgcagagagctgtgaagcccaacaaggacaacagccggcgggtggacaacgtgctgaagctgtggatcatcgaggcccgggagctgccccccaagaagcgctactactgtgagctgtgcctggatgacatgctgtatgcccggaccaccagcaagcccaggtctgccagcggggacacagtgttctggggcgagcactttgagttcaacaacctgcctgctgtgcgggccctgcggctgcacctgtacagagacagcgacaagaagaggaagaaggacaaggccggctacgtgggcctggtgacagtgcctgtggccaccctggccggccgccacttcacagagcagtggtaccctgtgaccctgcccactggaagtggcggcagcggcggcatgggcagcggcggcggcggcggcagcggcggcggcagcggcggcaagggcaagggcggctgcccagctgtgcggctgaaggcccgctaccagaccatgagcatcctgcccatggagctgtacaaggagtttgctgaatatgtgaccaaccactacaggatgctgtgtgctgtgctggagcccgccctgaatgtgaagggcaaggaggaggtggccagcgccctggtgcacatcctgcagagcacaggcaaggccaaggacttcctgagtgacatggccatgtctgaggtggaccgcttcatggagcgggagcacctgatcttccgggagaacaccctggccaccaaggccatcgaggagtacatgaggctgattggccagaagtacctgaaggatgccatcggggagttcatccgggccctgtatgagagcgaggagaactgtgaggtggaccccatcaagtgcacagccagcagcctggccgagcaccaggccaacctgaggatgtgctgtgagctggccctgtgcaaggtggtgaacagccactgtgtgttcccccgggagctgaaggaggtgtttgcctcctggaggctgcgctgtgccgagcggggccgggaggacattgctgacaggctcatcagcgccagcctcttcctgcgcttcctgtgcccagccatcatgagccccagcctgtttggcctgatgcaggagtacccagatgagcagaccagcaggaccctgaccctcatcgccaaggtgatccagaacctggccaacttcagcaagttcaccagcaaagaagacttcctgggcttcatgaatgagttcctggagctggagtggggctccatgcagcagttcctgtatgagatcagcaacctggacaccctgaccaacagcagcagctttgagggctacatcgacctgggccgggagctgagcaccctgcacgccctgctgtgggaggtgctgccccagctgagcaaggaggccctgctgaagctgggccccctgccccggctgctgaatgacatcagcacagccctgaggaaccccaacatccagaggcagcccagccggcagagcgagcggccccggccccagcctgtggtgctgcggggccccagcgctgagatgcagggctacatgatgagggacctgaacagcagcattgacctgcagagcttcatggcccggggcctgaacagctccatggacatggcccggctgcccagccccaccaaggagaagcccccacctcctcctcctgggggcggcaaggacctcttctacgtgtccaggcctcccctggcccggagcagccctgcctactgcaccagcagcagtgacatcacagagcctgagcagaagatgctgtctgtgaacaagtctgtgtccatgctggacctgcagggagatggccctgggggccgcctgaacagcagctctgtgagcaacctggccgctgtgggggacctgctgcacagcagccaggccagcctgacagctgccctgggcctgcggcctgccccagctggccgcctgagccagggcagcggcagcagcatcacagctgctggcatgaggctgagccagatgggcgtgaccacagatggagtgcctgcccagcagctgcgcatccccctgtccttccagaaccccctcttccacatggccgcagatggccctggccccccaggcggccatggaggcggcggcggccacggcccccccagcagccaccaccaccaccaccaccaccaccaccaccggggcggggagcccccaggggacacctttgcccccttccacggctacagcaagtctgaggacctgagcagcggcgtgcccaagcccccagctgccagcatcctgcacagccacagctacagtgatgaatttggccccagcggcacagacttcacccggcggcagctgagcctgcaggacaacctgcagcacatgctgagccccccccagatcaccatcggcccccagaggcctgcccccagcggccctgggggcggcagcggcggcggcagcggcggcggcggcggcggccagcccccacccctgcagaggggcaagagccagcagctgactgtgtctgctgcccagaagccccggcccagcagcggcaacctgctgcagagccctgagcccagctatggccctgcccggccccggcagcagagcctgagcaaggagggcagcattggaggcagcggcggcagcggcggcggcggcggcggcggcctgaagcccagcatcaccaagcagcacagccagacccccagcaccctgaaccccaccatgcctgccagcgagaggacagtggcctgggtgagcaacatgccccacctgtctgctgacatcgagagcgcccacatcgagcgggaggagtacaagctgaaggagtacagcaagtccatggatgagagccggctggacagagtgaaggagtatgaggaggagatccacagcctgaaggagcggctgcacatgagcaacaggaagctggaggagtatgaaagaaggctgctgagccaggaggagcagaccagcaagatcctgatgcagtaccaggcccggctggagcagagcgagaagaggctgcggcagcagcaggccgagaaggacagccagatcaagagcatcatcggccgcctgatgctggtggaggaggagctgcggcgggaccacccagccatggccgagcccctgcctgagcccaagaagaggctgctggatgcccagctgctgatcagatag

SEQ ID NO: 167840 - DNA, 1464 bp, Artificial Sequence
  derived and/or modified sequence
gaagacttcctgggcttcatgaatgagttcctggagctggagtggggctccatgcagcagttcctgtatgagatcagcaacctggacaccctgaccaacagcagcagctttgagggctacatcgacctgggccgggagctgagcaccctgcacgccctgctgtgggaggtgctgccccagctgagcaaggaggccctgctgaagctgggccccctgccccggctgctgaatgacatcagcacagccctgaggaaccccaacatccagaggcagcccagccggcagagcgagcggccccggccccagcctgtggtgctgcggggccccagcgctgagatgcagggctacatgatgagggacctgaacagctccatggacatggcccggctgcccagccccaccaaggagaagcccccacctcctcctcctgggggcggcaaggacctcttctacgtgtccaggcctcccctggcccggagcagccctgcctactgcaccagcagcagtgacatcacagagcctgagcagaagatgctgtctgtgaacaagtctgtgtccatgctggacctgcagggagatggccctgggggccgcctgaacagcagctctgtgagcaacctggccgctgtgggggacctgctgcacagcagccaggccagcctgacagctgccctgggcctgcggcctgccccagctggccgcctgagccagggcagcggcagcagcatcacagctgctggcatgaggctgagccagatgggcgtgaccacagatggagtgcctgcccagcagctgcgcatccccctgtccttccagaaccccctcttccacatggccgcagatggccctggccccccaggcggccatggaggcggcggcggccacggcccccccagcagccaccaccaccaccaccaccaccaccaccaccggggcggggagcccccaggggacacctttgcccccttccacggctacagcaagtctgaggacctgagcagcggcgtgcccaagcccccagctgccagcatcctgcacagccacagctacagtgatgaatttggccccagcggcacagacttcacccggcggcagctgagcctgcaggacaacctgcagcacatgctgagccccccccagatcaccatcggcccccagaggcctgcccccagcggccctgggggcggcagcggcggcggcagcggcggcggcggcggcggccagcccccacccctgcagaggggcaagagccagcagctgactgtgtctgctgcccagaagccccggcccagcagcggcaacctgctgcagagccctgagcccagctatggccctgcccggccccggcagcagagcctgagcaaggagggcagcattggaggcagcggcggcagcggcggcggcggcggcggcggcctgaagcccagcatcaccaagcagcacagccagacccccagcacctag

SEQ ID NO: 167841 - DNA, 3855 bp, Artificial Sequence
  derived and/or modified sequence
atgggcctgcggccccccacccccagccccagcggcggcagctgcagcggcagcctgcccccacccagccgctgccagcccctgcggcggcgctgcagcagctgctgcttccctggagagtaccacctgggccgcagcaggaggaagtctgtgcctgggggcaagcagtacagcatggagggcgccccagctgcccccttccggcccagccagggcttcctgagccggcggctgaagagcagcatcaagaggaccaagagccagcccaagctggacaggaccagcagcttccggcagatcctgccccgcttccgctctgctgaccatgaccgggcccggctgatgcagagcttcaaggagagccacagccatgagagcctgctgagccccagcagcgctgctgaggccctggagctgaacctggatgaagattccatcatcaagcctgtgcacagcagcatcctgggccaggagttctgctttgaggtgaccaccagcagcggcaccaagtgctttgcctgccgctctgctgctgagcgggacaagtggattgagaacctgcagagagctgtgaagcccaacaaggacaacagcagaagagtggacaacgtgctgaagctgtggatcatcgaggcccgggagctgccccccaagaagcgctactactgtgagctgtgcctggatgacatgctgtatgcccggaccaccagcaagcccaggtctgccagcggggacaccgtcttctggggcgagcactttgagttcaacaacctgcctgctgtgcgggccctgcggctgcacctgtacagagacagcgacaagaagaggaagaaggacaaggccggctacgtgggcctggtgacagtgcctgtggccaccctggccggccgccacttcacagagcagtggtaccctgtgaccctgcccaccggcagcggcggcagcggcggcatgggcagcggcggcggcggcggcagcggcggcggcagcggcggcaaaggaaaaggaggctgcccagctgtgcggctgaaggcccgctaccagaccatgagcatcctgcccatggagctgtacaaggagtttgctgaatatgtgaccaaccactacaggatgctgtgtgctgtgctggagcccgccctgaatgtgaagggcaaggaggaggtggccagcgccctggtgcacatcctgcagagcacaggcaaggccaaggacttcctgagtgacatggccatgtctgaggtggaccgcttcatggagcgggagcacctgatcttccgggagaacaccctggccaccaaggccatcgaggagtacatgaggctcatcggccagaagtacctgaaggatgccatcggggagttcatccgggccctgtatgaaagtgaggagaactgtgaggtggaccccatcaagtgcacagccagcagcctggccgagcaccaggccaacctgaggatgtgctgtgagctggccctgtgcaaggtggtgaacagccactgtgtgttcccccgggagctgaaggaggtgtttgcctcctggaggctgcgctgtgccgagcggggcagagaagatattgctgacaggctcatcagcgccagcctcttcctgcgcttcctgtgcccagccatcatgagccccagcctgtttggcctgatgcaggagtacccagatgagcagaccagcaggaccctgaccctgattgccaaggtgatccagaacctggccaacttcagcaagttcaccagcaaggaggacttcctgggcttcatgaatgagttcctggagctggagtggggctccatgcagcagttcctgtatgagatcagcaacctggacaccctgaccaacagcagcagctttgagggctacatcgacctgggccgggagctgagcaccctgcacgccctgctgtgggaggtgctgccccagctgagcaaggaggccctgctgaagctgggccccctgccccggctgctgaatgacatcagcacagccctgaggaaccccaacatccagaggcagcccagccggcagagcgagcggccccggccccagcctgtggtgctgcggggccccagcgctgagatgcagggctacatgatgagggacctgaacagcagcattgacctgcagagcttcatggcccggggcctgaacagctccatggacatggcccggctgcccagccccaccaaggagaagcccccacctcctcctcctgggggcggcaaggacctcttctacgtgtcccggccccccctggcccggagcagccctgcctactgcaccagcagcagtgacatcacagagcctgagcagaagatgctgtctgtgaacaagtctgtgtccatgctggacctgcagggagatggccctgggggccgcctgaacagcagctctgtgagcaacctggccgctgtgggggacctgctgcacagcagccaggccagcctgacagctgccctgggcctgcggcctgccccagctggccgcctgagccagggcagcggcagcagcatcacagctgctggcatgaggctgagccagatgggcgtgaccacagatggagtgcctgcccagcagctgcgcatccccctgtccttccagaaccccctcttccacatggctgctgatggccctggccccccaggcggccacggcggcggcggcggccacggcccccccagcagccaccaccaccaccaccaccaccaccaccacagaggaggagagcccccaggggacacctttgcccccttccacggctacagcaagtctgaggacctgagcagtggagtgcccaagcccccagctgccagcatcctgcacagccacagctacagtgatgaatttggccccagcggcacagacttcacccggcggcagctgagcctgcaggacaacctgcagcacatgctgagccccccccagatcaccatcggcccccagaggcctgcccccagcggccctgggggcggcagcggcggcggcagcggcggcggcggcggcggccagcccccacccctgcagaggggcaagagccagcagctgactgtgtctgctgcccagaagccccggcccagcagcggcaacctgctgcagagccctgagcccagctatggccctgcccggccccggcagcagagcctgagcaaggagggcagcatcggcggcagcggcggcagcggcggcggcggcggcggcggcctgaagcccagcatcaccaagcagcacagccagacccccagcaccctgaaccccaccatgcctgccagcgagaggacagtggcctgggtgagcaacatgccccacctgtctgctgacattgaaagtgcccacatcgagcgggaggagtacaagctgaaggagtacagcaagtccatggatgagagccggctggacagagtgaaggagtatgaggaggagatccacagcctgaaggagcggctgcacatgagcaacaggaagctggaggagtatgaaagaaggctgctgagccaggaggagcagaccagcaagatcctgatgcagtaccaggcccggctggagcagagcgagaagaggctgcggcagcagcaggccgagaaggacagccagatcaagagcatcatcggccgcctgatgctggtggaggaggagctgcggcgggaccacccagccatggccgagcccctgcctgagcccaagaagaggctgctggatgcccaggagcggcagctgccccccctgggccccaccaacccccgggtgaccctggccccaccctggaatggcctggcccccccagcccctcctcctccaccccggctgcagatcacagaaaatggagagttcaggaacacagctgaccactag

SEQ ID NO: 167842 - DNA, 4032 bp, Artificial Sequence
  derived and/or modified sequence
atgagccgcagccgggccagcatccaccggggcagcatcccagccatgtcctatgcccccttcagagatgtgcggggccccagcatgcacaggacccagtatgtgcacagcccctatgaccggcccggctggaacccccgcttctgcatcatcagcggcaaccagctgctgatgctggatgaagatgagatccaccccctgctgatccgggaccggcgctctgagagcagcaggaacaagctgctgcggaggacagtgtctgtgcctgtggagggccggccccatggagagcacgagtaccacctgggccgcagcaggaggaagtctgtgcctgggggcaagcagtacagcatggagggcgccccagctgcccccttccggcccagccagggcttcctgagccggcggctgaagagcagcatcaagaggaccaagagccagcccaagctggacaggaccagcagcttccggcagatcctgccccgcttccgctctgctgaccatgaccgggcccggctgatgcagagcttcaaggagagccacagccatgagagcctgctgagccccagcagcgctgctgaggccctggagctgaacctggatgaggacagcatcatcaagcctgtgcacagcagcatcctgggccaggagttctgctttgaggtgaccaccagcagcggcaccaagtgctttgcctgccgctctgctgctgagcgggacaagtggattgagaacctgcagagagctgtgaagcccaacaaggacaacagccggcgggtggacaacgtgctgaagctgtggatcatcgaggcccgggagctgccccccaagaagcgctactactgtgagctgtgcctggatgacatgctgtatgcccggaccaccagcaagcccaggtctgccagcggggacacagtgttctggggcgagcactttgagttcaacaacctgcctgctgtgcgggccctgcggctgcacctgtacagagacagcgacaagaagaggaagaaggacaaggccggctacgtgggcctggtgacagtgcctgtggccaccctggccggccgccacttcacagagcagtggtaccctgtgaccctgcccactggaagtggcggcagcggcggcatgggcagcggcggcggcggcggcagcggcggcggcagcggcggcaagggcaagggcggctgcccagctgtgcggctgaaggcccgctaccagaccatgagcatcctgcccatggagctgtacaaggagtttgctgaatatgtgaccaaccactacaggatgctgtgtgctgtgctggagcccgccctgaatgtgaagggcaaggaggaggtggccagcgccctggtgcacatcctgcagagcacaggcaaggccaaggacttcctgagtgacatggccatgtctgaggtggaccgcttcatggagcgggagcacctgatcttccgggagaacaccctggccaccaaggccatcgaggagtacatgaggctgattggccagaagtacctgaaggatgccatcggggagttcatccgggccctgtatgagagcgaggagaactgtgaggtggaccccatcaagtgcacagccagcagcctggccgagcaccaggccaacctgaggatgtgctgtgagctggccctgtgcaaggtggtgaacagccactgtgtgttcccccgggagctgaaggaggtgtttgcctcctggaggctgcgctgtgccgagcggggccgggaggacattgctgacaggctcatcagcgccagcctcttcctgcgcttcctgtgcccagccatcatgagccccagcctgtttggcctgatgcaggagtacccagatgagcagaccagcaggaccctgaccctcatcgccaaggtgatccagaacctggccaacttcagcaagttcaccagcaaagaagacttcctgggcttcatgaatgagttcctggagctggagtggggctccatgcagcagttcctgtatgagatcagcaacctggacaccctgaccaacagcagcagctttgagggctacatcgacctgggccgggagctgagcaccctgcacgccctgctgtgggaggtgctgccccagctgagcaaggaggccctgctgaagctgggccccctgccccggctgctgaatgacatcagcacagccctgaggaaccccaacatccagaggcagcccagccggcagagcgagcggccccggccccagcctgtggtgctgcggggccccagcgctgagatgcagggctacatgatgagggacctgaacagcagcattgacctgcagagcttcatggcccggggcctgaacagctccatggacatggcccggctgcccagccccaccaaggagaagcccccacctcctcctcctgggggcggcaaggacctcttctacgtgtccaggcctcccctggcccggagcagccctgcctactgcaccagcagcagtgacatcacagagcctgagcagaagatgctgtctgtgaacaagtctgtgtccatgctggacctgcagggagatggccctgggggccgcctgaacagcagctctgtgagcaacctggccgctgtgggggacctgctgcacagcagccaggccagcctgacagctgccctgggcctgcggcctgccccagctggccgcctgagccagggcagcggcagcagcatcacagctgctggcatgaggctgagccagatgggcgtgaccacagatggagtgcctgcccagcagctgcgcatccccctgtccttccagaaccccctcttccacatggccgcagatggccctggccccccaggcggccatggaggcggcggcggccacggcccccccagcagccaccaccaccaccaccaccaccaccaccaccggggcggggagcccccaggggacacctttgcccccttccacggctacagcaagtctgaggacctgagcagcggcgtgcccaagcccccagctgccagcatcctgcacagccacagctacagtgatgaatttggccccagcggcacagacttcacccggcggcagctgagcctgcaggacaacctgcagcacatgctgagccccccccagatcaccatcggcccccagaggcctgcccccagcggccctgggggcggcagcggcggcggcagcggcggcggcggcggcggccagcccccacccctgcagaggggcaagagccagcagctgactgtgtctgctgcccagaagccccggcccagcagcggcaacctgctgcagagccctgagcccagctatggccctgcccggccccggcagcagagcctgagcaaggagggcagcattggaggcagcggcggcagcggcggcggcggcggcggcggcctgaagcccagcatcaccaagcagcacagccagacccccagcaccctgaaccccaccatgcctgccagcgagaggacagtggcctgggtgagcaacatgccccacctgtctgctgacatcgagagcgcccacatcgagcgggaggagtacaagctgaaggagtacagcaagtccatggatgagagccggctggacagagtgaaggagtatgaggaggagatccacagcctgaaggagcggctgcacatgagcaacaggaagctggaggagtatgaaagaaggctgctgagccaggaggagcagaccagcaagatcctgatgcagtaccaggcccggctggagcagagcgagaagaggctgcggcagcagcaggccgagaaggacagccagatcaagagcatcatcggccgcctgatgctggtggaggaggagctgcggcgggaccacccagccatggccgagcccctgcctgagcccaagaagaggctgctggatgcccaggagcggcagctgccccccctgggccccaccaacccccgggtgaccctggccccaccctggaatggcctggcccccccagcccctcctcctccaccccggctgcagatcacagaaaatggagagttcaggaacacagctgaccactag

SEQ ID NO: 167843 - DNA, 3879 bp, Artificial Sequence
  derived and/or modified sequence
atgagccgcagccgggccagcatccaccggggcagcatcccagccatgtcctatgcccccttcagagatgtgcggggccccagcatgcacaggacccagtatgtgcacagcccctatgaccggcccggctggaacccccgcttctgcatcatcagcggcaaccagctgctgatgctggatgaagatgagatccaccccctgctgatccgggaccggcgctctgagagcagcaggaacaagctgctgcggaggacagtgtctgtgcctgtggagggccggccccatggagagcacgagtaccacctgggccgcagcaggaggaagtctgtgcctgggggcaagcagtacagcatggagggcgccccagctgcccccttccggcccagccagggcttcctgagccggcggctgaagagcagcatcaagaggaccaagagccagcccaagctggacaggaccagcagcttccggcagatcctgccccgcttccgctctgctgaccatgaccgggcccggctgatgcagagcttcaaggagagccacagccatgagagcctgctgagccccagcagcgctgctgaggccctggagctgaacctggatgaggacagcatcatcaagcctgtgcacagcagcatcctgggccaggagttctgctttgaggtgaccaccagcagcggcaccaagtgctttgcctgccgctctgctgctgagcgggacaagtggattgagaacctgcagagagctgtgaagcccaacaaggacaacagccggcgggtggacaacgtgctgaagctgtggatcatcgaggcccgggagctgccccccaagaagcgctactactgtgagctgtgcctggatgacatgctgtatgcccggaccaccagcaagcccaggtctgccagcggggacacagtgttctggggcgagcactttgagttcaacaacctgcctgctgtgcgggccctgcggctgcacctgtacagagacagcgacaagaagaggaagaaggacaaggccggctacgtgggcctggtgacagtgcctgtggccaccctggccggccgccacttcacagagcagtggtaccctgtgaccctgcccactggaagtggcggcagcggcggcatgggcagcggcggcggcggcggcagcggcggcggcagcggcggcaagggcaagggcggctgcccagctgtgcggctgaaggcccgctaccagaccatgagcatcctgcccatggagctgtacaaggagtttgctgaatatgtgaccaaccactacaggatgctgtgtgctgtgctggagcccgccctgaatgtgaagggcaaggaggaggtggccagcgccctggtgcacatcctgcagagcacaggcaaggccaaggacttcctgagtgacatggccatgtctgaggtggaccgcttcatggagcgggagcacctgatcttccgggagaacaccctggccaccaaggccatcgaggagtacatgaggctgattggccagaagtacctgaaggatgccatcggggagttcatccgggccctgtatgagagcgaggagaactgtgaggtggaccccatcaagtgcacagccagcagcctggccgagcaccaggccaacctgaggatgtgctgtgagctggccctgtgcaaggtggtgaacagccactgtgtgttcccccgggagctgaaggaggtgtttgcctcctggaggctgcgctgtgccgagcggggccgggaggacattgctgacaggctcatcagcgccagcctcttcctgcgcttcctgtgcccagccatcatgagccccagcctgtttggcctgatgcaggagtacccagatgagcagaccagcaggaccctgaccctcatcgccaaggtgatccagaacctggccaacttcagcaagttcaccagcaaagaagacttcctgggcttcatgaatgagttcctggagctggagtggggctccatgcagcagttcctgtatgagatcagcaacctggacaccctgaccaacagcagcagctttgagggctacatcgacctgggccgggagctgagcaccctgcacgccctgctgtgggaggtgctgccccagctgagcaaggaggccctgctgaagctgggccccctgccccggctgctgaatgacatcagcacagccctgaggaaccccaacatccagaggcagcccagccggcagagcgagcggccccggccccagcctgtggtgctgcggggccccagcgctgagatgcagggctacatgatgagggacctgaacagctccatggacatggcccggctgcccagccccaccaaggagaagcccccacctcctcctcctgggggcggcaaggacctcttctacgtgtccaggcctcccctggcccggagcagccctgcctactgcaccagcagcagtgacatcacagagcctgagcagaagatgctgtctgtgaacaagtctgtgtccatgctggacctgcagggagatggccctgggggccgcctgaacagcagctctgtgagcaacctggccgctgtgggggacctgctgcacagcagccaggccagcctgacagctgccctgggcctgcggcctgccccagctggccgcctgagccagggcagcggcagcagcatcacagctgctggcatgaggctgagccagatgggcgtgaccacagatggagtgcctgcccagcagctgcgcatccccctgtccttccagaaccccctcttccacatggccgcagatggccctggccccccaggcggccatggaggcggcggcggccacggcccccccagcagccaccaccaccaccaccaccaccaccaccaccggggcggggagcccccaggggacacctttgcccccttccacggctacagcaagtctgaggacctgagcagcggcgtgcccaagcccccagctgccagcatcctgcacagccacagctacagtgatgaatttggccccagcggcacagacttcacccggcggcagctgagcctgcaggacaacctgcagcacatgctgagccccccccagatcaccatcggcccccagaggcctgcccccagcggccctgggggcggcagcggcggcggcagcggcggcggcggcggcggccagcccccacccctgcagaggggcaagagccagcagctgactgtgtctgctgcccagaagccccggcccagcagcggcaacctgctgcagagccctgagcccagctatggccctgcccggccccggcagcagagcctgagcaaggagggcagcattggaggcagcggcggcagcggcggcggcggcggcggcggcctgaagcccagcatcaccaagcagcacagccagacccccagcaccctgaaccccaccatgcctgccagcgagaggacagtggcctgggtgagcaacatgccccacctgtctgctgacatcgagagcgcccacatcgagcgggaggagtacaagctgaaggagtacagcaagtccatggatgagagccggctggaccgggagtatgaggaggagatccacagcctgaaggagcggctgcacatgagcaacaggaagctggaggagtatgaaagaaggctgctgagccaggaggagcagaccagcaagatcctgatgcagtaccaggcccggctggagcagagcgagaagaggctgcggcagcagcaggccgagaaggacagccagatcaagagcatcatcggccgcctgatgctggtggaggaggagctgcggcgggaccacccagccatggccgagcccctgcctgagcccaagaagaggctgctggatgcccagaggggcagcttccccccctgggtgcagcagaccagggtgtag

SEQ ID NO: 167844 - DNA, 3900 bp, Artificial Sequence
  derived and/or modified sequence
atgagccggagccgggccagcatccaccggggcagcatccccgccatgtcttacgccccctttagggatgtgcgcggcccaagtatgcaccggactcaatatgtgcactctccttatgacaggcctggctggaaccctcggttctgtataatatcaggcaatcagctgttaatgctggacgaagatgaaatccacccgctgctgattcgggacaggcgatccgagagctcacgtaataagttgctgcgtcgaacagtgtctgtccctgtcgagggaagaccccacggagagcacgaataccaccttggccggtctaggagaaagagtgttcccggcggtaaacaatatagcatggagggagcgcctgcggccccattccggcctagccagggcttcctttcacgcagacttaaatctagtataaaacgcaccaaaagtcagccaaagttagatcgcaccagctcatttcgccaaatactaccccgttttcgcagcgcagaccacgaccgggcccgtctgatgcaaagcttcaaggaaagccactctcatgaaagcttactctcaccctcctccgcggccgaagcactagagctcaatctcgatgaggactccattattaagcctgtacattccagcattttgggtcaggaattctgtttcgaggtgacaaccagctccggaaccaagtgcttcgcctgtcggagtgcggccgaaagagataagtggattgagaatttgcagcgcgctgttaagccaaataaggacaatagcagaagagtcgacaacgtgctcaagctatggatcatcgaagctcgagagctgcccccaaaaaagcgctattactgcgaactctgtcttgatgacatgctttatgcaaggactactagcaaaccaagatcggcatctggcgacacagtcttctggggggaacacttcgaattcaacaacctcccagcggtcagagccctccgattgcatctataccgggattctgacaagaaacggaagaaggacaaagccggctatgtaggcctcgttaccgtcccagtcgcaacactggccggtcggcacttcaccgaacagtggtaccctgtgacgttaccaaccggctcaggggggtccgggggcatgggatccggcggaggaggcggctctggtgggggatccggtggcaaagggaaggggggctgcccagccgttcggctaaaggcgcgataccaaaccatgagcattttgcccatggaactgtataaggagtttgcggagtacgttacaaatcattatcggatgctatgcgcagtcctggagcctgccttgaatgtgaaaggcaaggaggaggtggcgagtgctctggtccacattctgcagagtacgggcaaggccaaggacttcctttctgacatggcaatgtccgaagttgatcgatttatggaacgggagcatttaatctttcgggaaaatactctggcaaccaaagcaattgaggagtatatgcggttgatcggccagaaatatctcaaggatgcgattggcgagtttattagggctctatatgaatcagaagaaaactgcgaggtggacccaatcaagtgtaccgcctcttcccttgcagaacatcaggctaatctgcgaatgtgctgtgaattagccctttgtaaagtggtgaacagccactgcgtgttcccacgcgagctaaaggaggtgtttgcaagttggcgactgaggtgcgcggagcgaggccgagaggatatagccgaccggcttattagcgcgtccctctttctcaggttcttatgtccagccatcatgtcccccagccttttcgggcttatgcaggagtatcccgacgagcaaacctctcgcacgcttacactgatcgccaaggtgatacagaatttagccaatttttccaaatttacaagcaaagaggacttcctgggcttcatgaatgaatttctggagctggagtggggatccatgcagcagttcctctacgaaataagcaatctggacacactgacaaacagctcaagcttcgagggatacatcgacttgggcagagaactgagcactctccatgcactgctgtgggaggttcttccgcaactgtccaaagaagcgctgctgaagctggggcccttacctcggctcctcaacgacatttctacagccctacggaatccaaatatccagcgacaaccaagccgccagagtgaacggccacgaccgcagcccgtggtccttcgagggccctccgcagagatgcaaggctatatgatgcgggacctgaactcttcaatcgatttgcagtctttcatggcacgaggactgaactcatcgatggatatggccaggttgcctagtcctacaaaagagaaaccccctccccctcccccgggcggtggcaaggacctgttttacgtgtcacgaccgcccctggcacgatccagtcccgcttattgtacgtcatcctcagatattaccgaacccgagcagaagatgttatccgtgaacaagagtgttagtatgctggatttgcagggagatggaccggggggccgcctgaattcgagctcagtgagcaacctggctgcggtgggagacttactgcactctagtcaggcctctttgaccgccgccctgggcctgaggccagctcccgccgggcgactgagccagggttctggatcctccattacagccgccggaatgagactgtcccagatgggagttactaccgatggagtccccgctcagcagttgcggatacccctatccttccagaatccactcttccatatggccgcggatggacccggtccccctgggggccacggcggtggaggcggccatggcccgccaagcagtcatcaccaccaccatcatcaccaccatcatagaggcggggagccacccggtgacacttttgctccatttcacggatactcaaagagtgaggatttatccagtggtgtgcccaagccgcctgcggctagcatcctgcacagccatagctatagcgatgagttcggtccctccggaaccgacttcacgaggcgccagctgtcattacaagataaccttcagcacatgttaagcccaccgcagattacaattggaccccagaggccggcaccatcgggccccggcggggggagcgggggaggctcaggaggggggggtgggggccagcccccccctctgcagcgcggaaaatctcagcagcttaccgtgtctgctgcccagaagccccgaccgagctcaggtaatctgttgcagagcccggaacctagctatggccctgctcgaccacggcagcagtcactgtccaaggaagggtcaatcgggggcagcggcgggagcggtggcggaggaggcgggggtctaaaaccatcgataacaaaacaacattctcagacgccttccacactcaacccaacaatgccagccagcgagcggactgttgcctgggtctccaatatgccacatttatctgccgacatcgaatcagcccacatagaaagagaagagtataaattgaaagagtatagtaagtcaatggacgaaagtagactggacagggtaaaagagtacgaggaagagatccactcactcaaagagaggctccacatgagcaaccgaaagttagaggaatacgagcgacgcttattaagtcaggaggaacagacctccaagatccttatgcagtaccaagcacgtctcgagcagtcggaaaaacggctcaggcagcaacaggcggaaaaggattcacagataaaaagcataatcggtcggttgatgctggtcgaggaggaactgaggagagatcacccagctatggctgaaccattgcccgaacccaagaaacgcctcctggatgcacagctgttgataaggtag

SEQ ID NO: 167845 - DNA, 1464 bp, Artificial Sequence
  derived and/or modified sequence
gaggacttcctgggcttcatgaacgagttcctggagctggagtggggaagcatgcagcagttcctttacgaaatctcgaatttggataccctgaccaactcaagttcattcgagggatacatagacctgggccgggaactgtctactctacatgcgttactgtgggaagtcttaccccagctgtctaaagaagctctgctgaagctaggccccctgccccgcctgttgaacgacatctctaccgcattgagaaacccaaacattcaacgacagccatcccgacaaagtgaacggcccagacctcagcctgtagtgctgcggggaccatctgctgaaatgcagggctatatgatgcgcgacctgaattcatccatggacatggctcggttgccttcacccaccaaggaaaaaccacctcccccccctcctggaggcggtaaagacctcttctacgtatcgcggccgcctctcgccaggtcttcccctgcatactgcacctctagcagtgatattaccgagcccgaacagaaaatgctgtctgtcaacaagagcgtgagcatgctcgacctgcaaggcgacggcccagggggtcggctcaactcaagtagcgtttcgaacctcgctgccgtgggagacctgctacattccagtcaggcatcattgaccgccgccctgggactgcgtcctgccccggccggtcgcttgtcccagggaagtggcagcagtataacagctgcaggaatgaggctatcacaaatgggcgtcacaaccgacggtgttccagctcagcagctccgtatcccactctcattccaaaatcctctctttcatatggccgcagatggccccggccctccaggcggccacggggggggtggcgggcacggaccccccagttcccatcaccatcaccaccatcaccaccaccataggggaggagagccacctggcgataccttcgcaccctttcatggctattctaagtccgaggatctgagcagcggtgtgcccaaaccacctgctgcttctattctccactcgcattcctactctgacgaattcggaccatctggtactgacttcaccagacgacagctttctctccaggacaatctgcagcatatgctgtccccgccccagatcaccatagggccccagcgacctgcaccctctggccccggggggggctcagggggggggagcggtgggggcggcggcggacagccgccccctctgcaacggggcaaaagtcagcagttaactgtctcggccgctcaaaaaccaaggccatcatccgggaacctcttgcagtccccagagcccagctacgggccagcccgtcccagacagcagtctctatcaaaagagggatccattggtgggtccggagggagcgggggcggcggcggtggcggactaaagccttctataacgaagcagcattcacagaccccttccacgtag

SEQ ID NO: 167846 - DNA, 3900 bp, Artificial Sequence
  derived and/or modified sequence
atgagccggagccgggccagcatccaccggggcagcatccccgccatgagctatgcccccttcagggatgtccgcggccctagcatgcatcgcactcagtacgtccatagcccatacgaccgacccggctggaacccccgattttgcatcatctcgggcaaccagctgttgatgctcgatgaagacgaaatccatcctctgcttattagagataggagatccgagtccagcagaaacaaactgctgcgacgaaccgtgtcagtgccggtggaggggcgcccacatggcgaacacgagtatcatctggggagaagcaggcgcaagtcagtacccggcggtaaacaatacagcatggagggagcacctgctgcaccctttcgcccatcccaggggtttctgtctaggcgattgaaatcaagcatcaaaagaaccaaaagtcaacctaaactggacagaacctcaagtttcaggcagatactccctcgctttcgtagcgcagatcacgatcgcgccaggcttatgcagagcttcaaggagtcacacagtcacgaaagcctgctaagcccttcgtcagccgccgaggccctggagctgaatttagacgaagattcgatcattaagcctgtgcatagcagcattcttggccaggaattctgttttgaggtgacaaccagctcgggcacgaaatgttttgcctgtcgttccgctgccgaaagagacaaatggatcgagaacctgcagcgggctgtcaagccaaacaaggacaattcaagaagagtcgacaacgtacttaagttatggatcatagaagcccgggagcttcccccaaagaaacggtattactgcgagttatgcctggatgacatgctgtatgctagaacaacttcaaaacccaggtctgcctccggggataccgtgttctggggtgaacactttgaatttaataacctacccgccgttagagctcttcgactccatctctatcgagattccgacaaaaaacggaagaaagacaaggccgggtacgtggggctggtgactgtgcccgttgccaccctggctggccgacacttcactgaacagtggtatccagtcactctgccaaccggcagcggaggtagtggtgggatgggatccggaggcgggggggggagtggcggtggctcaggtgggaagggcaaggggggctgccctgccgtccgcctgaaagctcggtaccagactatgagtattcttccaatggaattgtacaaggagtttgcggaatatgtaacgaaccactatagaatgctctgtgctgtgctggagcctgcccttaacgttaaaggcaaggaggaggttgcctcggcactggtccatattctgcagtctacaggaaaagccaaagacttcctgagcgatatggctatgtctgaggtcgatcgatttatggaaagggaacacctgattttccgagaaaacaccctggcgactaaggccatcgaagagtacatgcggctgattggccagaagtacttgaaggatgccatcggcgagtttatcagggcactttatgaatccgaagaaaactgcgaggtcgacccgattaagtgcaccgcgtcctccttagccgagcaccaagccaacctgcgcatgtgctgcgaactcgccctgtgtaaagtggttaatagccactgcgtatttccacgggagctgaaggaagttttcgccagctggaggttgagatgcgcggagcgtggcagagaagacatagccgaccgactcatctcagcatctttgttcctccgtttcctgtgccctgctatcatgtccccctccctgttcgggctgatgcaggagtatccggatgagcagacctctagaacactgaccctaattgcaaaggttatccagaatttggcaaatttctccaagtttactagcaaggaggactttctcggattcatgaatgaatttctcgagcttgaatgggggtctatgcagcagttcctgtatgagatctccaatctcgacacactgacaaactcgagctcctttgagggatatattgacctgggtagagaactctccacattacatgccctgctgtgggaggtgcttcctcagctgagcaaggaggcattgctgaagctgggaccattgcctagactgcttaacgacatttccaccgctttgagaaacccgaatatccagagacagccctctcgacagagcgagcgccccagacctcagcctgtggtgctgaggggtccatctgctgagatgcaaggctacatgatgcgcgacctcaactcttcgattgatctccagtcgtttatggctcgcggcctgaattcaagcatggacatggcccgtctgccctccccaaccaaagaaaagccccccccacctccccccggcgggggaaaggaccttttctacgtgtcacggcctcctctggccaggtcctccccagcctattgtacgagtagcagcgatattactgaaccagaacagaagatgttgtccgtcaataagagcgtgtcaatgctggacctgcagggggacgggccaggggggcggcttaactcttccagtgtctctaacctggcagccgtgggtgacctgttgcatagctcccaagcctccctgaccgctgcactcggactccggccagctcctgctgggagactaagccaaggatctggaagcagcatcactgcggccggaatgcgcctgtcacagatgggagtgaccaccgatggcgtgcctgcacagcagctccggatacccctgtctttccagaaccctttattccacatggccgcggacggccccggccctcctggcggacacggcggaggggggggccatgggcccccttcctctcaccaccaccaccaccaccatcatcatcaccgtggaggagagccccctggggacacatttgcacctttccatggttactctaaatcagaggatctatccagtggggtgcctaagccccccgctgcctccatattacactctcactcatatagcgatgaatttggccctagcggtactgatttcacccgacgacagttgtctctccaggataatctgcaacatatgttgagcccgcctcaaatcaccattggaccccaacgacctgctccgagcggaccaggaggtggatccgggggagggagtggggggggtggtggcggacagcccccaccattgcagcgcggcaagagtcagcaactaactgtttccgcagcacagaagcccaggcccagcagcggaaacctgttgcagagtcccgaaccatcttacggcccggcccgaccccgccaacagagcctgtctaaagaaggttccattggcggaagcggggggtctggtggcgggggcggagggggactcaagcctagcattactaagcagcattcccagacgccctcgactctgaatcccaccatgccagcatcagaacggaccgtggcgtgggtgtccaacatgcctcacctttctgccgacattgagtcagcacatattgagagagaggagtataaactgaaagaatactcgaagagcatggacgagtctcgcttagatagggtaaaggagtacgaggaagagattcattcactgaaagagagactgcatatgagcaacagaaaactggaggagtatgagcgtagacttctgagccaggaggagcagacgagtaagatcttaatgcagtaccaggctcggctggagcagtccgagaagagactccgccaacagcaggcagaaaaggacagccagatcaaaagcatcatcggccggttgatgctggtggaagaggaactgagacgggaccatcccgccatggctgaacccttgcctgagccaaaaaaacgcttgctcgatgcccaacttctgattcgatag

SEQ ID NO: 167847 - DNA, 3855 bp, Artificial Sequence
  derived and/or modified sequence
atgggcctgcggccccccacccccagccccagcggcggcagctgctccgggagcttgccacctccctctaggtgccagcctctgaggaggcgatgttcaagttgttgctttcccggcgaataccacctgggcaggagccggcgaaagagtgttcccggaggaaagcagtacagcatggaaggagctccagcggctccctttcggccatcccagggattcctttctaggaggctgaagtcctctattaagaggacaaagtcccaacccaagttggacagaacgtcctctttccgtcagatccttccgcgcttcaggagcgccgatcatgaccgggcgaggctgatgcagagttttaaagaaagtcacagtcacgaaagcctgctttcaccttcttctgccgccgaagccctcgaactgaacttggatgaggactctatcatcaaaccagtgcattcatctatcttaggacaggagttctgctttgaggtcaccacctcaagtggcaccaagtgcttcgcttgccgttctgctgctgaaagagataaatggatcgagaacctgcagcgagctgtgaagcccaataaggacaactcacggagagtggacaatgttcttaagctgtggatcatagaagcccgagagctacctcctaagaagagatactattgcgaactctgcttggacgacatgctctacgcccgcaccaccagcaaaccgcgatctgcctcaggggataccgtattttggggcgaacactttgaatttaacaatctgcccgccgtacgcgcacttcgactgcatctctaccgggatagcgataaaaagagaaaaaaagacaaagcggggtacgtggggctcgtgactgtgcctgtcgccacacttgctggtagacatttcaccgagcagtggtaccctgttacactacccactggaagtggtggctctggcggcatgggcagtgggggaggaggcgggagtggaggcgggagtggtggaaagggaaagggtgggtgcccagcggtacggctaaaagcacggtaccagactatgagcatactacctatggagctgtacaaagaatttgcggaatacgtaacgaatcattatcgcatgttatgtgccgtcctcgaaccagccctcaacgtgaaagggaaggaagaggtggcgtctgcactggtacacatcctgcagtctaccgggaaagccaaggacttcctctccgatatggccatgtcagaagtggaccgctttatggagagggaacacctaatcttcagagaaaatacactggctaccaaggcgatcgaagaatacatgagactgattggccagaagtacctgaaagatgccatcggagagttcattagagcactgtatgaaagcgaagagaactgcgaagttgaccccattaagtgtacggcgagtagccttgcggagcaccaggccaacttaagaatgtgttgcgagttagccctgtgtaaggtggtgaactctcattgcgtgttccctcgggaactgaaggaggtgttcgccagctggagactgcggtgtgctgagcgcggcagagaggacatcgccgaccggttgataagcgcttcgctgtttcttcgattcctctgtcccgccattatgtctccctctctgttcgggttaatgcaagagtacccagatgaacagactagccggaccctcactctgatcgctaaagttattcagaacctggcgaacttctcaaaatttacatccaaagaagactttctgggctttatgaacgagtttctcgagctcgagtggggatcgatgcagcagtttctgtacgagatcagcaatcttgacacactcactaactcctccagcttcgaagggtacatcgaccttgggcgggagcttagcacgctccatgcgcttctttgggaggtcctgcctcaattatccaaggaagccctgctcaagttgggtccactcccccgactccttaatgacataagtaccgcacttcgcaaccctaatatccagcgccagccttcacggcaatcggaaagaccccggcctcaacctgtggtgctcaggggcccctcagcggagatgcagggctacatgatgagagatttgaactccagtatcgatcttcagagcttcatggcccgcggtcttaactctagtatggatatggctaggctcccgagccccacgaaggagaagccccccccgccgccgcccggcggcggcaaagacttattctacgtcagcagacctcctctggccagatcaagtccagcatactgcacgtcctcctccgatattacagaaccagagcaaaagatgctgagcgtgaataagagtgtcagcatgcttgacctgcaaggagatggccctggtggtcgtctaaatagcagttcagtgtccaaccttgctgccgtaggcgatctgctgcatagtagccaggcaagcctgactgccgcacttggcctgcgccctgcccccgctgggagattgtctcagggctccggatcttctatcacagcggccggtatgcggctgagccagatgggtgttaccacagatggtgtgccagcgcagcagcttcgcatacccttaagctttcagaatccccttttccacatggctgccgacggccctggcccaccaggtggacatggcgggggaggaggccacggtcccccgtctagccaccaccatcaccaccatcaccaccatcaccgcggcggggagccacccggcgatacgttcgctccctttcacggctattctaaaagcgaagacctctccagcggtgtccctaaacctcctgcggcctcgattttacatagtcactcttattctgacgagtttgggcctagtggaaccgactttaccaggcgccaattaagcctgcaagacaatttgcagcatatgctgtctcctccacaaataacgatcgggcctcagcgcccggctccgagtggacctgggggaggcagcggaggtggatctggcggcgggggcggcggacaaccaccgccactgcagcgagggaaatcgcagcagcttaccgtgtccgccgcccaaaagccccggccctccagtggaaacctgcttcagtctccagagcctagctacggtccagcccgaccgagacagcagagcctctccaaggaaggttcaattggtggctccggaggctctgggggggggggtgggggtggcttgaaacctagtattaccaaacagcattcacagacgccctctacattgaatccgaccatgcccgccagtgagaggacagtggcatgggtgtctaacatgcctcacctttccgcagatatcgaatcagcgcatatcgagcgcgaggagtataagctcaaagagtactcaaagtcaatggatgaatccagacttgatcgcgtaaaagaatatgaggaagagatccacagtctgaaagaaagactgcacatgtcaaaccggaaactggaggagtatgaacggaggctcctgagtcaggaagagcaaacttctaagatcctcatgcagtatcaagctaggttggagcagagcgagaaacgcctcaggcagcagcaggcagagaaggactctcaaatcaaaagcatcattggccgcctgatgctcgttgaagaagagctccggcgggaccatcctgccatggccgaaccgcttccagaacctaaaaaacggctactcgacgcacaagagcgacagctgccccccctgggaccaactaacccaagggtaacattggcaccaccttggaacggccttgctcctccggctccaccccctcctcctaggttgcagataacagagaacggtgagtttagaaacaccgccgaccactag

SEQ ID NO: 167848 - DNA, 4032 bp, Artificial Sequence
  derived and/or modified sequence
atgagccggagccgggccagcatccaccggggcagcatccccgccatgtcgtacgccccctttagagacgtgaggggtccgtcaatgcacagaacccagtatgtgcactccccgtatgatcggcctgggtggaacccgaggttctgtatcatcagcggcaaccagctgttaatgttggacgaggatgaaattcaccctctcttgatccgcgatcgtcgatctgaaagttcgagaaacaaacttctgcgacgcaccgtgtctgtgcctgtggaagggcgcccacacggggagcatgaatatcatctcggaaggtctcggcgcaaaagtgttccaggcggtaagcagtacagcatggagggagcccctgcagcgcccttccggccgagccagggattcctcagccgacggttgaagtcaagcataaaacggacgaaaagtcagcccaagctggaccgcacttcctcgttcaggcaaatactgcctcgatttcgaagcgctgaccacgaccgcgccagattgatgcaatcattcaaagagagtcacagtcacgagtcattgctgagtccatcctccgcggccgaggccctggagttaaatctggacgaggattcaattatcaaacctgtgcactcatccatactaggccaagagttctgcttcgaagtgaccacaagttccggtacgaagtgttttgcttgcagatccgccgctgaaagagataagtggattgagaatctacagcgtgccgtgaaaccaaacaaggacaactcccggagagtggacaacgtgttgaagctgtggatcatagaggctcgtgagttgccccccaaaaaaagatactattgcgagctctgcctggacgacatgctgtacgcccgcaccaccagcaagccacgtagtgcctccggtgacacagtgttctggggagaacacttcgaattcaacaatttacctgctgtgcgcgcactcagactgcatttataccgtgactcagataaaaagaggaagaaagacaaggccggatacgtgggacttgtcaccgtgcctgtcgctacactggcgggtcgccatttcacggagcagtggtatcctgtcactctccctaccggctcgggcgggtctggtgggatggggtccggagggggtggtggctccgggggcggctctggtggaaagggcaagggtggctgtcccgccgttagactgaaggcgaggtatcaaactatgtccattctcccaatggagttgtataaggaattcgcagagtacgtcacaaaccattaccgtatgttatgtgccgttctggaacccgctcttaatgtcaagggcaaagaggaggttgccagtgctctggttcacattctacagtctacaggcaaagccaaggactttctgagtgatatggccatgagcgaagtcgatcgattcatggaaagggaacatttaatattccgggagaacaccctagcaaccaaagccatcgaagagtacatgcggcttataggccagaagtatttgaaagacgctatcggagaatttatccgagccctgtatgagtcggaggagaattgtgaagtggaccctatcaaatgtaccgcctcttctctggccgagcaccaggcgaacctgcgtatgtgttgtgagctcgcgctctgtaaagtggttaatagtcattgtgtattccctagagagctgaaggaagttttcgctagttggagacttaggtgcgccgaacgtggcagggaggacattgccgatcgtttaatatccgcctcactcttcctgcgcttcttatgccctgcaataatgagtcccagcctcttcggcctcatgcaggagtacccggatgagcaaacaagcaggacactcactctcattgccaaagtgattcagaatttagcgaacttttccaagtttaccagtaaggaggatttcctaggcttcatgaatgagtttctcgagcttgagtggggcagcatgcagcagttcctctatgaaataagtaatttggatactttaactaacagtagctcgttcgaaggatatattgatctggggcgtgagctaagtaccctccatgccctgttgtgggaagtcctgccccagctcagcaaggaggcactcttgaaattgggcccccttccccgcctgctgaacgatatctcaaccgcactgcggaatccaaacatccagagacaaccgtctcggcagtcagagaggccacgaccgcagccagtcgtccttcggggcccttcagcggaaatgcaggggtacatgatgcgcgacctgaactcaagtattgatctgcaatcatttatggctcgaggccttaactccagcatggatatggccaggctgccatcccccacaaaagagaaaccaccaccgccgcctcccggtggggggaaggatctgttttatgttagccggccccccctggcccgctcctcaccagcttactgcacctcctccagtgacataactgagcccgaacagaagatgctttctgtgaacaagtcagtgtcaatgctagacctgcaaggagacgggcctggtggtcggctcaattctagcagtgtttctaatcttgcggcggtcggcgatttgcttcattcatcccaggcctcactgaccgcggccctcggtttgcggcctgcaccggcagggagattatcgcagggaagcggttcttctatcacagcagccgggatgaggctgtcccaaatgggtgttacgaccgacggggtccctgcccaacagctgcggatcccactttctttccaaaaccccctctttcacatggccgcggacggaccgggtccccctggcgggcatgggggaggcggaggccacgggccaccgagttcccatcaccaccatcaccatcaccaccaccatcgcggcggtgaacctcctggcgatacgttcgccccctttcacggatattccaagtccgaagacctgagcagtggagtgccgaaaccacctgctgcctcgattctacatagccacagctatagtgacgagtttggcccatcaggcacagacttcacccgcagacaactctctctccaggataacctgcagcacatgttaagtccgccccagatcactatcggcccacagagaccagccccatctggcccaggaggcggctctggtgggggtagcggcgggggcgggggggggcagcctccacctttgcaacggggaaagagtcagcaactgactgtgagtgccgcccaaaaaccgcgacctagctctggcaatctgctgcagtctcccgagccatcctacggccctgcccgcccgaggcagcagtcactctcaaaggagggaagtatcgggggaagcggcgggagcggcggaggaggtggtggaggactcaagccttctatcacaaagcaacacagccaaactccaagcacacttaacccgacaatgccagccagtgagagaaccgtggcctgggtgtcaaatatgccccacttatctgcagacatcgagagtgcccacattgagagagaggaatataaactgaaggagtattctaaatccatggacgagtccagactggatcgtgtgaaggaatatgaggaggaaatacactcccttaaagaaaggctccacatgagtaataggaaactggaggagtacgaacggagactgttatcccaggaggagcaaacatctaaaatcttaatgcagtatcaagctcggctggaacagtccgagaaaaggctcaggcaacagcaggcagagaaagattcccaaataaagagcataatcggtcggctgatgttggtggaagaggaacttcgcagagatcaccctgcaatggctgagcccttgcctgagcccaagaagaggctgctggatgcccaagagcggcagctccctcctctcgggccaactaacccacgagttaccctggctccgccctggaacggattggcccctccagctcccccccctccaccacggctgcagataaccgagaacggcgaattcaggaacacggcagaccattag

SEQ ID NO: 167849 - DNA, 3879 bp, Artificial Sequence
  derived and/or modified sequence
atgagccggagccgggccagcatccaccggggcagcatccccgccatgtcgtatgcacctttccgtgatgtacgaggcccatcgatgcaccgtacgcaatatgtgcacagcccctatgatagacctgggtggaaccctaggttttgtattatttccggaaaccagctgctaatgctagatgaggatgagatccaccccctccttatccgcgacaggcgaagcgagtctagcaggaacaagctcttacgcagaactgtgtctgtcccagttgaggggagaccccacggtgaacacgaatatcatcttgggcgctctagacgcaaatccgtccctggtggcaaacagtactcaatggagggggccccggccgctcccttcaggccctcccagggattcctatctcgccggctcaaatcctccataaaacgcaccaagagtcagcctaagttggaccgaacatctagtttcagacagatcctgccacggttcaggagcgcggaccacgatcgcgcccggttgatgcagagcttcaaggagagtcacagccatgaaagtttactcagccccagcagtgcggcggaggcactagagttaaatctggacgaagacagcatcattaagcccgtgcactccagcatattaggccaggagttctgtttcgaggttactactagctccggcactaaatgttttgcctgtaggagcgcggctgagcgtgacaagtggatcgagaatctgcagagagccgtaaaacccaataaggataactccagacgagtggacaacgtcctgaaactgtggattatagaggcacgggaactcccaccaaagaagcgctactactgcgagctctgtcttgatgatatgctgtacgcacgaacgacctctaagccaagaagcgcatcaggcgacactgtattttggggcgagcacttcgaattcaataatctgccagctgtgcgcgccctgcgcctgcacctctatagggattctgacaaaaagcggaagaaagacaaagccggttatgtaggacttgtgacggtccctgtggcaacattggccggcagacacttcacggagcagtggtacccggtaacactgcccactggctccgggggttcaggcgggatgggatcaggaggtggaggaggttcagggggggggagtgggggcaaagggaaaggaggctgccccgcagtgcgcctgaaagctcgctaccaaaccatgtcgatcctgcccatggagctgtacaaggagttcgccgaatacgtgaccaaccactataggatgctctgtgctgtgctggagcccgctctcaacgtcaagggcaaagaagaagtggccagcgccctggtgcatattcttcagagcactggtaaggccaaagacttccttagcgatatggcaatgtccgaggtggacagatttatggagcgcgagcatttaattttccgggagaatacgcttgcaacgaaggccattgaagaatacatgcgcctgattggccagaagtacctgaaggatgcaataggggaattcattcgcgctctatacgaaagcgaggagaactgcgaagtggaccccatcaagtgcacagcatccagcctggccgaacatcaggccaacttgaggatgtgctgtgaacttgcactgtgcaaagtggtaaactcacactgcgtctttcccagggagctgaaggaagtctttgccagctggcggctgaggtgtgctgagcgggggagggaagatatcgccgatcgcctaatctcagcttccctgttcttgagattcttgtgcccagcgataatgtcgcctagtctcttcgggctgatgcaggagtaccccgatgagcagacatctagaactctgactctgatcgccaaggttatacaaaacttggctaacttctctaagttcacttcaaaggaagatttcctgggctttatgaacgagttcctcgagcttgaatgggggtccatgcagcagttcctctacgagatatccaacctcgacaccttgactaattcctctagttttgaaggctatattgacctgggtagggagctttccactcttcatgcgctgctctgggaggtgctccctcaactcagcaaggaagcgctgctgaaactcggtcccttaccacggctgttaaatgatataagcaccgcgcttaggaatcccaacatacagcggcagcccagccgccagtctgagcgacctaggccacagcccgtcgtactacggggtccaagcgcagagatgcagggctatatgatgcgcgacctgaactcttctatggatatggcaagactgccctctccaacaaaagagaagcctccaccacccccacctgggggtggtaaggatctgttttatgtctcccgccccccattggccaggtctagtccggcttactgcacctcctccagtgacattactgagcctgaacagaagatgctttctgtaaataagtctgtcagcatgctcgatctgcagggagacgggccaggtggcaggttgaactcgtcctctgtgtcgaatcttgccgcagtaggcgacctgttgcacagctcccaggcgtcactgacggctgccctcggactgcgccctgctccagcgggcagactgtcgcaagggtcaggttccagtattactgccgcaggcatgagactgtctcaaatgggagtcacaaccgacggagtgcccgcccaacagttgcgcataccactgagttttcagaaccctttgtttcacatggcagcagatgggcctggccctccagggggacacggcggagggggcgggcatgggcctcccagcagccaccaccatcatcaccatcatcaccaccatcggggcggagagcctcctggtgacacatttgccccattccacgggtatagtaaatcggaggacctgtcttcgggcgtgccaaaaccacctgccgcatcgatcttgcatagccattcatatagcgacgagtttggaccttctggcactgacttcacccgccggcagctatcgctgcaggacaatcttcagcacatgctgtctccaccacaaatcaccatcggacctcagcggcctgccccctctggcccaggagggggctcggggggggggagcggcggtggtgggggcggccagccaccgcctctccaacgaggaaaaagccagcaattgaccgtgagtgctgcacagaaaccccgtcccagttccggtaacctgctgcagagccccgaaccatcttatgggcccgctaggccaaggcagcagagtctttcaaaggaaggctctataggtggctcgggaggctccggaggaggagggggaggaggcctcaaaccatccatcacaaagcaacatagtcagacacctagcacgctaaaccccacaatgccagcctccgagcgcaccgtggcatgggtttctaatatgccacacttgagcgctgatatcgagagcgcacacatagaacgggaagagtataaactgaaagaatacagcaagtctatggatgaaagccggctggacagagagtatgaggaagagatccacagcctgaaagagcgattacatatgtccaatcggaagttggaagaatatgaaagaaggctgctctctcaggaggagcagacaagcaagatccttatgcagtaccaggctaggttggagcagtctgaaaagcggttgcgccagcagcaggctgagaaagacagtcagatcaaaagtatcattggcagactgatgttagtggaggaggaacttaggcgggatcaccccgcgatggctgagcctttgcccgagcccaagaaacggctcctcgatgcccagcggggtagctttccaccttgggtgcagcagacccgggtgtag

SEQ ID NO: 167850 - DNA, 4032 bp, Artificial Sequence
  derived and/or modified sequence
atgagccggagccgggccagcatccaccggggcagcatccccgccatgtcctatgctccctttagagatgtgagaggacccagcatgcacaggacacagtatgtgcattccccttatgaccgccctggctggaacccacggttctgcataatcagcggaaatcagctgctcatgctcgacgaagacgaaatccacccactccttataagggatcggagatctgagtccagccgaaataagctgctgcgacggactgtatctgtgcccgtggaaggaaggccacacggagagcacgaatatcatctggggcgcagtcggaggaagagcgtccccggagggaaacagtactctatggagggtgcccctgcagctcctttcagaccttcccagggattcctaagtcggcgcttgaagtcctcaataaaaaggactaagagccagccaaaactcgatcgtacgtcttcatttcggcagattttgccgcggtttcggagcgctgaccatgatagggcccgcttaatgcagagcttcaaagaatcacacagtcatgagagcctgctgagcccaagctctgcagcggaagccctcgagctcaacctagacgaagacagcattatcaagccggtgcacagttcaattctgggccaggaattttgtttcgaggtgacaacctcttccggcaccaagtgttttgcatgcagatctgccgcagagagggacaagtggatcgagaacctccagcgggctgtgaagcccaacaaggacaacagtaggcgagtcgataacgtcttgaagttatggattatcgaagctagggagcttccgccgaaaaaacgatactactgtgaattgtgcctggatgacatgctatacgctcggaccacttcaaagcctcgcagtgcctccggcgacactgtcttttggggagagcacttcgagtttaataacttaccagcggtgcgggcactgcggctgcacctctatagggactccgacaagaagcgaaaaaaagataaggctggttacgttggactagtcacggtgcccgtggctactttggccggacgccatttcacagagcagtggtaccctgtgaccctgcctaccggatcaggggggtccggaggcatggggagcggggggggcggcggttccggagggggaagtggtggaaaggggaaaggcggctgccccgctgtgcgcttgaaggctcgttatcagaccatgtcgatcttgccaatggagctgtacaaggaatttgccgaatacgtgactaaccactataggatgctatgcgccgtgctcgaaccagcactcaacgttaagggaaaggaggaggttgccagcgctctggttcacatactccaatccactgggaaagccaaagacttcttatccgatatggccatgtctgaggtggatcgctttatggaacgcgagcatttgatcttcagagaaaacaccctggcgaccaaagccatcgaagagtacatgagattaataggacagaaatatctgaaggacgctataggtgagttcatcagggctttgtatgagagtgaggagaattgtgaggtggatcccatcaaatgtactgcttcttccctcgccgaacatcaggcaaacctgcggatgtgctgcgaactcgccctttgcaaggtggttaattctcattgcgtgttcccacgggagctgaaggaggtgtttgcaagctggcgcctgaggtgtgcagagaggggacgcgaagacatcgccgacagacttatctccgcgtccctgttcctgagatttctctgccctgctataatgagcccttccctctttggtcttatgcaggaatacccagatgagcagacctcccggacactcaccttaatcgctaaagtgattcaaaacttggctaacttctcaaagtttacatcaaaggaggattttctaggttttatgaacgagttcctggaactcgaatgggggtcgatgcaacagtttctgtatgagatcagcaacttagatacactgactaactcgagcagcttcgaaggatacattgacctgggccgggagttgtctacgcttcatgctctgctctgggaggtcctgccccagctgagcaaagaggcgttgctgaagttggggcccctgccgaggttgctcaatgatatttccactgctttgaggaatcctaacatacagaggcagccttccaggcaaagtgaaaggccaagaccacaacccgtggttctacggggtccctcggccgagatgcaaggatacatgatgagagacttgaactcctccatcgacctccaatcatttatggcgagggggcttaactcctcaatggatatggcccggctgcccagtcctaccaaggaaaagccaccgcctccgcctcccggaggcgggaaagatctcttctacgtgtcacgccctcccctcgctaggtcaagcccagcatattgcactagcagctccgacatcacggaacccgaacaaaagatgctaagcgtgaataaatcagttagcatgcttgatcttcagggcgatggaccaggtggacgcctcaattcttcatctgtttccaatctcgctgccgtgggagaccttcttcactcttctcaagctagtctgacggcagcactaggccttcgacctgccccagccgggcgtttatcccaggggagcggctcctccattactgcggctggcatgagattatcccagatgggcgtaacgacggatggcgttcccgcgcagcagttgagaatacccttgagcttccaaaatccgctgttccatatggcggcagatggacctgggcctccagggggccatggagggggcgggggccacggacctcccagcagccaccatcaccaccatcatcatcaccaccacagaggaggtgagccccctggagacactttcgccccatttcacggatacagcaaatccgaagatctctccagcggcgttcctaagcctcctgctgcttccattctgcactctcattcgtatagcgacgaattcggtcccagcgggacagatttcaccagacggcagctgtctctgcaggataacctccaacacatgctttctcccccacagataactatcgggccccagcgccctgccccctcagggcccggcgggggatctggcgggggaagcggcgggggcggggggggtcagccgccacccctgcagcgcgggaagagtcaacaactaacagtttcagctgcccagaagcctagaccctccagcggcaatctcctgcaatcaccagagcccagctatggtcccgccagaccccgccagcagagcctgagtaaggaggggagcatcggcggaagcggcggttccggtggggggggtgggggtgggcttaaaccaagcatcacaaagcagcattcacagactccttctacgctgaaccctaccatgcccgcctcagagcggacggtggcatgggtatcgaatatgccccacctgagtgccgatatcgaaagtgcgcatatcgagagagaagagtataaactgaaggagtacagcaaaagcatggacgaatccagactggaccgagtgaaggaatatgaagaggaaatccactcactgaaagaaagactccacatgtccaatagaaagctcgaggagtacgagaggcggttgcttagccaagaggagcaaacctctaaaatcctcatgcagtaccaggcaaggctggaacagtccgaaaagagactacgccagcaacaggctgagaaggacagccagatcaaaagcattatcggccgattgatgctcgtagaagaggagttgcgcagagatcatccggccatggccgagcccttacctgagccaaagaaacgcctcctcgacgctcaggagagacagctgccaccacttggtcccacaaacccccgggtgactctcgcgcctccgtggaatggcttagctccccctgctcctccaccaccgcccaggctgcagatcacggagaacggcgaatttaggaacaccgcagaccactag

SEQ ID NO: 167851 - DNA, 3900 bp, Artificial Sequence
  derived and/or modified sequence
atgagccggagccgggccagcatccaccggggcagcatccccgccatgtcttacgccccattccgagatgtcaggggtccctctatgcatcgaacacagtatgtgcatagtccttatgacagaccgggctggaatccaagattctgcatcataagcggcaatcagctcctgatgctcgatgaagatgaaatccatccactacttatcagggatcgccgatccgagtcgagccgaaacaaattgctgagaagaacagtttccgtgccagtcgagggtcgccctcatggagagcatgagtatcacctgggtcgctctcggaggaaatccgtgccgggcggaaagcaatacagtatggaaggagctcccgccgcacccttcagacctagtcaagggttcctgtcgcggagattgaaaagtagcatcaagagaacaaagagccagccgaagctggatagaacctcttccttccggcagattttaccgcgcttccgatcagctgatcacgaccgggcgcgactcatgcaaagtttcaaagaaagtcacagtcacgaatccctcctctctccttcttccgccgctgaggccctggagctgaacctggacgaggatagtataatcaaaccagtgcactcttccatactgggtcaagaattctgttttgaggtcacgacctccagcggtactaagtgctttgcttgtcgttctgctgctgagagagacaaatggatcgagaatctgcaaagagcagtgaagccaaataaagataacagccggagggttgacaacgtcctgaagctatggattattgaggcaagggaactgcctccaaaaaagcggtactactgcgagttgtgcttagatgacatgttgtatgcccggactaccagcaagcctcgatctgcatctggcgataccgtgttttggggcgagcacttcgagtttaacaatcttcctgcagttcgggccctgcgcttgcatctctatagggactcggataagaagcggaagaaggacaaggctggctacgtggggcttgtaactgtcccagtggctacgctcgccgggcgtcacttcactgagcagtggtaccccgtcactcttcccactggatccggcggctccgggggcatgggctccgggggcggcggcggctccggaggagggagcggggggaaggggaagggcggatgcccagccgtgcgcctgaaagctagataccagacaatgtccatcctaccaatggagctgtataaggaattcgcagaatacgtcactaatcactatcgtatgttgtgcgctgtcttggaaccggccttgaatgtgaaggggaaggaggaagtcgcctcagctcttgtgcatattttgcaaagcactggaaaggctaaagacttcctgtctgatatggccatgtccgaggtggacagatttatggagcgcgaacatttaatttttcgcgagaataccctggcaacaaaggctatcgaggaatatatgaggctcatcggacagaagtatctcaaggacgctataggagaatttattcgtgccctgtatgagagtgaagagaactgtgaggtggaccccattaagtgcaccgcctcctcactggcggagcaccaagcgaatctgcgcatgtgttgtgaactggctttatgtaaagtggttaacagccactgtgtctttcccagggaactgaaggaggtgttcgccagctggcgcctcagatgcgccgaacgcggccgagaggacatcgccgaccggctcatcagtgcttcgttgttcctgagatttttgtgtccagccatcatgtccccctctctgtttggattaatgcaagagtatcctgacgaacagactagccggacactcaccctgattgcaaaggtgatccagaacttagctaacttctctaagtttacgtcaaaggaggactttctggggtttatgaacgaattcctggagctcgaatggggtagcatgcaacaatttctgtacgagattagcaatctggatacactgacaaatagctcaagcttcgagggatacatcgatctgggtcgcgaactttcaacactccacgctctcctttgggaggtgttgccgcagctcagcaaagaggctctcctcaaactcggccccctgcccagacttttgaacgacatttctaccgcactgagaaatccaaatatccagcgccagccatcccgacagagtgagagaccacgcccacaacctgtggtcctcaggggaccttcagctgaaatgcaggggtacatgatgagggatttgaactcctccatcgatctgcagtccttcatggcaagagggttaaatagctctatggatatggcacgcctcccatctcctaccaaggaaaaacccccaccaccccctcccgggggcggaaaggacctgttctatgtgagcagacccccgcttgccaggtcatcaccagcgtattgtacaagctcaagcgacatcaccgagcctgagcaaaagatgctctcggtaaataaatcagttagcatgcttgaccttcaaggcgatggacccgggggtcgactcaattcctcgagcgtatccaatctcgcagcggtcggtgacctgcttcacagctcccaggcaagcctgactgcagcgcttggacttcgtccagccccggccggccggcttagccagggttctggctcctctattaccgccgcaggtatgcggctaagccaaatgggcgtgactacagacggcgtgcccgcccaacagctgcggattccattgtcctttcaaaatccgcttttccacatggccgcagacggaccgggaccacccggtgggcatggtggcggcggggggcacggacctcctagcagccaccaccaccaccaccaccaccatcatcaccgcggaggggagccacccggggatacgttcgctcccttccacggctacagtaaatccgaggatttaagttcaggcgtgcccaaaccccccgccgcttccattctacactcccactcatacagtgatgagttcggaccttccggaacggattttactcgcagacaactctcccttcaggataatcttcagcacatgcttagccccccccaaatcactataggccctcagaggccggcaccgagcggaccaggcgggggttcaggcgggggctccgggggcggaggtggaggccagccaccccctttacagagaggcaagtcccagcaactgaccgtctctgccgcgcagaagccgcgccccagcagcgggaacttactgcaaagtcccgaaccttcttacggccctgcccgccctcgccagcagtctctatccaaggagggtagcatcggcgggtccggcggctctggggggggaggcggcggggggttgaaaccctcgatcaccaagcagcacagccaaacaccttccacactgaacccaacaatgccggcttctgaacgtaccgttgcctgggtttcaaatatgccccacctgagtgcagacatagaatctgcccacattgagagagaggagtataagctgaaggaatatagcaaaagtatggatgaatcccgccttgatagagtgaaagagtacgaggaggaaattcacagcctcaaggaacgactacacatgtctaaccgcaagcttgaggaatatgaacgacgccttctcagtcaggaggaacaaacctccaagatcctgatgcagtaccaggcacgactggaacagagcgaaaagagattgcgacagcagcaggcagagaaagactcacagatcaaatccataatcggtagactcatgcttgtggaagaagagctgcggagagaccatcccgccatggctgaacccctgcccgagcccaaaaaacgactactcgacgcccaattattgattcgctag

SEQ ID NO: 167852 - DNA, 3900 bp, Artificial Sequence
  derived and/or modified sequence
atgtccaggtccagggcttcaattcacaggggcagcatccctgctatgtcatatgcccctttccgcgacgtgcgcggaccctctatgcaccgaacccaatatgtgcatagcccatatgaccgccctggttggaacccacgtttctgtatcatctcaggtaatcagctgttgatgctggatgaagatgagatccaccccctcctgatccgagatcgaagatcagagtcctctaggaataaactgctgaggagaaccgtgtcggtaccagttgagggacgcccacacggcgagcacgagtatcacctcggcagatctcgcaggaaatctgttccaggcggtaaacagtatagtatggagggggcaccagccgctcccttcaggccgtctcagggatttctcagcaggagactgaagagcagcattaagcgaactaagtcacagccaaaactcgacagaaccagttccttcaggcagatactccctaggtttcggagcgctgaccatgatagagccagattgatgcagagcttcaaagagtctcacagccacgagtcgttactttcaccaagctcagccgctgaagcgctggaattaaacttggatgaggacagcatcatcaagcccgtgcatagctcgatacttgggcaggaattctgcttcgaagtaactacaagctcgggaactaaatgcttcgcctgccgctcagccgcagagcgggacaagtggatcgagaaccttcagcgggctgtaaagcccaataaggataattcgcgccgagttgacaacgtgcttaagttgtggatcatcgaggctagggagctcccaccaaagaaaaggtattactgcgagttatgcctcgatgacatgttatacgcgagaacaacctccaaacccagatctgcctccggggataccgtgttttggggcgagcacttcgaattcaataacctgcccgctgtcagggctctgaggctgcatttgtatagagacagtgacaaaaaaaggaagaaggataaggccggttacgtaggtttggtaaccgtaccagtagctacactggcagggagacactttaccgaacagtggtatcccgtcacacttccaactgggtcaggcggaagtgggggaatgggctctggagggggtggcggaagcggaggaggctctggagggaaaggcaaaggcggatgccctgcggtccgtctcaaagcgagatatcaaacaatgagcattctgcctatggaactctacaaggagtttgctgagtacgtcacgaaccactacaggatgctgtgcgccgtgttggaaccagcattgaatgtgaagggcaaagaggaggtggcatccgccttagtgcatattcttcaatccacggggaaagcaaaggacttcctgtccgatatggctatgagcgaagtggatcggttcatggagagggagcacctgatttttagggaaaatacactggcaacaaaggccattgaagaatacatgagactaattggacagaagtacttaaaagatgccatcggtgaatttattagggcgctatacgaatccgaggaaaactgcgaagtcgacccaattaagtgcacggctagttctctggccgaacaccaggccaatctgcgtatgtgctgcgagcttgctctgtgtaaggtagtcaactcacattgtgtgtttccacgtgagctcaaggaagttttcgcttcttggagactacgctgtgctgagcggggtcgggaagacattgctgatcgcttgatctcagctagtctgtttcttagattcctgtgcccagctataatgtctccatccctgttcggtctgatgcaggaataccctgacgaacagacctcccgcacgctaactctgattgctaaagtgatccagaatttagctaatttctcaaagttcactagcaaagaggatttccttgggttcatgaatgagttcctcgagctcgagtggggttccatgcagcagtttttatatgaaatctcaaatctagacaccctcacaaactcaagttcattcgaagggtatatcgatctgggcagagaacttagcactctccatgctctcctctgggaggtactgccccagttgtccaaggaagctttgctgaaactcgggcctttaccgcgactgcttaacgatatctccacggccctgagaaaccctaatattcagcggcagccgagccgccaaagcgaacgacctaggcctcaacctgtagttctcaggggcccaagtgctgaaatgcaggggtacatgatgagagacctgaacagtagcatagacctgcagtcttttatggcccgtggtctcaattcatctatggatatggcccgtttaccatcacctacaaaggagaagcccccacctccaccccctggcggtggcaaggacctgttctacgtgtctcggcctcccttggcacggagcagcccggcatattgtactagctcttccgatatcacagaacctgaacagaaaatgttgtccgtgaacaagtccgtcagcatgctggacctgcagggagatggacctggaggacgattgaacagctcatctgtcagtaaccttgctgccgtgggtgacctgctccactcaagccaagcgtctttgactgctgctctgggcttgaggccagccccagctggtagactttcacagggaagcggttcctctatcactgctgccggaatgaggcttagccagatgggagtcaccacggacggcgtccccgcacagcaattgaggattcctttgtcatttcagaaccccctctttcatatggccgcagacgggcctggtccaccaggcggtcatggcggtgggggagggcacggccctcccagttcacaccaccaccatcatcaccaccaccatcacagggggggagaacctcctggagataccttcgcaccttttcacgggtacagcaaatctgaggatctgtcatccggcgtccccaagccccctgcagcctcaatcttacactcacacagctactccgacgagttcggcccatctgggacggacttcactcgcagacagctgtcgctgcaggataacctgcagcatatgctatcacctccacagataacgatcggccctcagagaccagctccctccggtccagggggtggctcaggcggtgggtccggcggaggcggtgggggacaacctcccccacttcaacgtggaaagtcccaacagctcacagtaagcgccgctcagaaaccccgtccttcgagtgggaacctcctgcagagcccagagccctcctacgggccagccaggccacggcagcagtctctgagcaaggagggcagcataggcggtagcgggggttcgggtggaggcggtggtggaggcctgaaaccatcgattacgaagcagcactcccagacccctagtaccctgaatcccacgatgccagcctctgaaaggactgtcgcttgggtcagcaacatgccgcacctctcggccgatattgaatccgctcacatagagcgggaggagtataagctgaaagagtactccaagtctatggacgaatcgcgactcgaccgagttaaagagtatgaagaggaaatccattccctcaaagaacgcctccatatgtccaacagaaaactggaggagtacgaaaggcgtttgctttctcaggaggagcagactagtaagatactgatgcagtatcaagccaggctcgaacagtcagaaaaacggctgcgccagcagcaagcagagaaggactcccaaattaagtcaattatcgggcgtcttatgctcgttgaagaagaactccgacgtgaccatccagctatggcagagccgctccctgagcctaaaaaacggttactggatgcccagcttttaatacggtag

SEQ ID NO: 167853 - DNA, 1464 bp, Artificial Sequence
  derived and/or modified sequence
gaagatttcctcggcttcatgaacgagtttctagaactggagtggggaagcatgcagcaattcctctacgagatttcaaatctggacacactgaccaactcctcctccttcgagggttatatagacttgggccgagagttgagtacactgcatgcccttctctgggaggtactcccacagctgagtaaagaagcgctgcttaaactcggaccgctacccagactgctgaatgacatctctactgcacttcgcaatcccaatattcaaaggcagcctagccggcagtccgaacgccctaggcctcaaccagtagttctacgcggaccaagcgcagagatgcaaggctacatgatgcgagatctcaattcaagtatggacatggcccgtcttccctcacccaccaaagaaaagccgcctccaccacccccaggcggaggcaaagaccttttctatgtctcccgccctccactcgcaaggagctcgccagcttactgtacaagctcaagcgatattactgaacccgaacaaaaaatgttgagtgtgaataagagtgtgagtatgttggacttacaaggggacgggccagggggaagacttaacagcagcagcgtgtctaatctggcggcagtgggagatcttctgcacagttcgcaggcctctctcacagcagctctcggccttcggccagctcctgccggacgcctaagtcagggctctggatcttccattacagcggctggtatgaggctctcacaaatgggcgtgactactgatggagttccagcccagcagctaagaatcccactgagttttcagaacccactgtttcacatggcggcagacggtcctggtccccctggcggacacggtggtggcggtggccacggcccaccctctagtcaccatcatcaccatcaccaccaccatcatcggggaggagaacctcccggtgatacattcgccccttttcacgggtactccaagtccgaggacctgtcttcaggcgtccccaaaccaccagcagcgtcaatcctccacagccacagttactcagacgaatttggaccatccggcacagactttacccgacggcagctctcactccaggataacctccagcatatgctgtctccccctcagatcactataggccctcagagacctgctcctagtggtcctggtggcggttctgggggtggcagtggaggcggagggggaggccagccaccacccctccagagggggaagagccaacagttgacagtgtccgcggcacaaaagcctcgacctagcagcggaaacctgctgcagtccccagaaccttcttacggccctgccaggccaagacagcagagcctttctaaggaaggaagcatcggcggatcaggcggatcgggtggaggtgggggtggcggattgaagccaagcatcactaagcagcattcccagactccctctacatag

SEQ ID NO: 167854 - DNA, 3900 bp, Artificial Sequence
  derived and/or modified sequence
atgagccgttctagggcgagtattcatcgcggatcaatcccggcaatgtcctatgcacctttcagggatgtccgaggaccctccatgcaccgcacacagtatgtccactccccttatgatagacccggttggaatcctcgattttgcattatatctgggaaccagctgttaatgctcgacgaagatgaaatccacccactgctgatcagggatcggagaagtgaatcctcgagaaacaaattgctgcgtaggaccgtgtccgttccagtcgaaggaaggcctcatggggagcacgagtaccacctggggaggagccggcgaaagtcagtccccggtggcaaacagtacagtatggagggcgcacctgcagccccatttcgcccaagccagggatttttgtcccggagactgaagagttccatcaagcgcaccaagtcccagcctaaactggatcgcacaagtagcttccgacagatcctgccgagatttcggagtgcggatcacgaccgggcaagattaatgcagtcattcaaagagtctcactcacacgaaagcctgttgtccccctcctcagcagctgaggccctcgaattgaatctcgatgaagactccataatcaagccggtccactcatcgattctgggccaggaattctgctttgaagtgactacttcctccgggactaaatgcttcgcttgtagaagtgccgctgagcgagacaagtggatcgagaatttgcaaagggccgtgaagccgaataaagataactcacgcagggtagacaacgtcttgaaactgtggataatcgaagcgagggagctgcctccgaagaagcggtactactgcgaactatgcttggacgatatgctgtacgctaggactactagtaaacccagatctgccagtggagataccgttttttggggggagcacttcgagtttaataatctccctgccgtgcgcgctctgcgattacacctttacagagattcagataagaaaaggaaaaaggacaaagcaggctacgtgggtctggtcacggtgcctgttgctacgctggcaggtcggcactttacagagcagtggtatcccgtgacactcccaaccggcagcggcggaagtggtggcatgggctccggtggaggaggcggtagtggcggaggcagtggaggtaagggaaaggggggatgtccagccgtgagactgaaagcgaggtatcagacaatgtcaattctacccatggaattgtacaaagaatttgcagaatatgtcacgaaccactaccgtatgctgtgcgccgtgctggaaccggcactgaatgtcaagggaaaggaagaagtcgcgagtgccctggtgcacatcctccagtctactgggaaagcgaaggactttctttcggatatggccatgagtgaagtagaccggttcatggagcgtgagcatctgatttttagggaaaacactctggcaaccaaagcgatagaagaatacatgcggctcataggccaaaaatacctgaaggacgctattggagaattcatccgcgcactgtacgaatcagaggagaactgcgaggtggacccgatcaaatgtaccgcaagctcgctcgcggagcaccaagctaacctgcggatgtgttgcgaacttgcattgtgtaaggtcgtgaactctcattgcgtgtttccaagggaacttaaagaagtgtttgcttcctggcggttacggtgtgccgaaaggggacgagaggatattgcagatcggctgatttccgcttcactctttttgaggttcctgtgtccagccatcatgtcgcccagcctcttcggcctgatgcaggagtaccctgatgaacaaacctctaggacactgactcttatcgccaaagtaatacagaacctggctaactttagcaagtttacgtctaaagaggattttctcggcttcatgaacgaattcttggaactggagtggggttccatgcagcaattcctgtacgagatctctaatctcgacacgctgacaaacagttccagcttcgagggctacattgatttaggacgagaacttagtactctgcatgcgctgctgtgggaagtgctgccacaactaagcaaagaagccctcctaaaactgggcccattgcctaggttgctaaacgatataagtactgcacttagaaatccaaatatacagcgtcagccaagcaggcagtccgagagaccccgaccacagccagtggtgctaagggggcctagcgcagagatgcaggggtatatgatgcgagatctcaattcctctatagacctccagtcgttcatggctcgtgggctgaacagctcaatggacatggctaggctgccctctccaaccaaagagaaacccccacctccacctcctggaggagggaaggacctgttttacgtgtccagaccaccccttgctcgcagttctccagcatattgcacctcgtcaagcgatatcacagagcccgaacagaagatgctgagcgtaaataaatccgtgtcaatgctggatctgcagggggatggtccaggcggaaggctgaattccagttccgtgtctaacttggcagctgtcggcgacctgctccacagctctcaggccagcttgaccgcagcccttggtcttagaccagctcccgctggcagactgtcacagggttccggatcctcgattactgcagctggaatgcggcttagtcagatgggggttaccactgacggcgtgccagcacagcagttgcgaatccccttgtcattccagaatccactcttccacatggctgcggatggccctggtcctccaggcggacatggcggaggaggaggacacggacctccttccagccatcaccatcaccatcaccaccaccatcaccgcggtggtgaaccccctggcgatacgttcgcgccatttcacggttacagtaagtcagaagatctgtcctctggtgtacccaagccaccagccgcatccattcttcacagccacagctattctgacgagtttggcccatcaggcactgattttacacgtaggcagctgagcttgcaggacaacctacagcacatgctgtctccaccacagatcacaatcggccctcagaggcccgctccatcaggtcccggtgggggaagcgggggagggagcgggggagggggtggtgggcagccccctccactccagcggggaaaaagccaacagctgaccgtttcagccgctcagaaacccaggccctcaagcgggaatctgctgcaatctccagagccgagttatggaccagccagacctagacagcaatccctctctaaggaggggtctattgggggttccggtgggagcggcggaggtggaggcggaggactgaagccatccattactaaacaacattcccagactccttctacactgaaccctaccatgccagcctctgagagaactgtggcatgggtctctaacatgccacatctgagcgctgacatagagtcagcccacatcgagcgtgaggagtacaagctgaaagaatatagcaagtccatggatgagtctagactcgaccgagtaaaggagtacgaggaggagatacactccctgaaggaaagactgcacatgagcaataggaagctcgaagagtacgagagacgcttgctgtctcaggaggagcagacctcgaagatccttatgcaataccaggcaagactggaacagagcgagaagcgccttcggcagcagcaagcggaaaaagatagccagattaagtcaattatcggtcgtctcatgctcgtagaagaagaacttaggagggatcacccggcaatggccgaacccctgcccgaacctaagaagcgcctcctggacgctcagctactgattagatag

SEQ ID NO: 167855 - DNA, 3855 bp, Artificial Sequence
  derived and/or modified sequence
atggggcttagaccgccaacaccctccccatctgggggtagttgctccgggtccttacccccaccgtcccgatgccagcccctccgacggagatgtagttcttgctgttttccaggggagtaccaccttggtcggagccgcagaaaatccgtgcccggagggaagcagtattcaatggagggcgctcctgctgcccctttccgcccaagccaagggtttctgtccagacgcctgaaatcctctataaaacgtacaaagagccaacccaagctggacaggacctcctcatttcgacaaattctccctcgctttagaagcgcggatcatgatcgggctagacttatgcagtcattcaaggagtcgcacagccatgaatcattactgagcccaagttcagcagccgaggccttagagcttaacctggacgaggacagtataatcaagcctgtacacagttctattctgggtcaggaattctgcttcgaagtgactaccagttcgggaacaaaatgcttcgcctgtcgaagcgcagccgaaagggacaagtggatagaaaacctgcaacgggctgtcaagcccaacaaggacaatagtcgaagagtggacaacgttctaaaattgtggattattgaagcccgtgagttgcctcccaaaaagcgatattactgcgagctctgtctagacgacatgctgtacgcccgtaccacatccaagcccagatctgcgtccggcgacacggtgttctggggagagcacttcgagtttaataacttgcctgctgtgcgagccctccgactgcatctttaccgggattcagacaagaagagaaagaaggataaagccggatacgttggcctggtgaccgtgccagttgccacgctggcaggccgacattttactgagcaatggtacccagtgaccctccctactggcagcggcggatcaggagggatgggctcaggagggggtggcggatccggtgggggtagtggaggcaagggaaaagggggatgtcccgctgtgagactcaaggcgaggtaccagacgatgtcgatcctgccaatggaattgtacaaagaatttgcagagtatgtgaccaatcactaccgcatgctctgtgctgtgttagagccagctctcaacgtgaaaggcaaagaggaggtggcttccgcattagtgcacattttacagtcgacaggaaaagcaaaagactttctttcagacatggccatgtcagaggtcgaccgcttcatggagagagaacacctgatctttcgggagaataccctggccacaaaggctattgaagaatatatgaggctgatcggccaaaagtacttaaaggacgccatcggggagttcatcagggccttgtacgaatcggaggaaaattgcgaggtggacccaataaagtgtacagcctcgtcactggcggaacaccaagccaacctgcgcatgtgttgcgagttggcattgtgtaaggtggtaaactcacactgtgtatttccacgggagctaaaggaggtgtttgcctcctggcgacttcgctgcgcagaacggggacgggaggacattgcggatcgactcatcagtgcttcactgttcctcagatttctctgccccgcaataatgtcgccttcgttgttcggcctgatgcaagagtatcctgatgaacagactagtcggaccctgacactgattgcaaaggtcatccagaaccttgccaatttttcaaagtttacttcgaaagaggattttttagggttcatgaatgagttccttgaactggaatggggaagtatgcagcagttcctctatgagatctcaaacctcgatactttaaccaacagttcatcctttgagggctacatcgatctgggaagagaactcagcactcttcacgcgctcctctgggaagtgttgcctcagctctctaaggaagctctgttaaagctaggccctctccccagacttctgaatgatatctccacagctcttcgtaacccaaatattcagcgacagccttcgcggcagagcgagaggccgaggcctcaaccggtggtgctgagaggcccttcagctgaaatgcaggggtatatgatgcgcgatctgaattcatccatcgatttgcagtcctttatggctcggggacttaacagcagcatggatatggccagattgccgtcacctactaaggaaaagcccccaccccctcctcccggaggcggaaaggacctgttctatgtttctcgccctcctcttgcccgaagttcaccggcatattgcacttcatcttctgatatcacggaacccgagcagaagatgttgtccgtcaacaagtccgtgtccatgttggacctccagggggatggacccggtggaagactgaacagctcaagtgtcagcaacctggcagcggtgggcgacttacttcattctagccaggcctctctgacagcagccttgggactgagaccggcacctgccggaagactaagccagggctcagggtcatcaataactgccgcaggaatgagattgagccagatgggcgtgacaacagacggcgtacctgcacagcagttgcgaatccccctgagctttcagaaccctttattccacatggccgctgacggtccaggccctcccggagggcatggtggaggaggcggacatggcccaccgtcaagccaccaccaccaccatcatcatcatcaccatcgtggaggagagccacctggtgatacgttcgctccctttcacggctactctaagagcgaagacctgagtagcggggtgccgaagccccctgctgcatcgatcctgcactctcacagctattctgacgagtttggaccatcagggacagacttcacacggagacagctgagcctccaagataacctccagcatatgctctctccgcctcagatcactattgggccacaacgccctgccccttctggacccggaggaggaagcgggggagggagtgggggaggcggagggggtcaacccccacctttgcagcggggtaaatctcagcaactgacagtttcagcagcacaaaaaccacgccctagctctggcaaccttctgcagagccctgaaccatcatatggtccagcacgaccccgtcagcagagcttaagcaaagaaggtagcatcggtggttccgggggttcagggggaggcggtggtggaggtcttaaaccatccatcacgaagcagcacagccagaccccatccaccttaaatcctaccatgccggcatcagagcgcactgtcgcgtgggtctctaatatgcctcacctgtcagctgatatcgagtctgcacatatcgaacgggaggagtacaagctgaaggagtacagtaagagtatggatgaatcccgcttagaccgggtaaaagagtatgaagaggaaattcattcactaaaggaaaggttgcatatgagcaatagaaagctggaggaatacgagcgccgattgctgtcgcaggaggaacagacatccaagattctgatgcagtaccaggctcgtcttgagcagagtgagaagagactgcgacagcagcaggccgagaaagattcacagataaaaagcatcatcgggagactgatgctggttgaagaagagctgcgccgagaccaccctgctatggccgagcccctgccagaacccaaaaagcgtttgctagatgctcaggaacggcaactccccccactcggcccaaccaacccaagagtgacattggctcctccctggaatgggttagcacccccagcacccccacccccacctcgcctgcaaattaccgagaacggagagtttcggaatacggctgatcactag

SEQ ID NO: 167856 - DNA, 4032 bp, Artificial Sequence
  derived and/or modified sequence
atgtcccgatccagagcaagcatccatcgtggttcaatacccgcaatgtcctatgccccatttcgtgacgtgaggggcccttccatgcaccggacacagtacgtgcattcgccatatgatagacctgggtggaatcctcgattctgcatcatttctggcaaccaactccttatgttagacgaggacgagattcacccccttctaatccgagacaggaggtccgaatcttctcggaacaagctgctgcgcaggacagtgtctgtgcccgtggagggcagacctcacggagagcacgaataccacctgggaagaagtaggaggaaatctgtgcctggcggtaaacagtactcgatggaaggcgcaccagctgccccttttcgaccatcacagggtttcctatcccgcagactaaagtcctccataaaacgaacgaaaagccaaccgaagctggacagaacctcgagcttccggcaaattctccccaggtttaggtccgccgaccacgacagagctcgcttaatgcagtcgtttaaggaaagtcatagccacgagagtcttctgtcgccctctagcgccgcagaagctttggaactgaatcttgacgaagattctattatcaagccggttcacagcagcatcctcggacaggagttctgctttgaggtcactacatcctcaggtaccaagtgcttcgcttgccggagcgcagccgaacgtgataagtggattgaaaacttgcagcgtgccgttaagcctaacaaagataattcccgacgcgtggacaacgttttaaaattgtggattatagaggccagggagcttcctccgaagaaaaggtactattgtgaactctgtctggatgacatgctctacgcccgtactacatcgaagccgagatcagcaagcggcgataccgtcttctggggcgagcacttcgagtttaataacctgcccgctgtgagagccctgcgcctgcatctataccgcgattcagacaaaaaaaggaagaaggacaaagcaggctacgttggtctggtgaccgtgccagttgccacactcgccggacggcactttaccgaacaatggtaccctgtgaccctaccaacaggctcaggcggtagcggcggaatgggctcgggtggcggagggggatccggcggtggatcgggagggaaagggaaaggcggatgcccagccgttcggttaaaagccagatatcagaccatgtctatactgcctatggaactgtacaaggagttcgccgaatacgtaacaaatcactaccggatgttgtgcgcagtgctcgagccagctctgaatgtcaagggtaaagaggaggttgcaagcgctctcgtccacatcctccaatccactggcaaggctaaggatttcttatccgatatggccatgtccgaagttgatcggttcatggaacgcgagcatctgatttttcgggagaatacactcgcgactaaggccattgaggaatatatgcgactgatcggacagaagtatctgaaggacgcaattggcgagttcatccgagccttatacgagagcgaagagaactgtgaggttgatcctatcaagtgcaccgcctcttctctggccgagcaccaggccaacctgagaatgtgctgcgagctagccctctgtaaggtagttaattcacactgcgtgttcccacgcgagctgaaggaggtatttgcgtcgtggagattaaggtgcgcagagagaggccgtgaagatattgctgatcgcctgatcagtgcctcactttttttacgctttctctgtcctgccattatgtctccgtcccttttcggactcatgcaagagtaccccgacgagcagacatcccggacgttaacgctaattgctaaagtgatccagaacttagcgaactttagcaagttcacaagcaaggaggactttctcggcttcatgaatgaattcctggaacttgagtggggaagcatgcagcagttcctctatgaaatttccaacctggatactctcaccaactcttctagtttcgagggatatattgacctcggcagggaactgagtacactgcatgcccttctgtgggaagtgctgccacagctttctaaggaggcccttttgaagctgggcccattgcccagacttctgaacgacattagtacagcgctgaggaacccgaacattcaaaggcagccttctaggcagtcagagagaccccgaccccagccagtggtactgcgaggcccatccgcagagatgcaaggatatatgatgagagacctcaactcgtccatcgatctccagtcatttatggccaggggcttaaattcatctatggacatggcaagactccccagcccaaccaaggagaaaccccctcctccacctccaggaggcggtaaggacctgttctacgtgagtaggcctcccttggctagatcgagcccagcttactgtacttcctcatcagatatcaccgaacccgagcagaaaatgctctctgttaacaagtccgtgtctatgctcgacctgcagggagatggtcccggtgggagattaaactcatcatcagtcagtaatcttgccgcagttggggacttgctgcattcctctcaggcctcacttacggctgctctcggactcagacctgccccagctggcaggctctctcaagggtccggatctagtatcacagccgctggaatgcggctaagccagatgggggttaccacggacggagtgccggctcagcagttgcggataccccttagtttccagaacccgctgttccatatggctgccgatggcccaggcccaccagggggtcacgggggagggggtggccatggacccccaagcagtcaccatcaccatcaccatcatcaccaccatcgcggaggggaaccaccaggcgatactttcgctcctttccacgggtattccaaaagtgaggatctgagctctggggttccaaagcctcctgccgctagtatcttacattcacattcttattcggatgagttcgggccatccggaacagacttcacgcggcgacagctcagcctccaggataatctccagcatatgctgtcaccaccacagattacgattggcccacagcgcccagccccttctggacctgggggtggatcagggggagggtcaggtggcggaggcggtgggcaaccccctcctttgcagcggggtaagtcacaacagcttaccgtgagcgccgcacagaaacccagaccatcctccggtaacttgttgcagtcacctgagccctcctatggccctgctagacctagacaacaatcacttagtaaagaaggctccattgggggatccggaggctctggcggagggggaggcggtggattaaagcccagtatcaccaagcaacatagccagacacctagcactctgaaccctactatgccagcctctgaaagaacggtcgcctgggtttcgaacatgccacatctttctgccgatattgagtccgcccatattgaacgggaagagtataagttaaaagaatactccaagtcaatggacgagtctagacttgacagggtcaaagaatatgaagaagaaatccactcattaaaggagcgcctgcatatgtctaaccggaagttggaggagtacgagagacggctgctttctcaggaagaacagacttccaaaattctgatgcagtaccaggccaggctggagcagagcgaaaaaagactgcgccagcagcaagcggagaaggattcccaaatcaagagcataatcgggaggctgatgctggttgaagaggaactgaggcgcgaccacccagccatggcagagcctctgcccgaaccaaagaaacgtctcttagatgcgcaggagcgccagctacctccccttggtcctacgaaccctagagttacgcttgcacctccgtggaacggactcgccccaccagcaccacccccaccgcctagactacaaatcactgaaaacggagagtttaggaacactgccgatcattag

SEQ ID NO: 167857 - DNA, 3879 bp, Artificial Sequence
  derived and/or modified sequence
atgagtagatctcgggcttctatacaccggggatcgatccccgcaatgagttatgcccctttccgtgacgtccggggacccagtatgcatcggactcaatatgtgcactccccctatgatcgccctgggtggaacccacgattttgtataatctctgggaaccagttgctcatgctggacgaagatgagatccacccactgctgatccgggaccgcaggagtgaatcatctagaaataagctgctgaggaggaccgtttctgtacctgtggagggtcgaccacacggagaacacgaatatcatctgggaaggtcccggagaaagagcgtgccaggcggtaagcagtatagcatggaaggcgcacctgccgcaccctttcgtcccagccaggggtttctctcgcgacggttaaaatccagtatcaagcggaccaaaagccagccgaagctcgatcgaacttcaagcttccgacagatcctgcctcgttttcgatcagcagatcacgaccgagcaagattgatgcagtcatttaaagaatcccactcccacgagtccctcctcagcccatcatcagctgctgaggccctagagttgaaccttgacgaagactccattatcaaaccagtccactcgtcaatcctgggccaagaattttgctttgaggtgacgaccagcagcggtaccaagtgcttcgcctgcaggtctgctgcggagcgcgacaagtggatagaaaatctgcagagagctgtcaaacccaacaaggacaattcaagaagggtagataacgtgctcaagctgtggattatagaggccagagagctacctccaaaaaagcgctattactgcgagttgtgtctggatgacatgctgtacgcccgtacgacaagtaagcctcgctcagccagtggcgatactgtgttttggggtgagcactttgagttcaacaacctccccgcagtgcgtgcactacggctacacctgtaccgggattctgacaagaagcgtaagaaggataaagcgggatatgtcggactcgtgactgtgcctgtagcgacgttggccggacggcacttcaccgaacaatggtatcctgtaacactgcctaccggctctggaggatcggggggtatgggttccggaggaggcggagggtccggtggagggtctggaggtaagggtaaaggcggttgtccggctgttcggcttaaagcacgctatcagacaatgtctatcttgcctatggaactttataaggaatttgccgaatatgtgacgaatcactaccgcatgctgtgcgccgttctggagcccgcacttaatgttaagggcaaggaggaagtggcttccgccctagtccatattctgcaatctaccggcaaggccaaggacttcttaagtgacatggctatgagcgaggtggaccggttcatggagcgggagcaccttatcttccgggagaacaccctggctacaaaggctatcgaggagtacatgaggttgataggccagaaatatctcaaggacgctatcggcgagtttatcagggctctctacgagagcgaagagaattgcgaggttgaccctatcaagtgcaccgcgagcagcttggcggaacatcaggccaacttgagaatgtgttgcgagttagcactatgtaaggtcgtcaattcccactgcgtctttccacgcgaattgaaggaggtgtttgcctcatggagactgcggtgtgcagagcgcggacgagaggacatcgccgaccgactaatctccgctagtctctttcttcgctttctttgtcccgctattatgtcaccctcactcttcggattaatgcaggaatatcctgatgagcagacgtcacggaccctcactctgatcgccaaagtcatccagaaccttgccaatttctccaagtttacaagtaaggaagatttcctcggattcatgaacgagtttctagaactcgagtggggatctatgcaacagtttttgtatgagatttcgaatctggacactctgacaaattcctctagtttcgaaggttatatcgatctcggacgagaactttcaaccctgcacgccctgctgtgggaggtcctgcctcagctaagcaaagaagcattattgaaactggggcctttgccccgtctgctaaatgatatcagcactgcgctcaggaaccccaatattcaacgacagccatccaggcagtcagagcgcccacgccctcagccagtcgtgcttcgaggtccatctgcagaaatgcaggggtacatgatgcgcgatcttaacagttccatggacatggcacggcttccaagccctactaaggaaaaacctccccctcctccgccaggaggaggaaaggatttgttttacgtcagtcgaccgcctctggcaagaagtagcccggcttactgcacctcctcctcagatattacagaaccagagcagaagatgctgtcggtgaacaaatctgttagtatgctcgaccttcaaggcgacggcccaggcggacggctcaacagctctagcgtgagtaacctcgctgcggtgggcgaccttctgcacagctcgcaagcctcactcactgcagccctgggccttcggccagctcctgccggtcggctcagccaaggaagcggctctagcatcaccgctgctggcatgcgcttgtcacagatgggcgttaccacggatggggtcccagctcagcagctcagaatcccattatcgtttcagaacccacttttccacatggcggcagatggacctggtccccctgggggacacggcggagggggaggccacgggcctccgtcctctcaccatcatcaccaccaccaccatcaccaccgcggaggtgagcctcctggggataccttcgcacctttccatggatactccaagtccgaggatctctcttctggtgtgccaaagcctcccgctgccagcattttacatagtcactcatactctgatgaattcggacctagcgggaccgacttcacgcggaggcagttaagtctccaggacaatttacaacacatgctgagccctccccagattaccattggaccacagcgccctgcccctagcggaccaggtgggggaagcggcggtggctctggaggtggcggtgggggacagcctcccccattgcagagaggcaaatcccagcagttaactgtgtccgctgcacagaagcctagaccttcatcagggaacctgcttcagtcgcctgagccctcatacggacccgcaagaccaaggcagcaatccctgagtaaggagggtagtatcggtgggagcggcggaagcggcggaggtggagggggtggcttgaaacctagcatcactaaacaacactctcagaccccctctacactcaacccgaccatgcccgcaagtgaacggaccgtggcttgggtgtccaacatgcctcatttatcggctgacatcgaatcagcccacatcgaaagagaggagtataagctcaaggaatacagcaagtctatggatgaaagtcgattggatagggagtacgaggaagagatccatagcctgaaggaacggcttcatatgtctaacaggaagctggaagaatacgaaagacggttactgtcccaagaagagcagacttccaaaattctcatgcagtaccaggctagactggagcagtctgagaagcgcctacgacaacaacaagccgagaaggactctcagatcaaaagtataattggcagacttatgctcgtagaggaagaacttagacgggaccacccggctatggctgagccactgcctgaaccaaagaagcggcttctagacgcccagagagggtcgttccccccttgggtccaacagacacgggtgtag

SEQ ID NO: 167858 - DNA, 4032 bp, Artificial Sequence
  derived and/or modified sequence
atgtcacgaagcagagccagtattcatagaggatccatccctgccatgagctacgcccctttcagagacgtacgcggacctagcatgcatcggactcagtacgtacatagcccatatgatcgcccaggttggaatcctagattttgcataatctcggggaatcagcttctgatgctcgacgaagatgagattcaccccctgcttatccgcgaccgacggagcgaaagtagcaggaacaagctgttgcgtagaactgtgtctgtacccgtcgaggggcgaccacatggtgaacacgagtatcatttggggaggtcccggcgaaagagcgttcctgggggaaagcagtacagcatggaaggagcccctgcagcaccctttagaccctctcagggtttcctttctaggcgactgaaaagcagcataaaacgaacaaagtcccaacctaaactcgaccgcacctcgagctttagacagattctgcccagatttcggtccgcggaccatgacagagcccgtcttatgcagtccttcaaggaatcacattctcatgaaagcttgctgtccccatcatcagccgcagaggctctagagctcaatcttgatgaggacagtattatcaagccagttcacagttccattttgggacaggagttctgtttcgaagtgactacatcaagtggcaccaagtgtttcgcctgtaggagcgctgcggaaagggacaagtggatcgaaaaccttcagagggccgtaaaacctaacaaagacaattcccgtagggtagacaatgtgctcaagttatggattatcgaagctcgggagctgcccccaaaaaaacgatactattgcgagctgtgcctggacgacatgttgtacgcaagaacaacatctaaaccaagaagcgcctctggtgacactgtattctggggcgagcacttcgagttcaataacttaccggctgtccgcgcattgaggttgcacctgtaccgggattcagataagaaaaggaagaaagacaaagcgggatacgtgggattagtcactgtgcctgtcgccacgctcgcagggaggcactttactgagcagtggtaccccgtgaccttgccgaccggctctgggggttccggcggtatggggagtgggggtggagggggttcaggcggaggcagtggcggaaaaggcaagggaggatgtccggctgttcggctaaaagcgaggtatcaaaccatgagcatcttacccatggagctctacaaggagttcgccgaatatgtgactaaccactacagaatgctctgtgctgtgcttgagccggcactcaacgttaaggggaaggaggaggttgcttctgccctcgtgcatatcttacagtctacagggaaggccaaggatttcttgtcggacatggctatgagtgaagttgaccgctttatggaaagggagcaccttattttcagagaaaacaccctggcaacaaaagcgatcgaggaatacatgaggctaatcgggcagaagtacctaaaggatgctattggcgagtttatccgggcactatacgaatctgaagagaattgcgaagtggatcccatcaagtgtactgcttcaagcctcgctgagcatcaggcaaacctgcggatgtgctgtgagctcgccttgtgtaaggtagtgaatagtcactgtgtgttcccacgtgaactcaaggaagtcttcgctagttggcgactacggtgcgcagaacggggtcgagaagatatcgccgacaggttaattagcgcgtctctgtttttgcggtttctctgtccagctattatgagcccttctctgtttggactcatgcaggaatatcctgatgagcaaacgtctcgcaccctaacactcattgcaaaggtcattcagaacttagctaacttctcaaaatttaccagtaaagaagatttcctggggttcatgaacgagttcctcgaacttgaatggggaagcatgcagcagtttctctacgagatctcaaatttggataccctaaccaattcaagcagcttcgaggggtacatcgacctgggccgagaattatcaaccctccacgccctgctgtgggaagttctgccccaactgagcaaagaggccctgctgaagttaggtccactcccacgattactcaacgatatttccacagccctacgcaatccaaatattcagaggcagccgtcaagacaatctgagagaccacgccctcaacctgtggttctgagggggccttctgcagaaatgcagggctatatgatgcgagacttaaattcaagcattgacctccagtcttttatggcacgcggactgaactcttcgatggatatggcaagactcccttctccgaccaaggaaaagccccctccccctccgccaggcggaggtaaggaccttttttatgtctccagaccaccgctagccaggtcttcccccgcatattgcacgtcttcctcagacatcaccgaaccggagcagaaaatgttgtccgtcaataagagtgtctccatgctcgatctgcagggagatgggcctggaggacggctaaactcttcctctgtctctaacctggccgcagtcggcgatctgttacacagtagccaggcatccttgaccgccgcactgggcctgcggcctgctcctgcaggccgactgagtcagggaagcgggagttcaattacagccgctgggatgcggctctcgcaaatgggggtcacaacggatggcgtccccgctcaacagcttcggattcccctcagtttccagaatccactcttccacatggcagcagatgggccaggcccacccggaggccacggcggtggcggtggccatggtccaccttctagccatcaccaccatcaccatcaccatcaccaccgcggtggcgagcccccaggagacactttcgctccctttcatggatatagtaaatctgaggacctgtcctctggagtgcctaaaccccctgccgctagcatcctgcactcccactcatattccgatgagtttggtccttcaggcactgatttcacgcggaggcagctctctctccaagacaatctacagcatatgctctctccgccacaaatcacgatcggccctcagagacctgctccctcaggtccgggaggaggatccgggggagggagcggcggtggcggagggggacagccacctcccctgcagcggggaaagtcccaacagcttactgtcagcgccgcacagaagcccagaccgagtagtggcaacctgctccagagccccgagccatcttacgggcctgccagacccaggcagcagagcttatccaaagaaggatccattggagggtctgggggaagcggaggcggtggaggtgggggacttaagccaagtattactaaacagcattctcagacccccagcacgctcaatcctacaatgccagctagtgagcgtaccgtggcctgggtttcaaacatgccgcacctgtcagcggacatcgaaagcgcccatattgagagggaggaatacaaactcaaagaatacagtaaaagcatggatgaatctcgcttggatcgggtgaaagagtatgaggaggagattcacagcctcaaagaaagactccacatgagcaatcgcaagcttgaagaatatgagaggcgactgctgtcccaggaggaacaaacgtccaagattctcatgcaataccaggccaggcttgagcagagtgagaagagactgcgtcagcagcaggctgagaaagactcgcagattaagtccataattgggagactcatgctcgtggaggaagaactgaggagagaccatccagctatggctgagcccttgcctgaacccaaaaagcgtttgctcgatgcccaggaacgtcagctgccaccactgggaccgacaaacccgcgtgtgactctagcccctccatggaacgggctggcacctccggctcctcctccgcctccacgtctgcagataactgaaaacggagaattcagaaacactgccgatcattag

SEQ ID NO: 167859 - DNA, 3900 bp, Artificial Sequence
  derived and/or modified sequence
atgagccgatcacgggctagtattcacaggggctcgattcctgccatgagctacgctcctttccgcgatgtccggggaccctctatgcaccggacccaatacgtgcactctccgtacgaccggcctggctggaacccacgtttttgtatcattagcggtaatcagttattgatgctcgacgaagacgaaatccatccactgctgattagggacaggaggagcgagagctccagaaataagctcctgcggcgaaccgtgtcagtcccagtcgagggtcggccacatggagagcatgagtaccacctggggagatccaggcggaagagtgtgccaggtggtaagcagtactcgatggaaggagctccagcagcgccattcagaccatctcagggattcctgagtcgacgcttaaagagctccatcaagcgcacaaagtcccagcccaagcttgatagaacctctagctttcggcaaatactgcccaggttccgcagtgcagaccacgatcgggcaaggctgatgcagagtttcaaagaatctcactctcacgagagccttctttctcctagcagcgcagctgaggccctcgaacttaatctagacgaagactctatcattaagccagttcactcttcaatactgggacaggagttttgtttcgaagtaacaaccagcagcggcactaagtgtttcgcttgtcggtccgccgcagaacgtgataagtggattgaaaatttacagcgagctgtaaagcctaacaaagataacagcaggagagtcgacaacgtcctgaaactgtggatcattgaggctagagaattgcctccaaagaagcgctattattgcgagctgtgtctggacgacatgctctacgcaagaacaacatccaagcctcggtctgcttcaggcgacaccgtgttttggggggagcattttgagttcaataatctgcctgcagtgcgagccctccgcctccacctgtatcgggatagcgacaagaaaagaaagaaagacaaggccggatatgtcgggctagtgaccgttcctgtcgccacacttgccggaagacacttcactgagcagtggtaccctgttaccctacctaccggctcagggggtagtggcggtatgggtagcggaggtgggggtggcagcggaggcggttcaggaggcaaggggaagggtggctgccccgcagtacggctcaaggcaaggtaccaaacgatgtccatccttccgatggaactatacaaagagttcgctgagtacgtaacaaatcattacagaatgctgtgtgcagtattggagccagcgttgaatgttaaaggtaaggaagaggtggcttccgctctggttcacattttacagagcactggtaaggcaaaagactttttgagtgatatggcgatgtcagaagtagatagattcatggagcgtgagcatctcatcttccgcgagaacactctggccacaaaagctattgaagagtatatgcgcctgatcgggcagaagtacctgaaggacgccatcggcgagttcataagagcactttatgaatctgaagaaaattgcgaggtcgacccaatcaaatgtacagctagctcacttgccgagcaccaggccaacctcaggatgtgctgtgaactggcgctttgtaaggtggtaaatagccactgcgtgtttcccagggaactcaaagaggtctttgcctcctggagattaagatgcgcggagaggggacgcgaggacattgccgatcgccttatctcagcatccctgtttttgcggttcctgtgtcctgccattatgtctccttccctttttggtctgatgcaagaatacccagacgaacagacatctagaacactgacccttatcgccaaggtgattcagaacctcgccaatttctcaaagtttacttcaaaagaggacttcctgggattcatgaacgaatttctggaactcgagtgggggagcatgcagcagttcctttacgagatctccaatcttgacactctcaccaacagctcatcttttgaaggctacatcgacctgggtcgcgagttatccacgctccacgctctgctgtgggaggttctaccccagttgtctaaggaggcgctgcttaagctaggacctcttccgaggctgctcaacgacatctccactgccctgcgcaatcctaatatccaacgacagccaagtaggcagtcagaaaggccccgtccccaacccgtggtcctacggggaccaagcgccgagatgcaaggttacatgatgagagatcttaattcctccatagacctgcagagcttcatggcccgaggcttaaacagctcaatggacatggctcggttacccagccctacaaaagagaagcctcctccacccccacctggcggaggtaaagacctcttctatgtgtcaagacctcccctggctcggtcctctcccgcatactgcacttcatcttccgatattaccgagcccgaacagaagatgttatccgtgaataaatccgtgagcatgctggacttgcagggggacggtccaggcggacgactgaacagcagcagcgtatcgaacctggctgccgtgggggatctccttcattccagccaggccagtcttacagcggcactgggactgcgccctgcacctgccggacggttgtcacagggctctgggagcagtattactgccgcaggtatgcgcctgagtcagatgggggtgactaccgacggggtgccagctcaacaattacgtatacccctgtcctttcaaaaccccctgttccatatggccgctgatggccctggacctcctggcggacatggcggtggaggaggccacggccctccttcgagtcaccatcatcatcaccaccaccatcaccatagggggggagaacctcctggagatacctttgcaccgttccatggctactccaaatccgaggatttaagcagtggggttccaaaacctccagccgcttcaatactgcattctcactcatatagcgacgagttcggcccaagcggaacggatttcacacgcaggcagcttagcttacaagataacctgcagcacatgctctcaccaccccagattacaattggacctcagagaccggctccttcgggccctgggggaggctctggagggggtagcggcggagggggtggtggccagccgcctcccttacagaggggaaaaagtcagcagttgactgtgagcgctgctcaaaagcctcgccctagctccgggaacctgctacagagccccgaaccttcatatggcccagctaggcctcgtcagcaatcactgagtaaggagggcagcattgggggtagtggtggtagtgggggaggcggaggaggtggattgaagcccagcataaccaagcagcactcccagaccccatccaccctgaatcccaccatgccggctagcgagaggaccgtggcctgggtgagcaatatgccacatctgagcgccgacatcgagtctgcccacatcgagagagaggagtacaagcttaaagagtacagtaagagcatggatgagagccgactggaccgggtgaaggagtacgaagaggagattcactccctgaaggagcgcctccacatgtcaaaccgcaaacttgaagagtacgaaaggagactcctgagtcaggaggagcagacgtcaaaaattctgatgcagtatcaagctagattggagcagagtgaaaagcggctgagacaacaacaggcagaaaaagacagccagatcaagtcaatcatcggccgactgatgctggtcgaagaggaactccggcgtgaccaccctgcaatggcagagccacttccggaaccaaaaaaacgcttactggacgcgcagctgctcatccgatag

SEQ ID NO: 167860 - DNA, 4095 bp, Artificial Sequence
  derived and/or modified sequence
tctcggctgccgctgctgccgttggctcttattctcctcctcctcctcctctctcctcctctctgcttctctctgctcctctctcctcctctctcctcctcctcctcctccacctcctcctccttctccccctctttctccccctctttctctcttctttctcccccgtccccccgccccctccccccaggcctgatgagcaggtctcgagcctccatccatcgggggagcatccccgcgatgtcctatgcccccttcagagatgtacggggaccctctatgcaccgaacccaatacgttcattccccgtatgatcgtcctggttggaaccctcggttctgcatcatctcggggaaccagctgctcatgctggatgaggatgagatacaccccctactgatccgggaccggaggagcgagtccagtcgcaacaaactgctgagacgcacagtctccgtgccggtggaggggcggccccacggcgagcatgaataccacttgggtcgctcgaggaggaagagtgtcccaggggggaagcagtacagcatggagggtgcccctgctgcgcccttccggccctcgcaaggcttcctgagccgacggctaaaaagctccatcaaacgaacgaagtcacaacccaaacttgaccggaccagcagctttcgccagatcctgcctcgcttccgaagtgctgaccatgaccgggcccggctgatgcaaagctttaaggagtcacactctcatgagtccttgctgagtcctagcagtgcagctgaggcattggagctcaacttggatgaagattccattatcaagccagtgcacagctccatcctgggccaggagttctgttttgaggtaacaacttcatcaggaacaaaatgctttgcctgtcggtctgcggccgaaagagacaaatggattgagaatctgcagcgggcagtaaagcccaacaaggacaacagccgccgggtagacaatgtgctaaagctgtggatcatagaggcccgggagctgccccccaagaagcggtactactgtgagctctgcctggatgacatgctgtatgcacgcaccacctccaagccccgctctgcctctggggacaccgtcttctggggcgagcacttcgagtttaacaacctgccggctgtccgtgccctgcggctgcatctgtaccgtgactcagacaaaaagcgcaagaaggacaaggcaggctatgtcggcctggtgactgtgccagtggccaccctggctgggcgccacttcacagagcagtggtaccctgtaaccctgccaacaggcagtgggggatctgggggcatgggttcgggagggggagggggctcggggggtggctcagggggcaagggcaaaggaggttgcccggctgtgcggctgaaagcacgttaccagacaatgagcatcttgcccatggagctatataaagagtttgcagagtatgtcaccaaccattatcggatgctgtgtgcagtcttggagcccgccctgaatgtcaaaggcaaggaggaggttgccagtgcactagttcacatcctgcagagtacaggcaaggccaaggacttcctttcagacatggccatgtctgaggtagaccggttcatggaacgggagcacctcatattccgcgagaacacgcttgccactaaagccatagaagagtatatgagactgattggtcagaaatacctcaaggatgccattggagaattcatccgtgctctgtatgaatctgaggaaaactgcgaggtagaccctatcaagtgcacagcatccagtttggcagagcaccaggccaacctgcgaatgtgctgtgagttggccctgtgcaaggtggtcaactcccactgcgtgttcccgagggagctgaaggaggtgtttgcttcgtggcggctgcgctgcgcagagcgaggccgggaggacatcgcagacaggcttatcagcgcctcactcttcctgcgcttcctctgcccagcgattatgtcgcccagtctctttgggcttatgcaggagtacccagatgagcagacctcacgaaccctcaccctcattgccaaggtcatccagaacctggccaacttttccaagtttacctcaaaggaggactttctgggcttcatgaatgagtttctggagctggaatggggttccatgcagcagtttttgtatgagatctccaatctggacacgctaaccaacagcagtagctttgagggttacatcgacttgggccgagagctctccacactgcatgccctactctgggaggtgctgccccagctcagcaaggaagccctcctgaagctgggtccactgccccggctcctcaacgacatcagcacagctctgaggaaccccaacatccaaaggcagccaagccgccagagtgagcggccccggcctcagcctgtggtactgcgggggccatcggctgagatgcagggctacatgatgcgggacctcaacagctccatcgaccttcagtccttcatggctcgaggcctcaacagctctatggacatggctcgcctcccctccccaaccaaggaaaagccacccccaccaccgcctggtggtggtaaagacctgttctatgtaagccgtccacccctggcccgttcctcaccagcatactgcacgagcagctcggacatcacagagccagagcagaagatgctgagtgtcaacaagagtgtgtccatgctggacttacagggtgatgggcctggtggccgcctcaacagcagcagtgtttcgaacctggcggccgtaggggacctgctgcactcaagccaggcctcgctgacagcagccttggggctacggcctgcgcctgccggacgcctctcccaggggagtggctcatccatcacggcggctggcatgcgcctcagccagatgggtgtcaccacagacggtgtccctgcccagcaactgcgaatccccctctccttccagaaccctctcttccacatggctgctgatgggccaggtcccccaggcggccatggagggggcggtggccatggcccaccttcctcccatcaccaccaccaccaccatcaccaccaccgaggtggagagccccctggggacacctttgccccattccatggctatagcaagagtgaggacctctcttccggggtccccaagccccctgctgcctccatccttcatagccacagctacagtgatgagtttggaccctctggcactgacttcacccgtcggcagctttcactccaggacaacctgcagcacatgctgtcccctccccagatcaccattggtccccagaggccagccccctcagggcctggaggtgggagcggtgggggcagcggtgggggtggcgggggccagccgcctccattgcagaggggcaagtctcagcagttgacagtcagcgcagcccagaaaccccggccatccagcgggaatctattgcagtccccagagccaagttatggccccgcccgtccacggcaacagagcctcagcaaggagggcagcattgggggcagcgggggcagcggtggcggagggggtggggggctgaagccctccatcaccaagcagcattctcagacaccatccacattgaaccccacaatgccagcctctgagcggacagtggcctgggtctccaacatgcctcacctgtcggctgacatcgagagtgcccacatcgagcgggaagagtacaagctcaaggagtactcaaaatcgatggatgagagccggctggatagggtgaaggagtacgaggaggagattcactcactgaaagagcggctgcacatgtccaaccggaagctggaagagtatgagcggaggctgctgtcccaggaagaacaaaccagcaaaatcctgatgcagtatcaggcccgactggagcagagtgagaagaggctaaggcagcagcaggcagagaaggattcccagatcaagagcatcattggcaggctgatgctggtggaggaggagctgcgccgggaccaccccgccatggctgagccgctgccagaacccaagaagaggctgctcgacgctcagctcctcatcaggtaa

SEQ ID NO: 167861 - DNA, 1461 bp, Artificial Sequence
  derived and/or modified sequence
gaggactttctgggcttcatgaatgagtttctggagctggaatggggttccatgcagcagtttttgtatgagatctccaatctggacacgctaaccaacagcagtagctttgagggttacatcgacttgggccgagagctctccacactgcatgccctactctgggaggtgctgccccagctcagcaaggaagccctcctgaagctgggtccactgccccggctcctcaacgacatcagcacagctctgaggaaccccaacatccaaaggcagccaagccgccagagtgagcggccccggcctcagcctgtggtactgcgggggccatcggctgagatgcagggctacatgatgcgggacctcaacagctctatggacatggctcgcctcccctccccaaccaaggaaaagccacccccaccaccgcctggtggtggtaaagacctgttctatgtaagccgtccacccctggcccgttcctcaccagcatactgcacgagcagctcggacatcacagagccagagcagaagatgctgagtgtcaacaagagtgtgtccatgctggacttacagggtgatgggcctggtggccgcctcaacagcagcagtgtttcgaacctggcggccgtaggggacctgctgcactcaagccaggcctcgctgacagcagccttggggctacggcctgcgcctgccggacgcctctcccaggggagtggctcatccatcacggcggctggcatgcgcctcagccagatgggtgtcaccacagacggtgtccctgcccagcaactgcgaatccccctctccttccagaaccctctcttccacatggctgctgatgggccaggtcccccaggcggccatggagggggcggtggccatggcccaccttcctcccatcaccaccaccaccaccatcaccaccaccgaggtggagagccccctggggacacctttgccccattccatggctatagcaagagtgaggacctctcttccggggtccccaagccccctgctgcctccatccttcatagccacagctacagtgatgagtttggaccctctggcactgacttcacccgtcggcagctttcactccaggacaacctgcagcacatgctgtcccctccccagatcaccattggtccccagaggccagccccctcagggcctggaggtgggagcggtgggggcagcggtgggggtggcgggggccagccgcctccattgcagaggggcaagtctcagcagttgacagtcagcgcagcccagaaaccccggccatccagcgggaatctattgcagtccccagagccaagttatggccccgcccgtccacggcaacagagcctcagcaaggagggcagcattgggggcagcgggggcagcggtggcggagggggtggggggctgaagccctccatcaccaagcagcattctcagacaccatccaca

SEQ ID NO: 167862 - DNA, 4601 bp, Artificial Sequence
  derived and/or modified sequence
atgagcaggtctcgagcctccatccatcgggggagcatccccgcgatgtcctatgcccccttcagagatgtacggggaccctctatgcaccgaacccaatacgttcattccccgtatgatcgtcctggttggaaccctcggttctgcatcatctcggggaaccagctgctcatgctggatgaggatgagatacaccccctactgatccgggaccggaggagcgagtccagtcgcaacaaactgctgagacgcacagtctccgtgccggtggaggggcggccccacggcgagcatgaataccacttgggtcgctcgaggaggaagagtgtcccaggggggaagcagtacagcatggagggtgcccctgctgcgcccttccggccctcgcaaggcttcctgagccgacggctaaaaagctccatcaaacgaacgaagtcacaacccaaacttgaccggaccagcagctttcgccagatcctgcctcgcttccgaagtgctgaccatgaccgggcccggctgatgcaaagctttaaggagtcacactctcatgagtccttgctgagtcctagcagtgcagctgaggcattggagctcaacttggatgaagattccattatcaagccagtgcacagctccatcctgggccaggagttctgttttgaggtaacaacttcatcaggaacaaaatgctttgcctgtcggtctgcggccgaaagagacaaatggattgagaatctgcagcgggcagtaaagcccaacaaggacaacagccgccgggtagacaatgtgctaaagctgtggatcatagaggcccgggagctgccccccaagaagcggtactactgtgagctctgcctggatgacatgctgtatgcacgcaccacctccaagccccgctctgcctctggggacaccgtcttctggggcgagcacttcgagtttaacaacctgccggctgtccgtgccctgcggctgcatctgtaccgtgactcagacaaaaagcgcaagaaggacaaggcaggctatgtcggcctggtgactgtgccagtggccaccctggctgggcgccacttcacagagcagtggtaccctgtaaccctgccaacaggcagtgggggatctgggggcatgggttcgggagggggagggggctcggggggtggctcagggggcaagggcaaaggaggttgcccggctgtgcggctgaaagcacgttaccagacaatgagcatcttgcccatggagctatataaagagtttgcagagtatgtcaccaaccattatcggatgctgtgtgcagtcttggagcccgccctgaatgtcaaaggcaaggaggaggttgccagtgcactagttcacatcctgcagagtacaggcaaggccaaggacttcctttcagacatggccatgtctgaggtagaccggttcatggaacgggagcacctcatattccgcgagaacacgcttgccactaaagccatagaagagtatatgagactgattggtcagaaatacctcaaggatgccattggagaattcatccgtgctctgtatgaatctgaggaaaactgcgaggtagaccctatcaagtgcacagcatccagtttggcagagcaccaggccaacctgcgaatgtgctgtgagttggccctgtgcaaggtggtcaactcccactgcgtgttcccgagggagctgaaggaggtgtttgcttcatggcggctgcgctgcgcagagcgaggccgggaggacatcgcagacaggcttatcagcgcctcactcttcctgcgcttcctctgcccagcgattatgtcgcccagtctctttgggcttatgcaggagtacccagatgagcagacctcacgaaccctcaccctcattgccaaggtcatccagaacctggccaacttttccaagtttacctcaaaggaggactttctgggcttcatgaatgagtttctggagctggaatggggttccatgcagcagtttttgtatgagatctccaatctggacacgctaaccaacagcagtagctttgagggttacatcgacttgggccgagagctctccacactgcatgccctactctgggaggtgctgccccagctcagcaaggaagccctcctgaagctgggtccactgccccggctcctcaacgacatcagcacagctctgaggaaccccaacatccaaaggcagccaagccgccagagtgagcggccccggcctcagcctgtggtactgcgggggccatcggctgagatgcagggctacatgatgcgggacctcaacagctccatcgaccttcagtccttcatggctcgaggcctcaacagctctatggacatggctcgcctcccctccccaaccaaggaaaagccacccccaccaccgcctggtggtggtaaagacctgttctatgtaagccgtccacccctggcccgttcctcaccagcatactgcacgagcagctcggacatcacagagccagagcagaagatgctgagtgtcaacaagagtgtgtccatgctggacttacagggtgatgggcctggtggccgcctcaacagcagcagtgtttcgaacctggcggccgtaggggacctgctgcactcaagccaggcctcgctgacagcagccttggggctacggcctgcgcctgccggacgcctctcccaggggagtggctcatccatcacggcggctggcatgcgcctcagccagatgggtgtcaccacagacggtgtccctgcccagcaactgcgaatccccctctccttccagaaccctctcttccacatggctgctgatgggccaggtcccccaggcggccatggagggggcggtggccatggcccaccttcctcccatcaccaccaccaccaccatcaccaccaccgaggtggagagccccctggggacacctttgccccattccatggctatagcaagagtgaggacctctcttccggggtccccaagccccctgctgcctccatccttcatagccacagctacagtgatgagtttggaccctctggcactgacttcacccgtcggcagctttcactccaggacaacctgcagcacatgctgtcccctccccagatcaccattggtccccagaggccagccccctcagggcctggaggtgggagcggtgggggcagcggtgggggtggcgggggccagccgcctccattgcagaggggcaagtctcagcagttgacagtcagcgcagcccagaaaccccggccatccagcgggaatctattgcagtccccagagccaagttatggccccgcccgtccacggcaacagagcctcagcaaggagggcagcattgggggcagcgggggcagcggtggcggagggggtggggggctgaagccctccatcaccaagcagcattctcagacaccatccacattgaaccccacaatgccagcctctgagcggacagtggcctgggtctccaacatgcctcacctgtcggctgacatcgagagtgcccacatcgagcgggaagagtacaagctcaaggagtactcaaaatcgatggatgagagccggctggatagggtgaaggagtacgaggaggagattcactcactgaaagagcggctgcacatgtccaaccggaagctggaagagtatgagcggaggctgctgtcccaggaagaacaaaccagcaaaatcctgatgcagtatcaggcccgactggagcagagtgagaagaggctaaggcagcagcaggcagagaaggattcccagatcaagagcatcattggcaggctgatgctggtggaggaggagctgcgccgggaccaccccgccatggctgagccgctgccagaacccaagaagaggctgctcgacgctcagctcctcatcaggtaattctcctggttccgctttggccacgggcggaggacacagggggaggtgactccggaccactgcaggagaggcagcttccccccttgggtccaacaaacccgcgtgtgacgctggccccaccgtggaatggcctggcccccccagccccaccacccccaccccggctgcagattacggagaacggcgagttccgaaacaccgcagaccactagcccacccagcatcagagaccttctcttcctttcctgtgcaccccaccctgtaacagcaccaaccaccaggattggacatcaccgaggaacagcgggattgcctccccgaatgcctccctgggaggcacactgattgcccacccccaccactgcaccatttccaggagggagagtggggaccctcagccgcccccttttccttcccattggggtgctgccctctctttgacccccagggacccttgccccaggacaccgcctaccccgtacagaccccttcactccggggtgctatccccatcctctgcctcatcgttcccctgagcactgggggacagaccctcacccccaccctgggggtgtggcacctccaaactttcaacttcagggtgatttttttagcagtaaccagagctgacaatctaactcccctccaccgccccattttggcctcccctgccccccttgttatggggaggggaccccggg

SEQ ID NO: 167863 - DNA, 4339 bp, Artificial Sequence
  derived and/or modified sequence
gggggaagaggaaagcctgcctatgggcaatgacctttaacccatctttccccccagctagccccttctggggtgggtgggcaccagggacctagcctccctggatctttggtgtccttcattactggggttttactgaccctctcagtcatgctcccctgctgactgccagccccagtcatgggcctaaggcctcccaccccatccccctcagggggctcctgctcaggttccttgccccctccttcccgctgccagcctctccgccgtcgctgctcttcctgctgctttccgggggaataccacttgggtcgctcgaggaggaagagtgtcccaggggggaagcagtacagcatggagggtgcccctgctgcgcccttccggccctcgcaaggcttcctgagccgacggctaaaaagctccatcaaacgaacgaagtcacaacccaaacttgaccggaccagcagctttcgccagatcctgcctcgcttccgaagtgctgaccatgaccgggcccggctgatgcaaagctttaaggagtcacactctcatgagtccttgctgagtcctagcagtgcagctgaggcattggagctcaacttggatgaagattccattatcaagccagtgcacagctccatcctgggccaggagttctgttttgaggtaacaacttcatcaggaacaaaatgctttgcctgtcggtctgcggccgaaagagacaaatggattgagaatctgcagcgggcagtaaagcccaacaaggacaacagccgccgggtagacaatgtgctaaagctgtggatcatagaggcccgggagctgccccccaagaagcggtactactgtgagctctgcctggatgacatgctgtatgcacgcaccacctccaagccccgctctgcctctggggacaccgtcttctggggcgagcacttcgagtttaacaacctgccggctgtccgtgccctgcggctgcatctgtaccgtgactcagacaaaaagcgcaagaaggacaaggcaggctatgtcggcctggtgactgtgccagtggccaccctggctgggcgccacttcacagagcagtggtaccctgtaaccctgccaacaggcagtgggggatctgggggcatgggttcgggagggggagggggctcggggggtggctcagggggcaagggcaaaggaggttgcccggctgtgcggctgaaagcacgttaccagacaatgagcatcttgcccatggagctatataaagagtttgcagagtatgtcaccaaccattatcggatgctgtgtgcagtcttggagcccgccctgaatgtcaaaggcaaggaggaggttgccagtgcactagttcacatcctgcagagtacaggcaaggccaaggacttcctttcagacatggccatgtctgaggtagaccggttcatggaacgggagcacctcatattccgcgagaacacgcttgccactaaagccatagaagagtatatgagactgattggtcagaaatacctcaaggatgccattggagaattcatccgtgctctgtatgaatctgaggaaaactgcgaggtagaccctatcaagtgcacagcatccagtttggcagagcaccaggccaacctgcgaatgtgctgtgagttggccctgtgcaaggtggtcaactcccactgcgtgttcccgagggagctgaaggaggtgtttgcttcatggcggctgcgctgcgcagagcgaggccgggaggacatcgcagacaggcttatcagcgcctcactcttcctgcgcttcctctgcccagcgattatgtcgcccagtctctttgggcttatgcaggagtacccagatgagcagacctcacgaaccctcaccctcattgccaaggtcatccagaacctggccaacttttccaagtttacctcaaaggaggactttctgggcttcatgaatgagtttctggagctggaatggggttccatgcagcagtttttgtatgagatctccaatctggacacgctaaccaacagcagtagctttgagggttacatcgacttgggccgagagctctccacactgcatgccctactctgggaggtgctgccccagctcagcaaggaagccctcctgaagctgggtccactgccccggctcctcaacgacatcagcacagctctgaggaaccccaacatccaaaggcagccaagccgccagagtgagcggccccggcctcagcctgtggtactgcgggggccatcggctgagatgcagggctacatgatgcgggacctcaacagctccatcgaccttcagtccttcatggctcgaggcctcaacagctctatggacatggctcgcctcccctccccaaccaaggaaaagccacccccaccaccgcctggtggtggtaaagacctgttctatgtaagccgtccacccctggcccgttcctcaccagcatactgcacgagcagctcggacatcacagagccagagcagaagatgctgagtgtcaacaagagtgtgtccatgctggacttacagggtgatgggcctggtggccgcctcaacagcagcagtgtttcgaacctggcggccgtaggggacctgctgcactcaagccaggcctcgctgacagcagccttggggctacggcctgcgcctgccggacgcctctcccaggggagtggctcatccatcacggcggctggcatgcgcctcagccagatgggtgtcaccacagacggtgtccctgcccagcaactgcgaatccccctctccttccagaaccctctcttccacatggctgctgatgggccaggtcccccaggcggccatggagggggcggtggccatggcccaccttcctcccatcaccaccaccaccaccatcaccaccaccgaggtggagagccccctggggacacctttgccccattccatggctatagcaagagtgaggacctctcttccggggtccccaagccccctgctgcctccatccttcatagccacagctacagtgatgagtttggaccctctggcactgacttcacccgtcggcagctttcactccaggacaacctgcagcacatgctgtcccctccccagatcaccattggtccccagaggccagccccctcagggcctggaggtgggagcggtgggggcagcggtgggggtggcgggggccagccgcctccattgcagaggggcaagtctcagcagttgacagtcagcgcagcccagaaaccccggccatccagcgggaatctattgcagtccccagagccaagttatggccccgcccgtccacggcaacagagcctcagcaaggagggcagcattgggggcagcgggggcagcggtggcggagggggtggggggctgaagccctccatcaccaagcagcattctcagacaccatccacattgaaccccacaatgccagcctctgagcggacagtggcctgggtctccaacatgcctcacctgtcggctgacatcgagagtgcccacatcgagcgggaagagtacaagctcaaggagtactcaaaatcgatggatgagagccggctggatagggtgaaggagtacgaggaggagattcactcactgaaagagcggctgcacatgtccaaccggaagctggaagagtatgagcggaggctgctgtcccaggaagaacaaaccagcaaaatcctgatgcagtatcaggcccgactggagcagagtgagaagaggctaaggcagcagcaggcagagaaggattcccagatcaagagcatcattggcaggctgatgctggtggaggaggagctgcgccgggaccaccccgccatggctgagccgctgccagaacccaagaagaggctgctcgacgctcaggagaggcagcttccccccttgggtccaacaaacccgcgtgtgacgctggccccaccgtggaatggcctggcccccccagccccaccacccccaccccggctgcagattacggagaacggcgagttccgaaacaccgcagaccactagcccacccagcatcagagaccttctcttcctttcctgtgcaccccaccctgtaacagcaccaaccaccaggattggacatcaccgaggaacagcgggattgcctccccgaatgcctccctgggaggcacactgattgcccacccccaccactgcaccatttccaggagggagagtggggaccctcagccgcccccttttccttcccattggggtgctgccctctctttgacccccagggacccttgccccaggacaccgcctaccccgtacagaccccttcactccggggtgctatccccatcct

SEQ ID NO: 167864 - DNA, 5916 bp, Artificial Sequence
  derived and/or modified sequence
cctcctcctcctcctccacctcctcctccttctccccctctttctccccctctttctctcttctttctcccccgtccccccgccccctccccccaggcctgatgagcaggtctcgagcctccatccatcgggggagcatccccgcgatgtcctatgcccccttcagagatgtacggggaccctctatgcaccgaacccaatacgttcattccccgtatgatcgtcctggttggaaccctcggttctgcatcatctcggggaaccagctgctcatgctggatgaggatgagatacaccccctactgatccgggaccggaggagcgagtccagtcgcaacaaactgctgagacgcacagtctccgtgccggtggaggggcggccccacggcgagcatgaataccacttgggtcgctcgaggaggaagagtgtcccaggggggaagcagtacagcatggagggtgcccctgctgcgcccttccggccctcgcaaggcttcctgagccgacggctaaaaagctccatcaaacgaacgaagtcacaacccaaacttgaccggaccagcagctttcgccagatcctgcctcgcttccgaagtgctgaccatgaccgggcccggctgatgcaaagctttaaggagtcacactctcatgagtccttgctgagtcctagcagtgcagctgaggcattggagctcaacttggatgaagattccattatcaagccagtgcacagctccatcctgggccaggagttctgttttgaggtaacaacttcatcaggaacaaaatgctttgcctgtcggtctgcggccgaaagagacaaatggattgagaatctgcagcgggcagtaaagcccaacaaggacaacagccgccgggtagacaatgtgctaaagctgtggatcatagaggcccgggagctgccccccaagaagcggtactactgtgagctctgcctggatgacatgctgtatgcacgcaccacctccaagccccgctctgcctctggggacaccgtcttctggggcgagcacttcgagtttaacaacctgccggctgtccgtgccctgcggctgcatctgtaccgtgactcagacaaaaagcgcaagaaggacaaggcaggctatgtcggcctggtgactgtgccagtggccaccctggctgggcgccacttcacagagcagtggtaccctgtaaccctgccaacaggcagtgggggatctgggggcatgggttcgggagggggagggggctcggggggtggctcagggggcaagggcaaaggaggttgcccggctgtgcggctgaaagcacgttaccagacaatgagcatcttgcccatggagctatataaagagtttgcagagtatgtcaccaaccattatcggatgctgtgtgcagtcttggagcccgccctgaatgtcaaaggcaaggaggaggttgccagtgcactagttcacatcctgcagagtacaggcaaggccaaggacttcctttcagacatggccatgtctgaggtagaccggttcatggaacgggagcacctcatattccgcgagaacacgcttgccactaaagccatagaagagtatatgagactgattggtcagaaatacctcaaggatgccattggagaattcatccgtgctctgtatgaatctgaggaaaactgcgaggtagaccctatcaagtgcacagcatccagtttggcagagcaccaggccaacctgcgaatgtgctgtgagttggccctgtgcaaggtggtcaactcccactgcgtgttcccgagggagctgaaggaggtgtttgcttcgtggcggctgcgctgcgcagagcgaggccgggaggacatcgcagacaggcttatcagcgcctcactcttcctgcgcttcctctgcccagcgattatgtcgcccagtctctttgggcttatgcaggagtacccagatgagcagacctcacgaaccctcaccctcattgccaaggtcatccagaacctggccaacttttccaagtttacctcaaaggaggactttctgggcttcatgaatgagtttctggagctggaatggggttccatgcagcagtttttgtatgagatctccaatctggacacgctaaccaacagcagtagctttgagggttacatcgacttgggccgagagctctccacactgcatgccctactctgggaggtgctgccccagctcagcaaggaagccctcctgaagctgggtccactgccccggctcctcaacgacatcagcacagctctgaggaaccccaacatccaaaggcagccaagccgccagagtgagcggccccggcctcagcctgtggtactgcgggggccatcggctgagatgcagggctacatgatgcgggacctcaacagctccatcgaccttcagtccttcatggctcgaggcctcaacagctctatggacatggctcgcctcccctccccaaccaaggaaaagccacccccaccaccgcctggtggtggtaaagacctgttctatgtaagccgtccacccctggcccgttcctcaccagcatactgcacgagcagctcggacatcacagagccagagcagaagatgctgagtgtcaacaagagtgtgtccatgctggacttacagggtgatgggcctggtggccgcctcaacagcagcagtgtttcgaacctggcggccgtaggggacctgctgcactcaagccaggcctcgctgacagcagccttggggctacggcctgcgcctgccggacgcctctcccaggggagtggctcatccatcacggcggctggcatgcgcctcagccagatgggtgtcaccacagacggtgtccctgcccagcaactgcgaatccccctctccttccagaaccctctcttccacatggctgctgatgggccaggtcccccaggcggccatggagggggcggtggccatggcccaccttcctcccatcaccaccaccaccaccatcaccaccaccgaggtggagagccccctggggacacctttgccccattccatggctatagcaagagtgaggacctctcttccggggtccccaagccccctgctgcctccatccttcatagccacagctacagtgatgagtttggaccctctggcactgacttcacccgtcggcagctttcactccaggacaacctgcagcacatgctgtcccctccccagatcaccattggtccccagaggccagccccctcagggcctggaggtgggagcggtgggggcagcggtgggggtggcgggggccagccgcctccattgcagaggggcaagtctcagcagttgacagtcagcgcagcccagaaaccccggccatccagcgggaatctattgcagtccccagagccaagttatggccccgcccgtccacggcaacagagcctcagcaaggagggcagcattgggggcagcgggggcagcggtggcggagggggtggggggctgaagccctccatcaccaagcagcattctcagacaccatccacattgaaccccacaatgccagcctctgagcggacagtggcctgggtctccaacatgcctcacctgtcggctgacatcgagagtgcccacatcgagcgggaagagtacaagctcaaggagtactcaaaatcgatggatgagagccggctggatagggtgaaggagtacgaggaggagattcactcactgaaagagcggctgcacatgtccaaccggaagctggaagagtatgagcggaggctgctgtcccaggaagaacaaaccagcaaaatcctgatgcagtatcaggcccgactggagcagagtgagaagaggctaaggcagcagcaggcagagaaggattcccagatcaagagcatcattggcaggctgatgctggtggaggaggagctgcgccgggaccaccccgccatggctgagccgctgccagaacccaagaagaggctgctcgacgctcaggagaggcagcttccccccttgggtccaacaaacccgcgtgtgacgctggccccaccgtggaatggcctggcccccccagccccaccacccccaccccggctgcagattacggagaacggcgagttccgaaacaccgcagaccactagcccacccagcatcagagaccttctcttcctttcctgtgcaccccaccctgtaacagcaccaaccaccaggattggacatcaccgaggaacagcgggattgcctccccgaatgcctccctgggaggcacactgattgcccacccccaccactgcaccatttccaggagggagagtggggaccctcagccgcccccttttccttcccattggggtgctgccctctctttgacccccagggacccttgccccaggacaccgcctaccccgtacagaccccttcactccggggtgctatccccatcctctgcctcatcgttcccctgagcactgggggacagaccctcacccccaccctgggggtgtggcacctccaaactttcaacttcagggtgatttttttagcagtaaccagagctgacaatctaactcccctccaccgccccattttggcctcccctgccccccttgttatggggaggggaccccgggtgagggggccctattaccccttgatttctcaggagcgtctgggggggctcagcacgcacaaactccttctccttctaccactcttaaatttactccctccccacccagaacccagatggggtggagggggccaccggggcagggagggggcggcaaggggggaatgggagttgtctccccttctccccacacctgatctgctctcggctggtcccagagcggggtgagggggcttatgcccccccctcccccagtgtgttgggtggggtggaattgaggttagggtgaggggtcagggtttaggagggtgtgtatgttgggaggacaggctagttgatctgtcctactctgacacacagtcccctctgccccttccttctctcttcttggtctctactcccagggggaggggggaacttactctaggaaaagccatgtctctctcccccagggtggggggacctgtgttggaggaggggtgttggggggcccccttccatgactctgtcccctgggggaggtaggacagggctgggcttccctctcatcctccccctcccaatctccttccacctccctccctcccgccagctccacgatttttcggtgtttctctgtacatagttttctggcgggataggggaggtaggatggatggggtttggggtgggtaggccatgggaggggagaagcccctccttggcaccccctcttccctgactgctgtcccctacccagccttgcccccttcatccttttgcgtttggtattgagactctcctagactctactcctctttcttttgtatggacagttccccttcagtcccatccccctacacatacacccagccggggccaaatttatacttatataaaagttgtaaatatgtgaaattttatccctgtgccctttccccacctcaggccctacccctggaccctccccaaccttccttctctcttctttggctgttgtaattatctggggtttgtactgtacatatccggggtgtgtgtgtgtgggctgggggcaacccttctgtacagagcttcctggccccctccccccccgcccctctgcttccctccccacccaccacctcaagggtagggagttgctcttcctacctgttttattttgttttctcgttctccctccccaccccactcccagccttatctatcccccctcactgtccccttttctccactcccagccccatttcctttttttctggagtgtgtggtgaaacagaaaaaaacatgtttaataaacggagattgttctttta

SEQ ID NO: 167865 - DNA, 3929 bp, Artificial Sequence
  derived and/or modified sequence
cccaggcctgatgagcaggtctcgagcctccatccatcgggggagcatccccgcgatgtcctatgcccccttcagagatgtacggggaccctctatgcaccgaacccaatacgttcattccccgtatgatcgtcctggttggaaccctcggttctgcatcatctcggggaaccagctgctcatgctggatgaggatgagatacaccccctactgatccgggaccggaggagcgagtccagtcgcaacaaactgctgagacgcacagtctccgtgccggtggaggggcggccccacggcgagcatgaataccacttgggtcgctcgaggaggaagagtgtcccaggggggaagcagtacagcatggagggtgcccctgctgcgcccttccggccctcgcaaggcttcctgagccgacggctaaaaagctccatcaaacgaacgaagtcacaacccaaacttgaccggaccagcagctttcgccagatcctgcctcgcttccgaagtgctgaccatgaccgggcccggctgatgcaaagctttaaggagtcacactctcatgagtccttgctgagtcctagcagtgcagctgaggcattggagctcaacttggatgaagattccattatcaagccagtgcacagctccatcctgggccaggagttctgttttgaggtaacaacttcatcaggaacaaaatgctttgcctgtcggtctgcggccgaaagagacaaatggattgagaatctgcagcgggcagtaaagcccaacaaggacaacagccgccgggtagacaatgtgctaaagctgtggatcatagaggcccgggagctgccccccaagaagcggtactactgtgagctctgcctggatgacatgctgtatgcacgcaccacctccaagccccgctctgcctctggggacaccgtcttctggggcgagcacttcgagtttaacaacctgccggctgtccgtgccctgcggctgcatctgtaccgtgactcagacaaaaagcgcaagaaggacaaggcaggctatgtcggcctggtgactgtgccagtggccaccctggctgggcgccacttcacagagcagtggtaccctgtaaccctgccaacaggcagtgggggatctgggggcatgggttcgggagggggagggggctcggggggtggctcagggggcaagggcaaaggaggttgcccggctgtgcggctgaaagcacgttaccagacaatgagcatcttgcccatggagctatataaagagtttgcagagtatgtcaccaaccattatcggatgctgtgtgcagtcttggagcccgccctgaatgtcaaaggcaaggaggaggttgccagtgcactagttcacatcctgcagagtacaggcaaggccaaggacttcctttcagacatggccatgtctgaggtagaccggttcatggaacgggagcacctcatattccgcgagaacacgcttgccactaaagccatagaagagtatatgagactgattggtcagaaatacctcaaggatgccattggagaattcatccgtgctctgtatgaatctgaggaaaactgcgaggtagaccctatcaagtgcacagcatccagtttggcagagcaccaggccaacctgcgaatgtgctgtgagttggccctgtgcaaggtggtcaactcccactgcgtgttcccgagggagctgaaggaggtgtttgcttcgtggcggctgcgctgcgcagagcgaggccgggaggacatcgcagacaggcttatcagcgcctcactcttcctgcgcttcctctgcccagcgattatgtcgcccagtctctttgggcttatgcaggagtacccagatgagcagacctcacgaaccctcaccctcattgccaaggtcatccagaacctggccaacttttccaagtttacctcaaaggaggactttctgggcttcatgaatgagtttctggagctggaatggggttccatgcagcagtttttgtatgagatctccaatctggacacgctaaccaacagcagtagctttgagggttacatcgacttgggccgagagctctccacactgcatgccctactctgggaggtgctgccccagctcagcaaggaagccctcctgaagctgggtccactgccccggctcctcaacgacatcagcacagctctgaggaaccccaacatccaaaggcagccaagccgccagagtgagcggccccggcctcagcctgtggtactgcgggggccatcggctgagatgcagggctacatgatgcgggacctcaacagctctatggacatggctcgcctcccctccccaaccaaggaaaagccacccccaccaccgcctggtggtggtaaagacctgttctatgtaagccgtccacccctggcccgttcctcaccagcatactgcacgagcagctcggacatcacagagccagagcagaagatgctgagtgtcaacaagagtgtgtccatgctggacttacagggtgatgggcctggtggccgcctcaacagcagcagtgtttcgaacctggcggccgtaggggacctgctgcactcaagccaggcctcgctgacagcagccttggggctacggcctgcgcctgccggacgcctctcccaggggagtggctcatccatcacggcggctggcatgcgcctcagccagatgggtgtcaccacagacggtgtccctgcccagcaactgcgaatccccctctccttccagaaccctctcttccacatggctgctgatgggccaggtcccccaggcggccatggagggggcggtggccatggcccaccttcctcccatcaccaccaccaccaccatcaccaccaccgaggtggagagccccctggggacacctttgccccattccatggctatagcaagagtgaggacctctcttccggggtccccaagccccctgctgcctccatccttcatagccacagctacagtgatgagtttggaccctctggcactgacttcacccgtcggcagctttcactccaggacaacctgcagcacatgctgtcccctccccagatcaccattggtccccagaggccagccccctcagggcctggaggtgggagcggtgggggcagcggtgggggtggcgggggccagccgcctccattgcagaggggcaagtctcagcagttgacagtcagcgcagcccagaaaccccggccatccagcgggaatctattgcagtccccagagccaagttatggccccgcccgtccacggcaacagagcctcagcaaggagggcagcattgggggcagcgggggcagcggtggcggagggggtggggggctgaagccctccatcaccaagcagcattctcagacaccatccacattgaaccccacaatgccagcctctgagcggacagtggcctgggtctccaacatgcctcacctgtcggctgacatcgagagtgcccacatcgagcgggaagagtacaagctcaaggagtactcaaaatcgatggatgagagccggctggatagggagtacgaggaggagattcactcactgaaagagcggctgcacatgtccaaccggaagctggaagagtatgagcggaggctgctgtcccaggaagaacaaaccagcaaaatcctgatgcagtatcaggcccgactggagcagagtgagaagaggctaaggcagcagcaggcagagaaggattcccagatcaagagcatcattggcaggctgatgctggtggaggaggagctgcgccgggaccaccccgccatggctgagccgctgccagaacccaagaagaggctgctcgacgctcagagaggcagcttccccccttgggtccaacaaacccgcgtgtgacgctggccccaccgtggaatggcctggcccccccagcccc

SEQ ID NO: 167866 - DNA, 5916 bp, Artificial Sequence
  derived and/or modified sequence
cctcctcctcctcctccacctcctcctccttctccccctctttctccccctctttctctcttctttctcccccgtccccccgccccctccccccaggcctgatgagcaggtctcgagcctccatccatcgggggagcatccccgcgatgtcctatgcccccttcagagatgtacggggaccctctatgcaccgaacccaatacgttcattccccgtatgatcgtcctggttggaaccctcggttctgcatcatctcggggaaccagctgctcatgctggatgaggatgagatacaccccctactgatccgggaccggaggagcgagtccagtcgcaacaaactgctgagacgcacagtctccgtgccggtggaggggcggccccacggcgagcatgaataccacttgggtcgctcgaggaggaagagtgtcccaggggggaagcagtacagcatggagggtgcccctgctgcgcccttccggccctcgcaaggcttcctgagccgacggctaaaaagctccatcaaacgaacgaagtcacaacccaaacttgaccggaccagcagctttcgccagatcctgcctcgcttccgaagtgctgaccatgaccgggcccggctgatgcaaagctttaaggagtcacactctcatgagtccttgctgagtcctagcagtgcagctgaggcattggagctcaacttggatgaagattccattatcaagccagtgcacagctccatcctgggccaggagttctgttttgaggtaacaacttcatcaggaacaaaatgctttgcctgtcggtctgcggccgaaagagacaaatggattgagaatctgcagcgggcagtaaagcccaacaaggacaacagccgccgggtagacaatgtgctaaagctgtggatcatagaggcccgggagctgccccccaagaagcggtactactgtgagctctgcctggatgacatgctgtatgcacgcaccacctccaagccccgctctgcctctggggacaccgtcttctggggcgagcacttcgagtttaacaacctgccggctgtccgtgccctgcggctgcatctgtaccgtgactcagacaaaaagcgcaagaaggacaaggcaggctatgtcggcctggtgactgtgccagtggccaccctggctgggcgccacttcacagagcagtggtaccctgtaaccctgccaacaggcagtgggggatctgggggcatgggttcgggagggggagggggctcggggggtggctcagggggcaagggcaaaggaggttgcccggctgtgcggctgaaagcacgttaccagacaatgagcatcttgcccatggagctatataaagagtttgcagagtatgtcaccaaccattatcggatgctgtgtgcagtcttggagcccgccctgaatgtcaaaggcaaggaggaggttgccagtgcactagttcacatcctgcagagtacaggcaaggccaaggacttcctttcagacatggccatgtctgaggtagaccggttcatggaacgggagcacctcatattccgcgagaacacgcttgccactaaagccatagaagagtatatgagactgattggtcagaaatacctcaaggatgccattggagaattcatccgtgctctgtatgaatctgaggaaaactgcgaggtagaccctatcaagtgcacagcatccagtttggcagagcaccaggccaacctgcgaatgtgctgtgagttggccctgtgcaaggtggtcaactcccactgcgtgttcccgagggagctgaaggaggtgtttgcttcatggcggctgcgctgcgcagagcgaggccgggaggacatcgcagacaggcttatcagcgcctcactcttcctgcgcttcctctgcccagcgattatgtcgcccagtctctttgggcttatgcaggagtacccagatgagcagacctcacgaaccctcaccctcattgccaaggtcatccagaacctggccaacttttccaagtttacctcaaaggaggactttctgggcttcatgaatgagtttctggagctggaatggggttccatgcagcagtttttgtatgagatctccaatctggacacgctaaccaacagcagtagctttgagggttacatcgacttgggccgagagctctccacactgcatgccctactctgggaggtgctgccccagctcagcaaggaagccctcctgaagctgggtccactgccccggctcctcaacgacatcagcacagctctgaggaaccccaacatccaaaggcagccaagccgccagagtgagcggccccggcctcagcctgtggtactgcgggggccatcggctgagatgcagggctacatgatgcgggacctcaacagctccatcgaccttcagtccttcatggctcgaggcctcaacagctctatggacatggctcgcctcccctccccaaccaaggaaaagccacccccaccaccgcctggtggtggtaaagacctgttctatgtaagccgtccacccctggcccgttcctcaccagcatactgcacgagcagctcggacatcacagagccagagcagaagatgctgagtgtcaacaagagtgtgtccatgctggacttacagggtgatgggcctggtggccgcctcaacagcagcagtgtttcgaacctggcggccgtaggggacctgctgcactcaagccaggcctcgctgacagcagccttggggctacggcctgcgcctgccggacgcctctcccaggggagtggctcatccatcacggcggctggcatgcgcctcagccagatgggtgtcaccacagacggtgtccctgcccagcaactgcgaatccccctctccttccagaaccctctcttccacatggctgctgatgggccaggtcccccaggcggccatggagggggcggtggccatggcccaccttcctcccatcaccaccaccaccaccatcaccaccaccgaggtggagagccccctggggacacctttgccccattccatggctatagcaagagtgaggacctctcttccggggtccccaagccccctgctgcctccatccttcatagccacagctacagtgatgagtttggaccctctggcactgacttcacccgtcggcagctttcactccaggacaacctgcagcacatgctgtcccctccccagatcaccattggtccccagaggccagccccctcagggcctggaggtgggagcggtgggggcagcggtgggggtggcgggggccagccgcctccattgcagaggggcaagtctcagcagttgacagtcagcgcagcccagaaaccccggccatccagcgggaatctattgcagtccccagagccaagttatggccccgcccgtccacggcaacagagcctcagcaaggagggcagcattgggggcagcgggggcagcggtggcggagggggtggggggctgaagccctccatcaccaagcagcattctcagacaccatccacattgaaccccacaatgccagcctctgagcggacagtggcctgggtctccaacatgcctcacctgtcggctgacatcgagagtgcccacatcgagcgggaagagtacaagctcaaggagtactcaaaatcgatggatgagagccggctggatagggtgaaggagtacgaggaggagattcactcactgaaagagcggctgcacatgtccaaccggaagctggaagagtatgagcggaggctgctgtcccaggaagaacaaaccagcaaaatcctgatgcagtatcaggcccgactggagcagagtgagaagaggctaaggcagcagcaggcagagaaggattcccagatcaagagcatcattggcaggctgatgctggtggaggaggagctgcgccgggaccaccccgccatggctgagccgctgccagaacccaagaagaggctgctcgacgctcaggagaggcagcttccccccttgggtccaacaaacccgcgtgtgacgctggccccaccgtggaatggcctggcccccccagccccaccacccccaccccggctgcagattacggagaacggcgagttccgaaacaccgcagaccactagcccacccagcatcagagaccttctcttcctttcctgtgcaccccaccctgtaacagcaccaaccaccaggattggacatcaccgaggaacagcgggattgcctccccgaatgcctccctgggaggcacactgattgcccacccccaccactgcaccatttccaggagggagagtggggaccctcagccgcccccttttccttcccattggggtgctgccctctctttgacccccagggacccttgccccaggacaccgcctaccccgtacagaccccttcactccggggtgctatccccatcctctgcctcatcgttcccctgagcactgggggacagaccctcacccccaccctgggggtgtggcacctccaaactttcaacttcagggtgatttttttagcagtaaccagagctgacaatctaactcccctccaccgccccattttggcctcccctgccccccttgttatggggaggggaccccgggtgagggggccctattaccccttgatttctcaggagcgtctgggggggctcagcacgcacaaactccttctccttctaccactcttaaatttactccctccccacccagaacccagatggggtggagggggccaccggggcagggagggggcggcaaggggggaatgggagttgtctccccttctccccacacctgatctgctctcggctggtcccagagcggggtgagggggcttatgcccccccctcccccagtgtgttgggtggggtggaattgaggttagggtgaggggtcagggtttaggagggtgtgtatgttgggaggacaggctagttgatctgtcctactctgacacacagtcccctctgccccttccttctctcttcttggtctctactcccagggggaggggggaacttactctaggaaaagccatgtctctctcccccagggtggggggacctgtgttggaggaggggtgttggggggcccccttccatgactctgtcccctgggggaggtaggacagggctgggcttccctctcatcctccccctcccaatctccttccacctccctccctcccgccagctccacgatttttcggtgtttctctgtacatagttttctggcgggataggggaggtaggatggatggggtttggggtgggtaggccatgggaggggagaagcccctccttggcaccccctcttccctgactgctgtcccctacccagccttgcccccttcatccttttgcgtttggtattgagactctcctagactctactcctctttcttttgtatggacagttccccttcagtcccatccccctacacatacacccagccggggccaaatttatacttatataaaagttgtaaatatgtgaaattttatccctgtgccctttccccacctcaggccctacccctggaccctccccaaccttccttctctcttctttggctgttgtaattatctggggtttgtactgtacatatccggggtgtgtgtgtgtgggctgggggcaacccttctgtacagagcttcctggccccctccccccccgcccctctgcttccctccccacccaccacctcaagggtagggagttgctcttcctacctgttttattttgttttctcgttctccctccccaccccactcccagccttatctatcccccctcactgtccccttttctccactcccagccccatttcctttttttctggagtgtgtggtgaaacagaaaaaaacatgtttaataaacggagattgttctttta

SEQ ID NO: 167867 - DNA, 4095 bp, Artificial Sequence
  derived and/or modified sequence
tctcggctgccgctgctgccgttggctcttattctcctcctcctcctcctctctcctcctctctgcttctctctgctcctctctcctcctctctcctcctcctcctcctccacctcctcctccttctccccctctttctccccctctttctctcttctttctcccccgtccccccgccccctccccccaggcctgatgagcaggtctcgagcctccatccatcgggggagcatccccgcgatgtcctatgcccccttcagagatgtacggggaccctctatgcaccgaacccaatacgttcattccccgtatgatcgtcctggttggaaccctcggttctgcatcatctcggggaaccagctgctcatgctggatgaggatgagatacaccccctactgatccgggaccggaggagcgagtccagtcgcaacaaactgctgagacgcacagtctccgtgccggtggaggggcggccccacggcgagcatgaataccacttgggtcgctcgaggaggaagagtgtcccaggggggaagcagtacagcatggagggtgcccctgctgcgcccttccggccctcgcaaggcttcctgagccgacggctaaaaagctccatcaaacgaacgaagtcacaacccaaacttgaccggaccagcagctttcgccagatcctgcctcgcttccgaagtgctgaccatgaccgggcccggctgatgcaaagctttaaggagtcacactctcatgagtccttgctgagtcctagcagtgcagctgaggcattggagctcaacttggatgaagattccattatcaagccagtgcacagctccatcctgggccaggagttctgttttgaggtaacaacttcatcaggaacaaaatgctttgcctgtcggtctgcggccgaaagagacaaatggattgagaatctgcagcgggcagtaaagcccaacaaggacaacagccgccgggtagacaatgtgctaaagctgtggatcatagaggcccgggagctgccccccaagaagcggtactactgtgagctctgcctggatgacatgctgtatgcacgcaccacctccaagccccgctctgcctctggggacaccgtcttctggggcgagcacttcgagtttaacaacctgccggctgtccgtgccctgcggctgcatctgtaccgtgactcagacaaaaagcgcaagaaggacaaggcaggctatgtcggcctggtgactgtgccagtggccaccctggctgggcgccacttcacagagcagtggtaccctgtaaccctgccaacaggcagtgggggatctgggggcatgggttcgggagggggagggggctcggggggtggctcagggggcaagggcaaaggaggttgcccggctgtgcggctgaaagcacgttaccagacaatgagcatcttgcccatggagctatataaagagtttgcagagtatgtcaccaaccattatcggatgctgtgtgcagtcttggagcccgccctgaatgtcaaaggcaaggaggaggttgccagtgcactagttcacatcctgcagagtacaggcaaggccaaggacttcctttcagacatggccatgtctgaggtagaccggttcatggaacgggagcacctcatattccgcgagaacacgcttgccactaaagccatagaagagtatatgagactgattggtcagaaatacctcaaggatgccattggagaattcatccgtgctctgtatgaatctgaggaaaactgcgaggtagaccctatcaagtgcacagcatccagtttggcagagcaccaggccaacctgcgaatgtgctgtgagttggccctgtgcaaggtggtcaactcccactgcgtgttcccgagggagctgaaggaggtgtttgcttcatggcggctgcgctgcgcagagcgaggccgggaggacatcgcagacaggcttatcagcgcctcactcttcctgcgcttcctctgcccagcgattatgtcgcccagtctctttgggcttatgcaggagtacccagatgagcagacctcacgaaccctcaccctcattgccaaggtcatccagaacctggccaacttttccaagtttacctcaaaggaggactttctgggcttcatgaatgagtttctggagctggaatggggttccatgcagcagtttttgtatgagatctccaatctggacacgctaaccaacagcagtagctttgagggttacatcgacttgggccgagagctctccacactgcatgccctactctgggaggtgctgccccagctcagcaaggaagccctcctgaagctgggtccactgccccggctcctcaacgacatcagcacagctctgaggaaccccaacatccaaaggcagccaagccgccagagtgagcggccccggcctcagcctgtggtactgcgggggccatcggctgagatgcagggctacatgatgcgggacctcaacagctccatcgaccttcagtccttcatggctcgaggcctcaacagctctatggacatggctcgcctcccctccccaaccaaggaaaagccacccccaccaccgcctggtggtggtaaagacctgttctatgtaagccgtccacccctggcccgttcctcaccagcatactgcacgagcagctcggacatcacagagccagagcagaagatgctgagtgtcaacaagagtgtgtccatgctggacttacagggtgatgggcctggtggccgcctcaacagcagcagtgtttcgaacctggcggccgtaggggacctgctgcactcaagccaggcctcgctgacagcagccttggggctacggcctgcgcctgccggacgcctctcccaggggagtggctcatccatcacggcggctggcatgcgcctcagccagatgggtgtcaccacagacggtgtccctgcccagcaactgcgaatccccctctccttccagaaccctctcttccacatggctgctgatgggccaggtcccccaggcggccatggagggggcggtggccatggcccaccttcctcccatcaccaccaccaccaccatcaccaccaccgaggtggagagccccctggggacacctttgccccattccatggctatagcaagagtgaggacctctcttccggggtccccaagccccctgctgcctccatccttcatagccacagctacagtgatgagtttggaccctctggcactgacttcacccgtcggcagctttcactccaggacaacctgcagcacatgctgtcccctccccagatcaccattggtccccagaggccagccccctcagggcctggaggtgggagcggtgggggcagcggtgggggtggcgggggccagccgcctccattgcagaggggcaagtctcagcagttgacagtcagcgcagcccagaaaccccggccatccagcgggaatctattgcagtccccagagccaagttatggccccgcccgtccacggcaacagagcctcagcaaggagggcagcattgggggcagcgggggcagcggtggcggagggggtggggggctgaagccctccatcaccaagcagcattctcagacaccatccacattgaaccccacaatgccagcctctgagcggacagtggcctgggtctccaacatgcctcacctgtcggctgacatcgagagtgcccacatcgagcgggaagagtacaagctcaaggagtactcaaaatcgatggatgagagccggctggatagggtgaaggagtacgaggaggagattcactcactgaaagagcggctgcacatgtccaaccggaagctggaagagtatgagcggaggctgctgtcccaggaagaacaaaccagcaaaatcctgatgcagtatcaggcccgactggagcagagtgagaagaggctaaggcagcagcaggcagagaaggattcccagatcaagagcatcattggcaggctgatgctggtggaggaggagctgcgccgggaccaccccgccatggctgagccgctgccagaacccaagaagaggctgctcgacgctcagctcctcatcaggtaa

SEQ ID NO: 167868 - protein, 670 aa, Artificial Sequence
  derived and/or modified sequence
MSHLPMKLLRKKIEKRNLKLRQRNLKFQGASNLTLSETQNGDVSEETMGSRKVKKSKQKPMNVGLSETQNGGMSQEAVGNIKVTKSPQKSTVLTNGEAAMQSSNSESKKKKKKKRKMVNDAEPDTKKAKTENKGKSEEESAETTKETENNVEKPDNDEDESEVPSLPLGLTGAFEDTSFASLCNLVNENTLKAIKEMGFTNMTEIQHKSIRPLLEGRDLLAAAKTGSGKTLAFLIPAVELIVKLRFMPRNGTGVLILSPTRELAMQTFGVLKELMTHHVHTYGLIMGGSNRSAEAQKLGNGINIIVATPGRLLDHMQNTPGFMYKNLQCLVIDEADRILDVGFEEELKQIIKLLPTRRQTMLFSATQTRKVEDLARISLKKEPLYVGVDDDKANATVDGLEQGYVVCPSEKRFLLLFTFLKKNRKKKLMVFFSSCMSVKYHYELLNYIDLPVLAIHGKQKQNKRTTTFFQFCNADSGTLLCTDVAARGLDIPEVDWIVQYDPPDDPKEYIHRVGRTARGLNGRGHALLILRPEELGFLRYLKQSKVPLSEFDFSWSKISDIQSQLEKLIEKNYFLHKSAQEAYKSYIRAYDSHSLKQIFNVNNLNLPQVALSFGFKVPPFVDLNVNSNEGKQKKRGGGGGFGYQKTKKVEKSKIFKHISKKSSDSRQFSH

SEQ ID NO: 167869 - protein, 409 aa, Artificial Sequence
  derived and/or modified sequence
MEQEQTFGVLKELMTHHVHTYGLIMGGSNRSAEAQKLGNGINIIVATPGRLLDHMQNTPGFMYKNLQCLVIDEADRILDVGFEEELKQIIKLLPTRRQTMLFSATQTRKVEDLARISLKKEPLYVGVDDDKANATVDGLEQGYVVCPSEKRFLLLFTFLKKNRKKKLMVFFSSCMSVKYHYELLNYIDLPVLAIHGKQKQNKRTTTFFQFCNADSGTLLCTDVAARGLDIPEVDWIVQYDPPDDPKEYIHRVGRTARGLNGRGHALLILRPEELGFLRYLKQSKVPLSEFDFSWSKISDIQSQLEKLIEKNYFLHKSAQEAYKSYIRAYDSHSLKQIFNVNNLNLPQVALSFGFKVPPFVDLNVNSNEGKQKKRGGGGGFGYQKTKKVEKSKIFKHISKKSSDSRQFSH

SEQ ID NO: 167870 - DNA, 2013 bp, Artificial Sequence
  derived and/or modified sequence
atgagccacctgcccatgaagttattgcgcaagaagattgaaaaaaggaacctaaagctccgacagcggaacctgaagtttcagggggcaagcaaccttactctcagcgagactcagaatggtgacgtgtctgaggagaccatgggaagcaggaaagtcaagaaaagtaaacagaaacccatgaacgtcggcctgagtgagactcagaacggaggtatgagccaggaagccgtgggcaacatcaaagtgaccaagtccccacagaagtctaccgtcctgacaaatggggaggctgccatgcagtcctctaattcagagagcaagaagaagaagaagaagaagagaaagatggtgaacgatgccgagcctgacactaaaaaggccaaaaccgagaacaagggcaaatctgaggaagaaagtgccgaaaccaccaaggagaccgaaaataatgtcgagaagcccgataatgatgaggacgagtccgaggtcccaagcttgccactgggtctcaccggcgcctttgaagacacatcttttgcatccctgtgcaaccttgttaatgagaatactttgaaagccatcaaggagatggggttcaccaatatgaccgagatccaacataagagtataaggccattactggagggaagggacctgctggcagctgcaaaaaccgggtctggtaagaccctcgccttcctcatcccagcagtcgagctgatcgtgaagctccgttttatgcctcggaacggtaccggggtgctcattttaagcccaaccagggagctggccatgcaaaccttcggggtccttaaggaactaatgacccatcacgtgcacacatatggcctcatcatggggggatctaaccggtcagccgaggcccaaaagctcggaaacggcatcaatatcattgtggccactccaggccggctgctggatcatatgcagaacacaccaggcttcatgtacaaaaacctccagtgtctggtaattgacgaggccgaccgaattctggatgtcggctttgaggaggagctgaagcagataattaagcttctacccactcggagacaaactatgttgtttagcgccactcagacccgaaaagtggaggaccttgcccgcatcagcctcaagaaagagcccctttacgtgggcgttgacgatgacaaagcaaacgcaactgtggatgggctcgagcagggatatgtcgtttgtccttcagaaaagcggtttcttctactgtttaccttcctgaagaagaataggaaaaaaaagctgatggtgtttttttcctcatgtatgagcgtaaagtaccattatgagttgcttaactacatcgaccttcccgtattggccatccatggcaaacaaaaacagaataaacgaaccacaactttctttcagttttgcaacgccgattcagggactctcctctgcactgatgttgcggcacgcggtctggatattccggaggtggactggattgtgcagtacgacccccctgacgatccaaaagagtatatccacagggttggaaggacagcacgcggactgaacggaagaggtcatgctctactgatcctgcgtccggaggagctggggtttctacgttacctgaaacagtctaaggtcccgctcagtgaatttgacttctcttggtctaagatctccgacatacagagccagctggaaaagcttatcgaaaaaaactacttcttacataaatccgcgcaggaggcgtacaagtcgtatattcgcgcgtacgactcacatagtttgaagcagatttttaacgtgaataacctaaatctccctcaggtagctctgagcttcggtttcaaagtgccacccttcgtggacctaaacgtaaactcaaatgagggaaaacaaaaaaaaaggggcggtgggggaggctttgggtatcaaaaaacaaagaaagtagagaaatctaagatttttaaacacatttccaagaaaagctcggattcccgacagtttagtcattag

SEQ ID NO: 167871 - DNA, 1230 bp, Artificial Sequence
  derived and/or modified sequence
atggagcaagaacagactttcggggtgctgaaagagttgatgacacatcatgttcatacttatgggttaattatggggggcagcaacagatctgccgaagcacagaagctggggaatggaatcaacatcatagtagcaacccctgggaggctgctcgatcacatgcagaacacaccggggttcatgtacaagaacctccagtgcctggtgatcgacgaggctgatcgaattcttgacgttgggtttgaggaagagctcaagcagataattaaactgctacctaccaggaggcaaacgatgttgtttagcgcaacccagacccgaaaggtggaagacctggctaggatctccttgaaaaaagagcccctctacgtgggagtggacgatgataaagctaacgctaccgttgatggcctggagcagggctatgtagtgtgtccttctgagaagaggttccttctcctgttcacttttctgaaaaagaatagaaagaaaaaacttatggtttttttttcctcatgcatgtccgtaaagtaccactatgaactgctgaattacattgacctccccgtgttggccatccatggcaagcagaaacagaacaaaaggactactaccttttttcagttctgtaacgcagacagcggcactctcctgtgcaccgacgtcgccgctagaggactggacattccagaggttgactggatcgttcaatacgatccccctgatgatccaaaggaatacattcaccgggtaggtcgcaccgctagagggctaaacggaagaggtcatgcactgctgattctgaggccagaagagctgggattcttgagatatttgaaacaatccaaagtgcctctctctgagtttgatttctcttggagcaagatatcagatatacaaagccagcttgagaagctgatagaaaaaaattacttcctgcataaatcagcccaggaggcttacaagtcctatatccgggcttacgatagccacagcctgaagcagattttcaacgtcaataacttgaatctgccccaggttgcactcagcttcggctttaaggtgccgccctttgtggacctcaatgtaaactctaatgagggtaaacagaagaaaagagggggaggaggcggctttggctatcagaagacaaagaaagtcgaaaaaagcaaaattttcaaacatattagcaagaaatcaagcgacagccggcagttttcccactag

SEQ ID NO: 167872 - DNA, 2013 bp, Artificial Sequence
  derived and/or modified sequence
atgagccacctgcccatgaagctgctgaggaagaagattgagaagaggaacctgaagctgcggcagaggaacctgaagttccagggcgccagcaacctgaccctgtctgagacccagaatggagatgtgtctgaggagaccatgggcagcaggaaggtgaagaagagcaagcagaagcccatgaatgtgggcctgtctgagacccagaatggaggcatgagccaggaggccgtgggcaacatcaaggtgaccaagagcccccagaagagcacagtgctgaccaatggagaggccgccatgcagagcagcaacagcgagagcaagaagaagaagaagaagaagaggaagatggtgaatgatgctgagccagacaccaagaaggccaagacagaaaataaaggcaagtctgaggaggagagcgctgagaccaccaaggagacagagaacaacgtggagaagccagacaatgatgaagatgaaagtgaggtgcccagcctgcccctgggcctgactggagcctttgaggacaccagctttgccagcctgtgcaacctggtgaatgaaaacaccctgaaggccatcaaggagatgggcttcaccaacatgacagagatccagcacaagagcatccggcccctgctggagggccgggacctgctggccgccgccaagacaggcagcggcaagaccctggccttcctgatcccagctgtggagctgattgtgaagctgcgcttcatgcccagaaatggcaccggggtgctgatcctgagccccacccgggagctggccatgcagaccttcggcgtgctgaaggagctgatgacccaccacgtgcacacctacggcctcatcatgggcggcagcaacagatctgctgaggcccagaagctgggcaatggcatcaacatcatcgtggccaccccaggccgcctgctggaccacatgcagaacaccccaggcttcatgtacaagaacctgcagtgcctggtgattgatgaagctgaccgcatcctggatgtgggctttgaggaggagctgaagcagatcatcaagctgctgcccacccggcggcagaccatgctgttcagcgccacccagaccaggaaggtggaggacctggcccgcatcagcctgaagaaggagcccctgtatgtgggcgtggatgatgacaaggccaatgccaccgtggatggcctggagcagggctacgtggtgtgccccagcgagaagcgcttcctgctgctcttcaccttcctgaagaagaacaggaagaagaagctgatggtgttcttcagcagctgcatgtctgtgaagtaccactatgagctgctgaactacatcgacctgcctgtgctggccatccacggcaagcagaagcagaacaagaggaccaccaccttcttccagttctgcaatgctgacagcggcaccctgctgtgcacagatgtggccgcccggggcctggacatccctgaggtggactggatcgtgcagtatgaccccccagatgaccccaaggagtacatccaccgggtgggccgcacagcccggggcctgaatggccggggccacgccctgctgatcctgcggcctgaggagctgggcttcctgcgctacctgaagcagagcaaggtgcccctgtctgaatttgacttctcctggagcaagatcagtgacatccagagccagctggagaagctgattgagaagaactacttcctgcacaagagcgcccaggaggcctacaagagctacatccgggcctatgacagccacagcctgaagcagatcttcaacgtgaacaacctgaacctgccccaggtggccctgagctttggcttcaaggtgcccccatttgtggacctgaatgtgaacagcaatgaaggcaagcagaagaagaggggcggcggcggcggcttcggctaccagaagaccaagaaggtggagaagagcaagatcttcaagcacatcagcaagaagagcagtgacagccggcagttcagccactag

SEQ ID NO: 167873 - DNA, 1230 bp, Artificial Sequence
  derived and/or modified sequence
atggagcaggagcagacctttggagtgctgaaggagctgatgacccaccacgtgcacacctacggcctcatcatgggcggcagcaacagatctgctgaggcccagaagctgggcaatggcatcaacatcatcgtggccaccccaggccgcctgctggaccacatgcagaacaccccaggcttcatgtacaagaacctgcagtgcctggtgattgatgaggccgaccgcatcctggatgtgggctttgaggaggagctgaagcagatcatcaagctgctgcccacccggcggcagaccatgctgttcagcgccacccagaccaggaaggtggaggacctggcccgcatcagcctgaagaaggagcccctgtatgtgggcgtggatgatgacaaggccaatgccaccgtggatggcctggagcagggctacgtggtgtgccccagcgagaagcgcttcctgctgctcttcaccttcctgaagaagaacaggaagaagaagctgatggtgttcttcagcagctgcatgtctgtgaagtaccactatgagctgctgaactacatcgacctgcctgtgctggccatccacggcaagcagaagcagaacaagaggaccaccaccttcttccagttctgcaatgctgacagcggcaccctgctgtgcacagatgtggccgcccggggcctggacatccctgaggtggactggatcgtgcagtatgaccccccagatgaccccaaggagtacatccaccgggtgggccgcacagcccggggcctgaatggccggggccacgccctgctgatcctgcggcctgaggagctgggcttcctgcgctacctgaagcagagcaaggtgcccctgtctgaatttgacttctcctggagcaagatcagtgacatccagagccagctggagaagctgattgagaagaactacttcctgcacaagagcgcccaggaggcctacaagagctacatccgggcctatgacagccacagcctgaagcagatcttcaacgtgaacaacctgaacctgccccaggtggccctgagctttggcttcaaggtgcccccatttgtggacctgaatgtgaacagcaatgaaggcaagcagaagaagagaggaggcggcggcggcttcggctaccagaagaccaagaaggtggagaagagcaagatcttcaagcacatcagcaagaagagcagtgacagccggcagttcagccactag

SEQ ID NO: 167874 - DNA, 2013 bp, Artificial Sequence
  derived and/or modified sequence
atgagccacctgcccatgaagctgctgcggaagaagatcgagaagcggaatctgaagctgaggcagaggaacttgaaatttcagggcgcatctaacctgaccctcagcgagacccagaacggggacgtcagtgaagagaccatgggaagccgcaaagtgaaaaagtctaagcagaagcccatgaacgtgggcttaagcgaaacacagaatgggggcatgtcacaggaggcggtgggaaatataaaggtaacaaagtccccacagaaatctacagtccttaccaacggcgaggctgcgatgcagtccagtaacagtgagagcaagaagaaaaagaagaagaaaagaaaaatggtgaatgacgccgagcccgacacaaaaaaggcaaagacagagaacaaaggaaaaagcgaggaagagtcggccgagactaccaaggaaaccgagaacaacgtggaaaaaccagacaatgacgaagatgagtccgaggttccttcactgccactcggacttaccggcgcttttgaggacacaagtttcgcatcgctgtgtaatctcgtgaacgagaacaccctaaaggccattaaggagatgggtttcaccaacatgactgagatccagcacaaaagtatccgccccctcctcgaagggcgggatctgctggcagccgctaaaactggtagtggcaagaccctggcatttctgatccctgcggtggagctcatcgttaagttaagattcatgcctaggaatggcacaggcgtccttattttgtcccccaccagggagttggctatgcaaacctttggcgtcctcaaggaactcatgactcaccacgttcacacctacggtctgatcatgggcgggtctaatcgcagtgcagaagcacagaaattgggaaacggcatcaacatcatcgtcgcgaccccgggacgtctgttggaccatatgcagaacactcctggctttatgtacaaaaacctgcaatgcctggtcatcgatgaggccgataggatactggatgtgggattcgaagaggagttgaagcagataatcaaactgttaccaacaaggaggcagacgatgctgttttccgctactcagactcgaaaagtggaagatctcgcaagaatatctcttaaaaaggagccattatacgttggcgtcgatgacgataaggcaaatgctacagtcgatggtctggagcaaggctatgtggtttgcccctctgagaagagattcttactccttttcactttcttgaagaaaaatagaaaaaagaagcttatggtgttcttcagctcttgcatgtccgtgaagtaccactacgagctcctaaactacattgacttacctgttctggccatccacggaaagcagaagcagaacaagcggaccaccaccttctttcagttttgcaatgcagactccggcaccctcctttgcactgatgtggcagctcgtgggttggacatcccagaggtggattggatcgttcagtatgaccctccagatgatccgaaggagtacatacaccgcgtgggaagaaccgctcggggactgaacggcagaggtcatgcgttgctgatccttcgccccgaagagctcggcttcctcaggtacctgaagcagtcaaaagtcccacttagcgagtttgacttctcctggagtaagatttcagacatccaatcacagttagagaagctgatcgagaaaaattacttcctgcacaagagtgcacaggaggcctacaagagctatataagggcttatgactcacacagtttaaagcaaatttttaatgtgaataaccttaatctgccgcaagtcgctctctcctttgggttcaaggtgccacccttcgttgatctgaacgtgaacagtaacgaggggaagcagaagaaacgaggtggcggaggcgggtttgggtaccagaaaaccaagaaagtggagaagtctaagatctttaagcacattagcaagaaaagctctgatagccggcagttcagccactag

SEQ ID NO: 167875 - DNA, 1230 bp, Artificial Sequence
  derived and/or modified sequence
atggagcaggagcagaccttcggcgtgctgaaggagctgatgacccaccatgtgcatacgtatgggctgataatgggaggcagtaacagatcagccgaggcgcagaaactggggaatggtataaacatcatcgtggccactcctggtagattgctggatcatatgcagaatactccagggttcatgtataagaaccttcagtgccttgtgattgatgaagctgaccgtatcttggatgtgggttttgaagaggaactgaaacagataattaaacttctgcccaccaggcgacagaccatgctgttctctgccacccaaactaggaaggtggaagacctggctaggattagtctaaagaaggagcctctgtacgtcggtgtcgacgacgataaagctaacgcaacagttgacgggctcgagcagggatacgttgtatgcccatctgaaaaaagatttctgctgctgttcactttcttgaagaagaacaggaaaaagaagctaatggtctttttcagttcttgtatgagtgttaaataccactatgagctgctgaactatatcgacctgcctgtgctggctatccatggcaagcagaagcagaacaaacggactacaacctttttccagttttgcaacgccgattcgggaacccttctatgcactgacgtggccgcacggggactggacatccccgaagtcgattggatcgtccaatacgatccaccagatgatcctaaggagtacattcaccgggttggaagaaccgcaaggggcctgaatggtagaggccacgcactcctgattctccgccctgaggaactgggctttctgcgctatctcaagcagagcaaagtgccgctatcagagttcgatttttcctggtccaaaatcagcgacatccagtcacaattggagaaattaatcgaaaagaattacttcctccacaaaagcgctcaggaagcttacaaatcctacatcagagcgtacgactctcattctttaaaacagatattcaacgtgaacaacttgaacctgccccaggtcgctctctcttttggattcaaggttccaccattcgtggatctcaacgttaattctaacgagggcaaacagaaaaagcgcggcggaggcggtggttttggatatcaaaagactaaaaaggttgagaaaagcaaaatcttcaagcacatttccaaaaagtccagcgactcccgacaattttcccattag

SEQ ID NO: 167876 - DNA, 2013 bp, Artificial Sequence
  derived and/or modified sequence
atgtcccacctgccgatgaagctgctacgaaagaagatagaaaaacgcaatcttaagctgcgccagcgaaacctgaaattccagggcgcatctaatctgacactgtccgaaactcagaacggtgatgtctcagaggaaacaatgggctctcgcaaagtcaaaaagagcaagcagaaacccatgaacgtgggtctctctgagacccagaacggcggtatgagccaggaggcagtgggaaacatcaaggttacaaagtcaccgcaaaaatcaactgtgttgaccaacggggaggccgcaatgcaaagctcaaattcagaatccaaaaaaaaaaaaaaaaaaaaacgaaaaatggttaacgatgccgagccagacaccaaaaaagcgaaaaccgaaaacaagggaaagtccgaggaagaatctgcagagaccacaaaagagacagaaaataacgttgaaaagccagacaacgacgaggatgagtcagaagtaccttccctacctctgggcctgaccggcgcattcgaagatacttcattcgcctcactatgtaatctcgtgaatgaaaacacccttaaggcaatcaaggagatgggatttactaacatgactgagatccagcacaaatcaattcggcctcttttggaaggaagggacctgctggcagcagctaagactggatcaggtaagaccttggcgttcttaatacctgcagtcgaactcattgtaaagctgcgcttcatgcctcggaacgggactggagtgctgatcctctcccccacaagggagctggcaatgcagaccttcggagtgctgaaggagcttatgacgcaccacgtgcatacctacggtctgatcatggggggttccaaccggagtgcagaagcgcagaaattgggaaacgggatcaatatcatcgtagccacgccagggagactgttggatcacatgcagaatactcctgggttcatgtacaagaatctgcagtgcctggtgatagacgaagccgacagaatcttagacgtgggcttcgaggaggagctgaaacagatcattaagctcctgcccactcggaggcagaccatgttgtttagtgcaacgcagaccaggaaggttgaagaccttgcccgaatctccctaaaaaaagaaccactctacgtaggcgtcgacgatgacaaggcaaatgcgaccgtcgacggactggagcaggggtacgttgtctgcccttcagaaaagcgttttttgcttttgttcacctttctgaaaaaaaataggaagaagaaactgatggtcttttttagctcatgcatgtccgtgaaatatcattatgaactgcttaattacatcgatctgccagtcctagccattcacggcaagcagaagcaaaacaagcgcaccaccacgttttttcagttctgtaacgccgattcaggcacattactgtgtactgatgtcgcggcacgcggactggacatacccgaagtggattggattgtgcagtatgatcctccagacgatcctaaagagtacattcatagagttgggcgaacagcccgtgggctcaatgggcgtggccatgcactgttgatactccggcctgaagaactgggcttcctgcgatatcttaagcaatccaaagtaccactgtcggagttcgatttctcatggagtaagatttccgatatacagagccagctggagaagctgatcgaaaaaaactatttcctgcacaaaagtgcccaggaagcttataagtcttacattcgagcttatgattcccacagtctgaagcaaatattcaacgttaacaacttgaacctgccgcaggtggccctgagctttggcttcaaagtgcccccatttgtggatttaaacgtgaactctaatgaaggtaaacagaagaaaagaggcggaggaggagggtttggctaccagaagacaaagaaggtagagaagagcaagatctttaagcacataagtaagaagtcctctgatagtagacagttttcacactag

SEQ ID NO: 167877 - DNA, 1230 bp, Artificial Sequence
  derived and/or modified sequence
atggaacaggaacaaacatttggggttcttaaggaactgatgacacaccacgtgcacacatatggtctgatcatggggggatccaaccgctcagccgaggcacagaagttaggcaacggtatcaatataattgtcgctacgccgggaagattactcgaccatatgcaaaacacccctggattcatgtacaagaatcttcagtgtctggtgatcgacgaggccgatagaatactggacgttggcttcgaggaagagctgaaacaaatcataaagctgctccccacgaggaggcagactatgctcttctctgccactcagacgcggaaagttgaagatctggcccgaattagcctcaagaaagaaccgctgtatgtcggggtggacgacgacaaagccaatgccaccgtcgatggattggaacaggggtatgtagtatgtccaagcgagaaaagattcctgcttctgtttaccttcctgaagaagaaccgaaagaaaaagctgatggtgtttttcagcagctgtatgtcagtcaagtaccactatgagctgctgaactatatcgacctgcccgtgctggccattcacggcaaacagaaacagaataagcggaccaccactttttttcagttctgtaacgctgactccggcaccctgttgtgcacagacgtggccgctagaggcctggatatcccagaagtggactggattgtgcagtacgacccaccggatgatccaaaagagtacatacatagagtaggcaggactgcccgaggcttgaacgggaggggccacgcactgttgatcctgcgaccggaagagttagggtttcttcgctacttaaaacagagcaaggtgccgctttcagaatttgatttctcctggtcaaagataagtgatatccaatcccagctggagaagttaattgaaaagaactattttctgcacaagagtgcacaggaggcctataagtcttacattcgggcttatgacagtcatagtctgaaacaaatctttaacgtgaataatctgaatctgcctcaggtggcactgtcgtttgggtttaaagttcccccattcgtggacctaaacgtcaactccaacgaggggaagcaaaagaagcgcggaggtggcggaggctttggctatcagaagaccaaaaaggtcgaaaagtcaaagatctttaagcacatatcaaaaaagagtagcgattcaaggcagttctcccattag

SEQ ID NO: 167878 - DNA, 3796 bp, Artificial Sequence
  derived and/or modified sequence
ccagcgttcctgtgacgcgtttcctgttggccgagctgcgcacgtgcggccggaagggaagtaacgtcagcctgagaactgagtagctgtactgtgtggcgccttattctaggcacttgttgggcagaatgtcacacctgccgatgaaactcctgcgtaagaagatcgagaagcggaacctcaaattgcggcagcggaacctaaagtttcagggggcctcaaatctgaccctatcggaaactcaaaatggagatgtatctgaagaaacaatgggaagtagaaaggttaaaaaatcaaaacaaaagcccatgaatgtgggcttatcagaaactcaaaatggaggcatgtctcaagaagcagtgggaaatataaaagttacaaagtctccccagaaatccactgtattaaccaatggagaagcagcaatgcagtcttccaattcagaatcaaaaaagaaaaagaagaaaaagagaaaaatggtgaatgatgctgagcctgatacgaaaaaagcaaaaactgaaaacaaagggaaatctgaagaagaaagtgccgagactactaaagaaacagaaaataatgtggagaagccagataatgatgaagatgagagtgaggtgcccagtctgcccctgggactgacaggagcttttgaggatacttcgtttgcttctctatgtaatcttgtcaatgaaaacactctgaaggcaataaaagaaatgggttttacaaacatgactgaaattcagcataaaagtatcagaccacttctggaaggcagggatcttctagcagctgcaaaaacaggcagtggtaaaaccctggcttttctcatccctgcagttgaactcattgttaagttaaggttcatgcccaggaatggaacaggagtccttattctctcacctactagagaactagccatgcaaacctttggtgttcttaaggagctgatgactcaccacgtgcatacctatggcttgataatgggtggcagtaacagatctgctgaagcacagaaacttggtaatgggatcaacatcattgtggccacaccaggccgtctgctggaccatatgcagaataccccaggatttatgtataaaaacctgcagtgtctggttattgatgaagctgatcgtatcttggatgtggggtttgaagaggaattaaagcaaattattaaacttttgccaacacgtagacagactatgctcttttctgccacccaaactcgaaaagttgaagacctggcaaggatttctctgaaaaaggagccattgtatgttggcgttgatgatgataaagcgaatgcaacagtggatggtcttgaacagggatatgttgtttgtccttctgaaaagagattccttctgctctttacattccttaagaagaaccgaaagaagaagcttatggtcttcttttcatcttgtatgtctgtgaaataccactatgagttgctgaactacattgatttgcccgtcttggccattcatggaaagcaaaagcaaaataagcgtacaaccacattcttccagttctgcaatgcagattcgggaacactattgtgtacggatgtggcagcgagaggactagacattcctgaagtcgactggattgttcagtatgaccctccggatgaccctaaggaatatattcatcgtgtgggtagaacagccagaggcctaaatgggagagggcatgccttgctcattttgcgcccagaagaattgggttttcttcgctacttgaaacaatccaaggttccattaagtgaatttgacttttcctggtctaaaatttctgacattcagtctcagcttgagaaattgattgaaaagaattactttcttcataagtcagcccaggaagcatataagtcatacatacgagcctatgattcccattctctgaaacagatctttaatgttaataacctaaatttgcctcaggttgctctgtcatttggtttcaaggtgcctcccttcgttgatctgaacgtcaacagtaatgaaggcaagcagaaaaagcgaggaggtggtggtggatttggctaccagaaaaccaagaaagttgagaaatccaaaatctttaaacacattagcaagaaatcatctgacagcaggcagttctctcactgaacacatgccttcctttcatcttgaataactttgtcctaaaatgaattttttttccccttgatttaacaggatttttgtagactttagaatttggacttacctaacaagagtataaattgacttgggttgcaagcactgagcactgttacttctatcacgtctctcttttatttctgggatataaaacaggctttaagtttcttggttgcccaagggcagagcaaggaatatctggtgtttcttgtgatgataatattttaattttaaatatccctccctcatacaagtgtatgttaccattttaatataattctttttgtacctttccttcttgttttgcgaagatttttgtggcatggattgctgtgctcactgctgtaaaaggtgacctagtgtactgggcagctggtggcggtgcagaaaagagtctcaggttattttttgtttttagttatttcttggaccttgacagtatctaatgactcctcctgaaaatgctgcagtataaaagagcaaagagctttgggaaatacctaagaagcaccttaagattagggtggcattgcttttatagattcttgattttaaagcaacaggcctttctcaggtgttgcattttttggagcaaaaactatgggttgtaatttgaataaagtgtcactaagcagttataacgtttgatggctggggggtaggaagaggatggaattgagatgtttgagcctcatttacatcaatagaggtgtaatgtactgcatttcttcatttggtaacataacaaagactttcatacaaagaacgatgatgctcctcattaagatttgtttaattcaaggtggtttggatttggtaagcctttgcactctgtagagtacttagaagacaagggcaacttacttggagttagagccaagctgtcagacggtgcccagcacacattaatgttagcttctttctgagaaaaaaatacctcttccaggccctgaaacaaaaaatacatttgctgtgaagattgaaaatgaacaaagttagaaaaaaaaacagcaaaatcagtgatttagtcagatgagtttttcgttgtaggagcacttgatttctagtgtgttttgtacagtatataactacaagatagtacattttgtagcagttcaaagccaaagttgctagcatcattttgctgttgtgccagttaatcataggatcccattaaataagtgtgctaacatcgaatatagagaaaactggtaaagaacattccagtaggaaaagaaaagaacaatcttccatttctgggcttggccaccatcaccctggtcggacctgtcctggacttccaaccttgactgctgagctcctggcttagcttcttgggttcctaattcctggtgtttaataattctctccacgatcatgtttttctgattttttttttcagaaataatgttttttaaaagacaaaaacaaagggaagaatatttaattactgagcagaagtaaatactgttggcattttgtacataatctaatttttatatgcatgttcatgctttttaatttttttatcaaaaattaagtcatctacctactacttgtaaccagcttgtttcataacatgttattttcctgtgtcattaaataattacttcaatgttgta

SEQ ID NO: 167879 - DNA, 3195 bp, Artificial Sequence
  derived and/or modified sequence
aaacagaaaataatgtggagaagccagataatgatgaagatgagagtgaggtgcccagtctgcccctgggactgacaggagcttttgaggatacttcgtttgcttctctatgtaatcttgtcaatgaaaacactctgaaggcaataaaagaaatgggttttacaaacatgactgaaattcagcataaaagtatcagaccacttctggaaggcagggatcttctagcagctgcaaaaacaggcagtggtaaaaccctggcttttctcatccctgcagttgaactcattgttaagttaaggttcatgcccaggaatggaacaggagcaaacctttggtgttcttaaggagctgatgactcaccacgtgcatacctatggcttgataatgggtggcagtaacagatctgctgaagcacagaaacttggtaatgggatcaacatcattgtggccacaccaggccgtctgctggaccatatgcagaataccccaggatttatgtataaaaacctgcagtgtctggttattgatgaagctgatcgtatcttggatgtggggtttgaagaggaattaaagcaaattattaaacttttgccaacacgtagacagactatgctcttttctgccacccaaactcgaaaagttgaagacctggcaaggatttctctgaaaaaggagccattgtatgttggcgttgatgatgataaagcgaatgcaacagtggatggtcttgaacagggatatgttgtttgtccttctgaaaagagattccttctgctctttacattccttaagaagaaccgaaagaagaagcttatggtcttcttttcatcttgtatgtctgtgaaataccactatgagttgctgaactacattgatttgcccgtcttggccattcatggaaagcaaaagcaaaataagcgtacaaccacattcttccagttctgcaatgcagattcgggaacactattgtgtacggatgtggcagcgagaggactagacattcctgaagtcgactggattgttcagtatgaccctccggatgaccctaaggaatatattcatcgtgtgggtagaacagccagaggcctaaatgggagagggcatgccttgctcattttgcgcccagaagaattgggttttcttcgctacttgaaacaatccaaggttccattaagtgaatttgacttttcctggtctaaaatttctgacattcagtctcagcttgagaaattgattgaaaagaattactttcttcataagtcagcccaggaagcatataagtcatacatacgagcctatgattcccattctctgaaacagatctttaatgttaataacctaaatttgcctcaggttgctctgtcatttggtttcaaggtgcctcccttcgttgatctgaacgtcaacagtaatgaaggcaagcagaaaaagcgaggaggtggtggtggatttggctaccagaaaaccaagaaagttgagaaatccaaaatctttaaacacattagcaagaaatcatctgacagcaggcagttctctcactgaacacatgccttcctttcatcttgaataactttgtcctaaaatgaattttttttccccttgatttaacaggatttttgtagactttagaatttggacttacctaacaagagtataaattgacttgggttgcaagcactgagcactgttacttctatcacgtctctcttttatttctgggatataaaacaggctttaagtttcttggttgcccaagggcagagcaaggaatatctggtgtttcttgtgatgataatattttaattttaaatatccctccctcatacaagtgtatgttaccattttaatataattctttttgtacctttccttcttgttttgcgaagatttttgtggcatggattgctgtgctcactgctgtaaaaggtgacctagtgtactgggcagctggtggcggtgcagaaaagagtctcaggttattttttgtttttagttatttcttggaccttgacagtatctaatgactcctcctgaaaatgctgcagtataaaagagcaaagagctttgggaaatacctaagaagcaccttaagattagggtggcattgcttttatagattcttgattttaaagcaacaggcctttctcaggtgttgcattttttggagcaaaaactatgggttgtaatttgaataaagtgtcactaagcagttataacgtttgatggctggggggtaggaagaggatggaattgagatgtttgagcctcatttacatcaatagaggtgtaatgtactgcatttcttcatttggtaacataacaaagactttcatacaaagaacgatgatgctcctcattaagatttgtttaattcaaggtggtttggatttggtaagcctttgcactctgtagagtacttagaagacaagggcaacttacttggagttagagccaagctgtcagacggtgcccagcacacattaatgttagcttctttctgagaaaaaaatacctcttccaggccctgaaacaaaaaatacatttgctgtgaagattgaaaatgaacaaagttagaaaaaaaaacagcaaaatcagtgatttagtcagatgagtttttcgttgtaggagcacttgatttctagtgtgttttgtacagtatataactacaagatagtacattttgtagcagttcaaagccaaagttgctagcatcattttgctgttgtgccagttaatcataggatcccattaaataagtgtgctaacatcgaatatagagaaaactggtaaagaacattccagtaggaaaagaaaagaacaatcttccatttctgggcttggccaccatcaccctggtcggacctgtcctggacttccaaccttgactgctgagctcctggcttagcttcttgggttcctaattcctggtgtttaataattctctccacgatcatgtttttctgattttttttttcagaaataatgttttttaaaagacaaaaacaaagggaagaatatttaattactgagcagaagtaaatactgttggcattttgtacataatctaatttttatatgcatgttcatgctttttaatttttttatcaaaaattaagtcatctacctactacttgtaaccagcttgtttcataacatgttattttcctgtgtcattaaataattacttcaatgttg

SEQ ID NO: 167880 - DNA, 2013 bp, Artificial Sequence
  derived and/or modified sequence
atgagccacctgcccatgaagctgctgagaaagaagatcgagaagagaaacctgaagctgagacagagaaacctgaagttccagggcgccagcaacctgaccctgagcgagacccagaacggcgacgtgagcgaggagaccatgggcagcagaaaggtgaagaagagcaagcagaagcccatgaacgtgggcctgagcgagacccagaacggcggcatgagccaggaggccgtgggcaacatcaaggtgaccaagagcccccagaagagcaccgtgctgaccaacggcgaggccgccatgcagagcagcaacagcgagagcaagaagaagaagaagaagaagagaaagatggtgaacgacgccgagcccgacaccaagaaggccaagaccgagaacaagggcaagagcgaggaggagagcgccgagaccaccaaggagaccgagaacaacgtggagaagcccgacaacgacgaggacgagagcgaggtgcccagcctgcccctgggcctgaccggcgccttcgaggacaccagcttcgccagcctgtgcaacctggtgaacgagaacaccctgaaggccatcaaggagatgggcttcaccaacatgaccgagatccagcacaagagcatcagacccctgctggagggcagagacctgctggccgccgccaagaccggcagcggcaagaccctggccttcctgatccccgccgtggagctgatcgtgaagctgagattcatgcccagaaacggcaccggcgtgctgatcctgagccccaccagagagctggccatgcagaccttcggcgtgctgaaggagctgatgacccaccacgtgcacacctacggcctgatcatgggcggcagcaacagaagcgccgaggcccagaagctgggcaacggcatcaacatcatcgtggccacccccggcagactgctggaccacatgcagaacacccccggcttcatgtacaagaacctgcagtgcctggtgatcgacgaggccgacagaatcctggacgtgggcttcgaggaggagctgaagcagatcatcaagctgctgcccaccagaagacagaccatgctgttcagcgccacccagaccagaaaggtggaggacctggccagaatcagcctgaagaaggagcccctgtacgtgggcgtggacgacgacaaggccaacgccaccgtggacggcctggagcagggctacgtggtgtgccccagcgagaagagattcctgctgctgttcaccttcctgaagaagaacagaaagaagaagctgatggtgttcttcagcagctgcatgagcgtgaagtaccactacgagctgctgaactacatcgacctgcccgtgctggccatccacggcaagcagaagcagaacaagagaaccaccaccttcttccagttctgcaacgccgacagcggcaccctgctgtgcaccgacgtggccgccagaggcctggacatccccgaggtggactggatcgtgcagtacgacccccccgacgaccccaaggagtacatccacagagtgggcagaaccgccagaggcctgaacggcagaggccacgccctgctgatcctgagacccgaggagctgggcttcctgagatacctgaagcagagcaaggtgcccctgagcgagttcgacttcagctggagcaagatcagcgacatccagagccagctggagaagctgatcgagaagaactacttcctgcacaagagcgcccaggaggcctacaagagctacatcagagcctacgacagccacagcctgaagcagatcttcaacgtgaacaacctgaacctgccccaggtggccctgagcttcggcttcaaggtgccccccttcgtggacctgaacgtgaacagcaacgagggcaagcagaagaagagaggcggcggcggcggcttcggctaccagaagaccaagaaggtggagaagagcaagatcttcaagcacatcagcaagaagagcagcgacagcagacagttcagccactag

SEQ ID NO: 167881 - DNA, 1230 bp, Artificial Sequence
  derived and/or modified sequence
atggagcaggagcagaccttcggcgtgctgaaggagctgatgacccaccacgtgcacacctacggcctgatcatgggcggcagcaacagaagcgccgaggcccagaagctgggcaacggcatcaacatcatcgtggccacccccggcagactgctggaccacatgcagaacacccccggcttcatgtacaagaacctgcagtgcctggtgatcgacgaggccgacagaatcctggacgtgggcttcgaggaggagctgaagcagatcatcaagctgctgcccaccagaagacagaccatgctgttcagcgccacccagaccagaaaggtggaggacctggccagaatcagcctgaagaaggagcccctgtacgtgggcgtggacgacgacaaggccaacgccaccgtggacggcctggagcagggctacgtggtgtgccccagcgagaagagattcctgctgctgttcaccttcctgaagaagaacagaaagaagaagctgatggtgttcttcagcagctgcatgagcgtgaagtaccactacgagctgctgaactacatcgacctgcccgtgctggccatccacggcaagcagaagcagaacaagagaaccaccaccttcttccagttctgcaacgccgacagcggcaccctgctgtgcaccgacgtggccgccagaggcctggacatccccgaggtggactggatcgtgcagtacgacccccccgacgaccccaaggagtacatccacagagtgggcagaaccgccagaggcctgaacggcagaggccacgccctgctgatcctgagacccgaggagctgggcttcctgagatacctgaagcagagcaaggtgcccctgagcgagttcgacttcagctggagcaagatcagcgacatccagagccagctggagaagctgatcgagaagaactacttcctgcacaagagcgcccaggaggcctacaagagctacatcagagcctacgacagccacagcctgaagcagatcttcaacgtgaacaacctgaacctgccccaggtggccctgagcttcggcttcaaggtgccccccttcgtggacctgaacgtgaacagcaacgagggcaagcagaagaagagaggcggcggcggcggcttcggctaccagaagaccaagaaggtggagaagagcaagatcttcaagcacatcagcaagaagagcagcgacagcagacagttcagccactag

SEQ ID NO: 167882 - protein, 341 aa, Artificial Sequence
  derived and/or modified sequence
MVGEMETKEKPKPTPDYLMQLMNDKKLMSSLPNFCGIFNHLERLLDEEISRVRKDMYNDTLNGSTEKRSAELPDAVGPIVQLQEKLYVPVKEYPDFNFVGRILGPRGLTAKQLEAETGCKIMVRGKGSMRDKKKEEQNRGKPNWEHLNEDLHVLITVEDAQNRAEIKLKRAVEEVKKLLVPAAEGEDSLKKMQLMELAILNGTYRDANIKSPALAFSLAATAQAAPRIITGPAPVLPPAALRTPTPAGPTIMPLIRQIQTAVMPNGTPHPTAAIVPPGPEAGLIYTPYEYPYTLAPATSILEYPIEPSGVLGAVATKVRRHDMRVHPYQRIVTADRAATGN

SEQ ID NO: 167883 - DNA, 1026 bp, Artificial Sequence
  derived and/or modified sequence
atggtgggcgagatggagaccaaggagaagcccaagcccacccccgactacctgatgcagctgatgaacgacaagaagctgatgagcagcctgcccaacttctgcggcatcttcaaccacctggagagactgctggacgaggagatcagcagagtgagaaaggacatgtacaacgacaccctgaacggcagcaccgagaagagaagcgccgagctgcccgacgccgtgggccccatcgtgcagctgcaggagaagctgtacgtgcccgtgaaggagtaccccgacttcaacttcgtgggcagaatcctgggccccagaggcctgaccgccaagcagctggaggccgagaccggctgcaagatcatggtgagaggcaagggcagcatgagagacaagaagaaggaggagcagaacagaggcaagcccaactgggagcacctgaacgaggacctgcacgtgctgatcaccgtggaggacgcccagaacagagccgagatcaagctgaagagagccgtggaggaggtgaagaagctgctggtgcccgccgccgagggcgaggacagcctgaagaagatgcagctgatggagctggccatcctgaacggcacctacagagacgccaacatcaagagccccgccctggccttcagcctggccgccaccgcccaggccgcccccagaatcatcaccggccccgcccccgtgctgccccccgccgccctgagaacccccacccccgccggccccaccatcatgcccctgatcagacagatccagaccgccgtgatgcccaacggcaccccccaccccaccgccgccatcgtgccccccggccccgaggccggcctgatctacaccccctacgagtacccctacaccctggcccccgccaccagcatcctggagtaccccatcgagcccagcggcgtgctgggcgccgtggccaccaaggtgagaagacacgacatgagagtgcacccctaccagagaatcgtgaccgccgacagagccgccaccggcaactag

SEQ ID NO: 167884 - DNA, 1026 bp, Artificial Sequence
  derived and/or modified sequence
atggtgggagagatggagaccaaggaaaaaccaaaaccaacacccgattacctgatgcagttgatgaatgataaaaagctgatgagttcactacctaatttctgcggcatattcaaccatctggagaggctgctggatgaagagatctcccgggttaggaaagacatgtacaatgacactttgaatggtagcactgaaaagagatcagccgagctacctgacgcagtggggccaattgtacagctgcaggaaaaattatatgtgccggtgaaagaataccctgattttaacttcgttggccgcatccttggtccaaggggtttgaccgcaaaacagttggaagctgagacgggatgcaagatcatggttcgtggtaagggttccatgcgcgataaaaaaaaggaagagcagaaccgcggcaagcccaattgggagcacctgaatgaggacctgcacgtgctgattacagtggaggacgctcaaaaccgcgcagaaatcaaacttaaacgtgccgtcgaagaagttaagaagctccttgtccccgccgcagaaggcgaagatagcttaaaaaagatgcaacttatggagctggcgatccttaacggtacctatagggacgctaacataaagagcccggccctagcattttcccttgcagctacagctcaggcagccccccgcatcatcacgggtccagcacccgtgctgcctcccgccgcactcagaaccccaacccctgccggaccaacaattatgcctcttattcggcaaattcaaactgctgtcatgccgaatggtaccccgcaccctactgcagctatcgtccctcccgggcccgaagccggcttgatttacaccccatatgagtatccctacaccttggcgccggccacgtccatcctggagtaccccatcgagcccagtggggtgctgggtgccgtggctacaaaagtgcgccgccatgatatgcgcgtgcacccctatcagcgcatcgtgaccgccgatcgcgctgccaccggaaattag

SEQ ID NO: 167885 - DNA, 1026 bp, Artificial Sequence
  derived and/or modified sequence
atggtgggggagatggagaccaaggagaagcccaagcccaccccagactacctgatgcagctgatgaatgacaagaagctgatgagcagcctgcccaacttctgtggcatcttcaaccacctggagcggctgctggatgaggagatcagccgggtgaggaaggacatgtacaatgacaccctgaatggcagcacagagaagaggtctgctgagctgcctgatgctgtgggccccatcgtgcagctgcaggagaagctgtatgtgcctgtgaaggagtacccagacttcaactttgtgggccgcatcctgggcccccggggcctgacagccaagcagctggaggccgagaccggctgcaagatcatggtgcggggcaagggctccatgagggacaagaagaaggaggagcagaacagaggcaagcccaactgggagcacctgaatgaagacctgcacgtgctgatcaccgtggaggatgcccagaacagagctgagatcaagctgaagagagctgtggaggaggtgaagaagctgctggtgcctgctgctgagggggaggacagcctgaagaagatgcagctgatggagctggccatcctgaatggcacctacagagatgccaacatcaagagccctgccctggccttcagcctggccgccacagcccaggccgccccccgcatcatcaccggccctgcccctgtgctgcccccagctgccctgcggacccccaccccagctggccccaccatcatgcccctcatccggcagatccagacagctgtgatgcccaacggcaccccccaccccacagctgccatcgtgcccccaggccctgaggccggcctcatctacaccccctatgagtacccctacaccctggccccagccaccagcatcctggagtaccccatcgagcccagcggcgtgctgggcgctgtggccaccaaggtgagaagacatgacatgagggtgcacccctaccagagaattgtgacagctgacagagctgccactggaaattag

SEQ ID NO: 167886 - DNA, 1026 bp, Artificial Sequence
  derived and/or modified sequence
atggtgggcgagatggagaccaaggagaagcccaagcccacccccgattatctgatgcagctgatgaacgacaaaaaattgatgtcttctctgccaaatttctgtggcattttcaatcatttggagaggctgctcgatgaagaaatttccagggtgcgcaaggacatgtataacgataccctcaacggctccacggagaagcgctccgccgaattgcccgacgctgtcggcccaatcgtccaactgcaagaaaagttgtacgttcctgtgaaggagtatcctgattttaacttcgtggggaggatcctcggccctcgcggccttaccgccaagcagcttgaggcagagaccgggtgcaaaatcatggtgcgcgggaagggatccatgagggacaaaaaaaaagaggagcagaaccgcggcaaaccaaattgggagcacctcaacgaagatctgcatgtgctgataacagtggaggatgcccagaacagagctgagattaaactgaaaagggctgtggaggaggtgaaaaaacttctcgtgccagcggccgaaggggaagacagcctgaagaaaatgcaactgatggagctggcgattctgaacggaacctaccgagatgctaatattaagagccctgccctggcttttagcctcgccgccactgcccaggctgctccgcggatcatcacagggcccgctccagttctgccccccgccgcactccgcaccccaacccctgccggacccactattatgccactgatccgacagatccagaccgctgtgatgcctaatggcacgccacatcctactgctgccattgtcccaccagggcccgaggctggattgatttacactccatatgaatacccctacacattggctccggctacctccattctcgagtacccaatagagcccagcggcgtattgggcgccgtggccacgaaagtccggcgccacgatatgagggtgcatccctatcagagaatagtgactgccgaccgcgctgcgactggcaattag

SEQ ID NO: 167887 - DNA, 1026 bp, Artificial Sequence
  derived and/or modified sequence
atggtgggagagatggagactaaggagaaacctaaaccgacgcccgactatttgatgcagttgatgaatgacaaaaagctgatgagtagcctccccaacttctgtggcatcttcaaccacctcgagcgcctgcttgatgaggaaatatcacgggtcaggaaagatatgtataatgacactttgaatggcagcaccgaaaagcggtctgccgagctacccgacgccgtgggaccaatcgttcagctgcaagaaaagctgtacgttccggtcaaggaatatccagactttaacttcgtggggcgtatcttaggccctcgcggtctgacagcaaaacagctggaggctgagaccggctgcaagatcatggtccgcggtaagggcagcatgcgtgacaagaaaaaggaagagcaaaatcggggaaagccaaactgggagcacctgaacgaagatctgcatgttctgataaccgtggaagacgcccagaaccgggctgaaattaagcttaaaagggccgttgaggaagtcaagaaattgctggtccctgcagctgaaggtgaggattccctgaagaagatgcagctgatggagctggcaattctaaacggtacctaccgcgacgcgaatataaagtctccagccctggctttctctctggcggctacagcgcaagctgcgccaagaatcatcaccggtccagcccctgtgcttcctcccgctgctcttcgcacccctaccccagctggtccaaccatcatgcccttgatcaggcagatccaaacagctgtcatgcccaacgggacacctcacccgacagccgcaatcgttcccccaggccctgaggcaggccttatctatacaccgtacgagtacccttacacacttgctccagcaacctcaattctagagtaccccatcgaaccctccggtgtgcttggggcagtcgcaacaaaagtccgccgacatgacatgcgagttcatccgtatcagcgcatcgtaactgcggacagagcggcaaccggcaattag

SEQ ID NO: 167888 - DNA, 9463 bp, Artificial Sequence
  derived and/or modified sequence
tgaactgaggcgaactccgccgccaagtgagtgaggaggaggaggaggagaaggaggaggaggaagaggaggagcgcagtcggagcgcggcggcagcggcagaggcgccgcggcggggaccagcccagagagaccccccgagcccgcggcacaggcggcggcggcgctgagcgggctcgaccagccgagcgagcggcggccccggctcctcctcgtccggcgccagcagcccgcgccccgcgcccgcactcggccagccgagacccgcctcccgcccgcccgccggcctcgtgagggacgcgccgagccgggcggccgagagcggcggcggctgggagcgcgtcgggcccgggcggaaagtgcctgcggggggcgggcgagcgcgcggtgccggccgccccggggctcggcgcgggagccagagcgggagccggcgcggagcgggacgccgggtcccgagcggcccgcggccggggctcgcccccgcccctccctcctctccggcggcggcggcggcggcggcgggcggagtgagctgcggagcctggaatatggtcggggaaatggaaacgaaggagaagccgaagcccaccccagattacctgatgcagctgatgaacgacaagaagctcatgagcagcctgcccaacttctgcgggatcttcaaccacctcgagcggctgctggacgaagaaattagcagagtacggaaagacatgtacaatgacacattaaatggcagtacagagaaaaggagtgcagaattgcctgatgctgtgggacctattgttcagttacaagagaaactttatgtgcctgtaaaagaatacccagattttaattttgttgggagaatccttggacctagaggacttacagccaaacaacttgaagcagaaaccggatgtaaaatcatggtccgaggcaaaggctcaatgagggataaaaaaaaggaggagcaaaatagaggcaagcccaattgggagcatctaaatgaagatttacatgtactaatcactgtggaagatgctcagaacagagcagaaatcaaattgaagagagcagttgaagaagtgaagaaattattggtacctgcagcagaaggagaagacagcctgaagaagatgcagctgatggagcttgcgattctgaatggcacctacagagatgccaacattaaatcaccagcccttgccttttctcttgcagcaacagcccaggctgctccaaggatcattactgggcctgcgccggttctcccaccagctgccctgcgtactcctacgccagctggccctaccataatgcctttgatcagacaaatacagaccgctgtcatgccaaacggaactcctcacccaactgctgcaatagttcctccagggcccgaagctggtttaatctatacaccctatgagtacccctacacattggcaccagctacatcaatccttgagtatcctattgaacctagtggtgtattaggtgcggtggctactaaagttcgaaggcacgatatgcgtgtccatccttaccaaaggattgtgaccgcagaccgagccgccaccggcaactaacctatgaccttctgacctctgaactcttcacccaatgatgacctgaccatgcctgcctgctgatcagttaactggtaatcgcctttgcttgcctgtcgtcagtgcagcgagctgaggcacttgtccgttcgtcttaccatctaaccaaacaaaagacaaagaaattgttgtcctccaactcagctttttttttttttttttcctgtttgggtgaaagtggttctagaaactgcactgaatagtagtaaagcaataaggcccaattcatcccacagcactgatcatcttttaatatcccaccctaagcgaacggtaagaaggcctctcttaagaaggggagacagatggtccttaactactcaatgacagaggcagttactgtgagagacttctaggaatctttttcttctcatagcgaagtcaaagctctctctgaatgtactgtgtgatgatgcatcatgcatgaaccttcggtcagggatatcattggtgaagtgatttcaaaaagtattcaaaatttgatatgctgtttagtcactacagtgccctcaaagggcagaagttgcagccttttttatattgcctgccaaaatttgaagtattagaagaaagtgtgccatgagagaaaaacttaaggagttttgaaaagtaatgcaaataacaaaactgcaacactatttttaaaaagataaatatctgagttaaaattactgaatctttattttacacctaaaaaaatatgagaacaaggtacatgcattatgtgtcacattactgggcaaactgttcaagtatttttttttaaacctccctgtatagaaaaaaatcattaaggatgtaaaagccatgcttgcctatttgctgtatacatgtaatgaaattgtagataaagtgtagtgcattgaaacaaatgaacaaaaagtagatacttttactatacaagggtgctggtgcagaaaaaaatatatatatttttggaaatgtagcattttatactttcaagtgttataaaaaaaaagaaaaagaacaaagaaaccctttatttcattaaatgattttttctggtggttgtcaagaaacaaaagaccaaaagagcctttttgtctttcttttttattttttaagtattggaataagtctaaagaaaagaaagtgccttattttccttcatggtcattcagtcaagtgtctcataaagatcagctcctccctcagaatacaagttaatgcatgttactcagtcgcccagtatgtgaaagaagatatgagggagacaaatgagttgatagtttgaattataggatttttgccacgttaccttgatgcaaatttgccaaatctgatactgtgaaaagatttgataacttttctaatgcctgactagtaagttttaaaacatcattctttaaaagaatagtttaatacttttggttattccaatcttcaatgttaacccaaaggattctgagataaaaattatgtgtcatctaaacttcagtttacagacaaaattagagctttgttttatttggagaagggggatgcattcatttgattttgttttttgtttttaattaattgaatataataggatacctagcaaatgttttcacaaaagtgaatctttgtgattttcattctagaaaacaatgttttaaatcacccaaatttaatcacatgtctttatatcataccagataactggtgtagtgtatccttttactgtttcaataacctctgcctcccccaccccttaactttaaaagaatgtgaaaaactagcatcatagtgcatataaatactcaaccacatttcagcttaagcttctaatttctcaagaagttgaaacagttagttatgtagttgaagcaatttgtgtgcaaagcctacatctaaacacttgagtgaataatcattaactgctcagtaccagacgtggcaaatctcaagtgacagtggacccccccccccgcccagcttatcaactcgtcccctcttccacaccttcccagcatcacagtcagaggtcagcaggaagctgagtcattaccttcttggtgacctcccccaccatcttgtctcacttggaaaccgttgtcagtttatttactatgcaatagacattcattgttttgtatccagctagctttggtttaatatgccactgctttgtctttctgttacacatacagttttgatttatttacaatatatgctgtgccattttgatttttatattgtttggttggttgaataaatttgcgacactcaaacacttgaggtgatagttgttaaaaacaataccagtatttgatccagtttcatctcaactatgttatacctggacattttagatgtttatcaaaggtcttttatggggaagaaagtaaatgtatgaaataataaatgtgtgacatttatagggaatgttggctctgaacaaacttttgaaaacttggttgacaaaattttggatcaactgaaaaaagcatgacttttgaaatctctgaatgccttggttctcagtattatcattctttattgaatttatttcttattaaaatatgtagtttttaagactttttttctgacagtattatgtaattttttagcgtgggtagatgggagtgtcgcttgtatgttatcgtacagctgacatgtatttttgtctattctttattatcttagtttcatgctatgtatgtaccataaccaacctattgcctatgagaaacatgtaagataatgtatttacagccattgttacaagtttataatgtatttttctatcttgttttatatgtatgttatataacattcaaaaagaatttttttcttgattgagaaaaggatacaaaatgcaaaatccacaattttgataactgaaaattgccaattgttttgcagtactttattatattgggtgtcttgtcttttttgggcttttagttagctaatgaatgaatacattagacacttttgggttttagttgggattttacatagcttgcattttaattctttggttctttgctgtttctattaacccacagcattattttaataaatgttataataccaacctactaactctggactttgtctgtttattaacctttatatgtttaattaaaataaacaaataaagacaaaagaatgtaaagtcttgagttactggactaaccctgaagaacgtgaccacagataacatagtgtgacttgtttttatgttgtttgtcagctgacagttttgcacactactgttaaaatggctttggttattctggtcttttagcttgggggccggggcgggtgtgggtgtaggtgcagtagagatgggaacaaagtagcctttgtttgaggcattcttctcttgccacttgcctttcagcatctgcattactaattccacaccttatttttccttctccaaaataatcactgtctgctcacagcatcgagtaaaaagatacattgtcatggtatatacctggagaaaccagtttgattctttgttgaaccatttcttttaatttctgtaaataagtaattttatggtcacattgtaaagcagagaaactgttgatattttacctttatttagatttttgttttaacttgacctttttcctttggaaagcgttgaacttgtttagctaactactcctattaggggagcttaacttgggtaaagtcaaaggcccactggctgtttctcatggtggcctgaagccccgctgctttccagtgaggaaaagaaccctcagcacgttactgagctttcctcaggtatttttttctctgtcacctactttacaaatacagtcagactaaaacattaaacaagaagtttaagggggaataacattgggatttgaaaagttgtatgtgattaatttcttgcatgcaaatcaatttaagatttcttaaatatcttcatgcttttcttggctggaacttgggtaaattaacctgtaattatgaattatttagtttaactcaaggtgcatttttatttcacagattgatacttgcttttttctgtgaaacagttctcctagataccaaaatcctcaggatgaatttttgcatttgtaaataacaatttatctttgtaaattacattttatttatttagagttctaaaattgagggctgaaatgaatgacatgtaatagaagacaaaactgtaccaatacgctgttaaccaatcagactgtccaggtattctcatttcataaatatgtatacacacatataaatacacagagtagtgttagctgatgtgagtgataacagcgaatcaccattgagatggtcatttggatcatgtaaacaaaccgtgtcatgtctctgatgggagcggtgggtagtgtactgttaggtggacaggtcttttaacatgctactatttgtaaaagtttccgttgccataacagttcatgtagtagtctgtgaaaattcgaagctgtctgtcaagctgctaatatacaagttgtcatggtaccatgtaacttaaattgatgaatttctatgcaatttactattctctgaagcctatgaatgcagcctcatctcattttcagttaagggtactttatgtataattatgtcattgctgccttttatgtaggaaatgtaaaaaagttttaaaaggcgaaaataacattacagatttcatttttatacaggttacaatattaaacatgaaactaccaaattccaagaatagtaaaattctagagtcagttgattgattgaaactatttgacaaaacagttgaaagctgagctttcagtcaagaagttggtgaaattaatgtccttaaacttttcctttaggcaaaatgtcagggaaaacttaacatgaaagtagttactcccatacgcaccagtgcagtagctccaggtgtaagaggtcacgaaggcaccctgcccataaaaccaggatgtgcatacgtacacacaatcggtgtctggttatggttttctaaacactacataaggatctgaattttttagtgtgccaaaagcaaacgataggtttaaatgaaattgctcactaccaaatcaagactcttcatatatatacgtgtgtgtatatatatatgtcataacactttcacgtgtgacagcctaaggtttctttagttttaggatggggtggggtgggagtggttttgcatgtttgaccaggatgtgatgcctgtctttattccttgataagaagtagctgttacagcatttcaagcaaattattttaggtagaatagaacttactgccaaatgattatttatttagcaaaaattattctccaacttttcgaattcacaatttttctaagtgcatagagtagttttttacattgtcacgaattccttaatacctttatttaaaatggaaaaaatatggacaatattttagaaatatgtgctacacatctaattttatctgtagtttaagtgatctaaattgagatgcctttgatatgaagagatttaccaacattatatgcactcgtgccttcaatgtggaatcaaactggttaacctcagcacagtcctctcgtttctgtgtttctgctgcactaattgccagggggtgggggagaaggcgaatgaattaattcatagtagaaggaggcgataggtgcagcaaagggcagccacagtgttgattccacattataatgttgttgcctcttcttggcaaaagacaccacattgtgggaagatctcagcttccagggtaaaagttaatttataacttaaaagtgctattaagtttttattaccaaatatatcttttatggtttatattgtagtggtatgtatgaaacatttaaaattttactgtggaaattgtgtatatatatatatatagtcgaaataggtgttcacaggtcacatgtgaacggagaactgcatgaccgtacatgaaatgcaataaaccaactggaaaaagtgcatgtgcttcatcctctcaagccaactgcagctggaaagtgctgcttatcctccacccccagaaaatgcatgtatcaatatgagaataaagaacgcacactttcaattttattgaggctttcaacactatttaaaagaaaatgtaagaatttgacattctggagttattataacattagaaaatgagcataacattcactctgattttagccattaagggagattagtaaacagactgctacagtgttccatagttggactgtgcatccaaaacatttttttatctttaataaatggtacagtttttatgtagttttcgaatgtaagaagaaaggaatgctgaccaaaacttgatttcatcagcttcatgaaaaggactagtgtcattaacctgttgaacagaattggtttattaaaaaaatcatttccagtagtgtgaaacctttacgagtctttaacatctaaatgttatgactccttgtaccttaagttttccagtctttcttatttatatcatctccaagtacctctggctcctttcctcttgctcaccggaaccttagttttcctcaacagaatgctttgttaaagtagcccacagttgcaggatccatagcaccgtcgtgcagactagcagcccaaaggtgtgtttggtttggcttatacggtgttttgctttttaaactacttgccataatttaaaagtggcaacactagacttaaaaaaaaaaaagtctgattgcccatattagattttttttttaattcttcacaaaatctgctcttcctgaaagatcaaagtgtctagaaagcccaaacatgtattcttaacatagtaggcaccagctgaaactgagtaattaaacggtcccctgaagccaagtattccctggttagtcgccaccccaccactccttcctgtctctagtgtcacacttgggctgttgattttcttactcttctcttgctttaatccttccccccggctctctggctcctgtggatatctgtgcttgtttcctggtccaggatggtgatctgactttcaaaccagcttctcaaaaggggtgacataaaatcagttttgatgtttttcctcctgaaaaatcagatgaatattttagtcactgttactcatgcacattgtgttcttatgtttacagaagtgcttaagtgaatggaagcactagacatttggatttccttcctaacgtaatttttaatgattaccccttttatacagtaatttgtggtctttagaaagcagttaaactaattgaccatctaatagttgtactatacatatgtctaaaataatagtcatggtaagtttggcatcatatcttccccaaaaaatgtttattaaaattagattattccagtttaatgctattttgtgaactgtataccctctgaaagcgcttatttttacatgctacacaacagttccaattttaaggagtgtctcctaaaattgggatgaaaatctactgtagtctgttttaaagtatgctatactatgttcattggttacttaactggatattaatataaaggttattacaagaaaaatgatgaagagcaaaaggagaagaaaatatttgcaagtgaatccacaattcttgcagaactatttgagttgatactaaagattttatgttcactcctttaccttagaactgtcaagcttgggaatgaggaaagtgccttggctgtgcttgaaacctgaattttagtgcttcccttattacattcattgttttcaatgattgatttataaaattaagacatactggtagtacaagttgaaagttggtttgaatacattttaattaaatgataatatgttaatatgcttttgttcattgctttctcactgaggtaaaacagcattaaaaagttgtccagaatttaaactga

SEQ ID NO: 167889 - protein, 672 aa, Artificial Sequence
  derived and/or modified sequence
MESRKLISATDIQYSGSLLNSLNEQRGHGLFCDVTVIVEDRKFRAHKNILSASSTYFHQLFSVAGQVVELSFIRAEIFAEILNYIYSSKIVRVRSDLLDELIKSGQLLGVKFIAELGVPLSQVKSISGTAQDGNTEPLPPDSGDKNLVIQKSKDEAQDNGATIMPIITESFSLSAEDYEMKKIIVTDSDDDDDDVIFCSEILPTKETLPSNNTVAQVQSNPGPVAISDVAPSASNNSPPLTNITPTQKLPTPVNQATLSQTQGSEKLLVSSAPTHLTPNIILLNQTPLSTPPNVSSSLPNHMPSSINLLVQNQQTPNSAILTGNKANEEEEEEIIDDDDDTISSSPDSAVSNTSLVPQADTSQNTSFDGSLIQKMQIPTLLQEPLSNSLKISDIITRNTNDPGVGSKHLMEGQKIITLDTATEIEGLSTGCKVYANIGEDTYDIVIPVKDDPDEGEARLENEIPKTSGSEMANKRMKVKHDDHYELIVDGRVYYICIVCKRSYVCLTSLRRHFNIHSWEKKYPCRYCEKVFPLAEYRTKHEIHHTGERRYQCLACGKSFINYQFMSSHIKSVHSQDPSGDSKLYRLHPCRSLQIRQYAYLSDRSSTIPAMKDDGIGYKVDTGKEPPVGTTTSTQNKPMTWEDIFIQQENDSIFKQNVTDGSTEFEFIIPESY

SEQ ID NO: 167890 - DNA, 5225 bp, Artificial Sequence
  derived and/or modified sequence
gcctttggcttcagcgcttcgcccccgcgctgtgccctctgtcggcggcgtggggcagctgtagcagcgttggcggcaggaggcggcggccgcgtcgacgtcgacccagactggagcgacgtttaaagaaggggcagaatcgctggggagtgcggcttcttcttgttgggggactcccagccttccgcgcgtccggaggaggagaagcggcggcgccgggaagcaggcatggagagtagaaaactgatttctgctacagacattcagtactctggcagtctgctgaactccttgaatgagcaacgtggccatggactcttctgtgatgttaccgttattgtggaagaccgaaaattccgggctcacaagaatattctttcagcttctagtacctacttccatcagctcttctctgttgctgggcaagttgttgaactgagctttataagagcagagatctttgcagaaattctcaattatatctatagttctaaaattgttcgtgttagatcagatttgcttgatgagttaattaaatcagggcagttattaggagtgaaatttatagcagagcttggtgtcccattgtcacaggttaaaagcatctcaggtacagcgcaggatggtaatactgagcctttacctcctgattctggtgacaagaaccttgtaatacagaaatcaaaagatgaagcccaagataatggggctactataatgcctattataacagagtctttttcattatctgccgaagattatgaaatgaaaaagatcattgttaccgattctgatgatgatgatgatgatgtcattttttgctccgagattctgcccacaaaggagactttgccgagtaataacacagtggcacaggtccaatctaacccaggccctgttgctatttcagatgttgcacctagtgctagcaataactcgccccctttaacaaatatcacacctactcagaaacttcctactcctgtgaatcaggcaactttgagccaaacacaaggaagtgaaaaattgttggtatcttcagctccaacacatctgactcccaatattattttgttaaatcagacaccactttctacaccaccaaatgtcagttcttcacttccaaatcatatgccctcttcaatcaatttacttgtgcagaatcagcagacaccaaacagtgctattttaacaggaaacaaggccaatgaagaggaggaggaggaaataatagatgatgatgatgacactattagctccagtcctgactcggccgtcagtaatacatctttggtcccacaggctgatacctcccaaaataccagttttgatggatcattaatacagaagatgcagattcctacacttcttcaagaaccactttccaattccttaaaaatttcagatataattactagaaatactaatgatccaggcgtaggatcaaaacatctaatggagggtcagaagatcattactttagatacagctactgaaattgaaggcttatcgactggttgcaaggtttatgcaaatatcggtgaagatacttatgatatagtgatccctgtcaaagatgaccctgatgaaggggaggccagacttgagaatgaaataccaaaaacgtctggcagcgagatggcaaacaaacgtatgaaagtaaaacatgatgatcactatgagttaatagtagatggaagggtctattatatctgtattgtatgcaaaaggtcatatgtctgtctgacaagcttgcggagacattttaacattcattcttgggagaagaagtatccgtgccgttactgtgagaaggtatttcctcttgcagaatatcgcacaaagcatgaaattcatcacacaggggagcgaaggtatcagtgtttggcctgtggcaaatctttcatcaactatcagtttatgtcttcacatataaagtcagttcatagtcaagatccttctggggactcaaagctttatcgtttacatccatgcaggtctttacaaatcagacaatatgcatatctttccgatagatcaagcactattcctgcaatgaaggatgatggtattgggtataaggttgacactggaaaagaacctccagtagggaccactacatctactcagaacaagccaatgacctgggaagatatttttattcagcaggaaaatgattcaatttttaaacaaaatgtaacagatggcagtactgagtttgaatttataataccagagtcttactaaactcctttgaaatactagaaagttttgttttggatgatggggcaggggtttcagaagatctgtaaaacaaattaaggtgcgaacaagttaatttgatctgccacattatctgaaggaagtgtagtgggatttttgttgataatttttagaagcaaattttcctgaaagttttgagtagaggtgagaccccctccccaagtatctgtttatatagttagttttcagctcatttaaaagaggcaaaaattaaaagcttggagagatagtttcctgaatagaatttgaagcagtctgaatgttctttgaaaataactggagttattagcataccctagtacatcttacagctttccccttccatgttagcactttactgctgaattctcaattttcttaacattgagacaataaatgtgtgttttgtcttgtatatggcataaagagtaaataagttttagagttgttctggaaaatgtcagaataagtcagtacttgggttgtgtaatctgctagtccaagcgaacagcaacctcctgctaccctccctctatgaaaatagccatgcagacaagtctctcatctgaagaacaaattagatttagctaattagaattaatcctggctttcattgccatagtctgtaaaagactttggtggctagaccactttataccttcgcagtgtggtctctgggggcaaaaaactaatgaaaacaatctctgtaatggcagataggaggagatgaaaagttctgttgcatggatttttaattctctggctaccacatagtagagaatggaatgaagatttccttttggcttcttaaggttaaaaatattcccatgaacatgaaaattttcaaattttgaatctgaaagccaccaaatgtatctttatgtataaatccttgtaaatgatagattccatgggtgagactttacatattttgggtgggaggctactggcatatatttttaaatgttcatattgcgtagaatctccactaggaagtctttatttgaaatagttgaatcagtgatctagtattttcctttcggcaagatttgttaggtttttaccccttctaaaataagttttattccatctgcaaattgctgcaatattatagtaatcagaaactacataaggaatgttatataggcttgtcagttcccatttttcttgacaacaataaataccacttttaaaaatgacacatatttaaacacttagaaaataaagttaacacttactgaagtgctagtactaaactgtgctagtactaaaagaaaacaggttggaacatacatatagcctagcatttataacagaattgttgaacgtctgtaaatgattttttttttttttgcaaaggaaaaaattgatactggaaaagattgttgtgcatagttattagtcatttgtaaccttgcttaagtatttcttagtccaacatagatattttctttctcctgaccatgtattttaaaatatagtctatttcttgactttgaacttaaagctttaatcataatttctcatgtatacatcgttcttctgatggtaagctggatttgaaggtagtggtttcagtgtttcttaagttggtagctgagggtatcaggcatcagttcatgcaataatacaagaaaaaaaatcctttgcttgccaagaggtagagtgatgtgcatttatctgttttctgttctgtaagtctagaccttcaaaccatttgtaaactaacccctgggaaatttgaaattacctgataacttaagactctgtgatctctggaatcaccatatgtttcttttttgtgtagatattaataacattactctttgactatagtgtgcactctgaaatgtactcagtgaaaatttgttttgagtttcattaatgctatttcaccagttagacataattacttctaccgatgtgaatgatacggatgccggcagagcttccagatctttcagactcaactgctaggtcaattagtttgtcataataaaacttggcagattctacaagtctattatgacaaaccaggaactaattctataatggaaaactatccattctgaataataggtatgtaattatttgctgctgctgctgtgctctgtaaattctgaatatgacatttaaactctgtgcctactaaaggtatcttctggagtttttgggaggagagaaactggaaaattaaattgtatttttgccagaagactcttacttgcatgtgtctcagggtcttcagtttttctataagtttccatatccaaagttcagaattcatgtgaaatacttctttggggcaaaagtccttcattcctggtatttattggattggaaatctgtagcaagatgctgtttaaaattaccatattgtttttttatcttatacttagctctctggctattgaacttccttttcttgtttgaagttagcttcaaatttgctcctatgctaaattacctgtaaatattctggataggaactacttgaaatagtaatttgttaaaagatatgacaaaatgaaaatgcttaaactacagaaatttaaaaatgccataacaatcttgcgagactaactttaaaatatactttaaatgattattatgattttggtggtaacgatcccccacacacaaccactatgaagaaataatgccgcatttttcccccattgtaccaaaaagataaaaaaatggtaaacactgatcaaggtattttgtattgtcaaggcatgcatattctaaagaattaaatgctaacttaacagcactggctttctggctggtcaactatatgaaaccttgttcattcctccgagtactgtaatgttcacacttgtacaatcttccctgtcatgactttaagttctacttttcattaaccatggcctgatattagttcttagagcttcttgtggcaaaaataaaatgatttaattctaaaaaaaaaaaaaaaa

SEQ ID NO: 167891 - DNA, 2019 bp, Artificial Sequence
  derived and/or modified sequence
atggagagcagaaagctgatcagcgccaccgacatccagtacagcggcagcctgctgaacagcctgaacgagcagagaggccacggcctgttctgcgacgtgaccgtgatcgtggaggacagaaagttcagagcccacaagaacatcctgagcgccagcagcacctacttccaccagctgttcagcgtggccggccaggtggtggagctgagcttcatcagagccgagatcttcgccgagatcctgaactacatctacagcagcaagatcgtgagagtgagaagcgacctgctggacgagctgatcaagagcggccagctgctgggcgtgaagttcatcgccgagctgggcgtgcccctgagccaggtgaagagcatcagcggcaccgcccaggacggcaacaccgagcccctgccccccgacagcggcgacaagaacctggtgatccagaagagcaaggacgaggcccaggacaacggcgccaccatcatgcccatcatcaccgagagcttcagcctgagcgccgaggactacgagatgaagaagatcatcgtgaccgacagcgacgacgacgacgacgacgtgatcttctgcagcgagatcctgcccaccaaggagaccctgcccagcaacaacaccgtggcccaggtgcagagcaaccccggccccgtggccatcagcgacgtggcccccagcgccagcaacaacagcccccccctgaccaacatcacccccacccagaagctgcccacccccgtgaaccaggccaccctgagccagacccagggcagcgagaagctgctggtgagcagcgcccccacccacctgacccccaacatcatcctgctgaaccagacccccctgagcaccccccccaacgtgagcagcagcctgcccaaccacatgcccagcagcatcaacctgctggtgcagaaccagcagacccccaacagcgccatcctgaccggcaacaaggccaacgaggaggaggaggaggagatcatcgacgacgacgacgacaccatcagcagcagccccgacagcgccgtgagcaacaccagcctggtgccccaggccgacaccagccagaacaccagcttcgacggcagcctgatccagaagatgcagatccccaccctgctgcaggagcccctgagcaacagcctgaagatcagcgacatcatcaccagaaacaccaacgaccccggcgtgggcagcaagcacctgatggagggccagaagatcatcaccctggacaccgccaccgagatcgagggcctgagcaccggctgcaaggtgtacgccaacatcggcgaggacacctacgacatcgtgatccccgtgaaggacgaccccgacgagggcgaggccagactggagaacgagatccccaagaccagcggcagcgagatggccaacaagagaatgaaggtgaagcacgacgaccactacgagctgatcgtggacggcagagtgtactacatctgcatcgtgtgcaagagaagctacgtgtgcctgaccagcctgagaagacacttcaacatccacagctgggagaagaagtacccctgcagatactgcgagaaggtgttccccctggccgagtacagaaccaagcacgagatccaccacaccggcgagagaagataccagtgcctggcctgcggcaagagcttcatcaactaccagttcatgagcagccacatcaagagcgtgcacagccaggaccccagcggcgacagcaagctgtacagactgcacccctgcagaagcctgcagatcagacagtacgcctacctgagcgacagaagcagcaccatccccgccatgaaggacgacggcatcggctacaaggtggacaccggcaaggagccccccgtgggcaccaccaccagcacccagaacaagcccatgacctgggaggacatcttcatccagcaggagaacgacagcatcttcaagcagaacgtgaccgacggcagcaccgagttcgagttcatcatccccgagagctactag

SEQ ID NO: 167892 - DNA, 2019 bp, Artificial Sequence
  derived and/or modified sequence
atggaaagcaggaagctgatttcagcaactgacatccaatatagcggttccctcttgaattccctcaacgagcagaggggccatggactcttctgtgacgtgaccgtgattgttgaagatagaaagttccgggcacataagaacattttaagtgcctcctccacttattttcaccagctcttcagcgttgccggccaggttgtcgaactcagttttattcgcgctgagattttcgccgaaatcctgaattacatctactccagtaagatagtgagggtccgttctgatttactggacgaactcataaagagcggccagttgctgggtgtcaagttcatcgcggagttgggggtgccgttgtctcaggtgaagtcgatcagcggcaccgcccaggatggaaacacagagccactgccacccgactccggcgacaagaacttggtaatccagaagtctaaagatgaggcccaagacaacggagctaccatcatgcctattatcacagagagcttcagcttatccgcggaggactatgaaatgaaaaagatcatagtgactgactctgacgatgatgacgacgacgtcatattttgtagcgaaatccttccgacgaaggagaccctgccttctaataacacagtagcgcaggtgcagtccaatccgggtcccgttgccatctctgacgtggcaccctccgcatccaataactcccctccactgaccaatataaccccaactcagaagctgcctaccccagtgaaccaagctaccctcagccagactcagggatctgagaaactactggtcagctcagccccgacccacttaacccccaatatcattctgctgaaccagacgcccttaagcacaccccccaacgtgagctctagtttgccaaatcacatgccctcttccattaatctgctagttcagaaccagcagactccaaactccgctatcctgaccggtaacaaagccaacgaggaagaagaagaggaaatcatcgacgacgatgacgacacaatctccagctcacccgactcggcagtttccaatacctctctggttcctcaagcggacacgtcacaaaatacgtcattcgacgggtctctgatccagaagatgcagataccgaccttactccaggagccgctgtcaaattccctcaagatcagtgacataatcacaagaaacacaaacgaccccggggtaggaagcaaacatttgatggaggggcagaagatcatcacccttgatacggctaccgagatcgaagggctgtccaccggttgtaaagtgtatgcaaatatcggagaggacacatacgacatcgttattccagtgaaggacgatcccgacgagggagaggctagacttgagaacgagatccctaagacgagcggcagcgagatggcaaacaagagaatgaaggtaaagcacgatgaccattatgagctgatcgtggatggacgagtgtattatatatgcatcgtgtgcaagcgaagctatgtgtgtcttactagcctaagaagacacttcaatatacattcttgggagaaaaagtacccatgccgctactgcgaaaaagtgttccctctggctgagtatagaacaaagcatgaaattcatcatacaggagagaggcgctatcaatgcttggcctgtggcaaaagctttattaactaccaatttatgagtagccacattaaaagcgtccatagccaggacccgtccggagacagcaagctctatcgcctccatccttgtaggagcctgcagatcagacagtacgcttacctgagcgaccgcagcagcactattccagccatgaaagatgatggtatcggatacaaggtcgacacggggaaagaaccaccagtagggaccactacgtcaacccagaacaaaccgatgacatgggaagatatctttattcagcaggagaacgactccatattcaagcagaacgtgaccgacgggtctactgaattcgaattcatcatacccgagagctactag

SEQ ID NO: 167893 - DNA, 2019 bp, Artificial Sequence
  derived and/or modified sequence
atggagagcaggaagctgatcagcgccacagacatccagtacagcggcagcctgctgaacagcctgaatgagcagaggggccacggcctcttctgtgatgtgacagtgattgtggaggacaggaagttccgggcccacaagaacatcctgagcgccagcagcacctacttccaccagctgttctctgtggccggccaggtggtggagctgtccttcatccgggcagagatctttgctgagatcctgaactacatctacagcagcaagatcgtgcgggtgcggagtgacctgctggatgagctgatcaagagcggccagctgctgggcgtgaagttcatcgccgagctgggcgtgcccctgagccaggtgaagagcatctctggaacagcccaggacggcaacacagagcccctgcccccagacagcggggacaagaacctggtgatccagaagagcaaggatgaggcccaggacaatggagccaccatcatgcccatcatcacagagagcttcagcctgtctgctgaggactatgagatgaagaagatcatcgtgacagacagtgatgatgatgatgatgatgtgatcttctgcagcgagatcctgcccaccaaggagaccctgcccagcaacaacacagtggcccaggtgcagagcaaccctggccctgtggccatcagtgatgtggcccccagcgccagcaacaacagcccccccctgaccaacatcacccccacccagaagctgcccacccctgtgaaccaggccaccctgagccagacccagggcagcgagaagctgctggtgtcctctgcccccacccacctgacccccaacatcatcctgctgaaccagacccccctgagcaccccaccaaatgtgagcagcagcctgcccaaccacatgcccagcagcatcaacctgctggtgcagaaccagcagacccccaacagcgccatcctgaccggcaacaaggccaatgaggaggaggaggaggagatcattgatgatgatgatgacaccatcagcagcagcccagacagcgctgtgagcaacaccagcctggtgccccaggccgacaccagccagaacaccagctttgatggcagcctcatccagaagatgcagatccccaccctgctgcaggagcccctgagcaacagcctgaagatcagtgacatcatcaccaggaacaccaatgaccccggggtgggcagcaagcacctgatggagggccagaagatcatcaccctggacacagccacagaaattgagggcctgagcacaggctgcaaggtgtatgccaacattggagaggacacctatgacatcgtcatccctgtgaaggatgatcctgatgaaggagaggcccggctggagaatgagatccccaagaccagcggcagcgagatggccaacaagaggatgaaggtgaagcatgatgaccactatgagctgattgtggatggccgggtgtactacatctgcatcgtgtgcaagaggagctatgtgtgcctgaccagcctgcggcggcacttcaacatccacagctgggagaagaagtacccctgccgctactgtgagaaggtgttccccctggccgagtaccgcaccaagcatgagatccaccacactggagagcggcgctaccagtgcctggcctgtgggaagagcttcatcaactaccagttcatgagcagccacatcaagtctgtgcacagccaggaccccagcggggacagcaagctgtaccgcctgcacccctgccgcagcctgcagatccggcagtatgcctacctgagtgacaggagcagcaccatcccagccatgaaggatgatggcatcggctacaaggtggacaccgggaaggagccccctgtgggcaccaccaccagcacccagaacaagcccatgacctgggaggacatcttcatccagcaggagaatgacagcatcttcaagcagaatgtgacagatggcagcacagaatttgagttcatcatccctgagagctactag

SEQ ID NO: 167894 - DNA, 2019 bp, Artificial Sequence
  derived and/or modified sequence
atggagagccggaagctgatcagcgccaccgacatccagtacagcggtagtctccttaactcgttaaatgagcaacgtggccatggcctgttttgtgatgtaaccgtgatcgtcgaagacaggaaattcagagcccataaaaacatcctgagtgcgagtagcacctacttccaccagctgttcagtgtggcgggacaggtggtggagctcagcttcatcagggccgaaattttcgctgaaattttgaattacatttacagctctaagattgtgagggtgagatctgatctcctggatgaactgatcaaatccgggcagctccttggcgttaaattcatcgccgaactgggcgtgccgctatcccaggtgaagagcattagcggaactgcccaggacggaaatactgaaccactgccaccggactcgggcgataagaacctggtgattcagaagagcaaggacgaggctcaggacaacggtgcaactattatgcctattattacagaaagcttctccctgtccgctgaagactacgaaatgaagaagattatcgtgacagattcagatgatgacgacgatgacgtgattttctgctccgagatcttgcccacaaaagagacccttcccagcaacaacacagtcgcccaggtgcaatcaaacccaggacctgtcgccatctccgatgtggcccctagcgcttccaacaactccccgcctttgaccaacattacgcccacccagaaactgcccacacccgttaatcaggccaccttaagtcaaacccagggtagcgagaaattgttagtgtcatccgcaccaactcatctgactccaaacatcatcctcctcaatcagacccctcttagtacaccacccaacgtgtcatcaagcctccctaaccatatgccctcctcaataaacctgctcgtccaaaaccaacagacaccaaattcagctatcctgacagggaataaggccaatgaggaggaggaagaggagataatcgacgacgacgatgatactatctcgagcagcccagactcggcggtgtcaaataccagcctagtcccacaggcagacacaagtcaaaacacttcctttgatggcagcctcatccagaagatgcagattcccactctgctgcaggaacccctgtctaacagtttgaaaattagcgacatcataacccggaataccaacgatccgggcgtgggatcgaagcatctgatggagggtcaaaagatcatcacattggacacggcaactgagatcgagggactgtctactggttgcaaagtgtacgccaatatcggagaagatacatacgatatcgtcattccggtgaaagatgatcccgatgaaggtgaagctaggttggaaaatgaaattcctaagacctccggatcagaaatggctaataagaggatgaaagtgaaacacgacgaccattacgagctgatagtggacggaagagtctactatatttgcatcgtctgtaaacgctcttatgtgtgtctgaccagtcttcgtagacatttcaacatccactcctgggagaagaagtatccctgtaggtactgtgagaaggtatttccgttagctgagtatagaaccaaacacgaaatccaccacacaggtgagcggagatatcaatgcctggcttgtggtaagtcttttataaactatcagtttatgagctcccacattaaatctgtgcattcacaggatccttctggagacagtaagctgtaccgcttacatccctgtcgctccctgcagatcaggcagtacgcatatctcagcgatcggtcgtctacaatccctgcgatgaaagacgacgggattgggtacaaagtggatacaggcaaagagccaccagtgggtactaccacgtccacccagaacaaacccatgacctgggaagacatctttatacaacaggagaacgacagtatatttaaacagaacgtgaccgacggatcaacagagttcgaatttatcataccagagagttactag

SEQ ID NO: 167895 - DNA, 2019 bp, Artificial Sequence
  derived and/or modified sequence
atggaatcgaggaaacttatcagcgctacggatattcaatattcaggtagcctgttgaatagcctcaatgagcagagaggacacggcctcttctgtgatgtgactgtgatagtggaggacaggaaattccgcgctcataagaacatactgagcgcctcatctacttatttccaccagcttttctccgttgcaggccaggtggtggagttaagttttatccgcgcagagatattcgccgaaatcctgaattatatctattcttctaaaatcgtgcgggtcagaagcgaccttctggacgaactcataaaaagcggacagctgttaggtgtgaagtttatagccgaactgggcgtcccactcagtcaggtaaaatcaatttcaggcacggctcaagatggcaatacagaaccactgcctcctgattcaggcgataagaatcttgttatacagaagagtaaagatgaggcgcaggacaatggagccaccataatgcctataataacggagtcattttccttgagcgcagaagactacgagatgaagaagattatcgtgactgatagtgacgacgacgacgacgacgttatcttctgttccgagatcctgcccaccaaggaaaccctcccctctaacaacaccgtggcccaggtccagtcgaatcccggacctgtggccatcagcgatgtagctccctcggcttccaataatagtcctccactcacaaatataactccaactcagaagctgcccacccctgtcaatcaggcaactttgagccagacgcaggggagcgaaaagcttctcgtgtctagcgctcccactcacttaacacccaacattatcctgctaaatcagacccctctgtcaaccccccctaacgtgagcagctctctgccaaatcatatgcccagctcaattaacctgctcgtgcagaatcaacagaccccaaatagtgctattctgacaggcaataaagcaaacgaggaggaagaggaagagattatcgacgatgacgatgacactatcagctccagccccgatagcgccgtgagtaacacctctcttgtgcctcaggccgacacctcgcagaatacctcatttgatgggagcctcatccagaagatgcagatacccactctgctgcaggagcctctaagcaacagtctgaaaatatcggatattatcacacggaacaccaatgatcctggggtgggatcaaagcacctgatggagggccagaagattattacactggacacagcaactgagattgagggactgagtacggggtgtaaggtctacgccaatatcggcgaagatacgtacgatatcgtgattcctgtgaaagacgaccccgatgagggcgaggccagactggaaaatgaaattcctaaaacctctggctccgagatggccaacaagaggatgaaggtgaaacacgatgatcactacgagctgatagtggatgggcgtgtttactatatctgcattgtctgtaagcgcagttacgtgtgcctgacctcactccgtaggcattttaatattcactcctgggaaaagaaatacccgtgcaggtactgtgagaaagttttcccccttgctgagtatcgtacgaagcacgagatacaccacactggtgagcgtaggtaccagtgtcttgcctgtggaaagtcctttataaactaccagtttatgtccagccatatcaagtcggtccacagtcaggaccccagtggcgactccaaactctatcgtctgcatccctgtaggtccctgcagataagacagtatgcatatctgtctgatagatcttctacgataccagcgatgaaggatgatgggatcggctacaaagttgatacaggtaaagagcccccagtcggtaccactacctccacccagaacaagcctatgacatgggaagacatttttattcagcaggagaatgatagtatctttaagcagaacgtgacagatgggtccactgaatttgaatttatcatccccgagtcctactag

SEQ ID NO: 167896 - DNA, 5211 bp, Artificial Sequence
  derived and/or modified sequence
gcctttggcttcagcgcttcgcccccgcgctgtgccctctgtcggcggcgtggggcagctgtagcagcgttggcggcaggaggcggcggccgcgtcgacgtcgacccagactggagcgacgtttaaagaaggggcagaatcgctggggagtgcggcttcttcttgttgggggactcccagccttccgcgcgtccggaggaggagaagcggcggcgccgggaagcaggcatggagagtagaaaactgatttctgctacagacattcagtactctggcagtctgctgaactccttgaatgagcaacgtggccatggactcttctgtgatgttaccgttattgtggaagaccgaaaattccgggctcacaagaatattctttcagcttctagtacctacttccatcagctcttctctgttgctgggcaagttgttgaactgagctttataagagcagagatctttgcagaaattctcaattatatctatagttctaaaattgttcgtgttagatcagatttgcttgatgagttaattaaatcagggcagttattaggagtgaaatttatagcagagcttggtgtcccattgtcacaggttaaaagcatctcaggtacagcgcaggatggtaatactgagcctttacctcctgattctggtgacaagaaccttgtaatacagaaatcaaaagatgaagcccaagataatggggctactataatgcctattataacagagtctttttcattatctgccgaagattatgaaatgaaaaagatcattgttaccgattctgatgatgatgatgatgatgtcattttttgctccgagattctgcccacaaaggagactttgccgagtaataacacagtggcacaggtccaatctaacccaggccctgttgctatttcagatgttgcacctagtgctagcaataactcgccccctttaacaaatatcacacctactcagaaacttcctactcctgtgaatcaggcaactttgagccaaacacaaggaagtgaaaaattgttggtatcttcagctccaacacatctgactcccaatattattttgttaaatcagacaccactttctacaccaccaaatgtcagttcttcacttccaaatcatatgccctcttcaatcaatttacttgtgcagaatcagcagacaccaaacagtgctattttaacaggaaacaaggccaatgaagaggaggaggaggaaataatagatgatgatgatgacactattagctccagtcctgactcggccgtcagtaatacatctttggtcccacaggctgatacctcccaaaataccagttttgatggatcattaatacagaagatgcagattcctacacttcttcaagaaccactttccaattccttaaaaatttcagatataattactagaaatactaatgatccaggcgtaggatcaaaacatctaatggagggtcagaagatcattactttagatacagctactgaaattgaaggcttatcgactggttgcaaggtttatgcaaatatcggtgaagatacttatgatatagtgatccctgtcaaagatgaccctgatgaaggggaggccagacttgagaatgaaataccaaaaacgtctggcagcgagatggcaaacaaacgtatgaaagtaaaacatgatgatcactatgagttaatagtagatggaagggtctattatatctgtattgtatgcaaaaggtcatatgtctgtctgacaagcttgcggagacattttaacattcattcttgggagaagaagtatccgtgccgttactgtgagaaggtatttcctcttgcagaatatcgcacaaagcatgaaattcatcacacaggggagcgaaggtatcagtgtttggcctgtggcaaatctttcatcaactatcagtttatgtcttcacatataaagtcagttcatagtcaagatccttctggggactcaaagctttatcgtttacatccatgcaggtctttacaaatcagacaatatgcatatctttccgatagatcaagcactattcctgcaatgaaggatgatggtattgggtataaggttgacactggaaaagaacctccagtagggaccactacatctactcagaacaagccaatgacctgggaagatatttttattcagcaggaaaatgattcaatttttaaacaaaatgtaacagatggcagtactgagtttgaatttataataccagagtcttactaaactcctttgaaatactagaaagttttgttttggatgatggggcaggggtttcagaagatctgtaaaacaaattaaggtgcgaacaagttaatttgatctgccacattatctgaaggaagtgtagtgggatttttgttgataatttttagaagcaaattttcctgaaagttttgagtagaggtgagaccccctccccaagtatctgtttatatagttagttttcagctcatttaaaagaggcaaaaattaaaagcttggagagatagtttcctgaatagaatttgaagcagtctgaatgttctttgaaaataactggagttattagcataccctagtacatcttacagctttccccttccatgttagcactttactgctgaattctcaattttcttaacattgagacaataaatgtgtgttttgtcttgtatatggcataaagagtaaataagttttagagttgttctggaaaatgtcagaataagtcagtacttgggttgtgtaatctgctagtccaagcgaacagcaacctcctgctaccctccctctatgaaaatagccatgcagacaagtctctcatctgaagaacaaattagatttagctaattagaattaatcctggctttcattgccatagtctgtaaaagactttggtggctagaccactttataccttcgcagtgtggtctctgggggcaaaaaactaatgaaaacaatctctgtaatggcagataggaggagatgaaaagttctgttgcatggatttttaattctctggctaccacatagtagagaatggaatgaagatttccttttggcttcttaaggttaaaaatattcccatgaacatgaaaattttcaaattttgaatctgaaagccaccaaatgtatctttatgtataaatccttgtaaatgatagattccatgggtgagactttacatattttgggtgggaggctactggcatatatttttaaatgttcatattgcgtagaatctccactaggaagtctttatttgaaatagttgaatcagtgatctagtattttcctttcggcaagatttgttaggtttttaccccttctaaaataagttttattccatctgcaaattgctgcaatattatagtaatcagaaactacataaggaatgttatataggcttgtcagttcccatttttcttgacaacaataaataccacttttaaaaatgacacatatttaaacacttagaaaataaagttaacacttactgaagtgctagtactaaactgtgctagtactaaaagaaaacaggttggaacatacatatagcctagcatttataacagaattgttgaacgtctgtaaatgattttttttttttttgcaaaggaaaaaattgatactggaaaagattgttgtgcatagttattagtcatttgtaaccttgcttaagtatttcttagtccaacatagatattttctttctcctgaccatgtattttaaaatatagtctatttcttgactttgaacttaaagctttaatcataatttctcatgtatacatcgttcttctgatggtaagctggatttgaaggtagtggtttcagtgtttcttaagttggtagctgagggtatcaggcatcagttcatgcaataatacaagaaaaaaaatcctttgcttgccaagaggtagagtgatgtgcatttatctgttttctgttctgtaagtctagaccttcaaaccatttgtaaactaacccctgggaaatttgaaattacctgataacttaagactctgtgatctctggaatcaccatatgtttcttttttgtgtagatattaataacattactctttgactatagtgtgcactctgaaatgtactcagtgaaaatttgttttgagtttcattaatgctatttcaccagttagacataattacttctaccgatgtgaatgatacggatgccggcagagcttccagatctttcagactcaactgctaggtcaattagtttgtcataataaaacttggcagattctacaagtctattatgacaaaccaggaactaattctataatggaaaactatccattctgaataataggtatgtaattatttgctgctgctgctgtgctctgtaaattctgaatatgacatttaaactctgtgcctactaaaggtatcttctggagtttttgggaggagagaaactggaaaattaaattgtatttttgccagaagactcttacttgcatgtgtctcagggtcttcagtttttctataagtttccatatccaaagttcagaattcatgtgaaatacttctttggggcaaaagtccttcattcctggtatttattggattggaaatctgtagcaagatgctgtttaaaattaccatattgtttttttatcttatacttagctctctggctattgaacttccttttcttgtttgaagttagcttcaaatttgctcctatgctaaattacctgtaaatattctggataggaactacttgaaatagtaatttgttaaaagatatgacaaaatgaaaatgcttaaactacagaaatttaaaaatgccataacaatcttgcgagactaactttaaaatatactttaaatgattattatgattttggtggtaacgatcccccacacacaaccactatgaagaaataatgccgcatttttcccccattgtaccaaaaagataaaaaaatggtaaacactgatcaaggtattttgtattgtcaaggcatgcatattctaaagaattaaatgctaacttaacagcactggctttctggctggtcaactatatgaaaccttgttcattcctccgagtactgtaatgttcacacttgtacaatcttccctgtcatgactttaagttctacttttcattaaccatggcctgatattagttcttagagcttcttgtggcaaaaataaaatgatttaattctga

SEQ ID NO: 167897 - DNA, 2019 bp, Artificial Sequence
  derived and/or modified sequence
atggaaagcaggaagctgatcagcgccaccgatatccaatactccgggtctcttctgaattctctgaacgagcagcgagggcacggactgttctgtgacgtaactgtgatcgttgaagaccggaagttcagagctcacaagaatattctgtctgcatcctcaacatacttccatcaactgttctccgtggcaggacaagtggtagaactttcatttattcgcgcggagatttttgcagagatcctgaattatatctactccagtaagatcgttcgcgtccggtctgacctgttagacgaactcattaagagcgggcaactcttgggagtgaagttcattgcggagctgggtgtgcctctgtctcaggtgaagagcattagcggcaccgcccaggacggtaacacagagccactccctcctgacagcggcgacaagaacttggtaatccaaaagagcaaggacgaggcgcaggacaacggcgcaactataatgcccatcatcactgaatctttttcattgagtgcagaggactacgagatgaagaaaattattgttactgactccgatgacgatgatgacgatgtgattttttgctctgaaatccttcctactaaagaaacgctgcccagtaataacacggttgcccaggttcagtccaacccgggtccagtggcaatcagcgacgttgcgccctctgcgagtaacaatagtccacctctgaccaatataacgcccactcagaaactgccaacaccagtcaaccaggcaaccctctcccaaacacaagggtccgaaaagctccttgtctcttcggcgccaacccaccttacccccaatatcatcctcctcaatcaaacacctttatccacacctcctaacgtgtcttcaagccttcccaatcacatgccaagctcgattaatctcctggtgcagaatcaacagacacccaattccgctattttgacagggaacaaggctaatgaggaagaggaagaagagattattgacgatgatgacgacacgatctcctcgagtccagatagtgccgtttccaataccagtctggtccctcaagctgatacatcacagaacacgagtttcgatggctccttgattcagaagatgcaaatacctacactgttgcaggagcctttaagtaactccctgaagatcagcgacataatcacgcgcaataccaatgaccccggagtgggcagcaaacaccttatggaaggccaaaagatcatcacccttgatactgcaactgagattgaagggttaagcaccgggtgcaaagtctacgctaatattggggaagatacctatgatattgtgatccctgtgaaggatgaccctgacgaaggcgaagccaggctagaaaatgaaatccctaagacctccggctccgaaatggctaataaaagaatgaaagttaagcacgatgaccactatgagctgattgtggacgggcgcgtgtactacatatgcatagtctgtaaaagatcatacgtctgcttgacttccctaaggagacacttcaatatccattcttgggaaaagaagtacccttgccgctactgtgagaaggtgtttcctcttgctgaatatcgcaccaagcatgagatccaccacactggggagaggcgttatcagtgtctagcttgtggaaaatctttcatcaactatcaattcatgtcctcacatattaaaagcgttcattcgcaggatccttctggcgattccaagctctataggctgcacccgtgccgatccctgcaaattagacagtacgcgtatctgagcgatcggagttcaacgatacctgccatgaaagacgatgggataggatacaaagtagacaccggaaaggaaccaccagtaggtactaccaccagtacccagaataagcccatgacctgggaagacatttttattcagcaggaaaatgattctatcttcaagcagaacgtgacagatggttcaactgagttcgagttcattatccccgagtcttactag

SEQ ID NO: 167898 - DNA, 2019 bp, Artificial Sequence
  derived and/or modified sequence
atggagtccagaaaactgatctctgccaccgatatccagtatagtgggtctttactcaactctctgaacgagcagagaggacatgggctcttctgcgatgtaacagttatcgtggaagatcgtaaatttagggcacacaagaacatcctctctgcgtcctctacgtattttcaccagttgttcagcgtggcaggacaagtagttgagctcagttttatcagggctgaaatctttgctgagatcttgaattatatctattcatcgaaaatagtgcgggtgcgctccgacctactcgatgagctgataaagtcagggcagttgctgggtgtcaaatttatagccgaacttggagtgcccttgtcacaagtcaagagcatcagcggcaccgcacaagacggtaatacggaacccctgccccccgactcaggcgataagaatcttgtgatacagaaatctaaagatgaggcccaggacaatggtgctaccatcatgcctatcataactgagtccttcagcttatcagccgaggactatgagatgaagaaaataatcgtaactgattctgatgatgacgacgatgatgtgattttctgcagcgagatattgccgactaaagagacattgccctccaacaataccgtggcacaagtgcaatcgaaccccggaccagtagccatctccgatgtggctccatcagccagcaataattccccaccacttaccaacatcacacctacccagaagctccccactcccgtcaaccaggccaccctgagccagacccaaggaagcgagaaactgctcgtttcaagtgcacctacacatctgacacccaatatcatcttgttaaatcagactccattgagcactccacctaacgtatccagttccctccccaatcatatgccctccagcatcaacctgctagtgcagaaccagcaaacacccaattctgctatactgaccgggaacaaggccaatgaggaggaagaagaggagattatcgacgacgacgatgacaccatcagctcgtcacctgattcggccgtgtctaacacatccctcgttccccaggcagacacatcacaaaatacttcctttgacggatcacttattcagaaaatgcagattcctacgctgttgcaagagccactgagtaactctctcaaaatttcagacattatcacaaggaataccaatgaccctggcgtgggatcaaaacatttgatggaggggcagaagatcataaccctggatactgctacagagatcgaggggctgtctaccggatgtaaggtctatgcaaatataggggaggacacctacgatatcgtaatccctgtcaaggatgaccccgatgagggggaagcaaggctcgaaaacgagatcccaaagacgagcgggagtgagatggcgaataaaagaatgaaagtgaaacatgatgaccactacgagctgatagtggacggccgggtatactatatatgtattgtgtgcaagaggagctatgtctgtctcacctcattacggcgccacttcaatatccactcgtgggaaaagaaatacccgtgcagatattgcgagaaagtgtttccacttgccgagtacaggaccaagcatgagatccatcataccggggaacgccgatatcagtgcctggcatgcgggaaatcctttatcaattatcaatttatgtcttcccatattaaaagcgtacactcacaggatcctagcggagacagcaagttataccggctgcacccatgccggagcctgcagataagacagtacgcctatctctccgaccggtcaagcaccatcccagccatgaaagatgatggaattgggtacaaggtggacacaggtaaagagcctcccgtgggcacaacaacaagtacacagaacaagcctatgacgtgggaagatattttcatccagcaggagaatgattccatctttaagcagaacgtgactgacggcagtactgaattcgaattcattatcccagagagctattag

SEQ ID NO: 167899 - DNA, 2019 bp, Artificial Sequence
  derived and/or modified sequence
atggagtccaggaagttaatcagcgcaacagacattcaatattccggcagcctcttaaattccttaaacgagcagagaggacatgggcttttttgcgacgttacggtgatcgtagaagatcggaagtttcgagcccataaaaacattctgtccgcgtcatccacatatttccatcagctgttttctgtggcgggacaggtggtggaactctcatttattcgagcggaaatattcgcggagatcctgaattatatatattcaagcaaaattgtaagggttcggtccgatctactcgatgaactcataaaatccggtcagttgctaggtgtgaaatttatcgctgagctgggcgtcccactctcgcaggttaagtcaataagcgggaccgcgcaggatggcaataccgaacccctaccaccggattcgggggacaagaacctcgtcatccagaaaagcaaagacgaggcccaggataatggagccacgatcatgccgattatcaccgaaagcttttctctcagtgccgaggattacgagatgaagaagattattgtgactgatagtgacgatgacgacgatgacgtcatcttctgctcagaaatactaccgacaaaggaaacacttcctagcaataataccgtggcccaggttcagagtaatcctggccccgtggcgatttccgatgtggcaccaagtgccagcaacaattcaccaccgctcactaatattactcccacgcagaagctgcctacccctgtgaaccaagccacactgagccagacacagggatccgaaaaattactcgtttcctctgccccaacccatcttaccccaaacatcatcctgcttaaccagaccccactgtcaaccccacctaatgtgtcgtcaagtcttcccaatcatatgcctagctccataaacctgctggtccagaatcagcaaacgcccaattcagcaattctgactggcaacaaggccaatgaagaggaagaagaagagatcatcgacgatgatgacgacaccatcagcagctctcctgactccgccgtctccaacacatctttagttccccaggccgacacatcccagaatacatcctttgacggaagtcttatccagaagatgcagatcccaactcttctgcaggaaccgctgagcaattctttgaagatctctgatatcattacccgtaacactaatgaccctggggtgggcagcaagcatctgatggagggccagaagattattacgctggatactgcaaccgaaattgagggactgtctacagggtgtaaagtctatgctaacattggcgaggatacctatgacatcgtgattccagtgaaggatgatccggacgagggcgaggcaaggttagagaatgagatcccgaaaacttctggatctgaaatggcaaataagcgaatgaaggtgaagcatgacgaccattatgaactgatcgttgacgggagagtgtactatatctgtatagtgtgtaagaggagctacgtctgcttgacttccctgcggcgccactttaatatccacagctgggagaaaaagtacccctgccgctactgtgagaaggttttcccgctggccgaatatcggacgaaacatgaaatacaccataccggtgaaagaaggtaccagtgtctggcctgtggcaagtcttttataaattatcagttcatgtcctcccacatcaaatccgtgcactctcaagatccaagtggagacagcaaactgtacagattacacccttgcaggagtctgcagataagacagtatgcgtaccttagcgataggagcagcactatcccggcgatgaaagacgatgggattgggtacaaagtagacacggggaaagagccaccggttgggactacaacctctactcaaaataagcccatgacatgggaggatatttttattcagcaggaaaatgatagcatatttaaacagaacgtaacagatggaagcactgaattcgaatttatcatccccgagtcttattag

SEQ ID NO: 167900 - DNA, 2019 bp, Artificial Sequence
  derived and/or modified sequence
atggagagccggaagctgatcagcgccaccgacatccagtacagcggctcactgctcaattccctgaatgagcaacggggtcacggattgttttgcgacgttacggtgatcgtcgaagaccgtaagttcagagctcacaagaatatattgtccgcatcttcaacctacttccaccagcttttctctgtagccggccaggtcgtggaattatcctttatccgcgctgaaattttcgcagagattttgaactacatttactcttccaagatcgtccgggtgagatccgacttgctggacgagctcatcaagtcaggccagctgctcggggtgaaattcatcgccgaactgggagtgcccttgagtcaggtgaagagtatctctggtacagcgcaggacggaaacactgagccacttcctccggacagcggcgataagaatcttgttattcagaagtctaaggacgaggcccaggacaatggcgctactatcatgccaataattaccgagtcgttctcattaagcgccgaagattatgaaatgaagaaaattattgtgaccgatagcgacgacgacgacgacgatgtaatcttctgctcagagattctaccaacgaaagagactctccccagcaacaacacagtggctcaggtgcagagcaacccaggaccagtcgccatatcagacgttgccccatcagcgagtaacaactcacccccccttaccaatataacccccacccagaaactaccaacacccgttaatcaagcgacccttagccagacacagggcagtgaaaaactcctcgtctcctctgcccctacacatttaacaccgaacatcatcctgctgaatcagacccctctgagcacacccccaaacgtgtcttcctctcttccgaaccatatgccatcatcaattaatttgctggtccagaaccagcagacacccaacagcgctatcctgacaggcaataaagctaatgaagaagaggaggaggagatcattgatgacgatgacgataccatatcctctagtccggattctgcagtatccaacacctctcttgtgccccaagccgatacaagccagaataccagcttcgacggctcattgatccagaaaatgcaaatcccaaccttgctgcaggaacccctctcgaacagcctgaagatttcagatatcattactcgtaatactaacgatcccggcgtcggtagtaagcacttgatggaagggcaaaagatcattacactcgacaccgctacggaaatcgagggcctgagcaccggctgcaaggtgtacgctaacatcggagaagacacctacgacatcgtgatccccgttaaggatgacccagatgagggcgaagcccgactcgagaacgaaattccgaaaacttccggctccgaaatggccaacaagcgaatgaaagtgaaacacgacgatcactatgagctgattgtggacggccgtgtttactatatatgtatcgtgtgcaagaggtcttacgtatgcctgacaagcctgcggcggcacttcaatatccactcatgggaaaagaagtatccttgtcggtactgtgaaaaagtattccccctcgccgaataccgtactaagcatgaaattcaccacactggcgagaggcggtaccagtgcctcgcttgtgggaagtcttttattaactaccaatttatgtccagccacataaagagtgtgcacagccaagacccgagcggcgattcgaaactttatcgcctccacccgtgtcgaagcctgcaaatcagacagtacgcatatctgagcgatcgtagctccacaatacccgcaatgaaggacgacgggatcggatacaaagtggacaccggcaaagaaccccccgtggggaccactactagtacacagaacaagccaatgacatgggaagacatttttatacaacaggaaaacgattctatcttcaagcaaaacgttactgacgggagcactgagttcgaatttattattcctgagtcttattag

SEQ ID NO: 167901 - DNA, 2019 bp, Artificial Sequence
  derived and/or modified sequence
atggagagccggaagctgatcagcgccaccgacatccagtacagcggatcgctcctcaattccctgaacgagcagcgcggtcacggcttgttttgtgacgttaccgtgatcgtcgaagatcgaaagtttagggctcacaagaatatcctttcagcttcgagcacgtattttcaccagctcttcagtgtcgccgggcaggtggttgagctaagcttcattcgcgctgaaatcttcgctgagatcttaaattatatctactcaagcaaaattgtgcgggtgaggtcagacttgctggatgaattaatcaaaagtggccagctcttgggggtcaagttcattgcagagcttggcgtaccactctcccaggtcaaatcaatctccggcaccgcccaggacgggaataccgaaccgttgcctcctgattctggcgacaagaacttggtcattcagaagagtaaagatgaggcccaagataacggagccaccataatgcccatcatcacagagagtttcagcctgtcagccgaagattatgaaatgaaaaagatcattgtaacagatagcgacgacgacgacgatgacgtcatcttttgctctgaaatactaccaacaaaggaaaccctaccgtcaaataataccgtggcgcaggtccagtcaaatcctggtcctgttgccattagcgatgtcgcaccctccgcctccaacaacagccctcctctcacaaacattacaccaacacagaagctgccaacgcctgtaaatcaggctactctgagccagactcagggctcagaaaagctgttggtttcctcagcacccacccacttaacacctaatattattctgctgaaccagacacccttgtccaccccgccgaatgtgagctctagcctccccaaccatatgccgagcagcattaatctactggtgcagaatcagcaaacacctaactccgctatcctgactgggaataaggcaaatgaggaggaggaagaggaaattattgacgacgacgacgacacgatttcatctagcccggactctgccgtgtccaacacaagcctggttccacaagcagacacatcccagaatacaagttttgacggcagcctgattcagaaaatgcaaattcctacattgctccaggaacccctgtccaacagcctgaaaatttctgatataataactcgcaacactaacgacccaggagtcggctcaaaacacctgatggaggggcagaagattataacactcgacactgccacagagattgaaggactgtccacagggtgcaaggtatatgctaatatcggggaggatacctatgatatagtcattcccgtgaaggatgatcctgatgagggtgaggcaaggcttgagaatgagatccctaagacttccgggtccgagatggcaaataagagaatgaaggtcaaacatgatgaccattatgaactgattgtcgatggacgggtgtactacatctgtatagtctgtaaaaggtcctacgtatgcttgacaagcctgcgcaggcactttaatatacatagttgggagaaaaagtacccctgtaggtactgtgaaaaggtgtttcccctcgcggaatacaggaccaaacacgagattcaccacacgggggaacgtaggtaccagtgtcttgcctgtggtaaatcattcatcaactaccaatttatgtcttctcatatcaaatcagtgcacagccaggacccgtctggcgacagcaaactgtatcgtcttcatccctgccgtagcctccagatcaggcagtatgcttatctgtctgatcgctctagtaccatcccggcaatgaaggatgatggtattggttacaaagtagatacaggaaaggaaccgcctgtcggcacgacaacttccacacaaaataaacctatgacatgggaagatattttcattcagcaggagaatgatagcatcttcaagcagaatgttacagatggcagcacagagtttgagttcattatcccggagtcctattag

SEQ ID NO: 167902 - DNA, 2019 bp, Artificial Sequence
  derived and/or modified sequence
atggagagccggaagctgatcagcgccaccgacatccagtacagcggatcactcctgaacagtcttaacgaacaacgaggccacggcctcttctgtgatgtcacagtcatcgtggaagacagaaagttccgcgcacataagaacatcttatccgcatctagcacatacttccaccagttgttctcagtggccggtcaggttgtggaactatcctttattcgggccgagatatttgctgaaatcttgaactacatctattctagcaagatcgtccgtgtgaggagtgatctgctcgacgagttgatcaagagcggccagttgctaggcgtgaagttcattgctgaattgggagtgcctctttcacaggttaagtcaatctccggtaccgcccaggatggtaacaccgaacccctaccccccgactcgggcgataaaaatctggtcatccagaaaagtaaggacgaagcacaggataatggagcaacgatcatgcccatcattacagagtcattctctctgagcgcggaggattatgagatgaaaaagattatcgtgacagatagcgacgatgatgacgacgacgtgatcttctgctcagaaattttacctaccaaggaaaccctcccttccaacaacaccgtagcccaggtgcagtctaacccaggcccagtggccatctctgacgtggcgccgagcgcctcaaacaacagtccccctctgactaatatcaccccaacacagaaacttccaacgcctgtgaaccaagctactttgtcccagacccaaggcagtgaaaagttgctagtgtctagcgcgcccacccacctaacgcccaacattatactgctgaaccagacccctttgagtacaccccccaatgtctcttcaagcctgccaaaccatatgcctagctcaataaacctgcttgtgcagaaccaacagaccccaaatagtgctattctaactggtaacaaggctaatgaggaagaggaggaagaaattatcgatgacgacgatgacacaatatcatcttctcccgattccgccgtcagtaataccagcctcgtgccccaggccgacacctcacagaatacttcttttgatggcagcctgattcagaagatgcagatccctaccttactgcaggagcccctgagcaacagtttaaagataagcgatatcataacacgcaacacaaacgaccctggcgtaggaagcaagcacctcatggagggccagaagattattacactggataccgcaactgaaattgaaggcctcagtacaggctgcaaggtgtatgcaaatattggagaagacacgtatgatatagtcatacccgttaaagacgacccagacgagggagaggccaggcttgaaaatgaaatcccgaaaacctcaggaagtgaaatggccaataaacggatgaaggtaaaacatgatgaccactacgagcttattgtggacggccgcgtgtattatatctgcattgtgtgcaaaaggagctacgtgtgcctgaccagcttgcgtagacacttcaacatccacagttgggagaaaaagtacccctgccgttattgtgagaaggtgttccccctggccgaataccggaccaagcacgagattcaccacaccggggaacgaaggtatcagtgcctggcttgtggcaagtcctttatcaactaccagttcatgagcagccacataaagtccgtgcactcccaggacccttccggggatagtaagttgtaccgacttcacccttgcaggtcgctgcagatacgtcagtacgcctatctgagcgaccggtcgagtaccatcccagcaatgaaggacgacggcatcggctacaaagtggacacaggaaaagaacctcctgtaggcacaactactagcacccaaaacaagcccatgacctgggaagacatctttattcagcaggagaacgattctatcttcaagcagaatgtcacagatgggtccacggagtttgagttcatcattccagagtcctattag

SEQ ID NO: 167903 - DNA, 2019 bp, Artificial Sequence
  derived and/or modified sequence
atggagtcaagaaagttgatctctgcaaccgacattcagtacagtgggagcctgctgaatagcctgaacgagcagcgaggacacggcctcttctgcgacgtcactgttattgtcgaggataggaaatttcgagctcacaagaatattctatccgccagcagtacttactttcatcaattgttttcagtcgctggacaggtggtggaactgagtttcatacgcgctgaaattttcgctgaaatcctgaattacatctacagcagtaaaatcgtgagggtgaggtccgacctgcttgatgagctgataaaaagtggtcagctcctaggagtcaagttcattgccgagttaggggtccctctgagccaagtgaaaagtataagcggaaccgcgcaggacgggaataccgagcctctgccgcctgatagcggtgataaaaatttagtgattcagaagtccaaggacgaggctcaggataacggtgctaccatcatgcccatcataactgagagcttttcactctctgcagaggattatgagatgaaaaagatcatcgttaccgatagtgacgatgacgacgacgacgtgattttctgtagcgagatcctcccgactaaagaaactctcccgagtaacaacacggttgcccaggtgcagtccaatccagggcctgttgcgattagcgacgtggctccctccgcttctaacaactctcccccactaaccaatatcaccccaacccagaagctgcccacccccgtaaaccaggctaccctttctcaaacacagggctccgagaaactgctggtctcctccgccccaacccacctaacaccgaacatcatcttgctcaaccagacgcctctgtctaccccccctaacgtgagctcctcactgcctaaccatatgccctcttcaattaatttactggtgcagaatcagcagactccgaattcggcaattctgaccgggaacaaggcgaatgaagaagaagaggaggagattatcgacgacgatgatgatacaatctcctctagcccagattctgctgtgtccaatacaagcctggtgccacaggcagacacctcccaaaacactagcttcgacggatcattaatccagaaaatgcaaattcctaccctcttacaggagcctttgtccaattcgcttaaaatctcagacattatcacccgaaatactaacgacccaggtgttggctctaagcacctgatggagggccagaagattataaccttggacactgcaaccgaaattgaaggactgtctacaggctgtaaggtgtatgcaaatatcggtgaggacacgtatgacattgttatccccgtgaaggacgaccccgacgagggcgaagcacgactggaaaacgaaatcccaaaaacatctggttccgagatggctaacaaaagaatgaaagtaaagcacgatgaccactacgaacttatcgtcgatggccgagtgtattacatctgcatagtgtgtaaacggtcctacgtttgtttgacatccctccgacggcattttaacatccattcatgggaaaagaaatacccatgccggtactgtgagaaggtctttcctctggccgagtacaggacgaaacacgaaattcaccacaccggagagcgtaggtaccaatgcttggcatgcggtaaaagcttcattaactatcagttcatgtccagtcacatcaagtccgtgcacagccaggacccttccggcgattcaaagttgtaccgcctccacccctgtaggagccttcaaatacgccagtacgcatacctgagcgaccggtcatccaccatccccgctatgaaggatgatggaattggttacaaagtggacactggcaaggaaccgcctgttgggacgaccacatccactcagaataagcctatgacatgggaggacatcttcatacagcaagagaacgattccatatttaaacaaaatgtgacggacgggtcaaccgaattcgagtttattattcccgagtcttattag

SEQ ID NO: 167904 - DNA, 2019 bp, Artificial Sequence
  derived and/or modified sequence
atggagtcccgaaaactcatcagcgcaacagatattcaatactccggaagtctgttgaactcactgaacgagcagcgaggtcatggactgttttgcgacgtgacagtgatcgtcgaagatcggaagtttcgcgctcacaagaacatcctcagcgcttctagcacgtatttccatcaattgtttagtgtcgctgggcaggttgtggagttgagtttcattcgggctgagatcttcgccgagatcctcaattatatatacagctccaaaatcgtgcgcgtgaggagtgatctcctggacgaattgattaaaagcgggcagctgctgggtgtcaaattcatcgcagaactcggggtgcctctttcgcaggtgaagagcatttcaggaaccgcccaggacggtaatactgagccactacccccagacagcggagacaagaatctagttatccaaaaatcaaaagatgaggcacaggacaacggggctaccatcatgcctattatcactgaatcattcagtctgagcgctgaagactacgaaatgaagaagatcatcgtgacagactccgacgacgacgatgatgacgtgattttctgttctgagattcttccgaccaaggaaacgttgccctccaacaataccgtggctcaggtacaaagcaatcccggtccagttgccatttcagatgtggctccttcagccagcaacaactccccacctttgacgaacattacacctactcagaaactcccgacccctgtaaaccaagccacactgtcacaaactcagggttcggagaagctcctcgtgtctagtgcccctacccacctgaccccaaatatcatcctcctgaaccagacaccattaagcaccccaccaaacgtgagctcctccctaccgaatcacatgccctcgtctattaacctactggtgcaaaatcagcagactccaaattccgctattctgaccggcaacaaagcaaacgaggaggaggaagaggagattatcgatgacgatgacgataccatcagttcctcccccgatagcgctgtcagtaatacctcactcgtcccgcaggcagacacatcccaaaatacctcttttgatggatcattaattcagaaaatgcagatccctaccctgctgcaggagccactgtccaattcccttaaaatttcagacataatcacgcggaacaccaatgatccaggtgtcgggtccaagcacctcatggaagggcagaagattataacgctcgatacagcaacggagattgaaggcctaagcacaggttgtaaggtgtatgcaaatatcggcgaagatacttacgatatcgttatccctgttaaagacgacccagatgaaggagaagccagactagagaatgagatcccgaagacgtctgggtccgaaatggctaataagcgaatgaaggtgaagcatgatgaccattatgaattgatagtcgacggccgagtttattacatctgcatcgtgtgcaagcgctcatatgtttgtctgacatcgctgagaagacattttaacatacatagctgggagaagaagtatccctgcaggtactgcgagaaagtgtttccgctcgcggaatacaggacaaagcatgagatccatcacacaggcgagagaagatatcagtgtctggcctgtggaaaatctttcattaattatcaattcatgtcaagccacattaagtccgtgcattcgcaggatcccagcggagatagcaagttatatagactgcacccctgccgatccctgcagataaggcagtatgcttatctgagcgatcgtagctctactatccctgccatgaaggacgacggcattgggtataaggtcgatactgggaaagagcccccagtcggaactactacatctacccaaaataaacccatgacatgggaagatatcttcatacaacaggagaacgacagcatcttcaaacagaatgtgactgacgggagtacagagttcgaattcatcatcccagaaagctattag

SEQ ID NO: 167905 - DNA, 2019 bp, Artificial Sequence
  derived and/or modified sequence
atggagagccgtaaactgatttcagccacagacattcagtactcgggcagcctcctaaactctctcaacgagcaacggggtcatgggcttttttgtgacgtgaccgttattgtggaggataggaaattccgcgcacataagaacatactgtctgccagctccacatactttcatcagttattctcagtggccggtcaggtggtcgaattgagctttatccgggcagaaatctttgccgaaattctgaactacatttatagctccaagattgtgagggtgcgatctgatttactggacgaattgatcaaatctggccaattactgggagtgaaatttattgccgagcttggggtaccgctaagccaagtgaaatctatttcagggacagcccaagacggcaacactgagcctttacctcccgacagcggtgataaaaacctggtgattcagaagtcaaaggatgaagcccaggacaacggagccaccatcatgcctattattacagagagtttctctctctctgcggaggactatgaaatgaagaaaattattgtcacagactccgacgatgatgacgatgatgtgatcttctgttccgagatccttcccacaaaagagacattgccatccaataataccgtggcacaggtgcaatcgaatcctggaccagtggccattagcgacgtggccccatccgcctctaataattcccccccactgaccaacataaccccgacccaaaagcttcccacccccgtgaatcaagcaaccctttctcagacccagggaagcgagaagcttctggtcagctcagccccaactcacctcacacctaacatcatcctgctgaatcagacaccgctcagcacccccccaaacgtgtcttcttctttgcccaaccatatgccctcctctattaatctgctggtgcagaatcagcagacccccaattctgcaatcttgaccggaaacaaggcaaacgaggaggaggaggaagagattatagatgatgatgacgatacaatttcctcctcccctgatagtgctgtgtccaatacaagtctcgtccctcaggccgacacttcacaaaatacctcatttgacggctcgcttatacagaaaatgcagatcccgactctactgcaggagcccctgtctaatagcttaaagatttccgacatcataacacggaacacaaacgaccccggagtgggttccaagcacctgatggagggtcagaaaattatcacactcgataccgctactgagattgagggactgtccaccggctgcaaagtttacgcaaacattggtgaagatacatacgatatagttatcccggttaaagatgacccggacgagggagaggcgagactggaaaacgagatacccaagacgagcggctccgagatggcgaacaagcgaatgaaggttaagcacgatgaccattacgagctgattgttgacgggagagtgtactacatttgtatagtgtgcaagcggagctacgtgtgcctcacaagtctccgacgtcattttaacatccacagctgggagaagaaatacccctgcagatactgtgagaaagtgtttcctctggcagagtacagaaccaagcacgaaattcaccatacaggggagcgcaggtatcagtgcctcgcgtgtggtaagtcatttataaactatcagtttatgagtagtcatataaagtccgttcattctcaagatccttccggcgacagcaagctttatcgtttacacccttgtagatctctgcagattaggcagtatgcctatttgtccgacagatccagcaccattccagctatgaaagatgacggaatcggttacaaagtggatactggtaaagagcccccagtgggcaccacaacttccacccaaaataagcccatgacctgggaggatatcttcatccagcaggaaaacgactccattttcaaacagaacgtgaccgacggctcgactgagttcgagtttatcattcctgaatcctactag

SEQ ID NO: 167906 - DNA, 5308 bp, Artificial Sequence
  derived and/or modified sequence
tttggcttcagcgcttcgcccccgcgctgtgccctctgtcggcggcgtggggcagctgtagcagcgttggcggcaggaggcggcggccgcgtcgacgtcgacccagactggagcgacgtttaaagaaggggcagaatcgctggggagtgcggcttcttcttgttgggggactcccagccttccgcgcgtccggaggaggagaagcggcggcgccgggaagcagtgtctgttgacttcacttggcactgtttaacattccacctctggaaattgtaaagatggagagatgaggggaagggacaaggggatgaagaaagaggaaagggcatggagagtagaaaactgatttctgctacagacattcagtactctggcagtctgctgaactccttgaatgagcaacgtggccatggactcttctgtgatgttaccgttattgtggaagaccgaaaattccgggctcacaagaatattctttcagcttctagtacctacttccatcagctcttctctgttgctgggcaagttgttgaactgagctttataagagcagagatctttgcagaaattctcaattatatctatagttctaaaattgttcgtgttagatcagatttgcttgatgagttaattaaatcagggcagttattaggagtgaaatttatagcagagcttggtgtcccattgtcacaggttaaaagcatctcaggtacagcgcaggatggtaatactgagcctttacctcctgattctggtgacaagaaccttgtaatacagaaatcaaaagatgaagcccaagataatggggctactataatgcctattataacagagtctttttcattatctgccgaagattatgaaatgaaaaagatcattgttaccgattctgatgatgatgatgatgatgtcattttttgctccgagattctgcccacaaaggagactttgccgagtaataacacagtggcacaggtccaatctaacccaggccctgttgctatttcagatgttgcacctagtgctagcaataactcgccccctttaacaaatatcacacctactcagaaacttcctactcctgtgaatcaggcaactttgagccaaacacaaggaagtgaaaaattgttggtatcttcagctccaacacatctgactcccaatattattttgttaaatcagacaccactttctacaccaccaaatgtcagttcttcacttccaaatcatatgccctcttcaatcaatttacttgtgcagaatcagcagacaccaaacagtgctattttaacaggaaacaaggccaatgaagaggaggaggaggaaataatagatgatgatgatgacactattagctccagtcctgactcggccgtcagtaatacatctttggtcccacaggctgatacctcccaaaataccagttttgatggatcattaatacagaagatgcagattcctacacttcttcaagaaccactttccaattccttaaaaatttcagatataattactagaaatactaatgatccaggcgtaggatcaaaacatctaatggagggtcagaagatcattactttagatacagctactgaaattgaaggcttatcgactggttgcaaggtttatgcaaatatcggtgaagatacttatgatatagtgatccctgtcaaagatgaccctgatgaaggggaggccagacttgagaatgaaataccaaaaacgtctggcagcgagatggcaaacaaacgtatgaaagtaaaacatgatgatcactatgagttaatagtagatggaagggtctattatatctgtattgtatgcaaaaggtcatatgtctgtctgacaagcttgcggagacattttaacattcattcttgggagaagaagtatccgtgccgttactgtgagaaggtatttcctcttgcagaatatcgcacaaagcatgaaattcatcacacaggggagcgaaggtatcagtgtttggcctgtggcaaatctttcatcaactatcagtttatgtcttcacatataaagtcagttcatagtcaagatccttctggggactcaaagctttatcgtttacatccatgcaggtctttacaaatcagacaatatgcatatctttccgatagatcaagcactattcctgcaatgaaggatgatggtattgggtataaggttgacactggaaaagaacctccagtagggaccactacatctactcagaacaagccaatgacctgggaagatatttttattcagcaggaaaatgattcaatttttaaacaaaatgtaacagatggcagtactgagtttgaatttataataccagagtcttactaaactcctttgaaatactagaaagttttgttttggatgatggggcaggggtttcagaagatctgtaaaacaaattaaggtgcgaacaagttaatttgatctgccacattatctgaaggaagtgtagtgggatttttgttgataatttttagaagcaaattttcctgaaagttttgagtagaggtgagaccccctccccaagtatctgtttatatagttagttttcagctcatttaaaagaggcaaaaattaaaagcttggagagatagtttcctgaatagaatttgaagcagtctgaatgttctttgaaaataactggagttattagcataccctagtacatcttacagctttccccttccatgttagcactttactgctgaattctcaattttcttaacattgagacaataaatgtgtgttttgtcttgtatatggcataaagagtaaataagttttagagttgttctggaaaatgtcagaataagtcagtacttgggttgtgtaatctgctagtccaagcgaacagcaacctcctgctaccctccctctatgaaaatagccatgcagacaagtctctcatctgaagaacaaattagatttagctaattagaattaatcctggctttcattgccatagtctgtaaaagactttggtggctagaccactttataccttcgcagtgtggtctctgggggcaaaaaactaatgaaaacaatctctgtaatggcagataggaggagatgaaaagttctgttgcatggatttttaattctctggctaccacatagtagagaatggaatgaagatttccttttggcttcttaaggttaaaaatattcccatgaacatgaaaattttcaaattttgaatctgaaagccaccaaatgtatctttatgtataaatccttgtaaatgatagattccatgggtgagactttacatattttgggtgggaggctactggcatatatttttaaatgttcatattgcgtagaatctccactaggaagtctttatttgaaatagttgaatcagtgatctagtattttcctttcggcaagatttgttaggtttttaccccttctaaaataagttttattccatctgcaaattgctgcaatattatagtaatcagaaactacataaggaatgttatataggcttgtcagttcccatttttcttgacaacaataaataccacttttaaaaatgacacatatttaaacacttagaaaataaagttaacacttactgaagtgctagtactaaactgtgctagtactaaaagaaaacaggttggaacatacatatagcctagcatttataacagaattgttgaacgtctgtaaatgattttttttttttttgcaaaggaaaaaattgatactggaaaagattgttgtgcatagttattagtcatttgtaaccttgcttaagtatttcttagtccaacatagatattttctttctcctgaccatgtattttaaaatatagtctatttcttgactttgaacttaaagctttaatcataatttctcatgtatacatcgttcttctgatggtaagctggatttgaaggtagtggtttcagtgtttcttaagttggtagctgagggtatcaggcatcagttcatgcaataatacaagaaaaaaaatcctttgcttgccaagaggtagagtgatgtgcatttatctgttttctgttctgtaagtctagaccttcaaaccatttgtaaactaacccctgggaaatttgaaattacctgataacttaagactctgtgatctctggaatcaccatatgtttcttttttgtgtagatattaataacattactctttgactatagtgtgcactctgaaatgtactcagtgaaaatttgttttgagtttcattaatgctatttcaccagttagacataattacttctaccgatgtgaatgatacggatgccggcagagcttccagatctttcagactcaactgctaggtcaattagtttgtcataataaaacttggcagattctacaagtctattatgacaaaccaggaactaattctataatggaaaactatccattctgaataataggtatgtaattatttgctgctgctgctgtgctctgtaaattctgaatatgacatttaaactctgtgcctactaaaggtatcttctggagtttttgggaggagagaaactggaaaattaaattgtatttttgccagaagactcttacttgcatgtgtctcagggtcttcagtttttctataagtttccatatccaaagttcagaattcatgtgaaatacttctttggggcaaaagtccttcattcctggtatttattggattggaaatctgtagcaagatgctgtttaaaattaccatattgtttttttatcttatacttagctctctggctattgaacttccttttcttgtttgaagttagcttcaaatttgctcctatgctaaattacctgtaaatattctggataggaactacttgaaatagtaatttgttaaaagatatgacaaaatgaaaatgcttaaactacagaaatttaaaaatgccataacaatcttgcgagactaactttaaaatatactttaaatgattattatgattttggtggtaacgatcccccacacacaaccactatgaagaaataatgccgcatttttcccccattgtaccaaaaagataaaaaaatggtaaacactgatcaaggtattttgtattgtcaaggcatgcatattctaaagaattaaatgctaacttaacagcactggctttctggctggtcaactatatgaaaccttgttcattcctccgagtactgtaatgttcacacttgtacaatcttccctgtcatgactttaagttctacttttcattaaccatggcctgatattagttcttagagcttcttgtggcaaaaataaaatgatttaattct

SEQ ID NO: 167907 - DNA, 2346 bp, Artificial Sequence
  derived and/or modified sequence
tttggcttcagcgcttcgcccccgcgctgtgccctctgtcggcggcgtggggcagctgtagcagcgttggcggcaggaggcggcggccgcgtcgacgtcgacccagactggagcgacgtttaaagaaggggcagaatcgctggggagtgcggcttcttcttgttgggggactcccagccttccgcgcgtccggaggaggagaagcggcggcgccgggaagcagtgtctgttgacttcacttggcactgtttaacattccacctctggaaattgtaaagatggagagatgaggggaagggacaaggggatgaagaaagaggaaagggcatggagagtagaaaactgatttctgctacagacattcagtactctggcagtctgctgaactccttgaatgagcaacgtggccatggactcttctgtgatgttaccgttattgtggaagaccgaaaattccgggctcacaagaatattctttcagcttctagtacctacttccatcagctcttctctgttgctgggcaagttgttgaactgagctttataagagcagagatctttgcagaaattctcaattatatctatagttctaaaattgttcgtgttagatcagatttgcttgatgagttaattaaatcagggcagttattaggagtgaaatttatagcagagcttggtgtcccattgtcacaggttaaaagcatctcaggtacagcgcaggatggtaatactgagcctttacctcctgattctggtgacaagaaccttgtaatacagaaatcaaaagatgaagcccaagataatggggctactataatgcctattataacagagtctttttcattatctgccgaagattatgaaatgaaaaagatcattgttaccgattctgatgatgatgatgatgatgtcattttttgctccgagattctgcccacaaaggagactttgccgagtaataacacagtggcacaggtccaatctaacccaggccctgttgctatttcagatgttgcacctagtgctagcaataactcgccccctttaacaaatatcacacctactcagaaacttcctactcctgtgaatcaggcaactttgagccaaacacaaggaagtgaaaaattgttggtatcttcagctccaacacatctgactcccaatattattttgttaaatcagacaccactttctacaccaccaaatgtcagttcttcacttccaaatcatatgccctcttcaatcaatttacttgtgcagaatcagcagacaccaaacagtgctattttaacaggaaacaaggccaatgaagaggaggaggaggaaataatagatgatgatgatgacactattagctccagtcctgactcggccgtcagtaatacatctttggtcccacaggctgatacctcccaaaataccagttttgatggatcattaatacagaagatgcagattcctacacttcttcaagaaccactttccaattccttaaaaatttcagatataattactagaaatactaatgatccaggcgtaggatcaaaacatctaatggagggtcagaagatcattactttagatacagctactgaaattgaaggcttatcgactggttgcaaggtttatgcaaatatcggtgaagatacttatgatatagtgatccctgtcaaagatgaccctgatgaaggggaggccagacttgagaatgaaataccaaaaacgtctggcagcgagatggcaaacaaacgtatgaaagtaaaacatgatgatcactatgagttaatagtagatggaagggtctattatatctgtattgtatgcaaaaggtcatatgtctgtctgacaagcttgcggagacattttaacattcattcttgggagaagaagtatccgtgccgttactgtgagaaggtatttcctcttgcagaatatcgcacaaagcatgaaattcatcacacaggggagcgaaggtatcagtgtttggcctgtggcaaatctttcatcaactatcagtttatgtcttcacatataaagtcagttcatagtcaagatccttctggggactcaaagctttatcgtttacatccatgcaggtctttacaaatcagacaatatgcatatctttccgatagatcaagcactattcctgcaatgaaggatgatggtattgggtataaggttgacactggaaaagaacctccagtagggaccactacatctactcagaacaagccaatgacctgggaagatatttttattcagcaggaaaatgattcaatttttaaacaaaatgtaacagatggcagtactgagtttgaatttataataccagagtcttactaa

SEQ ID NO: 167908 - protein, 481 aa, Artificial Sequence
  derived and/or modified sequence
MASAASVTSLADEVNCPICQGTLREPVTIDCGHNFCRACLTRYCEIPGPDLEESPTCPLCKEPFRPGSFRPNWQLANVVENIERLQLVSTLGLGEEDVCQEHGEKIYFFCEDDEMQLCVVCREAGEHATHTMRFLEDAAAPYREQIHKCLKCLRKEREEIQEIQSRENKRMQVLLTQVSTKRQQVISEFAHLRKFLEEQQSILLAQLESQDGDILRQRDEFDLLVAGEICRFSALIEELEEKNERPARELLTDIRSTLIRCETRKCRKPVAVSPELGQRIRDFPQQALPLQREMKMFLEKLCFELDYEPAHISLDPQTSHPKLLLSEDHQRAQFSYKWQNSPDNPQRFDRATCVLAHTGITGGRHTWVVSIDLAHGGSCTVGVVSEDVQRKGELRLRPEEGVWAVRLAWGFVSALGSFPTRLTLKEQPRQVRVSLDYEVGWVTFTNAVTREPIYTFTASFTRKVIPFFGLWGRGSSFSLSS

SEQ ID NO: 167909 - protein, 481 aa, Artificial Sequence
  derived and/or modified sequence
MASAASVTSLADEVNCPICQGTLREPVTIDCGHNFCRACLTRYCEIPGPDLEESPTCPLCKEPFRPGSFRPNWQLANVVENIERLQLVSTLGLGEEDVCQEHGEKIYFFCEDDEMQLCVVCREAGEHATHTMRFLEDAAAPYREQIHKCLKCLRKEREEIQEIQSRENKRMQVLLTQVSTKRQQVISEFAHLRKFLEEQQSILLAQLESQDGDILRQRDEFDLLVAGEICRFSALIEELEEKNERPARELLTDIRSTLIRCETRKCRKPVAVSPELGQRIRDFPQQALPLQREMKMFLENLPNHLVIPTAHISLDPQTSHPKLLLSEDHQRAQFSYKWQNSPDNPQRFDRATCVLAHTGITGGRHTWVVSIDLAHGGSCTVGVVSEDVQRKGELRLRPEEGVWAVRLAWGFVSALGSFPTRLTLKEQPRQVRVSLDYEVGWVTFTNAVTREPIYTFTASFTRKVIPFFGLWGRGSSFSLSS

SEQ ID NO: 167910 - protein, 23 aa, Artificial Sequence
  derived and/or modified sequence
VRLAWGFVSALGSFHTADPEGAA

SEQ ID NO: 167911 - DNA, 3572 bp, Artificial Sequence
  derived and/or modified sequence
gagtgtgtgacccagcccttcccccgtggccaagcagagagagtggccttgaggaagccatagcagcaggaccagcatggcctctgctgcctctgtgaccagcctggcagatgaagtcaactgccccatctgtcagggtaccctgagggagccggtcactatcgactgcggccacaacttctgccgggcctgccttacccgctactgtgagataccaggcccagacctggaggagtcccctacttgcccactctgcaaagaacccttccgtcctgggagcttccggcccaactggcagctggctaacgtggtggagaacattgagcgcctccagctggtgtccacactgggtttgggagaggaggatgtctgccaagagcacggagagaagatctacttcttctgtgaggatgatgagatgcagttgtgcgtggtgtgccgggaggctggggagcacgctacccacaccatgcgcttcctggaggatgcagcggctccctatagggaacaaatccataagtgtcttaaatgtctaagaaaagagagagaggagattcaagaaatccagtcaagagaaaataaaaggatgcaagtcctcctgactcaggtgtccaccaagagacaacaggtgatttctgagttcgcacacctgaggaagtttctagaggaacagcagagcatcctcttagcacaattggagagccaggatggggacatcttgaggcaacgggatgaatttgatttgctggttgctggggagatctgccggtttagtgctcttattgaagaactggaggagaagaatgagaggccagcaagggagctcctgacggacatcagaagcactctaataagatgtgaaaccagaaagtgccggaaaccggtggctgtgtcgccagagctgggccagaggattcgggactttccccagcaggccctcccgctgcagagggagatgaagatgtttctggaaaaactatgctttgagttggactatgagccagctcacatttctctagaccctcagacttcccaccccaagctcctcttgtccgaggaccaccagcgagctcagttctcctacaaatggcagaactcaccagacaacccccaacgttttgaccgggccacctgtgttctggcccacactggcatcacaggggggagacacacgtgggtggtgagtatagacctggcccatgggggcagctgcaccgtgggcgtggtgagcgaggatgtgcagcggaagggggagcttcggctgcggccagaggagggggtgtgggctgtgaggctggcttggggcttcgtctcggctctgggctccttccccacacggctgaccctgaaggagcagccccggcaggtgagggtgtctcttgactatgaggtgggctgggtgaccttcaccaacgctgtcacccgagagcccatctacaccttcactgcctccttcactaggaaggtcattcccttctttgggctctggggccgagggtccagtttctccctgagctcctgagaaggagcagttacctactctcctctaagtacaggactcatatcaacccaagtaccatgtggacttgatccctggctgaatcacctggatgacttggaatagaaatgactgctttagaagatgggatggggccgggtggtaagggatagaagagaggactctcaatctactgatcaagtcctttccccaatgcccagtggatggccagggtacctggggactcaggctgctgccagttctgctcaccaccatccgtgcttggcacagaagtagctgcatagaaagggcactggatttgaagtcagaagacctgggttcttgaaccagcctgtcaaccagttgtatgactttaaacaaggcatctcacctcttttcatcttgttttcttccaataatgttagagttcatgtaatcacattctctagaaccatttagtttgtgttaactatgaaccaagcagtgtggtggccactggtgacttgaaaatatagagaaaaaaaaaacctgctctatatctgaaagagctcttgggaagacagagaaacataaagaggaaattacagcacagtgtggtgggtgttacgggaagtccaaccccagcattatgggagttcaggggaaggggcatagcccagcctggaaggagagggtgagtgggggatggctttctgaaaagggtggtctaaaggatgcctatggtcaatagggaaaagaggggaagaagcatcttaagaagaggaaacagcagagaactggctggatgacctgtgactctggagcactgggttgtctccattgtcattatgggcagatgtgtgccatccccagccgacgccactcactgcctccttcctcctggtgttgccacttctgggtgagattaaggtgcagggcctgggggcaggaggacataaggtatagccataaatcataacccagggaccacactcaaccctagggaaattgtcttcctgatcagttgattaccatctgaggtcaagaaatgagatagtgggagcaaatgggtcacaaatagctcagctgtgggctcagaaactgctaggtaaaagaattccagaaggaggccagggcataagttggatgacctatgaactttagtctaaagaattgagactaccgtaattgagactactgtagtgacatctgagaaatgggatggaagagtgaccatgttttattttcttgttcttgtcactattgtattttattttgcataatcatgcccttcactgacagtctccttaacatcatctgtttactctgctcagtgtaaactacaatgctctgtcatctccctactgggtctcctgggaggaggggagccatccagggtgcaaactcaaaggcagagggcacagcgtgcttaggcccaagcttagaattcaattgagaagttctgttgttcatccttacctcagcaggtagaaaagaggtggagatcagaagccagggattagagattgaattgctttccctgggagtgtgcagtatctcattaaaatgttgtatattcaaaaaaatacagacacacacaagtgcctatataatgataaaacatatccaaagcacccaaacctgtgattccagaaaagtagatcctatttttgtttatttttattggctttagctgtgtcttttgaaaggactattatcctctaaaatgtatgtgtatgaagatcctggcttgcagctcgggagctttacacaccttgtgtcactttatcttggtaacgagccaagatcatgcaaccagttcatccatgtctgacccaagagctcttaactgctatgctgcactgcctcattcagagatagatgcctgcatgggtcctggcgattattttaatgctggctacacccccacaggtgacttggattcagaaatacaatttatatttcttctttttaaattgttttattttatttttcttttaatagttatatgtcagtgagaacaatttatatgtcttacactgagaaataaaactgctcataagtgaaaaaaaaaaaaaaaaaaaaaaaaaaaaaa

SEQ ID NO: 167912 - DNA, 1446 bp, Artificial Sequence
  derived and/or modified sequence
atggccagcgccgccagcgtgaccagcctggccgacgaggtgaactgccccatctgccagggcaccctgagagagcccgtgaccatcgactgcggccacaacttctgcagagcctgcctgaccagatactgcgagatccccggccccgacctggaggagagccccacctgccccctgtgcaaggagcccttcagacccggcagcttcagacccaactggcagctggccaacgtggtggagaacatcgagagactgcagctggtgagcaccctgggcctgggcgaggaggacgtgtgccaggagcacggcgagaagatctacttcttctgcgaggacgacgagatgcagctgtgcgtggtgtgcagagaggccggcgagcacgccacccacaccatgagattcctggaggacgccgccgccccctacagagagcagatccacaagtgcctgaagtgcctgagaaaggagagagaggagatccaggagatccagagcagagagaacaagagaatgcaggtgctgctgacccaggtgagcaccaagagacagcaggtgatcagcgagttcgcccacctgagaaagttcctggaggagcagcagagcatcctgctggcccagctggagagccaggacggcgacatcctgagacagagagacgagttcgacctgctggtggccggcgagatctgcagattcagcgccctgatcgaggagctggaggagaagaacgagagacccgccagagagctgctgaccgacatcagaagcaccctgatcagatgcgagaccagaaagtgcagaaagcccgtggccgtgagccccgagctgggccagagaatcagagacttcccccagcaggccctgcccctgcagagagagatgaagatgttcctggagaagctgtgcttcgagctggactacgagcccgcccacatcagcctggacccccagaccagccaccccaagctgctgctgagcgaggaccaccagagagcccagttcagctacaagtggcagaacagccccgacaacccccagagattcgacagagccacctgcgtgctggcccacaccggcatcaccggcggcagacacacctgggtggtgagcatcgacctggcccacggcggcagctgcaccgtgggcgtggtgagcgaggacgtgcagagaaagggcgagctgagactgagacccgaggagggcgtgtgggccgtgagactggcctggggcttcgtgagcgccctgggcagcttccccaccagactgaccctgaaggagcagcccagacaggtgagagtgagcctggactacgaggtgggctgggtgaccttcaccaacgccgtgaccagagagcccatctacaccttcaccgccagcttcaccagaaaggtgatccccttcttcggcctgtggggcagaggcagcagcttcagcctgagcagctag

SEQ ID NO: 167913 - DNA, 1446 bp, Artificial Sequence
  derived and/or modified sequence
atggccagcgccgccagcgtgaccagcctggccgacgaggtgaactgccccatctgccagggcaccctgagagagcccgtgaccatcgactgcggccacaacttctgcagagcctgcctgaccagatactgcgagatccccggccccgacctggaggagagccccacctgccccctgtgcaaggagcccttcagacccggcagcttcagacccaactggcagctggccaacgtggtggagaacatcgagagactgcagctggtgagcaccctgggcctgggcgaggaggacgtgtgccaggagcacggcgagaagatctacttcttctgcgaggacgacgagatgcagctgtgcgtggtgtgcagagaggccggcgagcacgccacccacaccatgagattcctggaggacgccgccgccccctacagagagcagatccacaagtgcctgaagtgcctgagaaaggagagagaggagatccaggagatccagagcagagagaacaagagaatgcaggtgctgctgacccaggtgagcaccaagagacagcaggtgatcagcgagttcgcccacctgagaaagttcctggaggagcagcagagcatcctgctggcccagctggagagccaggacggcgacatcctgagacagagagacgagttcgacctgctggtggccggcgagatctgcagattcagcgccctgatcgaggagctggaggagaagaacgagagacccgccagagagctgctgaccgacatcagaagcaccctgatcagatgcgagaccagaaagtgcagaaagcccgtggccgtgagccccgagctgggccagagaatcagagacttcccccagcaggccctgcccctgcagagagagatgaagatgttcctggagaacctgcccaaccacctggtgatccccaccgcccacatcagcctggacccccagaccagccaccccaagctgctgctgagcgaggaccaccagagagcccagttcagctacaagtggcagaacagccccgacaacccccagagattcgacagagccacctgcgtgctggcccacaccggcatcaccggcggcagacacacctgggtggtgagcatcgacctggcccacggcggcagctgcaccgtgggcgtggtgagcgaggacgtgcagagaaagggcgagctgagactgagacccgaggagggcgtgtgggccgtgagactggcctggggcttcgtgagcgccctgggcagcttccccaccagactgaccctgaaggagcagcccagacaggtgagagtgagcctggactacgaggtgggctgggtgaccttcaccaacgccgtgaccagagagcccatctacaccttcaccgccagcttcaccagaaaggtgatccccttcttcggcctgtggggcagaggcagcagcttcagcctgagcagctag

SEQ ID NO: 167914 - DNA, 1446 bp, Artificial Sequence
  derived and/or modified sequence
atggcaagcgcagcatccgtaacctctctcgccgacgaagtcaactgtcctatctgccagggtaccctgcgcgaacctgtgaccattgactgtggccataacttctgccgggcctgcctgaccagatattgtgagatcccaggccctgacctcgaagaatcaccaacatgccctttatgtaaggagccattccgccccggttcgttccgaccaaattggcagctagcgaatgtcgtggaaaatatcgaaaggcttcaacttgtaagcaccctcggcctgggtgaagaggacgtgtgccaggagcacggggagaagatatattttttctgtgaggatgatgaaatgcaactgtgtgtggtttgtagagaggctggggagcacgccacgcacaccatgaggttcctcgaggacgccgctgcaccatatcgcgagcagattcacaaatgtcttaaatgtctccgcaaagagagagaagagatccaggagatacagagtagggaaaataaaagaatgcaggtcctgctcacccaggttagtaccaaacgccagcaggtgatctcagaattcgcccatttacgtaaattccttgaggagcaacagtcaatcctattagcccaactggaatcacaggatggagacatacttaggcagcgcgatgagtttgatctgctggtcgcaggggaaatctgccggtttagtgcactgattgaggagctagaggagaagaacgagcgccctgctagggaactgctcacagacatcaggtccaccctcattcgctgcgagaccaggaagtgtcgaaagcctgtggccgtaagcccagaactgggacagcgcattcgcgactttcctcagcaggctctcccacttcaacgcgaaatgaagatgtttctcgaaaaactctgttttgagctcgattacgaacccgcccatatctcactcgatcctcaaacatcccaccctaaactgctgttatccgaggaccaccaacgcgcacagttctcttacaagtggcagaactccccagacaaccctcagagatttgatcgcgcaacgtgtgtgctagctcataccgggatcactggaggaaggcacacctgggttgtttccatcgatcttgctcacggcggatcttgtacagttggggtcgtgagcgaggacgtccagcggaaaggggagctgcgcttaagacctgaggagggtgtatgggccgtcaggctggcatggggctttgtatcagctttaggaagtttcccaactcgtctaactttgaaggagcagccccgccaggtgcgggtcagcttggattacgaggtggggtgggtcacttttactaatgcagtgacacgggaacccatctacactttcacagcatccttcacccgaaaggtgataccattttttggcctttggggcaggggatcaagcttctctctctcctcttag

SEQ ID NO: 167915 - DNA, 1446 bp, Artificial Sequence
  derived and/or modified sequence
atggcatccgctgcgtccgtgacatcattagcagatgaggtgaactgtcccatatgccagggtacactgcgtgagcctgttaccatagattgtggccacaacttttgtcgggcttgcctgactcgatattgtgagatcccaggccccgacttggaggaaagccctacatgccctctctgcaaggagccattcagaccaggcagttttagacctaactggcaattagcaaatgttgtcgagaatatagagaggctacaactggtgtccactttgggactcggagaggaggacgtttgtcaggagcatggagagaagatctacttcttttgtgaagatgatgaaatgcagctgtgtgtggtctgcagggaagcgggggagcatgcaactcacaccatgcgcttcctcgaagacgctgctgctccttatcgcgagcagatccacaagtgtctgaagtgcctacgcaaggagagagaggagattcaggaaattcaatcacgtgaaaataaaaggatgcaagtgttactgacccaggtcagtacaaagagacaacaagtgatatctgagttcgcccacctgcgcaaattcctggaggagcagcaatcaatcctacttgcccaactcgaatctcaagatggggacatcctgcggcagagggacgaatttgatttactggttgcaggagagatctgcagattctccgcactgattgaagagttagaagagaaaaacgaaagacccgctagagaactactgactgatatccgatctactctgatccgctgcgagaccagaaagtgcagaaagcccgtggccgtgagcccagaactgggccagcgtatccgcgacttcccacagcaagctctgccccttcagcgtgagatgaagatgttcttggagaatctacccaaccatctcgttatacctacagcacacatctccctggatccccaaacctcccatcctaagcttcttctcagcgaggaccaccagagggctcagtttagttataaatggcagaactcccctgataatcctcaacgatttgacagagctacctgcgtgttggcacacaccgggatcacagggggtaggcacacctgggtagtgtccattgacctggcacacggaggttcttgtacagtgggagtggtctccgaagatgtgcagagaaagggcgaactccgacttaggccagaagaaggcgtgtgggctgtgaggctcgcctgggggttcgtcagcgccttaggtagctttcccacccgcctaacgttaaaggagcagcctagacaggtaagggttagtctggattacgaagtgggctgggtgactttcacgaatgccgtgacccgggaaccaatttatacctttactgccagctttacccggaaggtgataccattcttcggactttggggtcgaggatcctccttttctctttccagctag

SEQ ID NO: 167916 - DNA, 1446 bp, Artificial Sequence
  derived and/or modified sequence
atggccagcgctgcctctgtgaccagcctggctgatgaggtgaactgccccatctgccagggcaccctgcgggagcctgtgaccatcgactgtggccacaacttctgccgggcctgcctgacccgctactgtgagatccctggccctgacctggaggagagccccacctgccccctgtgcaaggagcccttccggcccggcagcttccggcccaactggcagctggccaacgtggtggagaacatcgagcggctgcagctggtgtccaccctgggcctgggggaggaggatgtgtgccaggagcacggggagaagatctacttcttctgtgaagatgatgagatgcagctgtgtgtggtgtgccgggaggccggggagcacgccacccacaccatgaggttcctggaggatgctgctgccccctaccgggagcagatccacaagtgcctgaagtgcctgaggaaggagcgggaggagatccaggagatccagagccgggagaacaagaggatgcaggtgctgctgacccaggtgtccaccaagaggcagcaggtgatcagcgagtttgcccacctgaggaagttcctggaggagcagcagagcatcctgctggcccagctggagagccaggatggagacatcctgcggcagagagatgaatttgacctgctggtggccggggagatctgccgcttcagcgccctgattgaggagctggaggagaagaatgaaagacctgcccgggagctgctgacagacatccgcagcaccctcatccgctgtgagaccaggaaatgtaggaagcctgtggccgtgtccccagagctgggccagaggatccgggacttcccccagcaggccctgcccctgcagcgggagatgaagatgttcctggagaagctgtgctttgagctggactatgagcccgcccacatcagcctggacccccagaccagccaccccaagctgctgctgtctgaggaccaccagagggcccagttctcctacaagtggcagaacagcccagacaacccccagagatttgaccgggccacctgtgtgctggcccacacaggcatcactggaggccgccacacctgggtggtgtccattgacctggcccatggaggcagctgcaccgtgggcgtggtgtctgaagatgtgcagaggaaaggagagctgcggctgcggcctgaggagggcgtgtgggccgtgcggctggcctggggctttgtgtctgccctgggcagcttccccacccggctgaccctgaaggagcagccccggcaggtgcgggtgtccctggactatgaggtgggctgggtgaccttcaccaatgctgtgacccgggagcccatctacaccttcaccgccagcttcaccaggaaggtgatccccttcttcggcctgtggggccggggcagcagcttcagcctgagcagctag

SEQ ID NO: 167917 - DNA, 1446 bp, Artificial Sequence
  derived and/or modified sequence
atggccagcgctgcctctgtgaccagcctggctgatgaggtgaactgccccatctgccagggcaccctgcgggagcctgtgaccatcgactgtggccacaacttctgccgggcctgcctgacccgctactgtgagatccctggccctgacctggaggagagccccacctgccccctgtgcaaggagcccttccggcccggcagcttccggcccaactggcagctggccaacgtggtggagaacatcgagcggctgcagctggtgtccaccctgggcctgggggaggaggatgtgtgccaggagcacggggagaagatctacttcttctgtgaagatgatgagatgcagctgtgtgtggtgtgccgggaggccggggagcacgccacccacaccatgaggttcctggaggatgctgctgccccctaccgggagcagatccacaagtgcctgaagtgcctgaggaaggagcgggaggagatccaggagatccagagccgggagaacaagaggatgcaggtgctgctgacccaggtgtccaccaagaggcagcaggtgatcagcgagtttgcccacctgaggaagttcctggaggagcagcagagcatcctgctggcccagctggagagccaggatggagacatcctgcggcagagagatgaatttgacctgctggtggccggggagatctgccgcttcagcgccctgattgaggagctggaggagaagaatgaaagacctgcccgggagctgctgacagacatccgcagcaccctcatccgctgtgagaccaggaaatgtaggaagcctgtggccgtgtccccagagctgggccagaggatccgggacttcccccagcaggccctgcccctgcagcgggagatgaagatgttcctggagaacctgcccaaccacctggtgatccccacagcccacatcagcctggacccccagaccagccaccccaagctgctgctgtctgaggaccaccagagggcccagttctcctacaagtggcagaacagcccagacaacccccagagatttgaccgggccacctgtgtgctggcccacacaggcatcactggaggccgccacacctgggtggtgtccattgacctggcccatggaggcagctgcaccgtgggcgtggtgtctgaagatgtgcagaggaaaggagagctgcggctgcggcctgaggagggcgtgtgggccgtgcggctggcctggggctttgtgtctgccctgggcagcttccccacccggctgaccctgaaggagcagccccggcaggtgcgggtgtccctggactatgaggtgggctgggtgaccttcaccaatgctgtgacccgggagcccatctacaccttcaccgccagcttcaccaggaaggtgatccccttcttcggcctgtggggccggggcagcagcttcagcctgagcagctag

SEQ ID NO: 167918 - DNA, 1446 bp, Artificial Sequence
  derived and/or modified sequence
atggccagcgccgccagcgtgaccagcctggccgacgaggtgaactgccctatttgccagggcactctgagagaacccgtcaccatcgactgcgggcataatttctgtcgcgcatgcctcaccaggtattgtgagatccctggtccggatctcgaagaatcccccacctgcccactgtgcaaggagccttttcggccggggtcctttcgtcctaattggcaactcgccaatgtcgtcgaaaacatcgaacgtttgcagcttgtgagcacactggggctaggggaagaagatgtttgccaggaacatggagagaaaatctatttcttctgcgaggacgatgagatgcagctttgcgttgtatgcagggaagccggcgagcatgcgacacatactatgcggtttctggaagatgccgctgccccctatagagagcagattcacaaatgcctgaaatgtctacgaaaggaaagagaggaaattcaggaaattcaaagtcgcgagaacaagaggatgcaagtgttgctcacccaggtttctaccaagcgccagcaggtcatctccgagtttgcccacttgaggaaatttctcgaagagcagcagagcattttgctggctcaacttgagagccaggacggtgacatcctgcgccagcgggacgaatttgacctccttgtcgcaggtgagatctgcaggttcagtgctctgattgaggagttagaggagaagaacgagagacccgcccgcgaactgctgaccgacattagaagtaccctgataaggtgtgagacccgtaagtgcaggaagcccgtggcggtgtcaccagaactggggcaaagaattagagatttcccccagcaggcgctcccactccagcgggagatgaaaatgtttttggagaagctgtgttttgaactggattacgaaccagcccacatcagcctggacccacagacctctcaccctaagctgctgctcagcgaggatcatcagagggcgcagttttcgtacaaatggcagaattctccagataacccacaaagattcgaccgggctacctgtgtgcttgctcacactggcatcacaggtggaagacatacctgggttgtaagcatcgacctggcacacggtggctcatgtacagttggcgtcgtatcagaggacgttcagcgaaagggagaattgcgtttgcgccccgaggagggtgtttgggccgtgagattagcctggggctttgtctcagctctgggtagttttcctactcgcctgactttaaaagaacaaccacgccaagtcagagtatcccttgactatgaagtcggctgggtcaccttcactaatgccgtcacgcgcgagccaatatacaccttcacagcttctttcaccagaaaagttatcccattcttcggcctttggggcagagggtcctccttctccctgtccagttag

SEQ ID NO: 167919 - DNA, 1446 bp, Artificial Sequence
  derived and/or modified sequence
atggccagcgccgccagcgtgaccagcctggccgacgaggtgaactgccccatttgccaaggcacacttcgcgagccggtgacgattgattgcggacacaatttttgccgggcatgccttacaagatactgcgaaatccctggccctgatctggaagaaagccccacatgccctctctgcaaagaaccctttcgccccggctccttccgcccaaattggcagctggctaacgtcgtggaaaacatagagaggctgcagctggtctctaccctcggtctcggcgaagaagatgtctgtcaggagcacggcgagaagatttactttttctgcgaggatgacgagatgcagctttgcgttgtatgcagagaagctggggagcatgcaactcacacaatgaggttcttagaagatgccgccgccccctatcgggagcagattcataagtgcttaaagtgccttcggaaggagagggaggaaatacaagaaatccagtctcgcgaaaacaagcgaatgcaggttctccttacccaggtgtccacgaagcgacaacaagtgatctcggagtttgcccatttacgcaagttccttgaggaacagcagagcatcctattggcccagctggaatctcaggatggcgatatcctgagacaacgcgacgagttcgatctgctggtcgccggcgaaatatgccgcttttccgcactgatagaagagctggaggagaagaacgagagacctgctagggaattgctgaccgatataagaagtacacttatccgctgtgagaccaggaaatgtcgcaagcccgtggccgtgtcaccagaattgggtcagagaatccgggacttccctcaacaggccctgccattacagcgggagatgaagatgttcttagaaaatctgccaaaccacctagtcattcctacggcgcacatttcgctggatccccagaccagccatccaaaactgctcttgtccgaggaccatcagcgggctcaattctcttacaaatggcaaaacagtccagataacccccagcgattcgatcgggcaacctgcgttcttgcacacactgggatcaccggtggccgccacacatgggtggtgagcatagacctcgcccacgggggatcctgcaccgttggggtggtaagcgaggatgtgcaacggaagggggaactgaggctccgacctgaagagggcgtgtgggcagtccggctcgcctgggggtttgtctcagcactgggaagcttcccaacaagattgactctgaaggaacagccacgtcaagtgcgcgtgtcacttgattatgaggttggatgggtgacatttaccaacgccgttacgcgagaacctatctatacgttcactgcgtcattcacacgcaaagtgatccctttttttgggctatggggaaggggatcatcattcagcctgagctcgtag

SEQ ID NO: 167920 - DNA, 1446 bp, Artificial Sequence
  derived and/or modified sequence
atggcatccgccgcatcggtcaccagcctggcagacgaggtcaactgtcccatctgccaagggacgctgagagaacccgtcactatcgattgtggtcacaacttctgtagagcttgcttgacccgatactgtgaaattcccggtccagatctggaagaaagccctacatgtcccctgtgcaaagagccatttaggcccggatcctttaggcctaattggcaactggccaatgtagtagaaaacatagagcgcttacagcttgtttccactctggggcttggggaagaagacgtatgtcaagagcacggcgagaaaatatattttttctgtgaagacgatgagatgcagctttgcgttgtgtgtcgcgaggcgggtgaacacgcgactcatactatgcgttttcttgaggatgccgcagccccatatcgcgaacagattcataagtgtctgaaatgtctccgaaaagagcgagaagagatccaagaaattcagagcagggagaataagcgcatgcaggtgctcctgactcaagtaagtactaagagacaacaagtcattagcgagttcgctcacctcaggaagttcctggaagagcaacagagtattctccttgcacagctggaatcacaggacggcgacattttgaggcagcgggacgagttcgacctattggttgccggagaaatctgtagattctctgccttgatcgaggagctcgaggagaaaaatgaaaggccagcaagagagcttttgacagacattcgcagcactctgatacggtgcgagacgaggaaatgtcgtaagcctgtggcagttagcccagaactaggtcagcgaatccgggattttccacagcaggccctcccgctgcaacgggagatgaaaatgttccttgaaaagctgtgcttcgagctagattacgaacctgcccatatctctctagacccccagacctctcaccccaaactcctcctatcagaggaccaccagcgagcacagttttcatacaagtggcagaattctcccgataacccgcaacggttcgaccgtgctacatgtgtccttgcccacactggtattacagggggaaggcatacctgggtcgtatccatcgatctggctcacggcggtagctgtacagtgggagtcgtcagtgaagatgtgcagaggaagggcgagctccgacttagacccgaggaaggtgtctgggccgtccgtctggcgtgggggttcgtgtctgcacttggctccttcccgacaaggttgacacttaaagaacagccaaggcaagttcgagtgtccctagattatgaagtgggttgggtgacatttactaacgcggtgacccgggaaccaatatatacattcaccgcctctttcacaagaaaggtgattccattttttgggttgtggggcagaggctcctccttcagcctctccagttag

SEQ ID NO: 167921 - DNA, 1446 bp, Artificial Sequence
  derived and/or modified sequence
atggcgtcagctgcatctgttacctccttggcggacgaggtcaattgtcccatatgccagggtactctcagagagcccgtcaccatcgactgcggccacaatttttgcagggcctgtctgacccgctactgtgaaatccccggtcccgatctggaggagagccccacctgtccactgtgtaaagaacccttcaggccgggatcatttcgtcccaattggcaacttgcaaacgtggtggaaaacatcgagagacttcagctcgtgtctacactgggcctgggggaagaagacgtctgccaagagcatggcgaaaaaatttacttcttttgcgaggacgacgagatgcagctgtgtgtggtttgcagggaagccggagagcacgctacccacaccatgcggttcctggaagacgcagctgctccataccgtgaacagattcacaagtgcttaaaatgcctgcgaaaagagagggaggaaatacaggagatccagagcagggagaacaagcgcatgcaagtgctgctcacacaagtctccaccaagcggcaacaagtgatcagtgagtttgcacatctcaggaagtttcttgaagaacaacagtccattctactcgcacagctcgagagccaggacggagatatcctgcgccagagagatgaattcgacctgctcgtggctggtgaaatctgcagatttagtgccctcatcgaggaacttgaggaaaagaacgaacgccctgccagagagctgcttacggacattagatctacgttgattagatgtgaaaccaggaaatgccggaaacctgtcgccgtctcaccagagctgggccaacgaatcagggacttccctcagcaggccctcccactgcagagggaaatgaaaatgttcctggagaaccttcctaaccacctagttatcccaaccgcccatatctccctggacccccagacctcacaccctaagctgttgcttagtgaggatcaccagcgagctcagtttagttacaaatggcaaaattccccagacaacccacagcggtttgaccgtgccacatgcgtccttgcacacaccgggatcactggtggtagacacacctgggtggtgagcatcgatcttgcccacggcggaagttgcacggtgggggtggtctccgaagacgttcagagaaagggggagctgcggctccgtccagaagaaggcgtctgggctgtccgcttagcgtggggttttgtgagtgctctggggagtttccccacccggcttactttaaaagaacagccacggcaggtgcgtgtatccctggactatgaggtggggtgggtgacgtttactaatgccgtgacaagagaacccatctacacttttaccgcaagctttactcggaaggtgatcccattctttgggctgtggggccgtggctctagcttcagcctaagtagctag

SEQ ID NO: 167922 - DNA, 3546 bp, Artificial Sequence
  derived and/or modified sequence
gagtgtgtgacccagcccttcccccgtggccaagcagagagagtggccttgaggaagccatagcagcaggaccagcatggcctctgctgcctctgtgaccagcctggcagatgaagtcaactgccccatctgtcagggtaccctgagggagccggtcactatcgactgcggccacaacttctgccgggcctgccttacccgctactgtgagataccaggcccagacctggaggagtcccctacttgcccactctgcaaagaacccttccgtcctgggagcttccggcccaactggcagctggctaacgtggtggagaacattgagcgcctccagctggtgtccacactgggtttgggagaggaggatgtctgccaagagcacggagagaagatctacttcttctgtgaggatgatgagatgcagttgtgcgtggtgtgccgggaggctggggagcacgctacccacaccatgcgcttcctggaggatgcagcggctccctatagggaacaaatccataagtgtcttaaatgtctaagaaaagagagagaggagattcaagaaatccagtcaagagaaaataaaaggatgcaagtcctcctgactcaggtgtccaccaagagacaacaggtgatttctgagttcgcacacctgaggaagtttctagaggaacagcagagcatcctcttagcacaattggagagccaggatggggacatcttgaggcaacgggatgaatttgatttgctggttgctggggagatctgccggtttagtgctcttattgaagaactggaggagaagaatgagaggccagcaagggagctcctgacggacatcagaagcactctaataagatgtgaaaccagaaagtgccggaaaccggtggctgtgtcgccagagctgggccagaggattcgggactttccccagcaggccctcccgctgcagagggagatgaagatgtttctggaaaaactatgctttgagttggactatgagccagctcacatttctctagaccctcagacttcccaccccaagctcctcttgtccgaggaccaccagcgagctcagttctcctacaaatggcagaactcaccagacaacccccagcgttttgaccgggccacctgtgttctggcccacactggcatcacaggggggagacacacgtgggtggtgagtatagacctggcccatgggggcagctgcaccgtgggcgtggtgagcgaggatgtgcagcggaagggggagcttcggctgcggccagaggagggggtgtgggctgtgaggctggcttggggcttcgtctcggctctgggctccttccccacacggctgaccctgaaggagcagccccggcaggtgagggtgtctcttgactatgaggtgggctgggtgaccttcaccaacgctgtcacccgagagcccatctacaccttcactgcctccttcactaggaaggtcattcccttctttgggctctggggccgagggtccagtttctccctgagctcctgagaaggagcagttacctactctcctctaagtacaggactcatatcaacccaagtaccatgtggacttgatccctggctgaatcacctggatgacttggaatagaaatgactgctttagaagatgggatggggccgggtggtaagggatagaagagaggactctcaatctactgatcaagtcctttccccaatgcccagtggatggccagggtacctggggactcaggctgctgccagttctgctcaccaccatccgtgcttggcacagaagtagctgcatagaaagagcactggatttgaagtcagaagacctgggttcttgaaccagcctgtcaaccagttgtatgactttaaacaaggcatctcacctcttttcatcttgttttcttccaataatgttagagttcatgtaatcacattctctagaaccatttagtttgtgttaactatgaaccaagcagtgtggtggccactggtgacttgaaaatatagagaaaaaaaaaacctgctctatatctgaaagagctcttgggaagacagagaaacataaagaggaaattacagcacagtgtggtgggtgttacgggaagtccaaccccagcattatgggagttcaggggaaggggcatagcccagcctggaaggagagggtgagtgggggatggctttctgaaaagggtggtctaaaggatgcctatggtcaatagggaaaagaggggaagaagcatcttaagaagaggaaacagcagagaactggctggatgacctgtgactctggagcactgggttgtctccattgtcattatgggcagatgtgtgccatccccagccgacgccactcactgcctccttcctcctggtgttgccacttctgggtgagattaaggtgcagggcctgggggcaggaggacataaggtatagccataaatcataacccagggaccacactcaaccctagggaaattgtcttcctgatcagttgattaccatctgaggtcaagaaatgagatagtgggagcaaatgggtcacaaatagctcagctgtgggctcagaaactgctaggtaaaagaattccagaaggaggccagggcataagttggatgacctatgaactttagtctaaagaattgagactaccgtaattgagactactgtagtgacatctgagaaatgggatggaagagtgaccatgttttattttcttgttcttgtcactattgtattttattttgcataatcatgcccttcactgacagtctccttaacatcatctgtttactctgctcagtgtaaactacaatgctctgtcatctccctactgggtctcctgggaggaggggagccatccagggtgcaaactcaaaggcagagggcacagcgtgcttaggcccaagcttagaattcaattgagaagttctgttgttcatccttacctcagcaggtagaaaagaggtggagatcagaagccagggattagagattgaattgctttccctgggagtgtgcagtatctcattaaaatgttgtatattcaaaaaaatacagacacacacaagtgcctatataatgataaaacatatccaaagcacccaaacctgtgattccagaaaagtagatcctatttttgtttatttttattggctttagctgtgtcttttgaaaggactattatcctctaaaatgtatgtgtatgaagatcctggcttgcagctcgggagctttacacaccttgtgtcactttatcttggtaacgagccaagatcatgcaaccagttcatccatgtctgacccaagagctcttaactgctatgctgcactgcctcattcagagatagatgcctgcatgggtcctggcgattattttaatgctggctacacccccacaggtgacttggattcagaaatacaatttatatttcttctttttaaattgttttattttatttttcttttaatagttatatgtcagtgagaacaatttatatgtcttacactgagaaataaaactgctcataagtgaaaa

SEQ ID NO: 167923 - DNA, 1522 bp, Artificial Sequence
  derived and/or modified sequence
gagtgtgtgacccagcccttcccccgtggccaagcagagagagtggccttgaggaagccatagcagcaggaccagcatggcctctgctgcctctgtgaccagcctggcagatgaagtcaactgccccatctgtcagggtaccctgagggagccggtcactatcgactgcggccacaacttctgccgggcctgccttacccgctactgtgagataccaggcccagacctggaggagtcccctacttgcccactctgcaaagaacccttccgtcctgggagcttccggcccaactggcagctggctaacgtggtggagaacattgagcgcctccagctggtgtccacactgggtttgggagaggaggatgtctgccaagagcacggagagaagatctacttcttctgtgaggatgatgagatgcagttgtgcgtggtgtgccgggaggctggggagcacgctacccacaccatgcgcttcctggaggatgcagcggctccctatagggaacaaatccataagtgtcttaaatgtctaagaaaagagagagaggagattcaagaaatccagtcaagagaaaataaaaggatgcaagtcctcctgactcaggtgtccaccaagagacaacaggtgatttctgagttcgcacacctgaggaagtttctagaggaacagcagagcatcctcttagcacaattggagagccaggatggggacatcttgaggcaacgggatgaatttgatttgctggttgctggggagatctgccggtttagtgctcttattgaagaactggaggagaagaatgagaggccagcaagggagctcctgacggacatcagaagcactctaataagatgtgaaaccagaaagtgccggaaaccggtggctgtgtcgccagagctgggccagaggattcgggactttccccagcaggccctcccgctgcagagggagatgaagatgtttctggaaaatctgcctaatcacctggttatccccacagctcacatttctctagaccctcagacttcccaccccaagctcctcttgtccgaggaccaccagcgagctcagttctcctacaaatggcagaactcaccagacaacccccagcgttttgaccgggccacctgtgttctggcccacactggcatcacaggggggagacacacgtgggtggtgagtatagacctggcccatgggggcagctgcaccgtgggcgtggtgagcgaggatgtgcagcggaagggggagcttcggctgcggccagaggagggggtgtgggctgtgaggctggcttggggcttcgtctcggctctgggctccttccccacacggctgaccctgaaggagcagccccggcaggtgagggtgtctcttgactatgaggtgggctgggtgaccttcaccaacgctgtcacccgagagcccatctacaccttcactgcctccttcactaggaaggtcattcccttctttgggctctggggccgagggtccagtttctccctgagctcctga

SEQ ID NO: 167924 - DNA, 1446 bp, Artificial Sequence
  derived and/or modified sequence
atggcttctgctgcaagcgtaacctcactagccgacgaagtgaactgccctatctgtcaaggtactcttagagagcctgtgacaattgattgtggacacaacttttgtcgagcctgcctaacgcgatactgtgaaatcccaggccccgatttggaggagtccccgacatgccccctgtgcaaggaacctttccggccaggatcctttaggcctaactggcaacttgcaaatgttgtcgaaaatatagaaagacttcagcttgtatctaccctgggcctcggggaagaggatgtgtgtcaggaacacggagaaaagatctatttcttttgtgaggacgatgagatgcagctgtgtgttgtctgccgagaggccggggagcacgcaacacatacgatgaggttcctggaggacgctgccgccccctatagagagcagattcataaatgtcttaaatgcctgcggaaggaaagggaggaaattcaggaaatccaatctcgagagaataaacgaatgcaggtgctcttgacccaggtttctactaagcggcaacaagttatttcagagttcgcgcacctgcgcaagtttctggaagaacaacagtccattctccttgcccagctcgaatcacaggatggcgatatcttacgacaaagagacgagtttgacctactagtggccggcgagatatgcaggttctccgccttgatcgaggaactcgaggagaagaacgagcgtcccgcacgggagcttctcaccgatatcaggtccacattaatcaggtgtgagactagaaagtgtagaaagcccgtcgccgtaagcccagagctgggacaaaggattagagatttcccccagcaagccctgcccctccagagagagatgaaaatgtttcttgaaaacctccctaatcaccttgtgattcccactgctcacatatccttggaccctcaaactagccatcctaaactgttgctgtcagaggatcatcagcgcgcccagttcagctataagtggcagaactctccagataaccctcaaagattcgacagggccacatgtgtgttagcccacacaggaattaccggggggcggcatacatgggtcgtctctatcgacctcgcgcatggcggctcttgtactgtgggcgtggtaagtgaagacgtccagcgcaagggagagctgcgactgcgcccggaagagggtgtctgggctgtgcggctcgcctgggggttcgtgtcagctctgggttcttttcctaccagactaacactaaaagagcagccccggcaggtgcgcgtctcattggactacgaggtcggttgggtgacctttacaaatgctgtcactagagagccaatctacaccttcacggcaagttttaccagaaaggtaatccccttctttggtttgtggggccggggttcttctttcagtttgtcgagttag

SEQ ID NO: 167925 - DNA, 1446 bp, Artificial Sequence
  derived and/or modified sequence
atggcctccgctgcctccgtcacttcactggccgacgaggtaaactgccccatttgtcagggaacactgagggaacccgtgactattgattgcggacacaatttctgtcgcgcatgtctaaccagatattgcgagatacctgggccagatctcgaggagagtcccacctgcccattgtgtaaggaaccctttagacctggctcattccgccctaattggcagcttgctaacgtcgtggaaaacatcgagcgactccagttagtgtcgaccctgggtctgggagaggaggatgtctgccaggaacatggcgagaagatctatttcttctgcgaggatgacgagatgcagctgtgcgtggtgtgtagagaggccggagagcacgctacacatacaatgagatttttggaagacgccgccgcaccatacagagagcagatacataaatgtttgaagtgccttcggaaggagagggaggagatccaagaaatccagagcagggaaaacaagcgtatgcaggtcctgcttacccaggttagcaccaaacggcaacaagtcatctctgaatttgcccatctgcgtaaattcctcgaggaacagcagagtatcttgttagcccagctagagagccaagacggcgacatcctgcggcaacgagatgagttcgatctgttggtcgccggcgaaatttgtcgattcagcgccctgatagaggaattggaggaaaagaacgaacggccagctcgggagctacttacagacatccggagcacgttgataagatgcgagactcggaagtgtcggaaaccagtggctgtgtcgcccgaactgggccagcggatacgtgattttccccagcaggccctgcccctgcagcgcgagatgaaaatgtttctggagaagctttgttttgagttggactacgaacccgcccatatctccctggacccacagaccagccatcctaagttgctgcttagtgaggaccatcagcgggctcagttttcttataagtggcagaactctccagacaacccccagcgctttgaccgcgccacctgtgtgctcgctcacaccggcatcacgggcggcagacatacttgggtcgttagtatcgaccttgcacacgggggaagttgcacagtcggggtcgttagtgaggacgtgcaaagaaagggtgaactcaggctgcggcctgaagagggtgtgtgggccgtccggctggcctggggatttgtaagtgcactaggttccttcccaacccgtcttacattgaaggagcagcctagacaggtgagagttagcttagattacgaagtcggttgggtcaccttcacaaacgccgtaacaagagagccgatctatacatttaccgcatctttcactcgcaaggtaattcctttttttggcttgtggggtcggggaagtagcttttcccttagcagttag

SEQ ID NO: 167926 - DNA, 1446 bp, Artificial Sequence
  derived and/or modified sequence
atggccagtgctgcatcagtgaccagtctggctgatgaggtcaattgtcccatctgccaaggtaccctgagggaacctgtcactatcgattgtgggcacaatttttgcagagcctgccttacgcggtactgtgagattcctgggccggacctggaagagagccccacctgccccctgtgcaaggaaccttttagacctggctcattcagacccaactggcagctcgccaatgtggtggagaacatcgagaggctacaactcgtatcaaccctggggttgggagaagaggatgtatgtcaggagcacggagagaagatctatttcttttgcgaagatgacgagatgcagctttgcgtggtgtgtagagaggcaggggagcacgcaactcatacgatgagatttctggaagatgctgccgccccatatcgggaacagatccacaaatgcttgaagtgcttacggaaagagagagaggagatccaagaaatccaatcccgagaaaacaagcgaatgcaggtactgctcacgcaggtttctacaaagcggcagcaggtcattagcgaattcgcacacctgagaaaatttttggaggagcagcaatccatacttctggcccaattagagtctcaggacggggatatccttcgacagcgggatgaatttgacctcctggtggccggtgagatctgtcgttttagtgctttgattgaggaactcgaggaaaaaaatgaaaggccagctcgagaactcctgacagacatcagatctacactcattcggtgtgaaacccgaaagtgccggaaaccggttgccgtcagccccgagctcgggcagagaatacgggatttccctcagcaagcactgccattgcagagagaaatgaaaatgtttctggagaagctttgtttcgagctcgactatgagccagctcacatatcgctcgaccctcaaaccagccaccccaaactgctgctgagtgaagatcaccagcgcgcccagttctcctataaatggcagaactcgcctgataaccctcagaggttcgaccgcgccacctgcgtactcgctcacaccggtattacaggcggcaggcacacctgggtggtctcgatcgacctggcacacggaggatcctgtaccgttggagttgtgagcgaagacgtgcaacggaaaggggagctcagactgagacccgaggagggagtttgggcggtacggctagcatgggggttcgtgagtgctttgggcagcttccccacaaggctgactctcaaagagcagccgcgccaggtgagagtatctctggactatgaggtcggctgggtgacgtttacgaacgcggttaccagagagccaatttacacattcaccgcaagttttacccgcaaagtcatcccgttttttgggctgtggggacgtggcagttctttttccttgagttcttag

SEQ ID NO: 167927 - DNA, 1446 bp, Artificial Sequence
  derived and/or modified sequence
atggcatcggcggcgtcagtgacctcattagcagacgaggtgaactgcccgatctgccagggaacactgagggagcccgtgacgattgattgtgggcataacttttgccgggcctgcctcacccggtattgcgagattccagggcccgatcttgaggaaagtcctacttgccctctttgcaaggaaccatttaggcctggtagtttcaggccgaactggcagctggctaatgtcgtggagaatattgaacgcttacagctggtgtccactcttgggttaggtgaggaggatgtctgtcaggagcacggagagaagatctattttttttgtgaagacgatgaaatgcaactgtgtgtagtctgcagagaggcaggggagcatgcaacacataccatgaggttcctggaagatgcagctgcaccctatcgggagcaaattcacaagtgcctgaagtgcctcagaaaagaaagggaggaaatccaagagattcagtcaagagaaaataagcgtatgcaggtgctgcttacacaggtaagcaccaaacggcagcaggtcatcagcgaatttgctcacctacgtaagttcctggaggaacagcagagtatccttctggcccaactagagagccaggatggagatatcctgcgacagagggatgagtttgacctgctggtcgcaggtgagatttgcaggttctctgcacttatcgaagagctggaggagaagaacgaacgccctgcccgggaattacttaccgatattcggtctactttaatccggtgtgaaacaagaaagtgccgtaagcctgttgccgtttcacccgaactgggtcaaagaatccgcgacttccctcaacaggccctccccctgcaaagagagatgaagatgtttctggagaaactgtgtttcgagctggactatgagccagctcatatttccttggacccacagacaagtcatcccaagctattgctatctgaggaccatcagcgggcccagttttcctataaatggcaaaattctcctgacaacccgcaacgattcgatcgcgcaacatgcgtgctggcacatacaggcattacggggggcaggcacacctgggttgtgtcgatcgacttggcgcatggcggctcatgtacagttggggttgtgtctgaagatgttcagagaaagggggagttacggctgaggcctgaggaaggggtatgggcagtaagactagcttggggatttgtctcagctttgggcagctttcctacgcggctcacactgaaggaacagcctcgccaggtgcgggtctcgctggattatgaggtgggctgggtgacattcacaaatgccgtaactcgagagcccatctatacatttacggccagcttcacccgaaaggtgatccccttctttggtttatgggggagaggatcctccttcagtttgtccagctag

SEQ ID NO: 167928 - DNA, 1446 bp, Artificial Sequence
  derived and/or modified sequence
atggcgtccgctgcctccgtgacaagcctcgcagatgaggttaattgtccaatctgccagggcacactgcgtgagccagttacgattgattgtggacacaacttctgtagagcatgtctgaccagatactgcgagatacccggaccagatctggaagagagccccacctgtcccttgtgcaaagaaccttttagacctggaagcttccggcctaattggcagctcgcaaacgtagttgaaaatatcgagagattgcagttggtatctacacttggactgggcgaggaagatgtgtgccaggagcatggggaaaagatatacttcttttgcgaggatgacgagatgcaattgtgtgtggtgtgtcgagaggccggcgagcacgctacccacacgatgcgcttcctggaggacgctgcggcaccgtacagggaacagattcacaagtgcctcaaatgtctgaggaaagagcgggaggaaatccaggagatccagtcgcgagagaataaacgtatgcaggtgcttttgacccaggtgtctacaaagcggcagcaggtgatctccgagtttgctcacctgaggaagtttctggaagagcagcaaagtattttactggctcagctggaatcccaagacggcgacattctgagacaacgggacgagttcgatctactggtggcaggggaaatatgcaggttttcagcgctgatagaggagttggaggaaaaaaatgagagaccggctagagagttgcttacagatattagaagcaccctaattcgatgtgaaactcgaaaatgccgcaagccagtggccgtgtctcctgagctcgggcagagaattcgggattttccacagcaagccttaccccttcagcgagagatgaagatgttcttggaaaagctgtgcttcgagctcgattatgagccggcgcacataagtctggacccgcaaacaagtcaccccaaattgctgcttagtgaagatcaccagagggctcagttttcatacaaatggcagaatagtcctgacaacccacagcggttcgacagggcaacttgcgttctggcccacaccgggatcacaggaggtcggcacacatgggtggtgagtatcgatctggctcatgggggcagctgcaccgtgggagtggtgagtgaagacgtccaaagaaagggcgagctcaggctgaggcccgaggagggcgtctgggctgtaagactagcctggggctttgtgtcagcgctgggctccttccccacgcggttgactcttaaggaacaaccgagacaggtgcgggtgtcactcgattatgaggtgggatgggtaacatttaccaatgccgtgacccgtgagcccatttatacgttcaccgcttcctttaccagaaaagttatcccctttttcgggctctggggtcgcgggagctccttctcactcagcagttag

SEQ ID NO: 167929 - DNA, 1446 bp, Artificial Sequence
  derived and/or modified sequence
atggcctcagccgccagtgtgacctctctggctgacgaggtgaattgccctatctgtcaaggcaccctgagagagcccgtaacgatcgactgtggtcacaacttctgtagagcttgcctgacccggtactgtgaaattccagggcccgatctggaggagtcccctacatgtccgctgtgcaaagagcctttcagaccgggcagtttccgacctaattggcagcttgccaacgtggtggagaatatcgaacggttgcagctcgtctccacgctgggactgggagaggaggacgtttgccaggagcacggcgaaaagatctactttttttgcgaagacgacgagatgcagctctgtgtggtgtgccgagaggccggagaacatgctacacacaccatgagattcctcgaagacgccgctgctccctatagggagcagatccacaaatgcctaaagtgcctccggaaagaacgcgaggagatccaggagatccagtcaagagagaataaacgaatgcaggttctgcttacccaggtgtccactaaaagacaacaagtaattagcgaatttgcacatctgcgaaagtttctcgaggaacaacaaagcatcttattagcacagttggaatcccaggatggcgatattttgagacagcgagacgagttcgatttactggttgctggcgagatttgccgttttagcgcgctgatcgaggagctggaggagaaaaacgagagaccagcccgtgaattgttgactgatatccggtctaccctcatacgctgtgagacgcggaagtgccgcaaaccagtggcagtaagtcctgaacttgggcaacgaattcgggatttcccccagcaggccctgccactgcaacgcgaaatgaaaatgttcctggaaaaactttgcttcgagctggattacgaacctgcgcacatatctctggaccctcagacctcccacccaaagctactgctctccgaagaccaccagagagcccagttttcctataagtggcagaattcacccgataacccacaaagattcgacagagcaacctgtgtgttggctcacactgggattactggggggcgtcacacttgggtggtgtcgatcgacctggcgcacgggggttcttgtacggtaggtgtcgtcagcgaggacgtgcagcgcaaaggggagttgagactgcgacccgaggaaggcgtgtgggctgtccggctggcctgggggttcgtatccgcactcggtagtttccctactcggctcactctcaaagaacagcccaggcaggtacgcgtttctctggactatgaggtaggttgggtgaccttcactaacgcagtgaccagagagcccatctatacatttacagccagctttaccaggaaggtgattccttttttcgggctgtggggccgggggtcctctttttcactatcctcatag

SEQ ID NO: 167930 - DNA, 1446 bp, Artificial Sequence
  derived and/or modified sequence
atggcctccgccgcttctgtgacgagcctggccgatgaagtgaactgtcccatctgccagggaacacttagagaacctgtgacaattgactgtgggcataatttttgtcgagcatgcctgacacgttactgcgagattcctggcccagacttggaggaatctccaacctgtcccctgtgcaaggagccctttagacccggctcgttccggcccaactggcagttggccaacgtggtcgagaacatagagcggctgcagttggtgtccactctcggcttaggggaggaggatgtgtgccaggaacatggcgagaagatttactttttctgcgaggacgacgagatgcagctgtgcgtggtatgtagagaggccggggagcacgccacccacacaatgagattcttggaggacgctgcagctccttacagagaacaaattcataagtgtttgaagtgcctccgcaaggagagggaagagatccaggagatccaatcaagagaaaacaagcgcatgcaggtgctgcttacgcaggtctctaccaagaggcagcaagtgattagcgagttcgcccacttgagaaagtttctcgaagagcagcagagtatcctactggcacagctagagtctcaggatggtgacatactcagacaaagggacgagttcgacctcctcgtcgccggggagatttgtaggttttctgccctaattgaggaactggaggagaagaacgaacgtcctgcgcgggagcttcttactgacattagatcaaccttgattcggtgcgaaaccagaaagtgcagaaagcccgttgccgtctctcccgagcttggccaaaggattcgagacttcccacagcaggctttgccccttcaacgagaaatgaagatgtttcttgagaagctctgcttcgaacttgactatgagccggcccatatctctttagacccccagaccagccatcccaagctcctgctgagcgaggaccaccaacgagcgcagttctcgtacaaatggcaaaactcacccgataacccacagcgctttgaccgggccacctgcgtgctcgcacacaccggcatcactggcggccggcatacttgggtggttagcatagatctcgcccatgggggcagctgtaccgttggggtggtgtccgaagacgttcagaggaagggggagctaaggctgcggcccgaggaaggagtttgggccgttaggctcgcatggggcttcgtctccgcgcttggctcttttcccacccgcctcacactgaaagaacagccgaggcaggtacgggtgtcgctggactatgaagtaggatgggtaacgtttacaaacgctgtaaccagggagccaatatacacctttactgcctcgtttacccggaaggtaataccgtttttcgggctgtggggtaggggaagctccttcagtctctcttcctag

SEQ ID NO: 167931 - DNA, 1446 bp, Artificial Sequence
  derived and/or modified sequence
atggcaagcgctgctagcgtcaccagcctagcagacgaggtgaactgccctatctgtcagggaaccctgcgggagccagtgactattgactgtgggcataacttttgtagggcttgccttacgcgctattgcgaaatccctggcccagatctggaagaaagcccgacgtgccctctctgtaaggaaccattccgtcccgggagtttcaggccaaactggcagcttgctaatgtcgtcgagaatattgaacggcttcagctcgtgagcactctgggactgggtgaggaggacgtgtgccaagaacacggtgagaaaatatactttttctgtgaggatgacgagatgcagttatgcgtggtatgtagggaggcgggtgaacacgccactcataccatgcgatttctggaagacgctgctgcaccataccgagagcaaattcataaatgcttgaagtgcctccgcaaggaacgtgaagaaattcaggagatacagtccagggagaataagaggatgcaagtgctgctgacccaggtttctacaaaaaggcaacaagttattagcgaattcgcccatcttagaaaatttctggaagaacagcagtcgatcctgctcgcccaactggagtcccaagacggcgatatcctgcgccagagagacgaattcgacctgctggtcgctggggagatctgccggttttctgccctcatcgaagaactggaagaaaagaatgagaggcctgctcgagagctcctgaccgatatccggtcaactctgatccgatgcgaaactaggaaatgccggaagcctgttgctgtctctcccgagctaggccagcgaatccgcgatttccctcaacaggcactgcctctgcagcgggagatgaagatgtttctggaaaagttatgttttgaattggattacgagccagctcacataagtctagaccctcaaacttcacaccctaagctgctgttaagtgaggatcatcagagagcccagttcagctataagtggcagaattcccctgacaacccgcagcgtttcgatcgtgcaacctgcgtgctcgcacatacgggcataactggtgggcgtcatacttgggtggtgtcaatcgatctggcccatgggggcagctgtacggtgggggtggtgagcgaagatgttcaaagaaagggtgaactacggcttcgccccgaggagggagtgtgggcagtcagactggcctgggggttcgttagtgctctaggctcattccccacccgcttgacactgaaagaacagccaagacaggtcagggtgtccctggactacgaggtgggatgggtgaccttcaccaatgctgtgaccagggagcccatatataccttcaccgcatcattcactcggaaggtaatccctttctttggtctgtgggggagaggtagtagcttctccctcagtagctag

SEQ ID NO: 167932 - DNA, 1446 bp, Artificial Sequence
  derived and/or modified sequence
atggcttcggctgccagcgtcaccagcctagccgatgaagttaattgcccgatatgtcagggtacgctgagagagccagtgacaatagactgtggacataatttttgcagagcctgtttgaccaggtactgcgaaattcctgggcccgacctcgaagaaagcccaacttgccccctgtgcaaagagccctttaggcctggctcctttcgtcccaactggcagcttgctaatgttgtggagaacatcgagcgtctgcagctagtgagcacactggggctcggcgaggaggatgtctgtcaagaacacggcgagaaaatatacttcttttgtgaagacgacgagatgcaattatgcgtagtatgccgtgaggctggcgaacatgccacccacactatgagattcctggaggatgccgcagctccctaccgagagcagattcacaaatgtctgaagtgtttaagaaaggagcgcgaagagatccaagagattcagtcaagggagaacaaacgcatgcaggtccttcttacacaggtgagcaccaagcgacaacaggtcatcagcgagttcgcccacctccgaaaattcctggaagaacagcagtctattcttctggctcagcttgaaagtcaagacggggacatcctcaggcaaagggatgaattcgatcttctcgtggcaggcgagatatgcaggtttagcgcactaatcgaagagcttgaggagaaaaatgagcgccccgcaagagaactgttgactgatatccgatccaccctaatccgctgcgagaccagaaagtgcaggaaacctgtcgccgtttctcccgaacttggtcagcgcattcgcgacttcccccagcaggcgctgcctctccagcgagaaatgaagatgtttctggaaaaccttcccaatcatctagtcattcctaccgcccacatctccctggacccccagaccagtcaccctaaactgttgttgtcagaggaccaccagcgggcgcagttctcttacaaatggcaaaattcccccgacaatccccagagattcgacagggccacctgtgtccttgcgcacactgggattacaggtggccgacatacctgggtagtctccatcgacttggcccacgggggttcttgtaccgtgggggtcgtgtccgaggatgtccaacggaagggagagctcagactgcgaccagaggagggcgtatgggctgttcgcctagcttggggctttgtatccgctctgggatcgtttcccacccgtctgactcttaaggagcagccccgccaggtgcgggtgtcattggattacgaggtcgggtgggtgaccttcacaaacgcggtaaccagggagcctatttatacgttcaccgcaagtttcacgcgcaaggtgatcccattctttggactgtggggcagaggctcgtccttcagtttaagctcctag

SEQ ID NO: 167933 - DNA, 1446 bp, Artificial Sequence
  derived and/or modified sequence
atggcttcagcggcatccgtgaccagtctagcagacgaagtgaactgccctatttgccagggcaccttgcgtgagcccgtgaccatcgactgtggccacaacttttgtcgagcatgcttaacccgctactgcgagattcccggccccgacttagaggagtcccctacctgtcccttgtgcaaggagccctttaggccaggaagtttccgccccaactggcagcttgccaacgtggtggagaatatcgagcggcttcaactggtcagcactctgggcctcggagaagaggacgtgtgccaggagcatggcgaaaagatctacttcttttgtgaggatgatgaaatgcagctgtgcgtggtttgccgggaagcgggtgaacacgccactcatacaatgcggttcctcgaggatgcagccgcaccgtacagagagcagatccataagtgtctgaagtgcctgaggaaggagcgtgaagaaattcaagagatccagagccgggagaacaaaagaatgcaagtgctactcacacaagtcagtactaagagacagcaggtcatcagtgagtttgcgcacctgcgaaaatttctggaggagcagcagtcgattctcttggcccagcttgagtcccaggatggagacattctcagacagcgtgatgaatttgacctcctggtggcgggggagatttgtaggttctccgctctgattgaagagctagaggagaagaatgagaggcctgcccgagaattgctgactgacatcaggagcactctgatccggtgcgaaacacggaagtgccgaaagcctgttgccgtttctcccgagctgggtcaaagaatccgggactttccgcagcaggcgctacctttgcagcgggagatgaagatgtttctcgagaatctgccaaatcacctcgtgattcctaccgctcatattagccttgatccccagactagccaccctaagctgctattgagtgaagatcatcagcgggcccagttctcatataagtggcagaactccccggataatccacaacgcttcgatcgggcgacctgtgttcttgcacatacagggattaccgggggtaggcacacatgggttgttagtatagatctcgcacacggcggatcctgcacggtcggagtggtcagtgaggacgttcaacgcaaaggggagttgcggttgcgtcctgaagaaggcgtgtgggccgtgcgactagcctggggatttgtgtctgccctagggtcatttcctacccggcttactctgaaagaacaaccccgccaggtgcgggtgtcattggactacgaagtaggatgggtgactttcaccaacgccgttacccgggagcctatctacacgttcaccgcctcctttactaggaaagtgattcccttttttggactttggggaaggggttcttccttttccctgtcctcttag

SEQ ID NO: 167934 - DNA, 1446 bp, Artificial Sequence
  derived and/or modified sequence
atggcgtccgccgcctcagttacctcactggccgacgaagtcaactgtccaatctgccaggggacactgcgcgagccagttaccattgattgcgggcacaacttttgtcgtgcatgtttgacacggtactgtgagattcccggacccgaccttgaggagtctcctacctgtcctctgtgcaaggaaccttttcggccaggctcattccgacccaattggcagctggccaatgtcgtggagaacatagagcgcctgcagctggtttctactctgggcctgggggaagaggatgtatgtcaagagcacggagagaagatctatttcttctgtgaggacgatgaaatgcaactgtgtgtagtgtgccgggaagctggagaacacgcaacccacactatgcgcttcctggaggacgccgcggccccatacagagaacaaatacacaaatgccttaaatgtctgaggaaggaacgggaggaaattcaggaaattcagtcccgggagaacaagcgaatgcaggtgttgctcacccaggtgagcacaaaacgacaacaggtgatcagcgaattcgctcatttacggaagttcctggaggagcagcagtccattctgcttgctcagctcgagtctcaagatggcgatattctcaggcagcgcgatgagtttgacctcttggtggctggagaaatttgccgttttagtgccctgattgaagagttggaagagaaaaatgaacgaccagctcgagagctcttaactgacatacggtccactctcattaggtgtgaaacgaggaagtgccggaagcctgtcgcagtctcacctgagttgggccagcggatccgcgattttcctcagcaggccctgccgttacagcgagagatgaaaatgttcctcgagaatcttcccaaccacctggtgatccctacagcccatataagccttgacccacagacatcccacccaaagcttctgctgagtgaggatcaccagcgggcgcagttcagttataagtggcagaacagtcccgacaaccctcagcggtttgacagagctacctgcgtcctggcccacaccgggatcacaggaggacgacacacgtgggtcgtgtccatcgacctggcacatgggggatcttgtactgtcggggtggttagcgaagacgtgcagcgaaagggagaattacggctcaggccagaagaaggcgtgtgggccgtgcgcctggcctgggggttcgtatctgccctggggtcatttccaactcgcctaacactgaaagagcagccaaggcaggtccgcgtctctttagactacgaagtgggctgggtgacgttcacaaacgcggtaaccagggaacccatctacacatttaccgcaagcttcaccaggaaggtgattcccttctttggcctttggggaagaggcagtagcttctcacttagcagctag

SEQ ID NO: 167935 - DNA, 1446 bp, Artificial Sequence
  derived and/or modified sequence
atggcgtccgccgcctccgtcacctctctggctgacgaggttaactgtccaatttgtcaggggacactccgggaacccgtgaccattgattgcggccacaacttctgtcgtgcttgtctgacacgatattgcgaaatcccgggtcctgacctcgaagaatccccaacttgccccctgtgtaaagaacctttcaggcctgggtcttttaggcccaattggcagttggctaatgtagtggaaaacattgagcgcctgcagctggtgtccacgctgggtctgggagaagaagacgtctgccaagaacatggcgagaagatttactttttttgtgaggacgatgaaatgcagctctgcgtggtctgcagagaggcaggcgaacacgccacacataccatgagatttttagaggacgccgctgccccctaccgggagcaaatacataaatgtctgaaatgccttaggaaagagcgggaggagatccaagagatccagagccgcgagaacaagaggatgcaggtgctgctcacacaggtgtctacaaagaggcagcaggtcatttcagagtttgcgcacctgaggaagtttctggaggagcaacagagcatcctgcttgcgcagctggagagtcaggatggtgatattcttcggcagcgcgatgagttcgacctgctggttgcaggcgaaatctgcagatttagcgcactcatcgaagaactggaggagaagaacgagaggcctgccagagagcttctcactgatattaggagtactctgatcaggtgcgagactcggaagtgtcgaaaaccagttgcagtgtccccagagctgggtcagagaattagggattttcctcagcaagctctgcccctacagcgggaaatgaagatgttcctcgagaacctgcccaatcacctcgtcatccccaccgcccacatctccctggatccccaaaccagccaccccaagttgctcctgtcagaggatcatcagagagctcaatttagctacaaatggcagaactctcccgataatcctcaacggttcgaccgcgcgacatgtgtactagctcataccggaattactggaggccggcatacttgggtcgtcagcatagatcttgcacatggaggctcctgtactgtgggggtggtgtccgaggacgtgcagcgcaagggcgaactgcgtcttcgaccagaggaaggcgtttgggcagtgcgactggcttggggcttcgtgtccgctttgggatctttccctactcgactgacgctaaaagaacaacccaggcaggtgagggtgagcctggattacgaggttggctgggtgacatttaccaatgcagtaacccgggagcctatctacacattcacagcttcttttacaaggaaagttattcctttttttggattgtggggtagaggctcctccttctcactttcttcctag

SEQ ID NO: 167936 - DNA, 1446 bp, Artificial Sequence
  derived and/or modified sequence
atggcctcggccgcttctgttacctcgcttgccgatgaggttaactgcccaatctgccagggaactctaagagaacctgttacgatagactgcggacataacttctgcagagcttgcctgactcggtactgtgagatcccgggaccagacctggaggagtcacctacctgcccactctgcaaagagcctttcaggccaggaagctttaggcccaactggcaactcgcgaacgtcgtcgagaacatagagaggctccagctggttagtaccctgggcttaggcgaagaagacgtctgtcaggaacatggtgaaaaaatctacttcttctgtgaagatgacgaaatgcagctgtgcgttgtgtgtcgggaggcaggtgaacatgccacacacacaatgagattcctggaagacgccgcagcgccttaccgcgaacagatacataaatgcctcaagtgtcttcggaaagagagagaagagattcaagaaatccaatcacgagaaaataagcggatgcaggttttgctcacccaagtaagcactaagagacagcaggtgatctctgaattcgctcatcttaggaagttcttggaggagcagcagtccatactcttagcacagcttgaatcacaagatggcgacattttgaggcagagggacgaatttgacttactggtagccggggaaatatgccgctttagcgcactcattgaagagctcgaagaaaagaatgaacgacctgctcgagagctcctgactgacatccgctccaccctcatccgctgcgagactcgtaagtgccgtaagccagtcgcggtgagtcccgaactgggtcagagaattcgcgactttccacaacaggccctgcctttacagcgtgaaatgaagatgtttctggaaaacctgcctaaccaccttgtgattccgactgcacacatcagccttgatcctcagactagccaccctaaattgctactgagcgaagatcatcagagggctcaatttagctacaagtggcagaattcccctgacaatccccagcggttcgacagggcaacctgcgtgctcgctcacaccggtatcactggaggtaggcacacctgggtggtgtcaatcgatctggcccacggaggcagctgcactgttggtgttgtgagcgaggatgtgcagcggaagggtgaactacggctgaggcccgaagaaggtgtttgggccgtgcgtctcgcctggggctttgtgtctgcgttaggaagcttcccaacaaggctgactttgaaagaacaacccagacaggtccgagtgtctctcgactacgaggtgggatgggtgacatttactaacgccgtgacgagagagcctatctatactttcactgcaagctttacacgcaaagttattccgttttttggcctttggggaaggggaagcagcttttccctgtccagctag

SEQ ID NO: 167937 - DNA, 1446 bp, Artificial Sequence
  derived and/or modified sequence
atggcttccgcagctagcgtgacgtccctcgctgacgaagttaattgtcccatctgtcagggcactctccgcgagcctgttactattgactgcggtcataatttttgcagagcatgtctgaccagatactgtgagattccggggccggatctggaggagagccctacatgtccgctgtgtaaagaaccatttcggcctgggtcatttcgacccaactggcaattagctaacgtggtcgagaacattgagaggctacaattagtatcaaccctgggcctgggcgaggaagatgtgtgtcaggagcatggcgagaaaatatatttcttttgcgaggacgacgaaatgcagctttgtgtcgtctgtcgcgaagctggagaacacgccacacacactatgaggttccttgaggacgctgcagctccttaccgagagcagattcacaagtgtttgaaatgtcttcgtaaagagcgagaggaaatccaggagattcaaagcagagagaacaaaaggatgcaggtgctcctcacccaggtgtcaaccaaacgccagcaggtcatctctgagttcgctcatctgcggaagtttctcgaggagcaacagtctatactgctggctcagcttgaatcccaagacggcgatatactaaggcagcgggatgagttcgacttgttagtggcgggtgagatttgccggttctctgccctgatcgaggaattggaagagaaaaacgagagaccagcccgcgaacttctaaccgacatccgcagcacactgattagatgcgagactcgaaaatgtcgcaagcccgtcgcggtgagtcccgagcttggacagcgaatccgcgatttcccccaacaggcacttcctctccaacgggagatgaagatgtttctggaaaaccttcccaaccaccttgtcattccaacagcccatatttccttggacccccaaactagccatccaaagctactgctgagcgaggatcatcagcgcgcccagttttcctacaaatggcaaaatagtcccgacaatcctcaacgttttgaccgtgctacctgtgtgctggcccacaccggaatcaccggcgggcgccatacctgggtggtgtccattgatctggctcacggggggtcctgcaccgtcggcgtggtgagtgaggacgtgcagaggaaaggtgagcttcgcttgaggcctgaggaaggcgtgtgggctgtcagactagcctgggggtttgtgagtgcacttgggagtttcccaacaagactgaccctgaaagagcagccgcgtcaggtccgagtgagcctggactacgaggtgggctgggtcacattcacaaacgctgtaactagagaacctatatatacttttacggcatctttcactcgaaaggtaattcccttctttggcctgtggggccggggttccagcttctctttgagttcatag

SEQ ID NO: 167938 - DNA, 1522 bp, Artificial Sequence
  derived and/or modified sequence
gagtgtgtgacccagcccttcccccgtggccaagcagagagagtggccttgaggaagccatagcagcaggaccagcatggcctctgctgcctctgtgaccagcctggcagatgaagtcaactgccccatctgtcagggtaccctgagggagccggtcactatcgactgcggccacaacttctgccgggcctgccttacccgctactgtgagataccaggcccagacctggaggagtcccctacttgcccactctgcaaagaacccttccgtcctgggagcttccggcccaactggcagctggctaacgtggtggagaacattgagcgcctccagctggtgtccacactgggtttgggagaggaggatgtctgccaagagcacggagagaagatctacttcttctgtgaggatgatgagatgcagttgtgcgtggtgtgccgggaggctggggagcacgctacccacaccatgcgcttcctggaggatgcagcggctccctatagggaacaaatccataagtgtcttaaatgtctaagaaaagagagagaggagattcaagaaatccagtcaagagaaaataaaaggatgcaagtcctcctgactcaggtgtccaccaagagacaacaggtgatttctgagttcgcacacctgaggaagtttctagaggaacagcagagcatcctcttagcacaattggagagccaggatggggacatcttgaggcaacgggatgaatttgatttgctggttgctggggagatctgccggtttagtgctcttattgaagaactggaggagaagaatgagaggccagcaagggagctcctgacggacatcagaagcactctaataagatgtgaaaccagaaagtgccggaaaccggtggctgtgtcgccagagctgggccagaggattcgggactttccccagcaggccctcccgctgcagagggagatgaagatgtttctggaaaatctgcctaatcacctggttatccccacagctcacatttctctagaccctcagacttcccaccccaagctcctcttgtccgaggaccaccagcgagctcagttctcctacaaatggcagaactcaccagacaacccccaacgttttgaccgggccacctgtgttctggcccacactggcatcacaggggggagacacacgtgggtggtgagtatagacctggcccatgggggcagctgcaccgtgggcgtggtgagcgaggatgtgcagcggaagggggagcttcggctgcggccagaggagggggtgtgggctgtgaggctggcttggggcttcgtctcggctctgggctccttccccacacggctgaccctgaaggagcagccccggcaggtgagggtgtctcttgactatgaggtgggctgggtgaccttcaccaacgctgtcacccgagagcccatctacaccttcactgcctccttcactaggaaggtcattcccttctttgggctctggggccgagggtccagtttctccctgagctcctga

SEQ ID NO: 167939 - DNA, 1446 bp, Artificial Sequence
  derived and/or modified sequence
atggccagcgccgccagcgtgaccagcctggccgacgaggtgaactgccccatttgccaaggaaccctgcgcgaaccagtgactattgactgtggacacaatttttgtagggcctgcctgacacgctattgcgaaatccctgggcccgacctcgaggaatctcctacctgtccactctgtaaggagccattccgccccggctccttccgacctaactggcaattagccaatgtagtggagaacattgagaggctgcagcttgtctccacactcggactgggcgaggaggatgtgtgccaagagcatggcgagaagatatacttcttctgcgaggacgatgagatgcaattatgcgtcgtgtgcagggaagccggggagcacgccactcatacaatgagatttttagaggatgcagcagctccctatagggaacagatccataagtgcttaaaatgccttagaaaggagcgggaggaaattcaggaaatacaatcgagggaaaataaacgcatgcaggtcctcctcacacaagtttcaacgaaacgccagcaagtcatttccgagttcgcccaccttagaaagtttctggaggagcagcaaagcatcctactcgctcagctggagagccaagacggcgacatcctcagacagagggacgaattcgacctgctcgtggcaggtgagatctgcaggttttccgccttgattgaggaactggaggagaagaacgagaggcctgcgcgagaactcctcacagacatccgttcaacgttgattcgctgcgaaaccaggaagtgtcggaagccggtggccgtctctcccgaactgggtcagcggatccgggactttccccaacaggccctgccactgcagcgcgaaatgaaaatgttcctggagaacctacccaatcacttggtgatacccacagcccatatcagcttagatccacagacctctcacccaaagctcctcttgtctgaagatcaccaacgcgcacagtttagctataaatggcagaatagtcccgacaatcctcaacgctttgaccgcgccacctgtgtcctggcccacactggtataaccggcggccgtcatacatgggtggtctctatagacctggcacacggaggaagttgcacagtgggtgttgttagcgaagacgtccagcgaaagggtgagttgaggcttcggccagaggaaggagtctgggcagttcgcctggcctggggtttcgtctccgctctagggtcctttcctaccagactcacattgaaggagcaacctcgacaggtgagagtcagtctggactacgaagtgggatgggtgaccttcacaaatgccgtgactagggagcccatttatacatttaccgcatcgttcactagaaaggtaattcccttcttcgggctttgggggagggggagcagcttcagtctgagctcttag

SEQ ID NO: 167940 - DNA, 1446 bp, Artificial Sequence
  derived and/or modified sequence
atggccagcgccgccagcgtgaccagcctggccgacgaggtgaactgtcctatttgccagggaacactccgagaaccagtgactatcgattgtggccataacttttgtcgagcatgcctgacccgttactgtgagattccagggcctgacctcgaagaatcacctacctgccccctttgcaaagagccgttcagacctgggtcatttcgccccaactggcagcttgccaatgtagtagagaacattgaaaggctacagctggtttccactctgggtctgggcgaggaagatgtatgccaggagcatggcgagaagatttattttttttgcgaagacgatgagatgcaactttgcgtcgtctgtcgtgaggcaggggaacacgccacccacacaatgaggtttttagaggacgccgccgcaccatacagggagcagatccacaaatgcttgaagtgtctacggaaggagagagaggagattcaagagattcagtcgcgcgaaaataaacgcatgcaggtgctcctgacacaggtgagtactaagaggcagcaggttatttctgagttcgcacacctccggaaattcctggaggagcagcaatccatactgcttgcccagttagaatctcaagatggcgatatcttgcgccagcgtgatgagttcgacctcctagtggctggtgagatatgccgcttttctgccctgatcgaggagttggaggaaaagaacgaaaggcctgcgcgcgagcttttaaccgatatccgcagtactttgattcgttgcgagacccgtaagtgccggaagccagttgccgtgtcccccgagttgggacagcggattcgcgatttcccgcaacaggctctgcctttgcaacgggaaatgaagatgttcctggaaaaactgtgctttgagcttgattacgagcctgcccacatttccctcgacccacaaacctcccatcccaagttacttctctccgaagaccaccaaagagcgcagttcagttacaagtggcagaattcgcccgataatcctcagcggttcgatagggcaacctgtgtacttgcacatactggcattaccggcggccggcacacgtgggtggtgtcgatagacctggcacacgggggctcttgtaccgtgggagtcgtttctgaggacgtccaacggaagggcgaactgagacttaggcccgaagaaggggtttgggctgtcagattggcctggggattcgtttcggcactggggtctttcccgactagactgaccctgaaggagcaacccagacaagtgagagtgagccttgactatgaggtgggctgggtcacgtttacaaacgccgtaacgcgagaaccaatctacacattcaccgcctctttcactaggaaagtcatcccattttttgggctttggggtcgcgggtcaagtttttctctcagttcatag

SEQ ID NO: 167941 - DNA, 1446 bp, Artificial Sequence
  derived and/or modified sequence
atggccagcgccgccagcgtgaccagcctggccgacgaggtgaactgcccaatatgccaaggtacgcttagagagcctgtgacaattgattgtggccacaatttctgcagagcctgcctgacacgctactgcgaaattcctgggccggatcttgaagagagccccacctgccctttgtgcaaggagccattccggcctggcagttttagacccaactggcagctcgcgaacgtcgtcgagaatattgagcgtctccagctggtcagcacactcggcctgggcgaggaagatgtgtgccaggaacacggggaaaagatttacttcttttgcgaggacgacgagatgcagttgtgcgtcgtctgcagagaagctggtgaacatgcgacgcacactatgcgttttctggaggacgctgctgccccctaccgagagcaaattcataagtgcctgaagtgccttcggaaggagcgagaggaaatccaggagatccaaagccgggagaataagaggatgcaggtcctgctgacacaggtcagcactaagagacagcaggtgatctccgaatttgctcatcttaggaagtttctggaggagcagcagtctattttgctggcccagctagagtcacaggacggagatattctgcgacagcgggatgagtttgatctcctggttgccggcgagatatgccgattttctgccctgatcgaggagctggaagaaaaaaatgaacgacccgcgagagaactactcaccgatataagatcgacactgattagatgcgaaacccgcaaatgtcgcaaaccagttgccgtgtcccctgaattgggacagaggattagggacttcccccagcaggctctgcccttacaacgtgaaatgaaaatgttcctggagaagctctgtttcgaactcgattacgagcccgcccacatctcacttgacccacagacgtcacatcccaagttactactctccgaagatcatcagcgcgcccagttttcgtataaatggcagaatagtccagacaatccacaacgattcgatagagccacgtgcgttctcgcccatacgggtattaccggagggcgccacacatgggtggtgtctattgatttagcccacggcggtagttgtaccgtgggcgttgtgtccgaagatgtgcagagaaagggggaactgaggcttcgtcctgaagaaggggtgtgggcagtgcggctggcctggggctttgtgagtgccctgggctcatttcccacacggctgacactcaaggagcaacccagacaggtccgagttagcctcgattatgaggtggggtgggtcacttttaccaacgcagtgacacgggagcccatatacacattcactgccagcttcacccgcaaagtgatccccttttttgggctttggggacgcggcagtagcttttcgctcagcagctag

SEQ ID NO: 167942 - DNA, 1446 bp, Artificial Sequence
  derived and/or modified sequence
atggccagcgccgccagcgtgaccagcctggccgacgaggtgaactgtcccatttgtcaaggaactctgcgagaaccggtgacgatagactgtggccacaacttctgtagagcgtgccttacaaggtactgtgagatccccggcccggacctcgaagagtcgccaacctgccctctgtgcaaagagccattccggccgggatcatttcgcccaaactggcagttagccaacgttgtggagaacatagaaagattacagctcgtttctaccttagggctgggggaagaggacgtctgtcaggagcacggagaaaagatttatttcttctgtgaagatgatgagatgcagttgtgcgtggtctgccgggaagccggcgagcatgccactcacacaatgcgtttcctggaggacgcagctgcgccttatagagaacagatccataagtgtctgaaatgtctgagaaaggaaagagaggaaatccaggaaatccagagtcgagaaaacaaacgcatgcaagtccttttaacccaggtaagtactaaaagacaacaggtgatcagcgagttcgctcacctgaggaaatttctggaagagcaacagtccattctgctggcccaactggagtcacaagatggggacattttgcggcagagggatgaattcgacttattagtggccggggagatctgcaggttttcggcccttatcgaggaactcgaggaaaagaatgagcgaccggcacgggaactgttgactgacataaggtcgaccctgatccgatgtgaaacaagaaaatgcagaaaaccggtggccgtgtcccccgagctgggtcagcggatccgggattttccgcaacaggctctgcctcttcagagggaaatgaagatgttcctggaaaagctgtgcttcgaattggactatgagcccgcacatatcagcctggacccacagactagccaccccaaactgctgctcagtgaggatcatcaaagggcccagttcagttataaatggcagaactcaccggacaatccccaacgattcgatagggcaacatgtgtcttggcacacaccggcatcacaggagggagacacacctgggtcgtgagcatcgacctggctcatggaggcagctgcactgtgggggtagtgagcgaggacgttcaacgtaagggtgagctgcgcttacgccccgaggagggggtctgggcagtgcgcttggcatgggggtttgtttctgccctgggatccttccccacacggcttacactaaaggagcagccgcgtcaggtgagggtgagcctggattatgaggtgggatgggttactttcacaaatgccgtcacccgggagcctatatacaccttcactgcctcattcacccgaaaagtgatccctttcttcgggctgtggggccggggcagcagtttctcccttagcagttag

SEQ ID NO: 167943 - DNA, 1446 bp, Artificial Sequence
  derived and/or modified sequence
atggccagcgccgccagcgtgaccagcctggccgacgaggtgaactgtcccatctgccaggggaccctgcgcgagcctgtgaccatcgactgtggtcacaacttctgtagagcctgcctgacaagatactgcgagatccccggacccgatctagaggaatccccaacttgccctctctgtaaggagccattcagacctggaagtttcagaccaaactggcagttagccaatgtcgttgagaacatcgaacgcctccagttagtgagcacccttggactgggagaggaggacgtgtgtcaggaacacggcgagaagatttactttttttgcgaagatgacgagatgcagctgtgtgttgtgtgccgtgaagctggggagcatgcgacccacacgatgcgctttctggaggatgcagctgccccttaccgggagcagattcacaaatgtctcaagtgtctgaggaaggagcgagaggagatccaagaaatccagtcacgggaaaacaagaggatgcaagtgcttctaacccaggtgtccacgaagaggcagcaagtcatcagtgagtttgcccatctccgcaagttcctagaggagcagcagtcaatcctcctcgctcagttagaaagccaggatggagacattctgcgccagagagacgagtttgacctgctggtggcaggtgagatttgtagattcagcgcactgattgaggaactagaagagaagaacgaaaggcccgcccgggagctcctgaccgatatacggagtaccctgatccgttgtgagactaggaagtgtaggaagcccgtcgctgtttctcccgaactgggtcaacgaatcagggatttcccccagcaggcgctgcctcttcaacgagagatgaaaatgtttctcgaaaagctgtgctttgaacttgattatgagcctgctcatattagcttggacccccagacgtcccacccgaagctcctcttgtctgaagaccatcagagagctcagtttagttataagtggcagaatagtcccgacaacccccagcggtttgaccgcgctacatgtgtgctggcccatactgggatcaccgggggtcgtcatacatgggtcgttagcattgacctagcccacggcggctcttgcactgtgggagtcgtgagcgaggatgtgcaacggaaaggagagctgcgactccggcctgaggagggggtttgggcagtgagacttgcatgggggtttgtgtccgccctgggcagcttccctactcggctgaccttgaaggagcagcccaggcaggtgcgggtctccctagactatgaagtggggtgggtcacctttaccaacgctgtgactagggaacctatctataccttcaccgcatctttcacccgcaaggttatccctttttttggcctttggggccgcggcagctcttttagcctgtcctcatag

SEQ ID NO: 167944 - DNA, 1446 bp, Artificial Sequence
  derived and/or modified sequence
atggccagcgccgccagcgtgaccagcctggccgacgaggtgaactgcccaatttgccaaggcaccttgagggaacctgtgactatcgattgcggacacaacttttgtcgggcatgcctgacacgatattgtgaaatccccggaccagacctggaagagtccccaacctgcccattgtgcaaggagccattcagacctggatctttccgccccaactggcaactcgctaacgtcgtcgagaatattgagcgcctccaactagtgtctactctaggtctgggcgaagaagatgtttgtcaggagcatggagaaaagatttatttcttctgcgaggatgacgagatgcaactgtgtgtggtttgcagggaggcaggcgaacatgccacacataccatgaggttccttgaagatgccgctgccccatatagggaacagatccataaatgcctgaagtgcctacggaaggagcgagaagagatccaggagatccagtccagagagaataaaaggatgcaggtacttttgacacaggtctcgacaaaacgccagcaggtgatcagtgagtttgcacatctccgaaaattcctggaggagcagcaatccatcttgctagcccagctggagagccaagacggggacattcttagacagcgcgacgaattcgacctgttggtcgccggcgaaatctgcaggttttcagcacttattgaagaactcgaggaaaaaaatgagaggcccgcccgcgaactgcttactgacatcagatctaccctaatcagatgtgagaccaggaaatgtagaaaaccagtggccgtgagcccggagttgggacagcgcatccgggacttcccacagcaggccctgcccctgcaacgcgaaatgaagatgttcctcgaaaaactgtgctttgaactggactacgaaccagctcatatctcactggacccacagacaagtcatcctaaactgctgttgagcgaggaccatcagagagcacagttctcttataaatggcaaaatagtcctgacaacccacagagatttgaccgggccacatgcgtgctcgcacacacgggtatcactggcggtcggcatacctgggtggtgagtattgacttggctcatggcgggtcctgcaccgtgggcgttgtatcggaggatgtgcagcggaaaggtgagctccggctgaggccggaagaaggagtgtgggccgtgcgcctagcttgggggttcgtgtccgcacttggcagctttcccacgaggctaacactaaaagaacaaccgaggcaggtgcgcgtgagcctcgactatgaagtgggatgggttaccttcaccaacgctgtcacacgggaaccaatctataccttcactgcaagcttcacgcgaaaggtgatccctttctttggtctctggggtagagggagctcattttcactgtcaagctag

SEQ ID NO: 167945 - DNA, 1446 bp, Artificial Sequence
  derived and/or modified sequence
atggccagcgccgccagcgtgaccagcctggccgacgaggtgaactgtcctatctgccagggaaccttgagggaacctgttacaatcgattgcggccacaacttctgtcgcgcatgcttaacacgctattgcgaaattccaggccccgatttagaggaaagcccaacttgcccactgtgcaaagagccatttcgtcccggtagctttcgcccaaactggcaactggccaacgtggtggaaaatatcgagagacttcaacttgtgtctacgctgggactgggcgaagaggatgtatgtcaggaacacggagagaagatttatttcttttgtgaagatgatgagatgcagctgtgtgtcgtgtgtcgggaagccggcgagcacgcaacacacacgatgaggttcctagaggacgccgccgcaccttatcgcgaacagattcataagtgcctcaagtgcctgcggaaagaaagagaggagatccaggaaattcaaagtcgagagaataagcgaatgcaggtcctccttacccaggtttccactaagcgccagcaagtcattagcgaatttgcccacctccggaagttcctcgaagagcagcaatcgatactgcttgctcagctggagtctcaggatggagatatcctgcggcagcgggacgaatttgacttattggtagcaggcgaaatttgtaggttctcagcccttatcgaggagctcgaggaaaaaaacgagcggccggcaagagaactattaacagatataaggtctaccctcattcgttgtgagactcgcaaatgtcggaaaccggtggccgtatcccctgagctcggccaaaggatccgggacttcccccagcaggcgctgcccctgcaaagagaaatgaagatgttcttggagaagctatgctttgaactggattacgagccagctcacatctcactggaccctcagaccagtcacccgaaacttctgctgagcgaagaccatcagagggcccaattcagctacaaatggcagaattcccctgacaatcctcagcgatttgacagagcaacttgcgtcctggcccatacaggcattaccggagggagacatacctgggtggtctctattgatttggcgcacgggggatcatgcacagtcggcgttgtcagcgaggacgtacagaggaaaggggagctgcgactcagacctgaggagggagtgtgggccgtccggctggcctggggattcgtatctgccttggggagctttcccactcgactgacgctgaaagagcagcctagacaagtgagggtgtcactggattacgaggtggggtgggtcactttcacaaatgcagtcaccagggaacctatatacacgtttacagcttcctttaccagaaaagtgatcccgtttttcggactctggggccgcggctcaagcttctctctgagcagctag

SEQ ID NO: 167946 - DNA, 1446 bp, Artificial Sequence
  derived and/or modified sequence
atggccagcgccgccagcgtgaccagcctggccgacgaggtgaactgcccaatctgtcaggggacattaagagagccagtgaccatcgactgcggccacaatttctgtcgtgcatgtctcaccaggtactgtgaaatacctggtccagatcttgaagaaagccccacgtgcccactgtgtaaggaacccttccggcctggctcttttaggccaaattggcagctggcgaatgtggttgaaaatattgagaggcttcagctggtgtccaccctgggcctgggcgaggaggatgtgtgccaggaacacggagagaagatttactttttttgcgaggacgatgagatgcagttgtgcgtcgtgtgcagagaagccggggaacatgccacccataccatgcgctttctcgaggatgccgccgcaccttaccgagagcaaatacacaagtgcctgaaatgcctgaggaaggagcgggaggagatccaggaaatccagagcagggagaacaagcgaatgcaggttctgctcacgcaggtgagtactaagcgccagcaggtcatcagtgaatttgcccatttgcgaaagtttctggaggagcaacagtctattctgctggctcagcttgaaagccaagacggggatatcttgagacagcgtgacgagttcgacctgctggttgccggggagatatgccggttcagtgcgttaatcgaggagcttgaagagaaaaatgaaagacccgctagggagctcctgaccgatattcgctctactctgattcgatgtgaaacccggaagtgtaggaagcccgttgccgtgtctcctgagctcgggcagaggatcagggatttcccacagcaggctctacctttacagagagagatgaagatgttcctggagaagctgtgctttgaattggattatgagcctgctcacatctccctagatccacagacctcacatccaaagctgctcctgagcgaggaccaccagcgcgcccagttctcttacaagtggcaaaatagccctgacaatccacaacggtttgaccgggccacttgtgttctggcccacaccgggatcaccggggggagacatacatgggtagtgtctattgacctggcccatggtggctcttgcaccgttggcgttgtcagtgaggacgtacaaagaaagggagagctccgattgagacccgaggagggcgtttgggccgtccggcttgcctggggctttgtctccgcattagggagtttcccaacgcggttgactcttaaagagcagcctaggcaagtcagggtgtctcttgattacgaggtaggatgggtgacctttacaaacgctgtgacccgtgaacctatatacacattcacagccagctttacaaggaaggtgatcccattcttcgggctgtggggccggggcagctcattctccctgtcctcctag

SEQ ID NO: 167947 - DNA, 1446 bp, Artificial Sequence
  derived and/or modified sequence
atggccagcgccgccagcgtgaccagcctggccgacgaggtgaactgcccaatctgccagggcactctgcgcgaacctgtgaccatcgattgcgggcataatttctgccgtgcttgtcttacacgctactgcgaaataccagggcccgacctggaagagtcgcccacttgtcccttatgcaaggagccattcagacccggtagctttcggcccaattggcaactagccaacgttgtggagaacattgagcgattgcagctcgtaagcaccctgggactcggggaagaggacgtgtgtcaggagcacggtgaaaagatctactttttctgtgaggacgacgagatgcagctctgtgtggtgtgtagggaggcaggggagcacgccacacacaccatgagatttctagaggacgctgccgccccgtatcgcgaacagatccacaagtgtttaaaatgccttcggaaggaaagagaagaaatccaggaaatacagtccagagagaacaagagaatgcaggtcctgttgacccaggtgagtacaaaacgtcagcaggtcatcagtgaatttgcacacctgaggaaattcctggaggagcagcagagtattctgctagcgcagctggaatctcaggatggggatatcctgcgccaacgagatgaatttgacttgttagtggcaggcgaaatctgccgcttttccgccttgattgaggagcttgaagagaaaaacgaaagacctgctcgcgaattgctgacagacatacgtagcacactcattcgatgcgaaactagaaagtgtcgaaaacccgtggccgtgagtcccgaactggggcaaagaatccgcgactttccccagcaggccttgcctctgcagcgcgagatgaagatgtttctcgagaacctgcccaatcatctcgtgattcccaccgctcacatatctctagacccacagacaagtcacccgaaactgctcctctccgaggaccatcaacgcgcccaattttcctataagtggcaaaactcaccggataatccacagagatttgacagagctacctgcgtcctggcacacactgggataactggcgggaggcacacctgggttgtgagcatcgatctggctcacggcgggtcatgtaccgtaggcgtggtttcagaggatgttcaaaggaagggggaactgcggcttaggccggaggaaggagtttgggccgtgcgattggcatggggcttcgtgtccgcactgggcagcttccctacgaggcttaccctgaaggagcagccaaggcaagtccgcgtgagcctcgattacgaggtgggctgggtgacgttcacaaacgccgtgactcgggagccaatctacacttttaccgcttcgtttacccgtaaagtgattcctttctttggcttgtggggtcgagggtcttcgttttccctgtctagctag

SEQ ID NO: 167948 - DNA, 1446 bp, Artificial Sequence
  derived and/or modified sequence
atggccagcgccgccagcgtgaccagcctggccgacgaggtgaactgccctatctgtcaggggactctgagagagccagtgaccatcgactgtggccacaatttctgccgggcgtgcctgacaaggtattgtgagattcctggcccagatctggaagaaagtcctacttgtccactatgtaaagagccgttccggcccggatctttccgacccaactggcagttggctaatgtagtcgaaaatattgagcggctgcaactcgtctccacattggggctgggagaggaggacgtgtgccaagagcacggagagaaaatctactttttctgtgaggatgacgaaatgcaactatgtgtcgtgtgccgcgaagcaggggagcacgctacccacacaatgagattcctcgaagacgccgctgctccataccgagagcagattcacaaatgcctcaaatgtctcaggaaggaaagggaggagatacaggagatccagtcccgagaaaataaacggatgcaggtcctccttacgcaggtgagcaccaagcggcagcaggtgatatccgagttcgctcacctcagaaagtttcttgaggagcagcagtctatcctgctggctcagttggagagtcaggatggcgacattttgcggcagagagacgagttcgatctcctggtggccggcgaaatctgtcggtttagtgcacttatcgaagagctggaggagaagaatgaacgaccagcccgggagctcctcaccgatatcaggagcactctcatccgatgcgagaccagaaaatgcagaaaacctgtggcagtatcaccagagcttggacagcgcatccgtgattttcctcagcaagccctaccattgcagagggagatgaaaatgtttctggagaatctgcccaatcacctggtgatacctaccgcccacatctcattagatcctcaaacaagtcacccaaagctgctcctgtctgaggaccaccagcgtgcacagttctcatacaagtggcagaattccccggacaacccccagagattcgatcgagcgacatgtgtgctagcccacacgggcattacaggtggccgccacacatgggtggtgtcaattgacctggcgcacggcggatcttgtaccgtgggcgttgtgagtgaggacgtgcagcggaagggtgagcttcgccttcgcccagaggagggcgtgtgggccgtgagactggcatggggattcgtttcggccctcggcagtttcccaactcgcctgacactgaaggagcaacctagacaagtccgggtgagtctggattacgaggtcgggtgggtgacattcaccaacgccgtgacccgcgaaccaatatatacattcacagcctcattcaccagaaaagtcatccccttcttcggcctctggggacggggttccagcttctctctttcttcttag

SEQ ID NO: 167949 - DNA, 1446 bp, Artificial Sequence
  derived and/or modified sequence
atggccagcgccgccagcgtgaccagcctggccgacgaggtgaactgccccatctgtcagggaacgctgcgtgagcctgtgactatagactgcggtcacaatttttgcagagcttgtcttactcgatattgcgagattccggggccggatctcgaagaatcacccacgtgtcctctgtgtaaagagcccttccgacccggcagcttccgccctaattggcaactagcaaacgtcgtagaaaacattgagcggcttcagcttgtctccacactgggactgggcgaggaggatgtgtgccaggaacatggggagaagatatacttcttttgtgaggatgatgaaatgcagctgtgcgtagtctgtagggaggccggagagcacgccactcatactatgcgcttcttagaggacgctgctgctccatatcgcgaacaaatccacaagtgtttgaaatgcctgagaaaggaacgagaggagattcaggaaattcagtcacgagagaataaacgaatgcaagtactcctgactcaggtgagtactaaaagacagcaggtcataagtgagtttgctcacctgagaaaattccttgaagagcaacagagcattcttctggcacagttggaaagtcaggatggcgatattctgcgtcagcgcgatgaatttgacctgctggtggcaggggaaatctgtcggttttctgctttgattgaagagctcgaggagaagaacgagaggccggcacgcgagctgctcactgatatcaggtccaccctgattcgttgcgaaacccggaaatgccgcaagcctgtggcggtctccccagagttgggacaaagaattcgggacttccctcagcaggcgctgcccctgcagcgcgagatgaaaatgtttctggagaatctccctaaccatctggtaatccccaccgcgcacatttccctggatccgcagacctctcacccgaagctactgctttctgaagatcaccagagagctcagttctcttataaatggcagaacagccccgataacccccaacgttttgatagggccacctgcgttttagctcacactggaatcaccggtggtcgtcacacttgggtggtcagtatcgacctcgctcatgggggatcctgtacagtgggcgtggtgagtgaagacgtccagaggaagggcgaactccggctgcggcccgaggaaggcgtctgggctgtcagactggcgtggggattcgtatctgccctgggttcgtttccaactaggttgacactgaaggagcagcccagacaagttcgcgtcagcctggattacgaagtaggatgggtaacttttaccaatgctgttacacgtgaaccgatctacacttttacagcgagcttcacacgcaaggtaattccattttttggcttatggggccgggggagttccttcagcctctccagttag

SEQ ID NO: 167950 - DNA, 1446 bp, Artificial Sequence
  derived and/or modified sequence
atggccagcgccgccagcgtgaccagcctggccgacgaggtgaactgccccatttgtcaagggacactgcgggagccagtgaccatcgactgcggccataacttttgccgtgcctgtctgactcgatattgtgagattcccggcccggatctggaggagtccccaacatgccccctctgtaaagagccttttcgtcccggctctttcagacctaattggcaactggctaacgtggttgagaacatcgagcgattacagctagtctctacattaggcctcggagaggaggacgtatgtcaagagcatggcgagaaaatatacttcttctgtgaagatgatgaaatgcagctgtgtgtcgtgtgtagggaagccggagagcacgctacccacaccatgcggttcctggaagacgccgccgctccatatagagagcagattcataagtgtctgaaatgcctcaggaaagagagggaagaaatacaagagatacaatctcgtgaaaacaaacgaatgcaggtcctgctgactcaggtgtccacaaagaggcagcaggtgatttcagaattcgcacatctccgcaagttcttagaagaacagcaatcaatcctcctagcacagctggagtcccaagacggcgacattctccgccaacgtgacgaattcgacctgcttgtcgctggcgaaatttgtcggtttagcgccctgatagaggaactcgaggaaaagaatgagcgacccgctagagagctgctcaccgatatcaggtctacactgatcaggtgtgagacccgcaaatgtcgtaaacccgtggccgtctcgcccgaactcggtcaaaggattagagacttcccccagcaggcgctgccactgcagcgggaaatgaagatgttcctggagaacctgccaaatcacctagtcatcccgacagcacatatttctcttgacccacagacttcccaccctaaactgttactttcggaagatcaccagcgcgcacaattcagctacaaatggcagaacagccccgacaatccccaacggttcgaccgcgccacctgcgtgctggctcataccggcatcacaggcggaaggcatacctgggtggtgtccattgacttggcacacggagggtcatgcacggtcggcgtggtcagtgaagacgttcagcggaagggcgagttgcggctccgcccagaggagggcgtctgggccgtaaggcttgcttggggcttcgtttctgctttaggatcctttcccacaaggctcacactcaaggagcaacccaggcaggtcagagtgagtttggactacgaggtaggctgggtcactttcactaacgcagtgactagagaacccatctacacctttactgccagctttactagaaaggtgatcccgttcttcgggttgtggggacgtggctcaagtttcagcctttcttcctag

SEQ ID NO: 167951 - DNA, 1446 bp, Artificial Sequence
  derived and/or modified sequence
atggccagcgccgccagcgtgaccagcctggccgacgaggtgaactgtcctatttgccagggtacattacgtgaaccagtcactattgactgtggacacaacttctgccgcgcctgtctcacacgatattgtgaaatccctgggccagacttggaggagagccccacatgtcctttatgcaaagaacccttcaggccgggctctttccgcccgaactggcagttggccaacgtggttgagaatatagaaaggctgcagttggtatccaccttagggctaggcgaggaggacgtatgccaagagcatggggaaaaaatatatttcttttgcgaagatgacgaaatgcaattatgcgtggtctgtcgggaagccggagaacatgctactcacacaatgcggtttcttgaggacgccgccgccccttatcgggaacaaattcacaagtgtctgaagtgcctacgcaaggaaagagaggaaattcaggaaatacagtcacgggagaacaaaaggatgcaggtgcttttaacacaggtgagcactaagcggcaacaggtgatcagcgaattcgctcatctcaggaaatttctcgaagagcagcagagcattctgctggcccaactcgaatcacaggacggtgatatacttagacagcgcgacgagtttgatctccttgtagcaggagaaatatgcagattttccgcactgatcgaagaactggaagagaaaaatgagaggccagctcgtgagctcctgaccgacattcgtagtaccctcatccgctgcgagaccagaaagtgtagaaagcccgtcgccgtcagcccagaactggggcagaggatccgagacttcccccagcaggccctgccattgcagagggagatgaaaatgtttctcgagaacctccctaatcatctggtaattccaacggctcatatctccttagatccccagacttcccaccccaaactcctgctctccgaggaccaccagcgggcgcagttctcctacaaatggcagaacagtccagataatcctcagcggttcgatagggctacttgcgtcttggcccataccggaatcacaggcgggcgccacacctgggtcgtctctattgatttagcccacggcggttcctgcacagtgggtgtggtgtcggaagacgtgcagagaaagggagaactgcggctgcgacccgaggagggggtctgggctgtgcgcttggcatggggtttcgtcagtgccctcggaagttttcctactagactgactctgaaagaacagccccgccaggtccgcgtgtctcttgactacgaggttggctgggtaacctttacgaacgcggtcacaagggagcccatatatacctttaccgcatcctttaccaggaaggtcatacccttcttcggcctgtgggggcgaggaagctccttctcactcagctcttag

SEQ ID NO: 167952 - DNA, 1446 bp, Artificial Sequence
  derived and/or modified sequence
atggccagcgccgccagcgtgaccagcctggccgacgaggtgaactgtcccatttgtcagggaaccctcagggagccagtgacgatcgactgtggtcacaacttttgtcgcgcctgcctgaccagatactgtgagatccctggacccgacctggaagaaagccccacgtgcccactgtgcaaagaaccttttcgccctgggtctttccggcctaattggcaactggccaatgtggtcgagaacatcgagagattacagctggtctctacccttggactgggggaggaggatgtgtgtcaggaacacggagagaaaatctatttcttctgtgaagacgacgagatgcaattatgcgtcgtctgccgcgaagccggagaacacgccacacacacaatgaggttcctggaggacgccgcggccccatatagggaacagatccataagtgtcttaaatgtctcagaaaggagcgggaggaaatacaggagatccagtcaagggaaaacaagcggatgcaggtcctccttacccaagtttctaccaaaaggcaacaagtgatctcagagtttgcccacttaagaaagttcctggaggagcagcaatccatccttcttgcccagctggagagtcaggatggggacattctgcggcagcgtgatgagtttgacttactggtcgccggcgagatctgtcggttctccgcgctgatcgaggagctcgaagagaagaatgaacgccccgcgagagaactgctaacggacatccggagcaccttaatccgctgcgagactagaaaatgccgaaagcctgtggctgtgagtcccgaacttggccaaagaataagagatttccctcaacaggctctccccctgcagcgcgagatgaaaatgtttctggaaaacctgcccaaccacctggtcatccctactgcccacataagcctggaccctcagacatctcatccaaagctgctgctgagcgaggaccaccagcgagcgcagttcagttacaagtggcaaaacagccccgacaatccacaacgttttgaccgagcgacgtgcgttcttgcgcacaccgggatcacagggggaaggcatacttgggttgtcagcatagatttggcccacggagggagctgcaccgtcggggttgtatctgaagacgtacagagaaagggtgaactgcgcctgaggcccgaggagggcgtttgggctgtcaggttggcctggggcttcgtctccgcccttggctcattcccaacgcgcctgacacttaaggagcagcctcggcaggtcagggtatccttggactatgaggtcggatgggtaacgttcaccaatgccgtgacgcgggagcctatctacacgttcaccgcgtccttcacgagaaaggttattccattcttcgggctgtggggccgcgggagctccttctcactcagttcatag

SEQ ID NO: 167953 - DNA, 1446 bp, Artificial Sequence
  derived and/or modified sequence
atggcctcagccgcttctgttacctcattggccgatgaggtaaactgccccatctgtcagggcacattgcgcgagccggtgactatagattgtggtcataacttttgccgggcatgtcttacaaggtactgcgagattcccggaccagatttggaagagtctcctacctgtcccctctgtaaggagccatttaggccaggatcttttcggcctaactggcagctggccaatgtggttgaaaatattgagaggttgcagttagtgtctactctcggcctaggtgaagaagatgtgtgtcaggagcacggagagaaaatctattttttctgtgaagacgacgaaatgcagctctgtgttgtgtgcagagaagcgggagaacatgctacccatacaatgcggttcctggaagatgccgcagctccatatagagaacaaatccacaagtgtttgaagtgcctccgtaaggaaagagaagagatccaagagattcagagccgggaaaacaagaggatgcaagtgctgctgacccaggtgagcacaaaaagacagcaggtcatcagcgagttcgcacacttaaggaagttcctagaagaacagcagtcaatcctgctcgctcagctggagagccaagatggcgacatcctcagacaacgcgatgaattcgacctgttagtcgctggagaaatctgcagattcagtgctctcatcgaagagctcgaagagaaaaatgagagaccagctcgcgaactgctcaccgacatacggtccactctaatcaggtgtgagaccaggaaatgtcgcaaaccagtggcggtgtcccccgagcttgggcagaggatccgtgattttcctcagcaagccctgcctctacaaagggaaatgaagatgttcttggagaaccttcccaaccatctcgttattcccactgcccatatctcactcgacccccaaacaagccaccctaagttactgctgtccgaggatcaccagagggcccagttttcatataagtggcagaacagtcctgataatccacagcgttttgatcgagcgacctgtgtgctggcccacactgggatcacagggggaaggcatacttgggtagtctcgattgatctcgcgcacggcggaagttgtacagtcggggttgtgtcggaagacgttcaacgtaagggtgagttacgtctcagacccgaggaaggcgtttgggctgtgcgtcttgcctgggggtttgtttcagctttaggctcctttcccactcgcctgaccctaaaggagcaaccacgtcaggttcgggtgtccctggactacgaagtcgggtgggtcacctttacgaatgcagtcactcgcgagcccatctacactttcactgcctcctttactcgtaaggtgatccccttttttggtctttggggaaggggttcatccttcagcttgtcgtcctag

SEQ ID NO: 167954 - DNA, 1446 bp, Artificial Sequence
  derived and/or modified sequence
atggccagtgcagcctccgttactagtttagccgatgaggtcaactgtcccatttgccagggaaccctccgcgaaccggttacgattgactgcggacataacttctgtagggcttgcctcacccgctattgcgagattcccggacccgatctggaagagagcccaacctgcccattatgtaaggagcctttccgtcctgggtcttttagaccgaactggcagctcgcgaacgtggtcgaaaacatcgaaaggctgcagttggtctctacgctgggccttggggaggaggacgtttgccaggaacatggcgaaaagatctattttttttgcgaggacgacgagatgcagctgtgtgtcgtatgtcgagaagctggtgagcatgctacacatacgatgagatttctggaggatgcagccgctccttaccgcgagcagatccataaatgcctgaagtgcttaagaaaggaacgggaggaaatccaggagattcagagtagggagaacaaacgtatgcaagtgttgctgacacaagtcagtactaaaagacagcaggtgattagcgagtttgcacatctcagaaagtttctggaggaacagcagtctatcttgctggcccagctagagtcacaggatggagacatcctccggcagagggacgagtttgacctgttggtggccggtgaaatctgcagattctccgcccttatcgaagagcttgaggaaaagaatgaaaggccagcccgtgaactcctcacagacattaggtcaacactgatccgctgcgagacacgaaaatgcaggaagcctgtcgccgtgtcgcccgagctgggccagcggattagggacttcccgcagcaggcgctacccctgcaacgagaaatgaagatgttcctggaaaaactgtgtttcgaactcgactacgagcctgcccatattagtttagacccccaaactagccacccgaagctgctgctgtctgaagatcaccagagggcacagttctcttacaaatggcaaaatagtcccgacaatccacaacggttcgatagggctacatgcgttctggcccataccggcatcacgggaggaagacatacgtgggttgtgtctatcgatctagcacatgggggatcctgcacagtcggcgttgtaagtgaggacgtgcagagaaaaggcgaactgcgtctcaggccagaagaaggggtctgggccgtaaggcttgcctggggtttcgtgtctgccctcggatcattccctacgcgtttaactctcaaagagcagccccgacaggtgcgtgtgagcctggactacgaggttggctgggtgaccttcacgaatgccgttacccgggaacctatatatacattcaccgcttcttttacccggaaagtgatcccattctttggcctttggggcaggggttccagcttcagcctttcctcctag

SEQ ID NO: 167955 - DNA, 1446 bp, Artificial Sequence
  derived and/or modified sequence
atggcttccgccgcatccgtgacatctcttgctgatgaggtgaattgtccaatctgccagggcaccctgcgggagcctgtgactatcgactgcgggcataacttttgtcgggcttgcttaacccgttactgcgagattccaggccctgatttggaagagtctcccacctgcccactgtgcaaagagcccttcaggcctggatctttccggcctaattggcagctcgccaacgtggttgagaatatcgagagattgcagctagtctctacgctggggttgggagaggaggacgtttgtcaggaacacggcgaaaaaatttactttttctgtgaggatgatgaaatgcaattgtgcgtggtttgtagagaagcgggagaacatgctacccacactatgcgcttcctggaagatgctgcggctccataccgcgagcaaattcacaagtgcctgaaatgcctaagaaaagagcgcgaagaaatacaggagatacagagtcgagagaataagcgaatgcaggtgctgctcactcaggtgagtactaagcggcaacaagtgatttcagagttcgctcacctccgaaagttccttgaggagcagcagagtatactcctcgcccagctcgagagccaggatggcgacatccttagacagagggatgagtttgaccttctggttgcaggtgagatatgcaggtttagtgccttgattgaggagttagaggagaaaaacgaaaggccagcccgtgagttgctgaccgatattaggtcaaccttaataagatgtgaaactcgaaagtgcagaaaaccggtggccgtgtcccccgaactgggccagaggattcgagatttcccacagcaggcactacctctgcagcgggagatgaagatgtttctggaaaagctgtgttttgaacttgattatgagccagctcacatttccttggatccacagacttcacaccctaagctcctgctatccgaagaccaccagcgggctcagttcagctacaagtggcaaaatagtcccgacaacccacagcgtttcgacagagccacatgtgtccttgcccacacaggaattacaggcggaaggcacacctgggtcgtgtccattgatctggctcacggaggttcatgcacagtcggtgttgtcagcgaggatgtgcagcgaaaaggggagttgaggttacgcccagaggagggggtttgggcagtgaggcttgcctggggatttgtgtctgcactggggagcttcccgactaggctgactctcaaagaacagccgcgtcaggtcagggttagtttagattacgaggtcggttgggtgacatttacaaatgccgtcacacgcgagccaatctatacctttacagccagcttcacacgaaaggtgattcctttcttcgggctatggggtcgtggttcaagcttttcgcttagttcatag

SEQ ID NO: 167956 - DNA, 3546 bp, Artificial Sequence
  derived and/or modified sequence
gagtgtgtgacccagcccttcccccgtggccaagcagagagagtggccttgaggaagccatagcagcaggaccagcatggcctctgctgcctctgtgaccagcctggcagatgaagtcaactgccccatctgtcagggtaccctgagggagccggtcactatcgactgcggccacaacttctgccgggcctgccttacccgctactgtgagataccaggcccagacctggaggagtcccctacttgcccactctgcaaagaacccttccgtcctgggagcttccggcccaactggcagctggctaacgtggtggagaacattgagcgcctccagctggtgtccacactgggtttgggagaggaggatgtctgccaagagcacggagagaagatctacttcttctgtgaggatgatgagatgcagttgtgcgtggtgtgccgggaggctggggagcacgctacccacaccatgcgcttcctggaggatgcagcggctccctatagggaacaaatccataagtgtcttaaatgtctaagaaaagagagagaggagattcaagaaatccagtcaagagaaaataaaaggatgcaagtcctcctgactcaggtgtccaccaagagacaacaggtgatttctgagttcgcacacctgaggaagtttctagaggaacagcagagcatcctcttagcacaattggagagccaggatggggacatcttgaggcaacgggatgaatttgatttgctggttgctggggagatctgccggtttagtgctcttattgaagaactggaggagaagaatgagaggccagcaagggagctcctgacggacatcagaagcactctaataagatgtgaaaccagaaagtgccggaaaccggtggctgtgtcgccagagctgggccagaggattcgggactttccccagcaggccctcccgctgcagagggagatgaagatgtttctggaaaaactatgctttgagttggactatgagccagctcacatttctctagaccctcagacttcccaccccaagctcctcttgtccgaggaccaccagcgagctcagttctcctacaaatggcagaactcaccagacaacccccagcgttttgaccgggccacctgtgttctggcccacactggcatcacaggggggagacacacgtgggtggtgagtatagacctggcccatgggggcagctgcaccgtgggcgtggtgagcgaggatgtgcagcggaagggggagcttcggctgcggccagaggagggggtgtgggctgtgaggctggcttggggcttcgtctcggctctgggctccttccccacacggctgaccctgaaggagcagccccggcaggtgagggtgtctcttgactatgaggtgggctgggtgaccttcaccaacgctgtcacccgagagcccatctacaccttcactgcctccttcactaggaaggtcattcccttctttgggctctggggccgagggtccagtttctccctgagctcctgagaaggagcagttacctactctcctctaagtacaggactcatatcaacccaagtaccatgtggacttgatccctggctgaatcacctggatgacttggaatagaaatgactgctttagaagatgggatggggccgggtggtaagggatagaagagaggactctcaatctactgatcaagtcctttccccaatgcccagtggatggccagggtacctggggactcaggctgctgccagttctgctcaccaccatccgtgcttggcacagaagtagctgcatagaaagggcactggatttgaagtcagaagacctgggttcttgaaccagcctgtcaaccagttgtatgactttaaacaaggcatctcacctcttttcatcttgttttcttccaataatgttagagttcatgtaatcacattctctagaaccatttagtttgtgttaactatgaaccaagcagtgtggtggccactggtgacttgaaaatatagagaaaaaaaaaacctgctctatatctgaaagagctcttgggaagacagagaaacataaagaggaaattacagcacagtgtggtgggtgttacgggaagtccaaccccagcattatgggagttcaggggaaggggcatagcccagcctggaaggagagggtgagtgggggatggctttctgaaaagggtggtctaaaggatgcctatggtcaatagggaaaagaggggaagaagcatcttaagaagaggaaacagcagagaactggctggatgacctgtgactctggagcactgggttgtctccattgtcattatgggcagatgtgtgccatccccagccgacgccactcactgcctccttcctcctggtgttgccacttctgggtgagattaaggtgcagggcctgggggcaggaggacataaggtatagccataaatcataacccagggaccacactcaaccctagggaaattgtcttcctgatcagttgattaccatctgaggtcaagaaatgagatagtgggagcaaatgggtcacaaatagctcagctgtgggctcagaaactgctaggtaaaagaattccagaaggaggccagggcataagttggatgacctatgaactttagtctaaagaattgagactaccgtaattgagactactgtagtgacatctgagaaatgggatggaatagtgaccatgttttattttcttgttcttgtcactattgtattttattttgcataatcatgcccttcactgacagtctccttaacatcatctgtttactctgctcagtgtaaactacaatgctctgtcatctccctactgggtctcctgggaggaggggagccatccagggtgcaaactcaaaggcagagggcacagcgtgcttaggcccaagcttagaattcaattgagaagttctgttgttcatccttacctcagcaggtagaaaagaggtggagatcagaagccagggattagagattgaattgctttccctgggagtgtgcagtatctcattaaaatgttgtatattcaaaaaaatacagacacacacaagtgcctatataatgataaaacatatccaaagcacccaaacctgtgattccagaaaagtagatcctatttttgtttatttttattggctttagctgtgtcttttgaaaggactattatcctctaaaatgtatgtgtatgaagatcctggcttgcagctcgggagctttacacaccttgtgtcactttatcttggtaacgagccaagatcatgcaaccagttcatccatgtctgacccaagagctcttaactgctatgctgcactgcctcattcagagatagatgcctgcatgggtcctggcgattattttaatgctggctacacccccacaggtgacttggattcagaaatacaatttatatttcttctttttaaattgttttattttatttttcttttaatagttatatgtcagtgagaacaatttatatgtcttacactgagaaataaaactgctcataagtgaaaa

SEQ ID NO: 167957 - DNA, 1446 bp, Artificial Sequence
  derived and/or modified sequence
atggcctctgctgcctccgttaccagcttggccgatgaggtgaattgccctatctgtcagggtacgctcagggagccagtgacaatcgactgcggccacaacttctgcagagcatgtctgactagatactgtgaaatacccggacccgacctagaggagagcccgacttgtcctctgtgtaaggagccttttcgccctgggagtttcaggccaaactggcaactcgctaacgtggttgaaaatatcgaaaggctgcaattggtcagcaccctgggcctcggggaagaggacgtgtgccaggagcacggcgagaaaatctattttttttgcgaggatgacgaaatgcagctgtgtgtggtttgtcgcgaggctggggagcatgcaacacacaccatgcggttcttagaagacgccgctgcaccctatcgcgagcagattcacaagtgcttaaaatgtctgcggaaggagagggaagagatccaggagattcagtcacgcgagaataagcgcatgcaggtgttgctgactcaggtttcgacaaagagacagcaggtgatcagtgaattcgcccacttgcgaaagtttctggaggagcagcagtctattctgttggcccagttggagagtcaggacggcgatatattaaggcagcgtgatgaatttgaccttttggttgcaggcgagatttgcaggtttagcgcgttgattgaggaattggaggaaaaaaacgaacgacccgctcgagagcttctgacagacattaggtctactctaataagatgtgagacgagaaaatgtagaaaacccgtggccgtctcccctgagttgggacagcgcattcgagatttcccacagcaggccctccctctgcagagagagatgaaaatgtttctggaaaaactctgcttcgagttggattatgaaccggctcacatatccctcgacccgcagacttcacatcccaaactgctgctttctgaggaccatcagcgagcccaatttagttacaagtggcagaattctcccgacaacccacaaaggtttgaccgcgcaacatgtgttctcgcgcacaccgggattacaggtggcaggcatacttgggttgtttcaattgatctggcccacggcggttcctgtaccgtgggcgtggtaagcgaggatgtacagcggaagggcgaactccggctgcgacctgaagagggggtgtgggccgtaaggctcgcatggggctttgttagtgcattaggcagcttcccgaccaggttaacccttaaagagcagcccaggcaagtccgcgtgtcactggattatgaagttggctgggtaacgttcaccaacgccgtgaccagagagccaatatacactttcacggcttcttttacgcgcaaagtaatcccattcttcgggctctgggggcgtgggagttcgtttagtttgagcagttag

SEQ ID NO: 167958 - DNA, 1446 bp, Artificial Sequence
  derived and/or modified sequence
atggcctccgcagcttctgtcacatcactggccgacgaggtcaactgtccaatttgccaggggacactccgggagccagtgaccattgactgtggacataatttctgtagggcgtgtctcacgcggtactgtgaaattcctggccctgacttagaggaatctcccacctgtcctctgtgcaaagagcctttccggcctgggtctttccgcccaaattggcagcttgcaaacgtagtggagaacattgagcggctgcaactggtcagcactctgggactgggcgaagaagatgtgtgccaggagcatggcgagaagatttattttttttgtgaagacgatgaaatgcagctctgcgttgtgtgccgggaagctggcgagcacgccacacacaccatgcggttcttggaggatgcagccgcaccctatcgagagcagattcataagtgcctgaagtgcctgcggaaagagcgcgaggaaattcaagagattcagagcagggagaataagagaatgcaggtgctgcttacccaggtctccaccaaaagacaacaagtcattagcgagttcgctcatctccggaagttcttagaagaacaacagtctattttactcgcccaattagagtcgcaggatggggatattctgaggcagagagacgagtttgaccttctggtggccggagaaatatgtagattttctgcactgatagaagaactcgaagagaagaacgaaagacccgcacgcgaactacttacagatatacgcagtacactgatcaggtgcgagaccaggaagtgccgaaagcccgtggcagtgagccccgaactgggccaacggataagggacttcccccagcaggcccttcctctgcaacgtgaaatgaagatgttcctagagaagctctgtttcgaattggattacgaacctgcccacatctcgcttgatcctcaaacctcccacccgaaactgctcctcagtgaggaccaccagcgggctcagttttcctataaatggcagaatagcccagataatccacaaagattcgaccgggcaacatgtgtcctggctcacacaggaattacaggcggaaggcacacatgggtcgtcagcatcgatctcgcacacgggggaagctgtaccgtgggagtagtatctgaggacgttcaaaggaaaggagagcttcgtctcaggccagaggaaggggtgtgggccgttcggctagcctggggatttgtatccgcgttggggtccttcccaacacgcctcactctcaaagaacagccgagacaggtgcgagtttccctcgattacgaagtaggctgggttaccttcaccaatgccgtcacacgtgagcctatctatactttcacagcttcttttacccggaaagttatacccttcttcgggctgtggggacggggttcttcatttagcctgtccagctag

SEQ ID NO: 167959 - DNA, 1446 bp, Artificial Sequence
  derived and/or modified sequence
atggccagcgccgcttctgtgacttctctcgcagatgaggttaattgtcccatttgtcagggcaccctgagggagccggttacaattgattgcgggcacaatttttgccgggcatgcctcacgaggtactgcgagatccccggaccagatctcgaggaatcgcctacttgccctctgtgcaaggagccatttcggccaggaagctttaggcctaactggcagcttgccaatgtggtagagaacatcgaacgactacagctggtgtccaccttagggctgggtgaggaggacgtgtgccaagaacatggcgagaagatatactttttctgtgaagatgacgagatgcagctttgtgtcgtctgtcgtgaggcgggagaacacgcaacccataccatgcgctttttggaggatgcagccgctccctatcgtgagcagatccacaagtgcctgaagtgcttaagaaaggaaagagaggagatccaagagattcagagcagggaaaataagcgcatgcaagtgctcctcactcaggtgtctactaaaaggcagcaagttatctctgagttcgcacacctcagaaaatttctcgaagagcagcagagcattttgctagcccagctagagagtcaggatggggatattttgcgccagagggacgagttcgatctcctggtggctggtgagatttgcagattttcagctttgatcgaagagttggaggaaaagaatgagcgccctgcccgagaattattaacggatatccggagcaccttaattaggtgtgaaacaaggaagtgtcgaaagcccgtggcggttagcccggaactggggcaacggatccgtgacttcccgcagcaggcactgcccctgcagagggagatgaagatgttcctcgaaaagctgtgcttcgagcttgactatgagcccgctcatatctcgctcgatccacagacttctcatcctaaactgctgttatctgaggatcatcagcgggctcagttctcctataaatggcagaattcccccgataatcctcaacgattcgaccgtgccacctgcgtcctggcacacacagggatcaccgggggacgacacacttgggtggtgtctatcgacctggcacacggaggaagctgtacagtgggggtagtgagtgaggatgtgcagcgaaagggcgaattgcgactccgacccgaagaaggtgtctgggcagtgcgactcgcctgggggttcgtgtctgcactcggaagtttcccaactaggttgacattgaaggagcagcccaggcaggtgcgggtgagcttggactacgaggtgggttgggtgacctttacaaatgccgttacaagagagccaatctatactttcacggccagcttcactcgcaaggtcatccccttcttcggattatggggtcggggtagctccttcagtttgtcaagctag

SEQ ID NO: 167960 - DNA, 1446 bp, Artificial Sequence
  derived and/or modified sequence
atggctagcgctgcttctgttacctctcttgcagacgaagtgaattgcccaatctgccagggcactctccgggaacccgtgactatcgactgtggccataatttctgtcgcgcatgcctcacaagatattgcgagatccctggaccagatctcgaggagtctcccacctgtccactgtgcaaagaacctttccgcccaggatccttccggccaaactggcagctagcaaatgtggtcgagaacatcgaaaggctgcaactggtttccacattggggctgggcgaagaagacgtgtgtcaagagcatggcgaaaagatctatttcttttgcgaggacgatgagatgcagttgtgcgttgtctgccgggaggccggagaacatgccacacatacaatgagatttctggaggacgccgcagcaccctacagagagcagattcacaaatgcctaaagtgtttgcgcaaagaaagagaggaaatccaggagatacagagtcgggaaaacaaacgaatgcaggtcctcctgacacaagtatccaccaaacgtcagcaagtcattagtgaattcgctcatctacgtaaatttttggaagaacagcaatctattctcctagcccaactcgagagccaggacggtgacatcctccgtcagcgagacgaattcgacctgctcgtagccggagagatatgtaggtttagtgcattgatagaagagctggaggagaagaatgaacggccagccagagagttgctgactgacattaggagtacactgatccggtgcgaaaccaggaagtgccggaagccggtggccgtttccccagaacttggacagagaattagagattttccacagcaggcccttccccttcagagggagatgaagatgttcctggagaagttgtgtttcgagcttgattatgagcccgctcatatttcactcgacccgcagacctcccacccgaagctgcttttaagtgaggaccatcagagagcccagttctcttataaatggcagaacagccccgataaccctcaaaggttcgacagagccacatgtgtgttagctcacaccggcataactggtggacgacacacctgggttgtgagcattgacctagcacatggagggagttgtaccgtgggcgtagtgagcgaagacgtgcagcggaagggtgaactgcggttgaggcccgaggagggcgtgtgggccgtgcgtctcgcatggggcttcgtgtccgccctgggcagcttccctactaggctgacacttaaagaacagccacggcaggtccgggtcagcctcgactatgaagtgggatgggtaaccttcactaatgccgtgacaagagagcctatttatacgttcactgctagctttactaggaaggtgatcccgtttttcgggctgtggggtaggggctcttccttttccctgagtagctag

SEQ ID NO: 167961 - DNA, 1446 bp, Artificial Sequence
  derived and/or modified sequence
atggcctctgctgcaagcgtgacatcgttagcagacgaagttaattgtccaatctgccaggggacactgagagagcccgtgacgatcgactgtggccataacttctgtagagcctgccttactcgctactgcgagatacctgggccagatcttgaggaatcaccaacctgtcccttgtgcaaagaaccattccgcccaggtagcttcagaccaaattggcagcttgctaacgtcgtagagaatattgaacgactgcaattggtgagcacgctggggctgggggaggaagacgtctgccaggaacacggtgaaaagatttacttcttttgtgaggacgacgaaatgcagctttgcgtcgtgtgcagagaggcgggagagcacgctacacatacaatgcggtttttagaagacgccgctgccccataccgggaacaaatccacaagtgcctaaagtgcctgagaaaggagcgggaggagatccaggagattcaatcaagagagaataaacgaatgcaggtgctgcttacacaggtctctacaaagcgccagcaagtaatatccgagtttgctcatctgagaaaatttcttgaagagcagcagtctatcctgttggctcagttggagagccaagatggcgatattctgaggcagcgagatgaatttgacttactcgtggccggtgaaatctgtcgcttcagcgcactcatcgaagagctcgaagagaaaaatgagaggcccgcaagggagctgctgactgatattcgcagcaccctcatacggtgcgaaacacgtaaatgtcggaagcctgtggcagtgagcccagagctgggtcagaggatcagagatttccctcagcaagcactgccgctgcaaagagaaatgaagatgttcttggaaaagctatgttttgagctggattacgagcccgctcacatctcactcgacccccagacaagccatcctaagctgttattatcagaggaccatcagcgggctcaattcagctacaaatggcaaaattcccccgacaacccccagcgttttgatagagccacctgtgtgttggcccataccggcattacagggggacgacacacctgggtggtatctatcgatctggcccatggcggttcctgtaccgtcggggtggtttcagaagacgtgcaaaggaaaggggagctccggctcaggccagaagagggagtttgggccgtaaggctggcgtggggcttcgtctccgcgttgggctcattcccaacgaggctgaccctgaaggagcagccgaggcaagtcagggtgtctctcgactatgaggtgggatgggttactttcaccaatgctgtgacccgcgagccgatctatacattcacggcctccttcaccaggaaggtgataccatttttcggtctttggggcaggggatcctccttctccttgtcgagctag

SEQ ID NO: 167962 - DNA, 1446 bp, Artificial Sequence
  derived and/or modified sequence
atggcaagtgcagcctcagttacatctttggcagacgaggtcaattgtcccatctgtcagggcactctcagggaacccgttacaatcgactgtggccacaacttctgccgcgcatgtctcacaaggtactgtgagataccgggtccagacctggaggagagcccaacttgccctctgtgtaaagaaccctttcggccagggtcctttagaccaaactggcagctggccaacgtagtggaaaacatcgagaggctccagctggtgagcaccctgggcttgggcgaggaagacgtctgtcaggagcacggcgagaagatttattttttctgtgaggatgatgaaatgcagctgtgcgttgtatgccgtgaggccggagagcatgctacccacaccatgcgattcctggaggatgccgcagcgccataccgggagcagatccacaagtgcctcaagtgtttgaggaaagagagagaggaaatccaggagattcagagtagagagaataaaagaatgcaggtccttttaacccaggtgagtaccaagcgacagcaggtgatttcagagttcgcccatctccggaagtttttggaggaacagcagagtatcctgttggcacagctggaaagccaggatggtgacattctgcggcagcgcgacgaatttgatctcctcgtagccggtgaaatttgtagatttagtgcacttattgaagagctggaggaaaagaatgaacgcccagccagagaacttcttactgatattcgatctacgctgatcaggtgtgaaactcggaaatgcaggaagcctgtcgctgtgtcacccgaattagggcagagaatccgggatttcccgcagcaggccctacccttgcagagggagatgaaaatgttcttagaaaacctgcctaaccatttggtgatccctaccgcccatatcagtctggacccacagacaagtcatccgaagcttttgctctcagaagaccatcagagggcacagttctcatataagtggcagaattccccagacaacccccagaggttcgacagggcgacctgtgttctcgcccacaccgggatcacaggcggacggcacacctgggtggtgagcattgacctagctcatgggggaagctgcaccgtaggagtagttagcgaagacgtgcagaggaaaggcgagcttcgtctgcgaccggaagagggggtctgggcggtgcggttggcttgggggtttgttagcgctctgggatcctttcctacacggctgacactgaaggagcaaccaagacaggtccgcgtgagcttagactatgaggtaggctgggtgacttttacgaatgccgttacaagagagccaatttataccttcaccgctagttttactcgcaaagttattccattcttcggcctctgggggaggggaagctctttctcactgtcgtcttag

SEQ ID NO: 167963 - DNA, 1446 bp, Artificial Sequence
  derived and/or modified sequence
atggcctcagccgcatcagtcactagtttggctgatgaagttaattgcccaatatgtcaggggaccctgcgggaaccagtgacgatagattgcggtcacaatttctgcagagcctgccttacccgatactgtgagattccagggccagacctggaggagtcgcctacctgtcccctgtgtaaagaaccttttcgcccaggaagcttccggcctaactggcagcttgctaatgtggtcgagaatatcgagcgcctgcagcttgtgagtaccctcggcttaggtgaggaagatgtgtgccaggaacatggggaaaaaatctactttttttgcgaggacgatgagatgcagctttgtgttgtatgtcgggaagctggcgagcatgccactcacaccatgcggttccttgaggatgctgccgcaccttacagagaacagatacataagtgtctgaagtgccttcgcaaggaacgagaggagatccaggagatccagtccagggagaacaaaaggatgcaggtgctactcacgcaggtgagtactaagaggcagcaagtcatcagtgagttcgctcatttgcgcaaatttctggaggagcagcagagcatcctgctggcccagttggagagtcaggatggggacatcctgcgccagcgggacgagttcgacttacttgttgccggagaaatttgcaggttcagcgccctgatcgaagaactagaggaaaagaatgaaaggcccgctcgagaattactgacagatatccggtctacccttatccgttgtgagacacggaaatgtagaaagccggtggccgtgtctcccgagcttggccagagaatcagggacttccctcagcaggctttgccactccaaagagaaatgaaaatgttcctggaaaatctgcccaaccacttagtgatcccaacagctcacatttcacttgacccacagacctcccacccaaagcttctgctgtcagaagaccaccagcgcgcacagttcagctacaaatggcagaattcccctgacaatccacagcgctttgatcgtgcgacatgtgtgctcgcacacacgggaatcaccggcggacggcacacttgggttgtgtcgatcgacttggcccacggaggcagctgtacagttggggttgtttctgaggacgtacagcggaaaggagaactgaggcttaggcccgaagaaggcgtgtgggccgtgcggctcgcgtgggggtttgtgtctgcactggggagcttccccactcggctgaccctgaaagaacagcctcggcaggtgagggtcagtttggactacgaggtaggatgggttacctttaccaatgcggtcacacgtgagcccatctacacctttacggcatccttcacacgtaaggtgatccccttcttcgggctgtggggcagggggtcttcattctcactgtcaagctag

SEQ ID NO: 167964 - DNA, 1446 bp, Artificial Sequence
  derived and/or modified sequence
atggcctcggccgcttcagtaacgagcctggctgatgaagtgaattgcccgatctgtcaggggactctccgtgaacctgtgacaatcgattgcggccacaatttttgtcgtgcttgcctcacgcgttattgcgagattccaggcccagatttggaggaatctccgacctgccctctttgtaaggagccattcaggccaggctccttcaggccaaactggcagctagcaaatgtggtcgagaatatagagaggctgcaactcgtttcaactcttggactcggggaagaagacgtgtgccaggagcacggagaaaaaatctacttcttctgcgaagacgatgagatgcaactgtgtgtagtgtgtagggaggctggtgagcacgccacgcacaccatgcggtttctggaagatgctgctgcaccttatagagagcaaatccataaatgcttaaagtgcctgcggaaagagagagaggaaatccaggagattcaaagccgcgagaataagaggatgcaggtcctgcttacacaagtgtcaactaaacggcaacaggtcatctcagaatttgcccatctccgaaaattcctggaggagcagcaatccatcctacttgcacagctggaatcacaagacggagacatcctgcgccagcgagacgaatttgacctgctggtggcaggcgagatttgcaggttttccgctctgattgaagagctcgaagagaaaaacgagaggcctgcaagggagcttttaactgacatccgctcaactctgatccgatgtgagacccgcaaatgccgtaagccagtagccgtgagccctgagctgggccagaggatccgcgattttccacagcaagccctgccacttcagcgcgagatgaaaatgtttctggaaaacttacccaatcacctggtgattcctaccgcccacatctctctggacccacagacaagccaccccaagcttctcctgtccgaagaccaccagagggctcagttcagttataagtggcagaatagccctgacaacccccagcgctttgaccgggcaacatgcgtccttgcccatacgggcatcactggcggtcggcacacctgggtagtgagcatcgacttggcccacggcggatcatgtactgtgggggtcgtcagtgaggacgtgcagcggaagggagagttgcgcctgcgcccagaggaaggtgtttgggctgtgcgactcgcatggggattcgtgtcagctctgggttctttccccaccaggctgacccttaaagaacagcctaggcaggttcgtgttagccttgactatgaggttggctgggtgacctttaccaatgccgttacacgggaacctatttacacattcacagcctctttcacaaggaaggtgatcccctttttcggcctgtggggcagggggtccagcttttcattgagcagctag

SEQ ID NO: 167965 - DNA, 1446 bp, Artificial Sequence
  derived and/or modified sequence
atggcttcagctgcgagtgtgacctccttagctgatgaggtcaactgtcctatttgtcagggcactcttcgagaacccgtcactatcgactgcggacataatttttgccgtgcgtgcttgacacgatactgtgagatccctggtcccgatctggaagagagccccacgtgtccgctctgcaaggagccattcaggcctggttcctttagacctaactggcagcttgccaatgtggtggaaaacatagaacgcctgcagttggtgtctaccctgggtctcggtgaagaggacgtgtgccaggaacatggggaaaagatctactttttctgtgaggatgatgaaatgcagctctgcgttgtttgtcgcgaggccggagagcatgcaacacatacaatgcggtttctggaagacgccgctgcaccctatcgggagcaaatccacaagtgccttaaatgtcttcgaaaggaacgggaggaaatccaagagatccagtctcgtgagaataaaaggatgcaagtgttattgactcaggtctccacaaagaggcagcaggtcatctctgaatttgcccacttgagaaagttcctggaggagcaacagtctatcttattggcccagctcgagtcacaggacggagatattctgaggcaaagagacgagtttgacctcctggtagcgggtgagatttgtcgattctccgctctgattgaagagctggaagagaaaaatgagaggccagcaagggagctgctgacagatatccgcagcacactcatccgctgtgaaacaaggaaatgcaggaagcccgtggcggtgtcccccgaattgggtcaaaggattagagacttcccccagcaggctctgccgctccaacgcgagatgaaaatgttcctggagaatctgcccaaccatctcgttatcccgacagctcatatttcactcgacccccagacctctcatccgaaacttctgttaagcgaagatcaccagcgggcacagttttcttacaaatggcagaactcacccgataacccccagagattcgacagagccacgtgcgtgctggcacacactggcatcaccgggggtaggcacacttgggttgtttctatcgatctggcacatggcggttcctgcacagtgggagttgttagtgaagatgtgcagcggaagggggagttacgattgcgcccagaagaaggagtctgggccgtaagacttgcatgggggttcgtctcagcccttggctccttcccaacgagattgacactcaaagagcagccacgtcaggtaagggtgagcctggactatgaggtgggatgggtgaccttcactaatgctgtgactagggagcctatatacacgttcactgcctcattcacacgcaaagttatacccttctttggactctggggacggggaagttcattttctctaagcagctag

SEQ ID NO: 167966 - DNA, 1446 bp, Artificial Sequence
  derived and/or modified sequence
atggcgtccgctgcttctgtgactagcctggctgacgaagtgaactgtcctatctgccaggggacccttagagagccagtgactatcgactgtggtcataatttctgtcgggcatgcttgaccaggtactgcgagattcccggacctgacctggaggaaagccccacctgccccttatgcaaggagcccttccgccctggatcattcagacctaattggcagttggcgaacgttgtggaaaacatagagcgactacagctggtttcgaccctaggcctaggggaagaagacgtttgtcaggagcacggagagaagatctacttcttttgcgaagacgatgaaatgcagctgtgtgtagtctgccgtgaagccggagagcatgccacgcacaccatgaggttcctcgaggatgccgcagccccttacagggagcagatacataagtgcctgaaatgcctaaggaaggaaagagaggagatacaggagatccagtcacgagagaacaagcggatgcaggtgctgctgacccaggtctcaacaaagcgacagcaggtaatcagtgagtttgcacacttaaggaagtttctggaggaacaacagtcaattcttctagcacagctagagtcgcaagacggggatatccttcgacaacgcgacgagtttgacctattggttgccggtgagatatgtcgattctcggccctcattgaggagctggaggagaaaaatgagcgaccagccagagagctcctaaccgacattaggtccaccctcatccggtgcgagacgaggaagtgtcgcaaacctgtagcagtatccccagaactcggtcaaaggatcagagatttcccacaacaagcactgcctctccagcgggagatgaagatgtttctcgagaacttaccgaatcatctcgtgataccgaccgcacacatcagcctggatcctcagaccagccaccctaagctgctgctgtctgaggaccatcagagggcccagttttcttataagtggcaaaacagtccagataaccctcagcgatttgacagggcaacctgcgttctggctcatacgggtattaccggcggtcgccatacatgggtcgtgagcattgatttagcacacgggggatcatgcaccgtgggcgtggtttctgaggatgtgcagagaaagggagagctgaggctcaggccggaggagggggtatgggccgtccggcttgcttggggtttcgtgtccgcccttggcagctttccgacacgcctgactctcaaggaacagcccaggcaggtgcgcgtgagtctggattacgaggtggggtgggtgacgttcacgaatgccgttacgcgggaacctatttatacattcacagctagcttcactcggaaggtgatccctttcttcgggctctgggggaggggcagctctttttcactgtcctcttag

SEQ ID NO: 167967 - DNA, 1446 bp, Artificial Sequence
  derived and/or modified sequence
atggcgtctgccgcatccgtcacaagcctcgctgatgaggtcaattgccccatctgtcaaggaaccctaagagaacctgtgacgattgattgcggtcataacttctgcagagcttgcctcacccgatactgcgaaattcctggccctgacctggaagaatccccaacatgtcccctgtgcaaggaaccattccgcccagggagctttcgcccaaactggcaactggctaacgtagtcgagaacatagaacggctgcaacttgtctctaccctcgggctaggggaagaagatgtgtgtcaggaacatggggagaagatctacttcttctgcgaagatgatgagatgcagctatgtgtggtgtgcagggaggctggtgagcacgctacacatacaatgagatttctggaagacgccgctgcaccgtatcgcgagcagatacataaatgcctgaagtgcttacgaaaggaacgagaggaaatccaagaaattcagtcccgggagaacaaacggatgcaagtgttgttgacgcaggtgtctacgaagaggcaacaagttatttcagaatttgcacacctgcgtaaatttctggaagagcaacaatcgatcttgctcgcccaacttgaatcacaggacggcgacatcttgcgtcaacgggatgagttcgacctactggtggcaggcgagatatgccgattctcagccctgattgaggaactggaagaaaagaatgagcgccctgcacgggaactactcaccgacatccggtccaccctgattcgctgcgaaacccgaaagtgccggaagcctgtggccgtctcacccgaactggggcaaagaataagggattttccccaacaggcactgccccttcagcgtgaaatgaagatgtttttggagaatcttcccaatcacttggtaatccccaccgcacatatctctttggatccccaaacctcccaccctaagctgttgctctctgaggatcaccagcgagcacagttctcgtataagtggcagaattcaccggataacccacagcgctttgaccgcgcaacctgcgtcttggcccacactggaatcactgggggaaggcacacttgggttgtctccatcgatcttgcccacggcggaagttgtaccgttggcgtggtctccgaggatgtccaacggaagggtgagctgagattgcggcctgaggaaggggtttgggcagtgagattggcttggggctttgtgtccgctctgggcagctttccaacacggttaacactgaaggaacagccacgtcaggttcgggtctcattagattacgaggtaggctgggtgacatttaccaatgcagtgacacgcgagcccatttatacttttactgcctcgtttacacgtaaggtgatcccttttttcggcctgtggggtagggggtcctcattctcactcagctcctag

SEQ ID NO: 167968 - DNA, 3549 bp, Artificial Sequence
  derived and/or modified sequence
gagtgtgtgacccagcccttcccccgtggccaagcagagagagtggccttgaggaagccatagcagcaggaccagcatggcctctgctgcctctgtgaccagcctggcagatgaagtcaactgccccatctgtcagggtaccctgagggagccggtcactatcgactgcggccacaacttctgccgggcctgccttacccgctactgtgagataccaggcccagacctggaggagtcccctacttgcccactctgcaaagaacccttccgtcctgggagcttccggcccaactggcagctggctaacgtggtggagaacattgagcgcctccagctggtgtccacactgggtttgggagaggaggatgtctgccaagagcacggagagaagatctacttcttctgtgaggatgatgagatgcagttgtgcgtggtgtgccgggaggctggggagcacgctacccacaccatgcgcttcctggaggatgcagcggctccctatagggaacaaatccataagtgtcttaaatgtctaagaaaagagagagaggagattcaagaaatccagtcaagagaaaataaaaggatgcaagtcctcctgactcaggtgtccaccaagagacaacaggtgatttctgagttcgcacacctgaggaagtttctagaggaacagcagagcatcctcttagcacaattggagagccaggatggggacatcttgaggcaacgggatgaatttgatttgctggttgctggggagatctgccggtttagtgctcttattgaagaactggaggagaagaatgagaggccagcaagggagctcctgacggacatcagaagcactctaataagatgtgaaaccagaaagtgccggaaaccggtggctgtgtcgccagagctgggccagaggattcgggactttccccagcaggccctcccgctgcagagggagatgaagatgtttctggaaaaactatgctttgagttggactatgagccagctcacatttctctagaccctcagacttcccaccccaagctcctcttgtccgaggaccaccagcgagctcagttctcctacaaatggcagaactcaccagacaacccccagcgttttgaccgggccacctgtgttctggcccacactggcatcacaggggggagacacacgtgggtggtgagtatagacctggcccatgggggcagctgcaccgtgggcgtggtgagcgaggatgtgcagcggaagggggagcttcggctgcggccagaggagggggtgtgggctgtgaggctggcttggggcttcgtctcggctctgggctccttccccacacggctgaccctgaaggagcagccccggcaggtgagggtgtctcttgactatgaggtgggctgggtgaccttcaccaacgctgtcacccgagagcccatctacaccttcactgcctccttcactaggaaggtcattcccttctttgggctctggggccgagggtccagtttctccctgagctcctgagaaggagcagttacctactctcctctaagtacaggactcatatcaacccaagtaccatgtggacttgatccctggctgaatcacctggatgacttggaatagaaatgactgctttagaagatgggatggggccgggtggtgagggatagaagagaggactctcaatctactgatcaagtcctttccccaatgcccagtggatggccagggtacctggggactcaggctgctgccagttctgctcaccaccatccgtgcttggcacagaagtagctgcatagaaagagcactggatttgaagtcagaagacctgggttcttgaaccagcctgtcaaccagttgtatgactttaaacaaggcatctcacctcttttcatcttgttttcttccaataatgttagagttcatgtaatcacattctctagaaccatttagtttgtgttaactatgaaccaagcagtgtggtggccactggtgacttgaaaatgtagagaaaaaaaaaacctgctctatatctgaaagagctcttgggaagacagagaaacataaagaggaaattatagcacagtgtggtgggtgttacgggaagtccaaccccagcattatgggagttcaggggaaggggcatagcccagcctggaaggagaggatgagtgggggatggctttctgaaaagggtagtctaaaggatgcctatagtcaatagggaaaagaggggaagaagcatcttaagaagaggaaacagcagagaactggctggatgacctgtgactctggagcactgggttgtctccattgtccttatgggcagatgtgtgccatccccagccgacaccactcactgcctccttcctcctggtgttgccacttctgggtgagattaaggtgcagggcctgggggcaggaggacataaggtatagccataaatcataacccagggaccacactcaaccctagggaaattgtcttcctgatcagttgattaccatctgaggtcaagaaatgagatagtgggagcaaatgggtcacaaatagctcagctgtgggctcagaaactgctaggtaaaagaattccagaaggaggccagggcataagttggatgacctatgacctttagtctaaagaattgagactaccgtaattgagactactgtagtgacatctgagaaatgggatggaagagtgaccatgttttattttcttgttcttgtcactattgtattttattttgcataatcatgcccttcactgacagtctccttaacatcatctgtttactctgctcagatgtaaaatacaatgctctgtcatctccctactgggtctcctgggaggaggggagccatccagggtgcaaactcaaaggcagagggcacagcgtgcttaggcccaagcttagaattcaattgagaagttctgttgttcatccttacctcagcaggtagaaaagaggtggagatcagaagccagggattaaagattgaattgctttccctgggagtgtgcagtatctcattaaaatgttgtatattcaaaaaaatacagacacacacaagtgcctatataatgataaaacatatgcaaagcacccaaacctgtgattccagaaaggtagatcctatttttctgtttatttttattggctttagctgtgtcttttgaaaggactattatcctctaaaatgtatgtgtatgaagatcctggcttgcagctcgggagctttacacaccttgtgtcactttatcttggtaacgagccaagatcatgcaaccagttcatccatgtctgacccaagagctcttaactgctatgctgcactgcctcattcagagatagatgcctgcatgggtcctggcgattattttaatgctggctacacccccacaggtgacttggattcagaaatacaatttatatttcttctttttaaattgttttattttatttttcttttaatagttatatgtcagtgagaacaatttatatgtcttacactgagaaataaaactgctcataagtgaaaa

SEQ ID NO: 167969 - DNA, 3546 bp, Artificial Sequence
  derived and/or modified sequence
gagtgtgtgacccagcccttcccccgtggccaagcagagagagtggccttgaggaagccatagcagcaggaccagcatggcctctgctgcctctgtgaccagcctggcagatgaagtcaactgccccatctgtcagggtaccctgagggagccggtcactatcgactgcggccacaacttctgccgggcctgccttacccgctactgtgagataccaggcccagacctggaggagtcccctacttgcccactctgcaaagaacccttccgtcctgggagcttccggcccaactggcagctggctaacgtggtggagaacattgagcgcctccagctggtgtccacactgggtttgggagaggaggatgtctgccaagagcacggagagaagatctacttcttctgtgaggatgatgagatgcagttgtgcgtggtgtgccgggaggctggggagcacgctacccacaccatgcgcttcctggaggatgcagcggctccctatagggaacaaatccataagtgtcttaaatgtctaagaaaagagagagaggagattcaagaaatccagtcaagagaaaataaaaggatgcaagtcctcctgactcaggtgtccaccaagagacaacaggtgatttctgagttcgcacacctgaggaagtttctagaggaacagcagagcatcctcttagcacaattggagagccaggatggggacatcttgaggcaacgggatgaatttgatttgctggttgctggggagatctgccggtttagtgctcttattgaagaactggaggagaagaatgagaggccagcaagggagctcctgacggacatcagaagcactctaataagatgtgaaaccagaaagtgccggaaaccggtggctgtgtcgccagagctgggccagaggattcgggactttccccagcaggccctcccgctgcagagggagatgaagatgtttctggaaaaactatgctttgagttggactatgagccagctcacatttctctagaccctcagacttcccaccccaagctcctcttgtccgaggaccaccagcgagctcagttctcctacaaatggcagaactcaccagacaacccccaacgttttgaccgggccacctgtgttctggcccacactggcatcacaggggggagacacacgtgggtggtgagtatagacctggcccatgggggcagctgcaccgtgggcgtggtgagcgaggatgtgcagcggaagggggagcttcggctgcggccagaggagggggtgtgggctgtgaggctggcttggggcttcgtctcggctctgggctccttccccacacggctgaccctgaaggagcagccccggcaggtgagggtgtctcttgactatgaggtgggctgggtgaccttcaccaacgctgtcacccgagagcccatctacaccttcactgcctccttcactaggaaggtcattcccttctttgggctctggggccgagggtccagtttctccctgagctcctgagaaggagcagttacctactctcctctaagtacaggactcatatcaacccaagtaccatgtggacttgatccctggctgaatcacctggatgacttggaatagaaatgactgctttagaagatgggatggggccgggtggtaagggatagaagagaggactctcaatctactgatcaagtcctttccccaatgcccagtggatggccagggtacctggggactcaggctgctgccagttctgctcaccaccatccgtgcttggcacagaagtagctgcatagaaagggcactggatttgaagtcagaagacctgggttcttgaaccagcctgtcaaccagttgtatgactttaaacaaggcatctcacctcttttcatcttgttttcttccaataatgttagagttcatgtaatcacattctctagaaccatttagtttgtgttaactatgaaccaagcagtgtggtggccactggtgacttgaaaatatagagaaaaaaaaaacctgctctatatctgaaagagctcttgggaagacagagaaacataaagaggaaattacagcacagtgtggtgggtgttacgggaagtccaaccccagcattatgggagttcaggggaaggggcatagcccagcctggaaggagagggtgagtgggggatggctttctgaaaagggtggtctaaaggatgcctatggtcaatagggaaaagaggggaagaagcatcttaagaagaggaaacagcagagaactggctggatgacctgtgactctggagcactgggttgtctccattgtcattatgggcagatgtgtgccatccccagccgacgccactcactgcctccttcctcctggtgttgccacttctgggtgagattaaggtgcagggcctgggggcaggaggacataaggtatagccataaatcataacccagggaccacactcaaccctagggaaattgtcttcctgatcagttgattaccatctgaggtcaagaaatgagatagtgggagcaaatgggtcacaaatagctcagctgtgggctcagaaactgctaggtaaaagaattccagaaggaggccagggcataagttggatgacctatgaactttagtctaaagaattgagactaccgtaattgagactactgtagtgacatctgagaaatgggatggaagagtgaccatgttttattttcttgttcttgtcactattgtattttattttgcataatcatgcccttcactgacagtctccttaacatcatctgtttactctgctcagtgtaaactacaatgctctgtcatctccctactgggtctcctgggaggaggggagccatccagggtgcaaactcaaaggcagagggcacagcgtgcttaggcccaagcttagaattcaattgagaagttctgttgttcatccttacctcagcaggtagaaaagaggtggagatcagaagccagggattagagattgaattgctttccctgggagtgtgcagtatctcattaaaatgttgtatattcaaaaaaatacagacacacacaagtgcctatataatgataaaacatatccaaagcacccaaacctgtgattccagaaaagtagatcctatttttgtttatttttattggctttagctgtgtcttttgaaaggactattatcctctaaaatgtatgtgtatgaagatcctggcttgcagctcgggagctttacacaccttgtgtcactttatcttggtaacgagccaagatcatgcaaccagttcatccatgtctgacccaagagctcttaactgctatgctgcactgcctcattcagagatagatgcctgcatgggtcctggcgattattttaatgctggctacacccccacaggtgacttggattcagaaatacaatttatatttcttctttttaaattgttttattttatttttcttttaatagttatatgtcagtgagaacaatttatatgtcttacactgagaaataaaactgctcataagtgaaaa

SEQ ID NO: 167970 - DNA, 3546 bp, Artificial Sequence
  derived and/or modified sequence
gagtgtgtgacccagcccttcccccgtggccaagcagagagagtggccttgaggaagccatagcagcaggaccagcatggcctctgctgcctctgtgaccagcctggcagatgaagtcaactgccccatctgtcagggtaccctgagggagccggtcactatcgactgcggccacaacttctgccgggcctgccttacccgctactgtgagataccaggcccagacctggaggagtcccctacttgcccactctgcaaagaacccttccgtcctgggagcttccggcccaactggcagctggctaacgtggtggagaacattgagcgcctccagctggtgtccacactgggtttgggagaggaggatgtctgccaagagcacggagagaagatctacttcttctgtgaggatgatgagatgcagttgtgcgtggtgtgccgggaggctggggagcacgctacccacaccatgcgcttcctggaggatgcagcggctccctatagggaacaaatccataagtgtcttaaatgtctaagaaaagagagagaggagattcaagaaatccagtcaagagaaaataaaaggatgcaagtcctcctgactcaggtgtccaccaagagacaacaggtgatttctgagttcgcacacctgaggaagtttctagaggaacagcagagcatcctcttagcacaattggagagccaggatggggacatcttgaggcaacgggatgaatttgatttgctggttgctggggagatctgccggtttagtgctcttattgaagaactggaggagaagaatgagaggccagcaagggagctcctgacggacatcagaagcactctaataagatgtgaaaccagaaagtgccggaaaccggtggctgtgtcgccagagctgggccagaggattcgggactttccccagcaggccctcccgctgcagagggagatgaagatgtttctggaaaaactatgctttgagttggactatgagccagctcacatttctctagaccctcagacttcccaccccaagctcctcttgtccgaggaccaccagcgagctcagttctcctacaaatggcagaactcaccagacaacccccagcgttttgaccgggccacctgtgttctggcccacactggcatcacaggggggagacacacgtgggtggtgagtatagacctggcccatgggggcagctgcaccgtgggcgtggtgagcgaggatgtgcagcggaagggggagcttcggctgcggccagaggagggggtgtgggctgtgaggctggcttggggcttcgtctcggctctgggctccttccccacacggctgaccctgaaggagcagccccggcaggtgagggtgtctcttgactatgaggtgggctgggtgaccttcaccaacgctgtcacccgagagcccatctacaccttcactgcctccttcactaggaaggtcattcccttctttgggctctggggccgagggtccagtttctccctgagctcctgagaaggagcagttacctactctcctctaagtacaggactcatatcaacccaagtaccatgtggacttgatccctggctgaatcacctggatgacttggaatagaaatgactgctttagaagatgggatggggccgggtggtaagggatagaagagaggactctcaatctactgatcaagtcctttccccaatgcccagtggatggccagggtacctggggactcaggctgctgccagttctgctcaccaccatccgtgcttggcacagaagtagctgcatagaaagggcactggatttgaagtcagaagacctgggttcttgaaccagcctgtcaaccagttgtatgactttaaacaaggcatctcacctcttttcatcttgttttcttccaataatgttagagttcatgtaatcacattctctagaaccatttagtttgtgttaactatgaaccaagcagtgtggtggccactggtgacttgaaaatatagagaaaaaaaaaacctgctctatatctgaaagagctcttgggaagacagagaaacataaagaggaaattacagcacagtgtggtgggtgttacgggaagtccaaccccagcattatgggagttcaggggaaggggcatagcccagcctggaaggagagggtgagtgggggatggctttctgaaaagggtggtctaaaggatgcctatggtcaatagggaaaagaggggaagaagcatcttaagaagaggaaacagcagagaactggctggatgacctgtgactctggagcactgggttgtctccattgtcattatgggcagatgtgtgccatccccagccgacgccactcactgcctccttcctcctggtgttgccacttctgggtgagattaaggtgcagggcctgggggcaggaggacataaggtatagccataaatcataacccagggaccacactcaaccctagggaaattgtcttcctgatcagttgattaccatctgaggtcaagaaatgagatagtgggagcaaatgggtcacaaatagctcagctgtgggctcagaaactgctaggtaaaagaattccagaaggaggccagggcataagttggatgacctatgaactttagtctaaagaattgagactaccgtaattgagactactgtagtgacatctgagaaatgggatggaagagtgaccatgttttattttcttgttcttgtcactattgtattttattttgcataatcatgcccttcactgacagtctccttaacatcatctgtttactctgctcagtgtaaactacaatgctctgtcatctccctactgggtctcctgggaggaggggagccatccagggtgcaaactcaaaggcagagggcacagcgtgcttaggcccaagcttagaattcaattgagaagttctgttgttcatccttacctcagcaggtagaaaagaggtggagatcagaagccagggattagagattgaattgctttccctgggagtgtgcagtatctcattaaaatgttgtatattcaaaaaaatacagacacacacaagtgcctatataatgataaaacatatccaaagcacccaaacctgtgattccagaaaagtagatcctatttttgtttatttttattggctttagctgtgtcttttgaaaggactattatcctctaaaatgtatgtgtatgaagatcctggcttgcagctcgggagctttacacaccttgtgtcactttatcttggtaacgagccaagatcatgcaaccagttcatccatgtctgacccaagagctcttaactgctatgctgcactgcctcattcagagatagatgcctgcatgggtcctggcgattattttaatgctggctacacccccacaggtgacttggattcagaaatacaatttatatttcttctttttaaattgttttattttatttttcttttaatagttatatgtcagtgagaacaatttatatgtcttacactgagaaataaaactgctcataagtgaaaa

SEQ ID NO: 167971 - DNA, 3549 bp, Artificial Sequence
  derived and/or modified sequence
gagtgtgtgacccagcccttcccccgtggccaagcagagagagtggccttgaggaagccatagcagcaggaccagcatggcctctgctgcctctgtgaccagcctggcagatgaagtcaactgccccatctgtcagggtaccctgagggagccggtcactatcgactgcggccacaacttctgccgggcctgccttacccgctactgtgagataccaggcccagacctggaggagtcccctacttgcccactctgcaaagaacccttccgtcctgggagcttccggcccaactggcagctggctaacgtggtggagaacattgagcgcctccagctggtgtccacactgggtttgggagaggaggatgtctgccaagagcacggagagaagatctacttcttctgtgaggatgatgagatgcagttgtgcgtggtgtgccgggaggctggggagcacgctacccacaccatgcgcttcctggaggatgcagcggctccctatagggaacaaatccataagtgtcttaaatgtctaagaaaagagagagaggagattcaagaaatccagtcaagagaaaataaaaggatgcaagtcctcctgactcaggtgtccaccaagagacaacaggtgatttctgagttcgcacacctgaggaagtttctagaggaacagcagagcatcctcttagcacaattggagagccaggatggggacatcttgaggcaacgggatgaatttgatttgctggttgctggggagatctgccggtttagtgctcttattgaagaactggaggagaagaatgagaggccagcaagggagctcctgacggacatcagaagcactctaataagatgtgaaaccagaaagtgccggaaaccggtggctgtgtcgccagagctgggccagaggattcgggactttccccagcaggccctcccgctgcagagggagatgaagatgtttctggaaaaactatgctttgagttggactatgagccagctcacatttctctagaccctcagacttcccaccccaagctcctcttgtccgaggaccaccagcgagctcagttctcctacaaatggcagaactcaccagacaacccccagcgttttgaccgggccacctgtgttctggcccacactggcatcacaggggggagacacacgtgggtggtgagtatagacctggcccatgggggcagctgcaccgtgggcgtggtgagcgaggatgtgcagcggaagggggagcttcggctgcggccagaggagggggtgtgggctgtgaggctggcttggggcttcgtctcggctctgggctccttccccacacggctgaccctgaaggagcagccccggcaggtgagggtgtctcttgactatgaggtgggctgggtgaccttcaccaacgctgtcacccgagagcccatctacaccttcactgcctccttcactaggaaggtcattcccttctttgggctctggggccgagggtccagtttctccctgagctcctgagaaggagcagttacctactctcctctaagtacaggactcatatcaacccaagtaccatgtggacttgatccctggctgaatcacctggatgacttggaatagaaatgactgctttagaagatgggatggggccgggtggtaagggatagaagagaggactctcaatctactgatcaagtcctttccccaatgcccagtggatggccagggtacctggggactcaggctgctgccagttctgctcaccaccatccgtgcttggcacagaagtagctgcatagaaagagcactggatttgaagtcagaagacctgggttcttgaaccagcctgtcaaccagttgtatgactttaaacaaggcatctcacctcttttcatcttgttttcttccaataatgttagagttcatgtaatcacattctctagaaccatttagtttgtgttaactatgaaccaagcagtgtggtggccactggtgacttgaaaatgtagagaaaaaaaaaacctgctctatatctgaaagagctcttgggaagacagagaaacataaagaggaaattatagcacagtgtggtgggtgttacgggaagtccaaccccagcattatgggagttcaggggaaggggcatagcccagcctggaaggagaggatgagtgggggatggctttctgaaaagggtagtctaaaggatgcctatagtcaatagggaaaagaggggaagaagcatcttaagaagaggaaacagcagagaactggctggatgacctgtgactctggagcactgggttgtctccattgtccttatgggcagatgtgtgccatccccagccgacaccactcactgcctccttcctcctggtgttgccacttctgggtgagattaaggtgcagggcctgggggcaggaggacataaggtatagccataaatcataacccagggaccacactcaaccctagggaaattgtcttcctgatcagttgattaccatctgaggtcaagaaatgagatagtgggagcaaatgggtcacaaatagctcagctgtgggctcagaaactgctaggtaaaagaattccagaaggaggccagggcataagttggatgacctatgacctttagtctaaagaattgagactaccgtaattgagactactgtagtgacatctgagaaatgggatggaagagtgaccatgttttattttcttgttcttgtcactattgtattttattttgcataatcatgcccttcactgacagtctccttaacatcatctgtttactctgctcagatgtaaaatacaatgctctgtcatctccctactgggtctcctgggaggaggggagccatccagggtgcaaactcaaaggcagagggcacagcgtgcttaggcccaagcttagaattcaattgagaagttctgttgttcatccttacctcagcaggtagaaaagaggtggagatcagaagccagggattaaagattgaattgctttccctgggagtgtgcagtatctcattaaaatgttgtatattcaaaaaaatacagacacacacaagtgcctatataatgataaaacatatgcaaagcacccaaacctgtgattccagaaaggtagatcctatttttctgtttatttttattggctttagctgtgtcttttgaaaggactattatcctctaaaatgtatgtgtatgaagatcctggcttgcagctcgggagctttacacaccttgtgtcactttatcttggtaacgagccaagatcatgcaaccagttcatccatgtctgacccaagagctcttaactgctatgctgcactgcctcattcagagatagatgcctgcatgggtcctggcgattattttaatgctggctacacccccacaggtgacttggattcagaaatacaatttatatttcttctttttaaattgttttattttatttttcttttaatagttatatgtcagtgagaacaatttatatgtcttacactgagaaataaaactgctcataagtgaaaa

SEQ ID NO: 167972 - protein, 824 aa, Artificial Sequence
  derived and/or modified sequence
MSLLGDPLQALPPSAAPTGPLLAPPAGATLNRLREPLLRRLSELLDQAPEGRGWRRLAELAGSRGRLRLSCLDLEQCSLKVLEPEGSPSLCLLKLMGEKGCTVTELSDFLQAMEHTEVLQLLSPPGIKITVNPESKAVLAGQFVKLCCRATGHPFVQYQWFKMNKEIPNGNTSELIFNAVHVKDAGFYVCRVNNNFTFEFSQWSQLDVCDIPESFQRSVDGVSESKLQICVEPTSQKLMPGSTLVLQCVAVGSPIPHYQWFKNELPLTHETKKLYMVPYVDLEHQGTYWCHVYNDRDSQDSKKVEIIIGRTDEAVECTEDELNNLGHPDNKEQTTDQPLAKDKVALLIGNMNYREHPKLKAPLVDVYELTNLLRQLDFKVVSLLDLTEYEMRNAVDEFLLLLDKGVYGLLYYAGHGYENFGNSFMVPVDAPNPYRSENCLCVQNILKLMQEKETGLNVFLLDMCRKRNDYDDTIPILDALKVTANIVFGYATCQGAEAFEIQHSGLANGIFMKFLKDRLLEDKKITVLLDEVAEDMGKCHLTKGKQALEIRSSLSEKRALTDPIQGTEYSAESLVRNLQWAKAHELPESMCLKFDCGVQIQLGFAAEFSNVMIIYTSIVYKPPEIIMCDAYVTDFPLDLDIDPKDANKGTPEETGSYLVSKDLPKHCLYTRLSSLQKLKEHLVFTVCLSYQYSGLEDTVEDKQEVNVGKPLIAKLDMHRGLGRKTCFQTCLMSNGPYQSSAATSGGAGHYHSLQDPFHGVYHSHPGNPSNVTPADSCHCSRTPDAFISSFAHHASCHFSRSNVPVETTDEIPFSFSDRLRISEK

SEQ ID NO: 167973 - DNA, 2475 bp, Artificial Sequence
  derived and/or modified sequence
atgtcgctcttgggagatcccttgcaagctctgccaccatctgcagcacccacgggccccttgctcgcccctccagccggcgctactctgaatcgcctccgggagccactgctgaggagactgtctgaactcctggatcaggcccccgaggggagaggttggcggcgcttggccgaactcgccggatcaagagggaggctgcgcttgagctgtctcgacttggagcagtgctccctcaaagtgctcgaacccgagggttccccatccctgtgtctgctgaagctgatgggcgagaaggggtgcaccgtgaccgagttgtcagatttcctgcaggctatggagcacacggaagtcctgcagctcctctccccgcctggaatcaagattaccgtgaatccggaatctaaagcggttctggccggtcagttcgtcaagctgtgttgcagggcaacaggacatccctttgtccagtaccaatggttcaagatgaacaaggagatcccaaacggtaatacttccgagctgatcttcaacgccgttcatgtaaaagatgccgggttctacgtgtgccgcgtgaacaataatttcacctttgaattcagtcagtggtcccaactggacgtctgcgatatccctgagagcttccagcggtccgtggacggggtgtctgaatccaaactgcagatctgcgtggagcccacttcacagaagcttatgcctggctcgaccctggtgctacagtgcgtggccgtgggatctcccatccctcactaccaatggtttaagaacgagcttccccttactcacgaaacaaaaaaattgtacatggtaccatacgtggatctcgagcaccagggaacttattggtgtcacgtgtataacgaccgggatagtcaggactccaagaaggttgagattatcattggaagaacagacgaggccgtggaatgtactgaagacgagcttaacaacctgggtcaccctgacaacaaggaacagacaaccgatcaaccactcgctaaggataaggtggctcttctgataggaaacatgaattacagggagcatccaaagctgaaagccccacttgtcgacgtttatgaacttactaatctgctcaggcagctcgatttcaaagtggtttctctattagacctcaccgagtatgagatgcgaaacgcggtcgacgaattcctgctactgctcgacaagggagtatacggactcctctactacgctggccacggatatgaaaactttggcaacagcttcatggtcccggtcgatgcccccaatccctatcgatccgaaaactgtctgtgtgtgcagaacattctgaagttgatgcaagagaaagagacagggctgaatgtgtttctgctggatatgtgtcgcaaacgaaatgactacgacgatacgatccctatactggacgccttaaaggtcacagctaatatagtattcggttatgcgacttgtcagggcgccgaggctttcgagattcagcattccggattggcaaacgggattttcatgaagtttctcaaagaccggctgcttgaggataagaagattacggtattgttggatgaggtggctgaagacatgggcaaatgccacctgacaaagggcaaacaagcactggaaatacggtcaagccttagcgaaaagagagctttgacggatccaatacaagggacagaatattctgccgagagcctggtaagaaacctgcagtgggctaaggctcacgagctgccagaaagtatgtgtctaaagttcgactgcggggtgcagattcagctcggattcgcggctgagttttcaaacgttatgattatttatacttcaattgtgtacaagccgcccgaaataattatgtgcgacgcctacgttacagattttcctctggatttggatattgatcccaaggatgccaacaaggggacacctgaagagacgggctcatacctcgtgagcaaagatctcccaaaacactgtctgtacacacggctgagctctttgcagaagctcaaagaacacctggtgttcaccgtgtgtctttcctaccagtatagcggactcgaagatacagtggaggacaagcaggaggtgaatgtgggcaaacccctgatagccaagttggacatgcacaggggattggggcgcaagacgtgttttcagacatgtttaatgagcaacggcccctaccagtcttccgcagctacatccggaggagcaggccattaccactcacttcaagatccattccacggggtctatcattctcacccggggaacccatccaacgttacacctgctgattcatgtcactgctccaggacccctgatgcgttcatatcatctttcgcacatcacgctagctgccacttctctcgttcaaatgtgcccgtggagaccaccgacgaaatccccttttcattctctgatcggctgcggatctcagaaaagtag

SEQ ID NO: 167974 - DNA, 2475 bp, Artificial Sequence
  derived and/or modified sequence
atgagcctgctgggggaccccctgcaggccctgccccccagcgctgcccccaccggccccctgctggcccccccagctggggccaccctgaaccggctgcgggagcccctgctgcggcggctgtctgagctgctggaccaggcccctgagggccggggctggaggcggctggccgagctggccggcagccggggccgcctgcggctgagctgcctggacctggagcagtgcagcctgaaggtgctggagcctgagggcagccccagcctgtgcctgctgaagctgatgggagagaagggctgcaccgtgacagagctgagtgacttcctgcaggccatggagcacacagaggtgctgcagctgctgagccccccaggcatcaagatcaccgtgaaccctgagagcaaggctgtgctggccggccagtttgtgaagctgtgctgccgggccaccggccacccctttgtgcagtaccagtggttcaagatgaacaaggagatccccaatggaaacaccagcgagctgatcttcaatgctgtgcacgtgaaggatgctggcttctacgtgtgccgggtgaacaacaacttcacctttgagttcagccagtggagccagctggatgtgtgtgacatccctgagagcttccagaggtctgtggatggagtgtctgagagcaagctgcagatctgtgtggagcccaccagccagaagctgatgcctggcagcaccctggtgctgcagtgtgtggccgtgggcagccccatcccccactaccagtggttcaagaatgagctgcccctgacccatgagaccaagaagctgtacatggtgccctacgtggacctggagcaccagggcacctactggtgccacgtgtacaatgaccgggacagccaggacagcaagaaggtggagatcatcatcggccgcacagatgaggccgtggagtgcacagaagatgagctgaacaacctgggccacccagacaacaaggagcagaccacagaccagcccctggccaaggacaaggtggccctgctgattggcaacatgaactaccgggagcaccccaagctgaaggcccccctggtggatgtgtatgagctgaccaacctgctgcggcagctggacttcaaggtggtgtccctgctggacctgacagaatatgagatgagaaatgctgtggatgagttcctgctgctgctggacaagggcgtgtatggcctgctgtactatgccggccacggctatgagaactttggaaacagcttcatggtgcctgtggatgcccccaacccctacagaagtgagaactgcctgtgtgtgcagaacatcctgaagctgatgcaggagaaggagaccggcctgaatgtgttcctgctggacatgtgcaggaagagaaatgactatgatgacaccatccccatcctggatgccctgaaggtgacagccaacatcgtgtttggctacgccacctgccagggcgctgaggcctttgagatccagcacagcggcctggccaacggcatcttcatgaagttcctgaaggaccggctgctggaggacaagaagatcaccgtgctgctggatgaggtggccgaggacatgggcaagtgccacctgaccaagggcaagcaggccctggagatccgcagcagcctgtctgagaagagggccctgacagaccccatccagggcacagagtacagcgctgagagcctggtgaggaacctgcagtgggccaaggcccacgagctgcctgagagcatgtgcctgaagtttgactgtggggtgcagatccagctgggctttgctgctgagttcagcaatgtgatgatcatctacaccagcatcgtgtacaagcccccagagatcatcatgtgtgatgcctacgtgacagacttccccctggacctggacatcgaccccaaggatgccaacaagggcaccccagaggagaccggcagctacctggtgtccaaggacctgcccaagcactgcctgtacacccggctgagcagcctgcagaagctgaaggagcacctggtgttcaccgtgtgcctgagctaccagtacagcggcctggaggacacagtggaggacaagcaggaggtgaatgtgggcaagcccctcatcgccaagctggacatgcaccggggcctgggcaggaagacctgcttccagacctgcctgatgagcaatggcccctaccagagcagcgctgccaccagcggcggggccggccactaccacagcctgcaggaccccttccacggcgtgtaccacagccaccctggcaaccccagcaatgtgaccccagctgacagctgccactgcagcaggaccccagatgccttcatcagcagctttgcccaccacgccagctgccacttcagccgcagcaatgtgcctgtggagaccacagatgagatccccttctccttcagtgaccggctgcgcatcagcgagaagtag

SEQ ID NO: 167975 - DNA, 8789 bp, Artificial Sequence
  derived and/or modified sequence
cgaggctccgtgccccgccccccgggtgccccgcccctttgcgcggctggcgcggccagcaggccaggctcccctcggcaaacctgtctaattggggcggggagcggagcttcctcctctgagggccgtgccgcgctgccagatttgttcttccgcccctgcctccgcggctcggaggcgagcggaaggtgccccggggccgaggcccgtgacggggcgggcgggagccccggcagtccggggtcgccggcgagggccatgtcgctgttgggggacccgctacaggccctgccgccctcggccgcccccacggggccgctgctcgcccctccggccggcgcgaccctcaaccgcctgcgggagccgctgctgcggaggctcagcgagctcctggatcaggcgcccgagggccggggctggaggagactggcggagctggcggggagtcgcgggcgcctccgcctcagttgcctagacctggagcagtgttctcttaaggtactggagcctgaaggaagccccagcctgtgtctgctgaagttaatgggtgaaaaaggttgcacagtcacagaattgagtgatttcctgcaggctatggaacacactgaagttcttcagcttctcagccccccaggaataaagattactgtaaacccagagtcaaaggcagtcttggctggacagtttgtgaaactgtgttgccgggcaactggacatccttttgttcaatatcagtggttcaaaatgaataaagagattccaaatggaaatacatcagagcttatttttaatgcagtgcatgtaaaagatgcaggcttttatgtctgtcgagttaataacaatttcacctttgaattcagccagtggtcacagctggatgtttgcgacatcccagagagcttccagagaagtgttgatggcgtctctgaatccaagttgcaaatctgtgttgaaccaacttcccaaaagctgatgccaggcagcacattggttttacagtgtgttgctgttggaagccctattcctcactaccagtggttcaaaaatgaattaccattaacacatgagaccaaaaagctatacatggtgccttatgtggatttggaacaccaaggaacctactggtgtcatgtatataatgatcgagacagtcaagatagcaagaaggtagaaatcatcataggaagaacagatgaggcagtggagtgcactgaagatgaattaaataatcttggtcatcctgataataaagagcaaacaactgaccagcctttggcgaaggacaaggttgcccttttgataggaaatatgaattaccgggagcaccccaagctcaaagctcctttggtggatgtgtacgaattgactaacttactgagacagctggacttcaaagtggtttcactgttggatcttactgaatatgagatgcgtaatgctgtggatgagtttttactccttttagacaagggagtatatgggttattatattatgcaggacatggttatgaaaattttgggaacagcttcatggtccccgttgatgctccaaatccatataggtctgaaaattgtctgtgtgtacaaaatatactgaaattgatgcaagaaaaagaaactggacttaatgtgttcttattggatatgtgtaggaaaagaaatgactacgatgataccattccaatcttggatgcactaaaagtcaccgccaatattgtgtttggatatgccacgtgtcaaggagcagaagcttttgaaatccagcattctggattggcaaatggaatctttatgaaatttttaaaagacagattattagaagataagaaaatcactgtgttactggatgaagttgcagaagatatgggtaagtgtcaccttaccaaaggcaaacaggctctagagattcgaagtagtttatctgagaagagagcacttactgatccaatacagggaacagaatattctgctgaatctcttgtgcggaatctacagtgggccaaggctcatgaacttccagaaagtatgtgtcttaagtttgactgtggtgttcagattcaattaggatttgcagctgagttttccaatgtcatgatcatctatacaagtatagtttacaaaccaccggagataataatgtgtgatgcctacgttactgattttccacttgatctagatattgatccaaaagatgcaaataaaggcacacctgaagaaactggcagctacttggtatcaaaggatcttcccaagcattgcctctataccagactcagttcactgcaaaaattaaaggaacatctagtcttcacagtatgtttatcatatcagtactcaggattggaagatactgtagaggacaagcaggaagtgaatgttgggaaacctctcattgctaaattagacatgcatcgaggtttgggaaggaagacttgctttcaaacttgtcttatgtctaatggtccttaccagagttctgcagccacctcaggaggagcagggcattatcactcattgcaagacccattccatggtgtttaccattcacatcctggtaatccaagtaatgttacaccagcagatagctgtcattgcagccggactccagatgcatttatttcaagtttcgctcaccatgcttcatgtcattttagtagaagtaatgtgccagtagagacaactgatgaaataccatttagtttctctgacaggctcagaatttctgaaaaatgacctccttgtttttgaaagttagcataattttagatgcctgtgaaatagtactgcacttacataaagtgagacattgtgaaaaggcaaatttgtatatgtagagaaagaatagtagtaactgtttcatagcaaacttcaggactttgagatgttgaaattacattatttaattacagacttcctctttctaagattttgtgaattggttgaatagttctatacaaatgaagtatggaggtgtgtatgtttatatgtatataacaaaatattttcattgtgaccactctgaagtaagagcaatgggaatggcattattgtagaataagtcattgtatttttaacaccagaaagaaccttgccgatcaccaggcataacctaattttatccatggaagaaacacagaaaggcatctaagttagagctggcaccagaactgagacctccagaaatctattccagtattttttccactacacaactgccttcctgacaggttctgagataagtgttatgtttgtagatagagtgaaatatatttatatatatataaatatatacagatacatatctgtgtattatctcaaggaatgtacaaactttagtttttgattataaggacttcactgcaagttttagttaagaggtttgtatataaatctgttatagaacaggctgaaatttcttgttcataagattatgaaaccacatgagaagtgataaaatgtttgttaaagctagatagaggttaagaatcaagatataatggataattttcatagctgcctatcagaatttcccaaatatttagcatcttccttgataatatgtattttcttcttgaatttcactggcctaatgagataatactcttatctttggctctacctaaaagttggttaaaaatgcaattggcattaacaaggaaaaatactgaattagtaattttaaaagtctcacaaagaaaatcccaggcctagatggctgcattgttgaattctgccaaacattaaaattagcactaattttttgcacactgtttctaaaagtaggagaggaaagaacacttcccaacttactctaggtcagtattaccctgatactagactagacatcacaagaaaactataagccaatattccttattaatacaaacacaaaaatcattaacaaaaatattagcaaactgaatccagcaacctataaaaaggattctatatcatgaccaagtggaatttatcccaggaattcaaggttggttcaacatctaaaaatcaaataagctaatatacagtcagttctcattattcacagtaattatgttctacagaatattctcccataaacactgaattaaatatggaacaactgcttttaggagaaagtgtatttgtgtatatgtgtgtatacatatgtttatctcacacacattatgagcttgaattcttaattcatcctagcaaattctaccttattttacagaagtgaaagtgaggtatcagaagtgttaagtgacatgcctgaggcacccccctaacaggtgtcagagctgaaattcaaaccccatccagctggccccggagccagagcttcttgtactacacagaattgcccctgccatttccaccctccagtcatttctctatgagactgaagcaggaaggcagagcatcatcttgttcagcctcagctgggaacatgtgtactgggtgactcaaatttttcacccatttacacatatccacaaatgactgcaaaagtgccacggatatcaatttgagggttataaattttagcaagttggtaaattcacaaatacataaccttgaataatgaggatcaactgtaccatatttaataaagcacaaaacccacacagattgtcttattacagcatttgataaaatccaaaactctttcataaaaacactcaacaaacttaggaataaaaggaatcttcctagatatgataaatataacatctatgaaaagcccacacctaacattatacttcatggtgatagactgaaggctgaatgttttccccttaagattgggaagaaggacaaggatgttcactcggcactacttctattcagcattgtacttgaagttctagccacagcagttaggttaggaattcaaggtttgttcaacatctaaaaatcaaataagctaataaagaaaagaggtttatactgcaaaagaagtgaaactatatgtattcacagttgatacatagttgtatatagaaaatgctaaagaatccataaaaagtaataaatgagttcaacaggttgcaggatacaagatcagttttatttctctactaacagcaaacattctgaaaatgagaataaagaaatcctatatacagtagcatcaagaataaaactccaacacgtttaaagaaattaagatccagataaatggaaagacatccatgttcatggattggaagactgaatattggtaagatggcaatgctgcccaaattagtctacatattcaacaattcctatcaaaatcctagctgtattttttgcagaaattgacaaactggtaaaattggtagggaaacgcaggggacccagaatagccaaaaaaccttggaaaagaacaaagttggaagacgtaccaatttcaaaaagtgctaccaagctacaataagacagtgtaggcatatggatagacatatcgatcagaggaatggaactgaacatccagaaataaacccatacatttctggtcaacttgttttcaacaaggatgccaataccatcaatagagaaggagtggtcttttcaacaaacggtgctgggacaactaactggtagctacgtgcacagcaaaaggatccctaccttcctaccacattacaaattctaactcaaaatggatcatagacctcaatataagagtttaaactcttagaagaaaacagaagtaaatctttgtgatgttgggcttaggaatggtttcttagacataataccaaaagcacaagcaacaaaggcaaacagtagataaatgggacttcatcaaaattaactttagcgccttaaaggacaccattaagaaagtgaagttaaccctcagaatgggagaaaaatttttgaaaaatcatgtatctgataaaaaaacaaacaaacatgcaggtgctcagctgtggttaccaccgagcagcactgtccagtgaacttgctgtgatgatgggatgcttggtatccgcactcccagtgtgatagcctttagcctcatggggttgttgagcagttgaaataatagctagtgtgaggaactgaacataaaattttagttttaggatgggtgtggtggctcacgcctataatctcagcactttgggaggccaatgaaggcggatcacttgagcccaggagttcaagaccagcttgaccaagatggcaaaaccctgtctctattaaaaatacaaaaaaattagctgggcatggtggcacacacctgtaatcccagctactagggaggctgaggcaggagaatcgtacttcccctttatactcttctgtatatttgatttttttttttttaagacagagtcctggctctgtcgcccaggctggagtgcagcgacatagtctcagctcactgcagcatccgtggaggctgaaacaggagaatcgcatgaattttttaaaaaatctaaacatgtaattttaaaacgggcttaagaagaatgataacagttttggtcttcttttttatcaaccatgcttttattttacttgaatctcgtgccaattgctttgtaatattaaagtaggatttacacaagtggaatttagaaaagatgataatctatcaaatctgtcaataccaattagaatgtaataaagaaattaggatagtggaggtttgagcaagtaaaggctcacccaaattcaaagccaatacttgatgctgagaggggatattttctggaaggtaatttttaaaaattaaagtcacaattataaattgtatatttcctaataaaagaaatctcaactcatgggacaatttgaatttaaaacactattgttcctcattcagtgatgaacaagtcaaaacgtttcagaaaagaaagcctttaaagaagaatcctggcacagaaaaggtccatttagacattgccttcttcccccatctctaatgcctcttttcaaatctctgacttgcacatgaagtaacagtgaggtgtcctgtgcagcagtcgcaattttttgacttgtcaaattgaagaaattcaattatgtagccagagcttagatcactgacatgtatactggcataagcttttttttgtttgtttttaattttattagaagtgggatctcattttgttgcccatgctggtctcaaacacctgtcttcaagtgatcctcctgcctcagcagcatcagtttaatatctagataaaatctgatgtatgtaattttacttttaagggtttttttccaaacagacgtcctgacaatgttgtttcctattccttgaacattcacctgacgcttatatactgtcattacttttatctgtcaactgatgtcagctactcaatttacacattacttttgtgcatttcatcctgtttctcagtttgacattgtcattcaaattcagagtttgacactgaaaccctgggcatggtggctcacacctgtaatcccagcacttcgggagactgcggtaagcagatcatttgaacccaggagtttgagactagccttggcaacatggtgaaaccccatctctaccaaaaaaaaaaaaaaaaaaaaagcaaaaacaaaaattaactgggcatagttgcacacacctgtagtcccagctactcaggaggctgaagtgggacgatcgcttgagcccagaaggcagaggttacggtgagtagagattgtgccactgcactccagcctggacgacagggcaagacgctgtctcaaaaataaaatattagtaaagaagagtacaatcagaatatgaaaatgtgtaaatgtgcatattctctttttttctaatttggtagcattaaaaatacttaagcatcaaagtttggctttatgaagaaggagtctgagacacctcaggtttcagcccttactaatagcgtggctcaaagagcgttaacttgcctgtgcttctgtttccttatctgtaaaatggggatgatgctgtaacatcaaagagcttataatactttccagagctggcagtactaaataagaccattcctctaaagtgccagcattttgaaaagcatcaacccatcaaccttgtgctttaaatctggcattcttaaagctatacctgtaggcagtatagagtgtttttttttatttgtttttttgttgttgtcttttgagtctcactctgtctcccaggctgtagtgcagtggcacgtcttggttcgccgcaacctccgcctcccaggttcaagcgattctcgtgcctcagccccccgcatagctggcattacaggcacacaccaccacgcccagctaatttttgtagttttagtagtatctactaaaataaacagggtttcaccatgttggccaggctggtctcaaactcctgacctcaagtgatctgcctgcctcggcctcccaaagtgctgggattacaggcgtgagtcaccatgcccggccggcagtgtatatcttctaaagttgcaatttttgttcactccagaatcacttttcaaaaagcatgcagatttaatgccaccagtttgtgttatgtatctatcccgcaaaacagctctaaaggtgatttactaaaagattaacagcatttatctctggtgggataatttttctttgcttgtttacctgtgtcttgcagattttacacagtgaacaatgactgtataattttaaaatacagatatgcacaattgtgtaatgtaaatatgctcagcttcaatacatttaagaacacatttttaacttttcgtaaggagtcttcagtttaaaagtacagtgtcattacagagtgcttattctgttacaaaattagtaaagctgattctgcctctaaa

SEQ ID NO: 167976 - DNA, 2475 bp, Artificial Sequence
  derived and/or modified sequence
atgagcctgctgggcgaccccctgcaggccctgccccccagcgccgcaccgacaggccccctccttgctccccctgccggtgctaccctgaataggctgagggagccccttctcagaaggttgtcagagctgctggatcaagcccctgagggccgaggatggagaagacttgccgagctagccggaagtcgcggtcggcttcgtttgtcatgcttggacctggagcagtgctccctgaaggttcttgagcctgaagggagcccctccctctgcttgctgaagctcatgggtgaaaaggggtgcaccgttaccgagctgtccgactttctacaggccatggagcataccgaggtgctgcagctgctgagcccacccggaatcaagatcaccgtgaacccagagtcgaaagccgtgttagctggacaatttgtaaagctttgctgcagggcaaccggccacccgtttgtgcagtaccaatggtttaagatgaacaaggaaatcccaaatggtaacacatctgaattaatatttaacgcggtgcacgtgaaggatgctggcttttatgtgtgccgggtgaacaataactttacttttgagttcagccagtggtcacaactggatgtatgcgatataccagaaagtttccagagaagcgttgacggtgtgtctgaatctaaactccagatctgtgtggaaccaacatcacagaaactaatgccaggcagtactttggtgctacagtgcgtggctgtgggatcacccataccgcactatcaatggtttaagaatgagcttccactgacgcatgaaactaaaaaactgtacatggtgccctatgtggatctggagcaccaaggaacatactggtgccatgtctataacgatcgcgatagtcaggatagcaagaaggtggagatcatcataggccgcactgacgaagcagtggaatgcacggaagatgagctaaataacctcggacacccggataataaggaacagaccacagaccagcccttagcaaaggacaaagtggcattgcttatcggcaatatgaactaccgggaacaccctaagcttaaagcacccctggtcgacgtatacgagctgactaatctgctgagacaattagactttaaggtcgtgtcgttgcttgacctgacggagtacgagatgcgcaacgctgtagacgagtttctgcttctcctggacaagggggtgtatgggctgctctactatgcaggtcacggctatgaaaatttcgggaatagcttcatggtccctgtggatgcgcctaatccgtacaggtccgagaattgcttatgtgttcagaacattctgaaacttatgcaggagaaagagaccggcctcaatgtatttctgctcgatatgtgtcggaagcgaaatgattatgacgacactattcctatccttgacgccctcaaagtgaccgctaacattgttttcggttacgcaacgtgccagggagccgaggcctttgaaattcagcattcgggcctagccaacggaatcttcatgaagttcctgaaagaccgcctactcgaggataagaaaattacagtgctgctggacgaagtcgccgaagatatgggcaagtgccaccttacaaaggggaagcaggccttagagatccggagcagtctttcagagaagagggccctgaccgaccccatccaaggtacagaatacagcgccgagtctttagtcaggaacctgcaatgggccaaggcacacgagctgcctgagtccatgtgtttaaaatttgactgtggtgtccaaattcagttaggttttgctgcagagttttccaacgtcatgataatctatacctccatcgtttataaaccccctgagatcataatgtgcgacgcatatgtaacagacttccccctcgacctggacatagatccgaaagatgccaacaaagggactccagaggagacggggtcctacctggtgagtaaggacttacctaagcactgcctttacacaagactgagttctcttcagaaattgaaggagcacctcgttttcacggtgtgcctcagctatcagtatagcggactagaggacacagtggaagataaacaggaggtcaacgtgggcaagccgcttatcgccaagctggacatgcaccgaggcctgggacgaaagacgtgcttccagacatgtctcatgtctaatggcccataccagtctagcgccgcaacatccggaggcgcagggcattaccattctctccaggacccgttccacggcgtgtatcactctcatccggggaatccctcaaatgtgacacccgccgattcatgtcattgctccaggactccagatgcctttatcagttcttttgcccatcatgcctcatgccactttagtcggtcgaacgtgccagtggagacaactgacgagattccattctcgttctccgacaggctgcgaattagcgagaagtag

SEQ ID NO: 167977 - DNA, 2475 bp, Artificial Sequence
  derived and/or modified sequence
atgtccctgttaggagaccctctgcaagcactccctccctccgccgctcctaccggaccactgctggcccctcctgccggagccaccttgaatcgattgcgcgaaccgctcctcagaaggctcagcgaactcctggaccaagcccctgaggggcgaggatggaggcgattggctgagttagccggaagtagaggaaggcttaggctgagctgcttggatctggaacaatgtagcctcaaggtcttggagccagaagggtcaccgtctctgtgtctgctgaaactaatgggggaaaagggttgtacagtgaccgaactctctgacttcctgcaggctatggagcacaccgaggtcctgcaattactctctccacccggtattaagattaccgtgaaccccgaatctaaggcagtgctagccggtcaattcgtcaagctgtgttgcagggcaaccggacacccgtttgttcagtaccaatggttcaagatgaacaaggagataccgaatggcaatacttcagagttgatcttcaacgcagtgcacgtcaaggatgcagggttctacgtgtgccgcgtgaacaacaatttcacatttgagttttcccagtggtctcaactggacgtgtgcgacattcctgaatcattccagagaagcgtggacggagtgagcgagagcaaattacagatctgtgtggagcccacatcacaaaagctaatgcctggctctactctggtgctgcagtgtgtggcagtggggtctcccattcctcactaccagtggttcaagaacgagttaccgcttacccacgagacgaagaagctctatatggtgccttatgtggaccttgagcatcaagggacatactggtgtcacgtgtataacgaccgggacagccaggacagcaaaaaggtggagataattatcggacggactgacgaggctgtcgagtgcaccgaagatgaactcaataacctgggccatcctgacaataaggaacaaactaccgaccagccactggccaaagataaggtggccttgttaatcggaaatatgaactaccgcgaacacccgaaactgaaggctccgctcgtagacgtgtacgagctcaccaatctgttgcggcagttagattttaaagtcgtctccctgctggacctcacagaatacgaaatgagaaatgccgtcgatgagttcctgctcttgctagacaaaggtgtgtatggactgctttactacgccggtcacgggtacgaaaactttgggaactccttcatggtgcccgtcgacgcccctaacccctaccgttctgagaattgtctctgcgtgcaaaatatcctgaaactcatgcaagaaaaagagacagggctgaatgtgtttttgctggacatgtgccggaagcgaaacgattatgacgacacaattccaatcttggatgccctgaaggtgactgccaacattgtgtttggttacgccacctgtcagggagctgaggcttttgagatacagcactcgggcctggctaacgggattttcatgaaatttctcaaggatcggctccttgaagacaagaagatcaccgtgttgctcgatgaggtagccgaggacatgggcaagtgccacctgaccaaaggtaagcaggcattggagatcagatctagcttgtccgaaaagcgggctctcacagatccaatccagggaaccgagtattccgcagagtcactggtgcgcaaccttcagtgggccaaagcccacgaacttcctgagtcaatgtgccttaagtttgattgtggcgttcagatacagctgggtttcgctgctgaattttcaaacgttatgatcatctatacgagtatcgtgtataaaccccctgaaatcattatgtgtgatgcctacgtgacagacttccccctggacctggatattgaccctaaggacgcaaataaggggactcccgaagagacaggatcctacctggtgtcgaaggacctgcccaaacattgtctttacacacgcctaagttccctccaaaagcttaaggagcaccttgtatttactgtgtgtttaagttaccagtacagtggcctcgaagacacagtggaagacaagcaggaggtaaacgttgggaagcccctgatagctaagcttgacatgcacagaggtctggggagaaaaacgtgttttcagacatgcctgatgtccaacggcccttatcagtcatctgccgctacttcaggaggtgccggtcactaccacagcctccaggatccctttcacggagtctaccatagccatccaggcaacccttcaaacgtgacccccgctgactcttgtcactgttctaggactcccgatgcatttattagctcgtttgctcaccatgcatcgtgccacttctcccggtctaatgtgccagtcgaaacaaccgatgagattccatttagtttctccgaccgccttaggattagcgaaaaatag

SEQ ID NO: 167978 - DNA, 2475 bp, Artificial Sequence
  derived and/or modified sequence
atgagcctgctgggcgaccccctgcaggccctgccccccagcgccgcccccaccggccccctgctggccccccccgccggcgccaccctgaacagactgagagagcccctgctgagaagactgagcgagctgctggaccaggcccccgagggcagaggctggagaagactggccgagctggccggcagcagaggcagactgagactgagctgcctggacctggagcagtgcagcctgaaggtgctggagcccgagggcagccccagcctgtgcctgctgaagctgatgggcgagaagggctgcaccgtgaccgagctgagcgacttcctgcaggccatggagcacaccgaggtgctgcagctgctgagcccccccggcatcaagatcaccgtgaaccccgagagcaaggccgtgctggccggccagttcgtgaagctgtgctgcagagccaccggccaccccttcgtgcagtaccagtggttcaagatgaacaaggagatccccaacggcaacaccagcgagctgatcttcaacgccgtgcacgtgaaggacgccggcttctacgtgtgcagagtgaacaacaacttcaccttcgagttcagccagtggagccagctggacgtgtgcgacatccccgagagcttccagagaagcgtggacggcgtgagcgagagcaagctgcagatctgcgtggagcccaccagccagaagctgatgcccggcagcaccctggtgctgcagtgcgtggccgtgggcagccccatcccccactaccagtggttcaagaacgagctgcccctgacccacgagaccaagaagctgtacatggtgccctacgtggacctggagcaccagggcacctactggtgccacgtgtacaacgacagagacagccaggacagcaagaaggtggagatcatcatcggcagaaccgacgaggccgtggagtgcaccgaggacgagctgaacaacctgggccaccccgacaacaaggagcagaccaccgaccagcccctggccaaggacaaggtggccctgctgatcggcaacatgaactacagagagcaccccaagctgaaggcccccctggtggacgtgtacgagctgaccaacctgctgagacagctggacttcaaggtggtgagcctgctggacctgaccgagtacgagatgagaaacgccgtggacgagttcctgctgctgctggacaagggcgtgtacggcctgctgtactacgccggccacggctacgagaacttcggcaacagcttcatggtgcccgtggacgcccccaacccctacagaagcgagaactgcctgtgcgtgcagaacatcctgaagctgatgcaggagaaggagaccggcctgaacgtgttcctgctggacatgtgcagaaagagaaacgactacgacgacaccatccccatcctggacgccctgaaggtgaccgccaacatcgtgttcggctacgccacctgccagggcgccgaggccttcgagatccagcacagcggcctggccaacggcatcttcatgaagttcctgaaggacagactgctggaggacaagaagatcaccgtgctgctggacgaggtggccgaggacatgggcaagtgccacctgaccaagggcaagcaggccctggagatcagaagcagcctgagcgagaagagagccctgaccgaccccatccagggcaccgagtacagcgccgagagcctggtgagaaacctgcagtgggccaaggcccacgagctgcccgagagcatgtgcctgaagttcgactgcggcgtgcagatccagctgggcttcgccgccgagttcagcaacgtgatgatcatctacaccagcatcgtgtacaagccccccgagatcatcatgtgcgacgcctacgtgaccgacttccccctggacctggacatcgaccccaaggacgccaacaagggcacccccgaggagaccggcagctacctggtgagcaaggacctgcccaagcactgcctgtacaccagactgagcagcctgcagaagctgaaggagcacctggtgttcaccgtgtgcctgagctaccagtacagcggcctggaggacaccgtggaggacaagcaggaggtgaacgtgggcaagcccctgatcgccaagctggacatgcacagaggcctgggcagaaagacctgcttccagacctgcctgatgagcaacggcccctaccagagcagcgccgccaccagcggcggcgccggccactaccacagcctgcaggaccccttccacggcgtgtaccacagccaccccggcaaccccagcaacgtgacccccgccgacagctgccactgcagcagaacccccgacgccttcatcagcagcttcgcccaccacgccagctgccacttcagcagaagcaacgtgcccgtggagaccaccgacgagatccccttcagcttcagcgacagactgagaatcagcgagaagtag

SEQ ID NO: 167979 - protein, 655 aa, Artificial Sequence
  derived and/or modified sequence
MTECFLPPTSSPSEHRRVEHGSGLTRTPSSEEISPTKFPGLYRTGEPSPPHDILHEPPDVVSDDEKDHGKKKGKFKKKEKRTEGYAAFQEDSSGDEAESPSKMKRSKGIHVFKKPSFSKKKEKDFKIKEKPKEEKHKEEKHKEEKHKEKKSKDLTAADVVKQWKEKKKKKKPIQEPEVPQIDVPNLKPIFGIPLADAVERTMMYDGIRLPAVFRECIDYVEKYGMKCEGIYRVSGIKSKVDELKAAYDREESTNLEDYEPNTVASLLKQYLRDLPENLLTKELMPRFEEACGRTTETEKVQEFQRLLKELPECNYLLISWLIVHMDHVIAKELETKMNIQNISIVLSPTVQISNRVLYVFFTHVQELFGNVVLKQVMKPLRWSNMATMPTLPETQAGIKEEIRRQEFLLNCLHRDLQGGIKDLSKEERLWEVQRILTALKRKLREAKRQECETKIAQEIASLSKEDVSKEEMNENEEVINILLAQENEILTEQEELLAMEQFLRRQIASEKEEIERLRAEIAEIQSRQQHGRSETEEYSSESESESEDEEELQIILEDLQRQNEELEIKNNHLNQAIHEEREAIIELRVQLRLLQMQRAKAEQQAQEDEEPEWRGGAVQPPRDGVLEPKAAKEQPKAGKEPAKPSPSRDRKETSI

SEQ ID NO: 167980 - protein, 347 aa, Artificial Sequence
  derived and/or modified sequence
MTECFLPPTSSPSEHRRVEHGSGLTRTPSSEEISPTKFPGLYRTGEPSPPHDILHEPPDVVSDDEKDHGKKKGKFKKKEKRTEGYAAFQEDSSGDEAESPSKMKRSKGIHVFKKPSFSKKKEKDFKIKEKPKEEKHKEEKHKEEKHKEKKSKDLTAADVVKQWKEKKKKKKPIQEPEVPQIDVPNLKPIFGIPLADAVERTMMYDGIRLPAVFRECIDYVEKYGMKCEGIYRVSGIKSKVDELKAAYDREESTNLEDYEPNTVASLLKQYLRDLPENLLTKELMPRFEEACGRTTETEKVQSSGEEAARSCQFLTAGTSKGLLTGLVKGSHLGLVHPQRMLFKPEIF

SEQ ID NO: 167981 - DNA, 1968 bp, Artificial Sequence
  derived and/or modified sequence
atgaccgagtgctttcttcctcccacatcgagtccgtccgaacatcgccgcgtcgagcatggtagcggcctgactcgcactccatcctctgaagaaatctcccccaccaaatttcctggtctgtatagaaccggagagcctagtcctcctcacgacattctgcatgaaccccctgacgtggtatctgatgatgagaaggaccatgggaaaaaaaaagggaaattcaagaagaaggaaaaacggacagagggttatgctgcgtttcaggaggatagtagcggagacgaagccgagtctccatctaaaatgaaaagatccaaaggtattcacgtgtttaagaagccgtccttctcgaaaaaaaaagagaaggatttcaaaatcaaagaaaagcccaaagaggaaaagcataaagaggagaaacataaggaggagaaacataaagaaaaaaaatccaaggacctaactgctgccgacgtggtgaaacagtggaaagaaaagaagaagaaaaaaaagcctattcaggaaccagaagtgccacagatcgatgtccccaacttgaaacctatcttcgggattcccctcgcagacgctgtggagcgtacaatgatgtacgatggaatacgactgccagcagtcttccgggagtgtattgactacgtggagaaatacgggatgaaatgcgaaggcatctaccgggtgtcggggataaaatccaaagtggacgagcttaaggccgcatacgaccgtgaagagtctaccaacctggaggattacgaaccaaacacagtggctagcctgctgaaacagtacctccgggacctgcctgaaaatctgctcaccaaggagcttatgccgcgcttcgaggaagcatgtggaagaacgactgaaactgagaaagtacaggaattccaacgattactgaaagaactgcctgaatgtaattacttgctgatctcttggctgattgtgcacatggaccacgttatcgccaaggagctggagacaaaaatgaatatccagaacatctcaattgtgctgtctccaactgttcagatctcgaatcgggtgttatatgtgttctttacccatgttcaggagctgtttgggaacgttgtgttgaagcaagtcatgaagcccctaagatggtccaacatggctacaatgcccacattaccagagacacaggctggcataaaggaagagatacggagacaggaatttctactcaattgcctacaccgggatttgcaaggaggcatcaaggatctgagtaaagaggagagactgtgggaagtccaaagaatactcacagcactgaagagaaaactaagggaggccaaaagacaggaatgcgagaccaagatagcccaggagatcgcctctctgagcaaagaggatgtgagtaaagaagaaatgaatgaaaatgaggaggtaatcaacatactgctggcacaagaaaacgagattctgacagagcaagaggagttgctcgctatggaacagtttcttcggaggcagattgcatccgagaaggaagagattgagcggcttagagccgagatagctgagattcagtctagacagcagcatgggaggtcggaaacggaagagtattctagtgagtctgagtctgagagtgaggacgaggaggaactgcagataattctggaggatcttcagcgccagaatgaggagctagaaatcaagaataatcatttgaatcaagcaatccacgaggagcgcgaagctattattgaattgcgagtgcagctgcgactgctgcagatgcagcgtgccaaagccgaacaacaagcgcaagaagacgaggagcctgagtggaggggtggggccgtgcagccccccagagacggagtattggagccgaaggccgccaaggaacaacctaaagccggtaaagaaccagcaaagccatcaccatctcgcgaccgcaaggaaacctctatttag

SEQ ID NO: 167982 - DNA, 1968 bp, Artificial Sequence
  derived and/or modified sequence
atgacagagtgcttccttccacccacttcttcacccagtgagcatcgtcgcgtagaacacgggagtggcttaacccgaactccatcatctgaggaaattagcccaactaagttccctggactttaccgaactggagagccatcccccccgcatgacatcttacacgaaccgcccgacgtggtctctgacgacgagaaagaccacggcaaaaagaagggtaagttcaagaagaaagagaagcggacagagggatacgcagcattccaggaggacagcagtggagatgaagccgaaagtcctagcaagatgaaaaggtccaaagggatccacgtctttaagaagccctcatttagcaagaagaaagaaaaagacttcaaaatcaaagaaaagcccaaggaggaaaaacataaggaggagaaacataaggaggagaaacacaaggagaagaaaagcaaggaccttacagccgcagacgttgtgaagcagtggaaggaaaaaaagaagaaaaagaagcctatccaagagcccgaggtaccccagatagacgttcccaatctgaagccaatcttcggcattcctcttgcggacgctgtggagcggaccatgatgtatgatggaatccgcttacctgccgtatttagagaatgtattgactatgtggagaagtatgggatgaaatgcgaagggatttaccgggtgagcggcataaagtcgaaagtggatgagcttaaggcagcctatgatcgagaagagtctacaaatctggaagattatgagccaaacaccgtcgcctcacttctcaaacagtacctccgagatcttccggaaaatttattgacaaaggagctaatgccccgcttcgaagaagcctgtggacggacaacagaaaccgaaaaagttcaggaattccagagactgctgaaagaactgccagagtgcaattatttgctgataagctggctgattgtacacatggatcacgttattgccaaggaactagagacaaagatgaatatacagaatatctcaattgtgctgtctccaactgtgcagatctccaaccgtgtcttatacgtgttcttcactcatgtccaggagctgttcggcaacgtggtgttgaaacaggtgatgaaacctctgcgatggtccaacatggccacaatgccgacactccccgagacccaagccgggatcaaagaggaaattagacggcaagagttcctgcttaattgtctacatcgggacttgcaaggaggcatcaaggacttgagcaaagaggaaagactctgggaggtgcagcgcatcctaaccgctctgaaaaggaaacttcgggaagcgaagcggcaggaatgcgagactaaaattgcacaggaaatagcgtcgctgtctaaggaggacgtgtctaaggaggaaatgaacgaaaacgaagaggtcatcaacattttgctggctcaggagaatgaaatactgactgagcaggaggaactgctggccatggaacagttcttaaggcggcagattgcctctgagaaggaggagattgaacggctgagggccgaaattgctgaaatccagagccgacagcagcatggtcgttccgagaccgaagaatatagtagtgagtccgaatcagaatccgaggatgaggaggagcttcagataatcctggaagatctccagcgtcagaacgaggaactcgagataaagaataaccacctcaaccaggctatccacgaggaacgagaggcaattatcgaactgagagtccagctcaggcttctccaaatgcagcgcgctaaggccgagcagcaggcccaggaggacgaagagccggagtggcggggcggagctgtccagccccctcgcgacggcgtgctggagccaaaagctgccaaagagcagccaaaggcggggaaggagcccgccaagccatcacctagtcgcgaccggaaggaaacctccatttag

SEQ ID NO: 167983 - DNA, 1044 bp, Artificial Sequence
  derived and/or modified sequence
atgacggagtgcttcctgccccccaccagctctccttcagagcaccgacgggttgagcacggcagtggcctcacccgcaccccttcatccgaagagatcagcccaacaaaattccctgggctgtaccgaactggtgagccttcaccacctcacgatatcctgcacgaacctccagatgttgtgtcagatgacgagaaagatcatggaaaaaagaaaggaaagtttaagaagaaagagaaaaggaccgaaggctacgcggcgttccaagaggactcatccggcgacgaggctgaaagcccctctaagatgaagcggagcaagggcatacatgtgttcaaaaagccttcgttcagcaaaaagaaggagaaggacttcaaaatcaaagaaaagcctaaggaggagaaacacaaagaagagaaacacaaggaagaaaaacacaaggaaaaaaaatctaaggaccttactgccgcggacgtggttaagcagtggaaagaaaagaagaaaaaaaaaaaaccaatccaagagcccgaagttccccaaattgacgtgccaaaccttaaaccaattttcggtatcccgcttgcagacgcagtggagaggaccatgatgtatgacggtatccggctgccagcagtctttagagaatgcatagattatgtggagaagtacgggatgaaatgcgaggggatttaccgcgtctcaggcatcaagtccaaggtagacgagctgaaggccgcttatgaccgggaggaaagcacaaatttggaggactacgagcctaatactgtggcttcacttctgaagcagtaccttcgagatttgcctgagaatctcttaactaaggagctgatgcccagatttgaggaggcgtgtggaaggacaactgaaacggagaaggtgcagagctcaggggaggaggccgcccggagctgtcagttcctcactgccgggaccagcaagggacttcttactggcctagttaagggttcccaccttggtctcgtgcatcctcagcgcatgctgtttaagcctgaaatcttttag

SEQ ID NO: 167984 - DNA, 1968 bp, Artificial Sequence
  derived and/or modified sequence
atgacagagtgcttcctgccccccaccagcagccccagcgagcaccggcgggtggagcacggcagcggcctgaccaggacccccagcagcgaggagatcagccccaccaagtttcctggcctgtacagaactggagagcccagcccccctcatgacatcctgcacgagcccccagatgtggtgtctgatgatgagaaggaccacggcaagaagaagggcaagttcaagaagaaggagaagaggacagagggctacgccgccttccaggaggacagcagtggagatgaagctgagagccccagcaagatgaagaggagcaagggcatccacgtgttcaagaagcccagcttcagcaagaagaaggagaaggacttcaagatcaaggagaagcccaaggaggagaagcacaaggaggagaagcacaaggaggagaagcacaaggagaagaagagcaaggacctgacagctgctgatgtggtgaagcagtggaaggagaagaagaagaagaagaagcccatccaggagcctgaggtgccccagattgatgtgcccaacctgaagcccatcttcggcatccccctggctgatgctgtggagaggaccatgatgtatgatggcatccggctgcctgctgtgttcagagaatgtattgattatgtggagaagtatggcatgaagtgtgagggcatctacagagtgtctggcatcaagagcaaggtggatgagctgaaggccgcctatgaccgggaggagagcaccaacctggaggactatgagcccaacacagtggccagcctgctgaagcagtacctgcgggacctgcctgagaacctgctgaccaaggagctgatgcccaggtttgaggaggcctgtggccgcaccacagaaacagagaaggtgcaggagttccagaggctgctgaaggagctgcctgagtgcaactacctgctgatctcctggctgattgtgcacatggaccacgtgattgccaaggagctggagaccaagatgaacatccagaacatcagcatcgtgctgagccccaccgtgcagatcagcaacagagtgctgtatgtgttcttcacccacgtgcaggagctgtttggaaatgtggtgctgaagcaggtgatgaagcccctgcgctggagcaacatggccaccatgcccaccctgcctgagacccaggccggcatcaaggaggagatccggcggcaggagttcctgctgaactgcctgcaccgggacctgcagggcggcatcaaggacctgagcaaggaggagcggctgtgggaggtgcagaggatcctgacagccctgaagaggaagctgcgggaggccaagaggcaggagtgtgagaccaagatcgcccaggagatcgccagcctgagcaaagaagatgtgtccaaggaggagatgaatgaaaatgaggaggtgatcaacatcctgctggcccaggagaatgagatcctgacagagcaggaggagctgctggccatggagcagttcctgcggcggcagatcgccagcgagaaggaggagattgaaaggctgcgggcagaaattgctgagatccagagccggcagcagcacggccgctcagaaacagaggagtacagcagcgagagcgagagcgagagtgaagatgaggaggagctgcagatcatcctggaggacctgcagaggcagaatgaggagctggagatcaagaacaaccacctgaaccaggccatccacgaggagcgggaggccatcatcgagctgcgggtgcagctgcggctgctgcagatgcagagggccaaggccgagcagcaggcccaggaggatgaggagcctgagtggaggggcggcgctgtgcagcccccaagagatggagtgctggagcccaaggccgccaaggagcagcccaaggccggcaaggagcccgccaagcccagccccagccgggacaggaaggagaccagcatctag

SEQ ID NO: 167985 - DNA, 1044 bp, Artificial Sequence
  derived and/or modified sequence
atgacagagtgcttcctgccccccaccagcagccccagcgagcaccggcgggtggagcacggcagcggcctgaccaggacccccagcagcgaggagatcagccccaccaagtttcctggcctgtacagaactggagagcccagcccccctcatgacatcctgcacgagcccccagatgtggtgtctgatgatgagaaggaccacggcaagaagaagggcaagttcaagaagaaggagaagaggacagagggctacgccgccttccaggaggacagcagtggagatgaagctgagagccccagcaagatgaagaggagcaagggcatccacgtgttcaagaagcccagcttcagcaagaagaaggagaaggacttcaagatcaaggagaagcccaaggaggagaagcacaaggaggagaagcacaaggaggagaagcacaaggagaagaagagcaaggacctgacagctgctgatgtggtgaagcagtggaaggagaagaagaagaagaagaagcccatccaggagcctgaggtgccccagattgatgtgcccaacctgaagcccatcttcggcatccccctggctgatgctgtggagaggaccatgatgtatgatggcatccggctgcctgctgtgttcagagaatgtattgattatgtggagaagtatggcatgaagtgtgagggcatctacagagtgtctggcatcaagagcaaggtggatgagctgaaggccgcctatgaccgggaggagagcaccaacctggaggactatgagcccaacacagtggccagcctgctgaagcagtacctgcgggacctgcctgagaacctgctgaccaaggagctgatgcccaggtttgaggaggcctgtggccgcaccacagaaacagagaaggtgcagagcagtggagaggaggccgcccggagctgccagttcctgacagctggcaccagcaagggcctgctgaccggcctggtgaagggcagccacctgggcctggtgcacccccagaggatgctgttcaagccagagatcttctag

SEQ ID NO: 167986 - DNA, 1968 bp, Artificial Sequence
  derived and/or modified sequence
atgaccgagtgcttcctgccccccaccagcagccccagcgagcaccggcgtgtggagcacggttccggcctgacccggactccgagcagcgaggagatttctcccacgaaattccctggtctataccgtactggcgagcccagccccccccatgatatcttacacgagccgccagacgtcgtgtctgacgacgagaaggatcatggtaaaaagaaaggaaaattcaagaaaaaggaaaagcgaaccgaaggatatgcagccttccaggaagactcctcaggagatgaagcggagtctcctagcaaaatgaaacggagtaaggggatacatgtgtttaagaaacctagcttttccaagaagaaagaaaaggacttcaagataaaggagaaacccaaagaagagaagcataaagaagaaaaacataaagaggagaaacacaaggaaaagaagtcgaaggacctgaccgcagccgatgtggtgaagcagtggaaggaaaaaaagaagaagaagaagccaattcaagagcccgaagtgccacaaatcgatgtgcctaatctgaagcctatcttcggtattccgctggccgacgctgtggaacgcactatgatgtatgatggcataagacttcccgcagtatttcgcgaatgcatcgactacgtggagaagtacggcatgaagtgcgaggggatctatcgcgtcagcggaattaagagcaaagtggacgagctgaaggcagcgtacgaccgggaggaaagcactaacctcgaggactacgagccaaacaccgtagcatctctgctaaaacagtatctccgggatctgcccgagaacctgctcaccaaagagctgatgccacggttcgaggaggcctgcggcaggaccacggaaacagagaaggtgcaagaattccaacgactgctcaaggagttgcctgaatgcaactatctgctcatctcgtggctaattgtgcacatggatcatgtcattgcgaaagagctggaaactaagatgaacatccagaacatctccattgttctgagcccgacagttcaaatcagtaatagggtgctgtacgtcttctttacccatgtgcaggagttgtttggaaatgtggtgctcaaacaggtcatgaagcccctgaggtggagcaacatggccacaatgccaaccctccccgaaactcaggccggaataaaagaggaaatccgtagacaggaattcttgctgaactgtctccacagagacctgcagggtggtatcaaagacctgagcaaggaggaacgcctgtgggaggtgcaaaggattttaactgcccttaagaggaaacttcgcgaagccaagcgacaggaatgtgagacaaaaattgcacaggagatcgcatcgctcagtaaagaggatgtgtctaaggaagaaatgaatgagaatgaggaggtaattaatatcctgctggcacaggagaatgagattctgactgaacaggaggagctgttagccatggagcagttcttgcggcgacagattgcatccgagaaggaagaaatcgagaggttaagggctgagatcgctgagatccagtctcgccagcagcacggacggagcgaaactgaggaatattcatcggagtcagaatctgagagtgaggacgaggaggaattgcagattattcttgaagatctgcagaggcaaaacgaagaattagaaatcaagaataaccacctcaatcaggcaattcatgaggaaagagaggccatcatcgagctccgtgtacagctaagattactgcagatgcagagagccaaagctgagcagcaggcccaggaggacgaggagccggaatggagaggaggtgccgtccagccgcctcgggacggagtcctggaacctaaagcggctaaggagcagcccaaagctgggaaggagcctgccaagccttcaccaagcagggaccgcaaggaaaccagtatctag

SEQ ID NO: 167987 - DNA, 1968 bp, Artificial Sequence
  derived and/or modified sequence
atgaccgagtgcttcctgccccccaccagcagccccagcgagcaccggcgagtggaacatggatctgggcttactaggacacccagttccgaagagatttcgcctacgaaatttccaggactctatcgtactggcgagccctcgcctccgcatgacattttacacgagccacctgatgtcgtaagtgatgatgagaaggatcacggcaaaaaaaagggcaagtttaaaaagaaagagaagaggacagaagggtacgctgcctttcaagaagacagctcaggtgatgaggccgaaagtccctctaagatgaaaagaagtaaaggcatccacgtattcaaaaaaccgtccttctcaaagaagaaagaaaaggactttaaaataaaggaaaagcccaaggaggagaaacacaaagaagaaaaacacaaggaggaaaagcataaggagaagaagtcaaaggaccttaccgctgcagacgtggttaagcagtggaaagagaagaaaaagaagaagaaacccattcaggagcccgaggttccccagatcgatgtgcctaacctcaaacctatctttggcatccctctagccgatgctgtggaacgtacaatgatgtacgacggcattagattaccagctgtcttccgcgagtgcatcgactatgtggaaaagtatgggatgaagtgcgagggcatctatcgcgtgagcggcatcaaatccaaagtggatgagcttaaggcagcatatgacagagaggagagtactaacctcgaggattacgagccaaacacagtggcctctctgctcaagcagtatcttcgagatctgccagagaacttgctgactaaggagctgatgccccggtttgaggaagcgtgcggacggaccactgagacagaaaaggtgcaggaatttcaaaggctgctcaaggaactcccagagtgtaattacctcctgatctcttggttgattgtgcatatggatcatgtgattgcaaaggagttagagaccaaaatgaacatacagaacatcagtattgtgttgagccccacagttcaaatcagcaaccgggtgctgtacgtgttttttacacacgtacaggaactgttcggaaacgttgtgctcaaacaggtaatgaaaccgcttcgctggagtaacatggcaaccatgcctacccttcccgaaacccaggccggaatcaaagaggagatcaggagacaggagtttctgctgaattgtctccaccgggacttgcagggtggcatcaaggatctctccaaggaggagagactgtgggaggtccaacgaatactgacagccctcaagcgcaagctgagggaagccaaacgccaggagtgcgagactaagatagcgcaggaaatcgctagtcttagtaaggaggacgtttccaaggaggaaatgaacgagaatgaagaggtgattaacatactattagcacaagagaatgagatactaaccgagcaagaagaattgctagctatggagcagttcctgaggcggcagatagcttctgagaaagaggagatagaacgcctcagagcagagatcgccgagattcagtctagacagcagcatggtcgatcagaaacagaggaatactcatctgaatcagaatcggagtcggaggatgaggaggaattgcagataatcctcgaagacctccaacgccaaaacgaagagctggagatcaagaataaccacctgaaccaggccattcacgaggagcgcgaagccatcatcgagctgagagtacaactgcggttgctgcagatgcagcgcgcgaaagctgaacagcaggctcaagaagacgaggaacccgaatggcggggcggcgccgtgcagccacctcgcgatggtgtgctggaaccaaaggccgctaaagaacagcccaaggccggaaaggagccagccaagccctctccctccagagaccggaaggaaacctctatatag

SEQ ID NO: 167988 - DNA, 1044 bp, Artificial Sequence
  derived and/or modified sequence
atgaccgagtgcttcctgccccccaccagcagccccagcgagcaccggagggttgaacatggcagcggcctcactcgtacgccatccagcgaagagatctcacctaccaagttcccaggtctttatcggacaggcgaaccctctccacctcacgacattcttcacgagccacctgacgtcgtgtcagacgatgaaaaagatcatggcaaaaagaaagggaaatttaaaaagaaggagaaacggactgagggttacgccgcatttcaggaagacagctctggagatgaggctgagagtccatcgaaaatgaaacggagtaagggcatacacgtcttcaagaagcctagcttttccaagaagaaggagaaggatttcaagatcaaggaaaagccaaaagaagaaaagcacaaagaggagaagcataaggaggaaaagcacaaggaaaaaaaatccaaggatctcactgcagccgatgtggtgaagcagtggaaagagaagaagaaaaagaagaagccaatacaggagcccgaagtaccacagatcgatgtgccaaacttgaagccaatctttggaatccccctggctgacgcagttgaacgcactatgatgtacgacggaatccgtttgccagccgtattccgggaatgtattgattacgtcgagaaatacgggatgaagtgcgaaggcatctatagagtgtcagggataaagagcaaagtcgacgaactgaaggctgcttatgatcgcgaagaaagtaccaacctggaggactacgagccaaatacggtggcttcacttctcaagcaatatctccgcgacttgcccgaaaacttgcttactaaggagctgatgccgagattcgaggaagcttgtggaaggacaaccgagaccgaaaaagtgcaatcttccggcgaggaggcagcaaggtcatgtcagttcctgaccgctggcacgagcaagggtttgttgaccggactggtgaagggctcgcacctgggcctggtgcaccctcagaggatgttattcaagcccgagattttctag

SEQ ID NO: 167989 - DNA, 1968 bp, Artificial Sequence
  derived and/or modified sequence
atgacggagtgttttctacccccaacatcaagtccgtcagaacaccgccgagtggagcacggcagtggactcacgagaacaccttcttctgaggagattagccctaccaagtttcctggactctacaggaccggggaaccctctccgcctcatgacatcctgcacgaaccccctgatgtggtttcggatgacgaaaaggatcatggcaagaaaaagggcaaattcaaaaaaaaggagaagcggactgagggctacgctgcattccaggaggactcctccggcgatgaagcagaaagcccttcaaaaatgaagagatccaagggcattcatgtatttaaaaagccgtccttctcaaaaaagaaagaaaaggacttcaagattaaagagaaacctaaagaggagaagcacaaggaagagaaacataaagaggaaaagcacaaggagaagaagtccaaggacttaacggccgcagatgtcgtgaaacagtggaaggagaagaagaagaagaagaagcctatacaagaacccgaagtcccacagatcgatgtgcctaatctgaagcccatcttcgggatcccactggcagacgccgtcgaacggactatgatgtacgatggcatcaggttgccggcagtctttcgggaatgtattgattacgtggaaaagtacggcatgaaatgcgaggggatttatagagtctcaggaattaagagtaaagtggacgaactcaaggcggcttatgaccgtgaagagagcacaaacctggaggactacgagcccaacactgtggccagccttcttaaacagtatctaagggatctgccggaaaatctcctaacaaaggagctgatgccaagattcgaggaagcatgtggccgtactacggaaaccgaaaaggtccaagaatttcagcgtctgctgaaagagctgcccgagtgcaactacctgttgattagttggctgatagtgcacatggaccacgtaatcgcaaaggagctggagacaaaaatgaatattcagaatatatccatagtcctgtctccaacagtgcagatttctaacagagtactctacgtgttctttacgcatgttcaggagctgttcgggaacgtagtcttgaagcaggtgatgaagcctctcagatggtccaacatggccaccatgcccacccttcccgaaacgcaagccggtatcaaggaagagattcgtaggcaggagttcctgctgaactgcctccacagagatctgcagggcggaatcaaagacctcagcaaagaagagcgcttgtgggaggtccagcggatccttacagccctgaagcgaaagctacgagaggcaaagagacaggaatgcgaaaccaaaattgcccaggagatcgcatcactgagcaaagaggatgtatcaaaagaagagatgaacgagaacgaagaggtaattaatatcctgctggcccaggagaatgagatcctgactgaacaagaagagctgcttgctatggaacagtttctacgacggcagattgcgtccgagaaagaggaaatcgagaggctaagagcagaaattgccgagattcagtcccgtcaacaacacgggagaagtgagactgaagaatattccagcgagagtgaaagtgagagcgaagatgaggaagaactgcagattatactggaagatctgcagcgccaaaatgaagagctagagatcaagaataatcatcttaatcaggccatccacgaagagcgggaagcaatcattgagctgcgggtgcagctccggcttctccagatgcagagggcaaaggcagaacagcaggcccaagaggatgaggagccagagtggaggggcggagctgtgcagccacccagggacggagtcctggagcctaaagctgccaaggagcagcccaaagctggtaaggaaccggcaaaacccagcccatcaagagataggaaggagacctctatctag

SEQ ID NO: 167990 - DNA, 1968 bp, Artificial Sequence
  derived and/or modified sequence
atgacggagtgctttctgccacccactagctctccctccgaacacaggcgtgtcgagcatggttccggtttaacccggacaccatcttccgaggagatttccccaactaagtttccagggctataccggactggggagcccagcccccctcacgatattctacacgagccacccgatgtggtatctgatgatgagaaagaccacggcaaaaagaaagggaagttcaagaagaaggagaaacggacggagggatacgcagcattccaggaagactcttcaggggatgaagccgagtcccctagcaaaatgaaaagatctaaagggatacatgtgttcaaaaagccttcctttagtaagaaaaaagagaaagactttaagataaaagaaaagccgaaagaagagaagcacaaggaggagaaacataaggaagaaaagcataaagagaagaagtcaaaagatttgacagccgctgacgtagtcaaacagtggaaagaaaagaaaaagaaaaagaaacccattcaggaacccgaagtgccacagattgatgtccccaacctaaaaccaattttcggcatacccctggctgacgccgtcgagcgcactatgatgtacgacggtattaggctgcccgctgtgtttagggagtgtattgactatgtcgagaaatacggcatgaaatgtgaaggtatctacagggtttcaggcatcaagtcaaaggtcgatgaactgaaagccgcttacgatagggaggaatccacgaacttggaggactatgaacctaatactgtggcatctcttctgaagcagtacctacgcgacctccccgaaaacctactcacaaaggagcttatgccaagatttgaagaggcctgcggccgtacgaccgagactgagaaagtccaggagtttcagcggctccttaaggagctccccgagtgtaattacctgttgatcagctggttgatcgtccatatggaccacgttattgccaaggagcttgagacgaagatgaatattcagaacatctccatagtgctgagcccaacagtccagatcagcaacagggtcctatacgttttcttcacccacgtgcaggagttgttcggcaatgtagttctcaaacaggtgatgaagcctttacggtggtccaatatggcaaccatgccaaccctgccggagacgcaggcaggcattaaagaggagataagacgccaggaattcctgttgaattgcctgcacagagatctgcaggggggaataaaggatttgtcgaaggaggagagactttgggaagtgcagaggattctgactgccctgaagcgcaagctgagggaggcgaaaagacaggaatgcgagacaaagatagctcaggagattgcatctctgtcaaaggaggacgtctccaaggaagagatgaacgaaaacgaggaagtgatcaacatcttattggcgcaagagaatgagattctgacggaacaggaagagcttctggccatggaacagtttctgaggaggcagatcgcatcagagaaagaagagattgaacggttgagagccgagatcgcagaaattcagtcccggcagcagcatggacgctcagagaccgaagaatacagttctgaatcagaatcggagtcagaagatgaagaggaacttcagattatcctcgaagacctgcagcgccagaatgaagagctcgagatcaagaataaccatttgaatcaggcgatccatgaagagagggaggccattatcgaacttcgagtccagctgagactcctgcagatgcaacgggctaaggcggagcagcaagcacaagaggacgaagagcctgagtggagaggaggcgcagtgcagccacctcgcgacggcgtcctcgaaccaaaagccgctaaggagcaaccaaaagcgggtaaagagccagctaagcctagcccctcaagggaccggaaggagacatcaatatag

SEQ ID NO: 167991 - DNA, 1044 bp, Artificial Sequence
  derived and/or modified sequence
atgacagaatgcttcctgccacctacttcgtcaccttctgagcaccggagagtagagcacggatctggcctgactaggactccatcatcggaagagataagccccaccaagttcccaggtctctatcgaacgggagagcccagccctccccacgatattctgcatgaaccccctgatgtcgtttccgatgatgagaaagaccatggaaagaagaagggcaagtttaagaaaaaggagaaaaggaccgagggatatgcagcctttcaggaggacagtagtggagatgaggccgagtccccttctaagatgaaaaggtccaagggcattcacgttttcaagaagccgtccttcagcaagaaaaaagagaaagactttaagattaaagaaaaacctaaagaggagaaacataaagaagagaagcataaggaagagaaacacaaggagaaaaaatcgaaggacctaactgctgccgatgtggtgaaacagtggaaagagaagaagaagaaaaagaagcctatccaggagcccgaggtcccacagattgatgtgccaaatcttaagcctatcttcggcatccctttggccgatgctgtcgagcgcacaatgatgtacgacggaatcaggcttcccgctgtgtttcgtgaatgcattgattacgtagaaaaatatggcatgaagtgcgagggcatttaccgagtgtctggtatcaagagcaaggtggatgaactcaaggcagcgtacgatcgcgaggagagtactaaccttgaggattacgagcctaatactgtcgccagcctgttgaagcagtatttaagggacctgcctgaaaatttgctgactaaagagcttatgccgaggtttgaagaggcttgcggacgtacaacggaaactgaaaaggtacagagctccggcgaggaagccgcaagatcatgccagttcctgaccgctggaaccagtaagggcctgctgaccggccttgtgaaggggtctcacctgggtctggtccaccctcaaagaatgctgttcaagcctgagatcttttag

SEQ ID NO: 167992 - DNA, 1968 bp, Artificial Sequence
  derived and/or modified sequence
atgacagagtgtttcctccccccaaccagctccccctccgagcatcggagggtggaacacgggagcggactgaccaggacacctagcagcgaggaaatttcccctaccaagtttccaggtctgtacaggacaggagagccaagcccaccgcacgatatcttacacgaaccacccgacgtcgtatccgacgatgagaaggatcacggaaaaaagaagggaaagtttaagaagaaggaaaaacggactgaaggatatgccgcgtttcaagaagattcgtctggggacgaggctgagagtccctcaaagatgaaacggagtaagggaattcatgtttttaagaaaccatcattttctaagaagaaggagaaagattttaagataaaggagaagccaaaagaggagaagcataaagaagaaaaacacaaggaggagaaacacaaagagaaaaaaagcaaagatctcaccgccgcggatgttgttaagcaatggaaggagaaaaaaaaaaaaaagaaacctattcaggaacccgaggttccccagatcgatgtgcccaacctaaaaccgatcttcggaatcccgctggctgacgccgtggagagaactatgatgtacgatggcattcgactgcctgccgtcttcagagaatgcatcgattatgtggagaagtacggcatgaaatgtgagggcatctatagggtttcaggtattaagagcaaagtggatgagctgaaagcagcctacgaccgtgaagagtccaccaatctcgaggactatgagccaaacacagtagcaagtttgctgaaacaatacttaagggaccttcccgagaacctgctcactaaggaacttatgccaagatttgaagaggcctgtggacgaaccactgagactgaaaaggtccaagagttccaacggttgctcaaagagttgccagagtgtaactatctacttatctcatggctgattgtgcacatggaccacgtgatagctaaggaattggaaacaaagatgaatatccagaacatctccatcgtcctctcacccacagtccagatctccaaccgtgttctatatgtcttcttcactcacgttcaggagctgttcgggaatgtggttctcaaacaggtcatgaagccgctgagatggagcaatatggcaaccatgcccaccctccctgaaacccaagcaggcataaaggaagaaatccgccggcaggaatttttgttaaattgcttgcatcgagaccttcagggaggaatcaaggacctgtctaaggaggagcggctatgggaggtgcaaaggatcctgacagccctgaaacgaaaactgcgcgaagcgaagagacaagagtgcgagaccaaaatagcccaggagattgcctcactgagtaaagaggacgtgtccaaggaggagatgaatgaaaatgaagaagtgatcaatatccttttagctcaagaaaatgaaatccttactgaacaagaggagctgttggccatggaacagtttctgcgccgccagatcgctagcgagaaggaggaaattgagcgactgagagcggaaattgcagaaatccagagcagacaacaacacgggagaagcgaaaccgaggagtattccagcgaatccgaatctgaatccgaagacgaagaggaactgcagataatcctggaagacctccagcggcagaacgaggaactggagatcaagaataaccatctcaaccaggcaatccacgaagagcgcgaggctatcatcgaattacgcgtccagttacgattgctgcaaatgcagagggctaaggccgagcagcaggcacaggaggatgaggaacccgaatggcgcggcggcgcagttcagccccctcgggacggggtgctcgaacccaaggccgccaaagagcaacctaaggccggaaaggagcccgcgaaaccttctccttctcgggaccgtaaagagaccagcatatag

SEQ ID NO: 167993 - DNA, 1968 bp, Artificial Sequence
  derived and/or modified sequence
atgacagaatgttttttgccccctaccagttcaccctctgaacataggcgtgtggaacacggatcaggtctaacccggacccccagctccgaagaaattagtcctacgaaatttcccgggctgtaccggacaggagaaccatcgccccctcatgatattcttcacgaacctcccgacgtagtctcagatgacgagaaagatcacggaaagaaaaagggcaaatttaaaaagaaagagaagcgcaccgagggatacgcagccttccaggaagacagttcaggcgatgaagctgaatcccccagcaaaatgaaaaggtctaaggggattcacgtttttaagaagcccagctttagcaaaaagaaagagaaggattttaaaattaaggagaagcccaaggaagaaaaacacaaagaagaaaaacacaaggaggagaaacacaaagagaagaagtcaaaagatcttacagccgccgacgtggtgaagcaatggaaagaaaagaaaaagaagaaaaagccgattcaagaaccagaagtcccacagatcgacgtgcccaacttgaaacctatcttcggcatcccactggctgacgcagtcgagaggacaatgatgtatgatgggatcagactgcccgccgtgttccgcgaatgtatagactatgttgagaaatatggaatgaagtgtgagggtatttatcgcgtgtcgggaatcaaatctaaagttgatgagctcaaggccgcctacgatcgagaagagagtacaaatctggaagattacgaacctaatacggtggcctcactcctcaaacaatacctcagagatttaccagaaaacctcctgactaaagaattaatgccacggtttgaagaggcctgcgggaggaccacagagacggagaaggtccaggaatttcagaggctattaaaggaattaccggagtgcaactatctcctgatttcgtggcttatcgtacatatggaccatgtgatcgccaaagaactcgagacaaaaatgaacatccagaacattagcattgtacttagtcccactgtgcagatctccaacagagtgttatatgtttttttcacacacgtgcaggagttattcggtaatgtggtgctgaaacaggtaatgaaaccacttagatggagtaatatggccacaatgccaaccctacccgaaacccaggcaggcatcaaagaggaaataagacggcaggagtttcttttgaactgcttgcaccgtgatttacagggcggtattaaggacttatcgaaggaggagaggttgtgggaagttcagcggatactaacggcattgaaaaggaagttgcgggaggctaaacggcaggagtgtgagacgaagattgcacaggagatcgctagtctcagtaaggaggatgtttcaaaggaggagatgaatgaaaatgaggaggtgattaatattctgcttgcgcaggaaaatgaaattctgaccgaacaagaagagctgctagcaatggagcaatttttaagaaggcagatagcttctgagaaggaagagatagaaaggcttagagctgagatagcagagatccagtccagacagcagcacgggagaagcgaaaccgaagagtactcctcagagtctgagtcagagtcagaagacgaagaggaattgcagatcatcctggaggacttgcagcgtcagaatgaagagctcgaaataaagaataatcacctcaaccaggcgatccatgaggaaagggaggctatcatcgaactgcgcgtccaactaagattgcttcagatgcaacgcgccaaagcagaacagcaggctcaggaagacgaagaacccgagtggcggggcggcgctgtacagccaccacgcgacggagtactggaaccaaaagctgctaaagaacagcctaaggctggcaaagaacccgcgaagccaagtccttctagagacagaaaagagaccagcatctag

SEQ ID NO: 167994 - DNA, 4368 bp, Artificial Sequence
  derived and/or modified sequence
agtctggtttaactggttggaacgactaaagcacgctggcgcaaggaaagctctcaacttcgggagctgaggcgcaggctggccagagcgtggagaggaaagccctttccatcctcaaggccgttgcaggagatgcccgcgagccaccttcgccagcaccacaccggggtgtaatggataggtaacagagaagacctcgtcccttcctagtcagggcatcagcatgactgagtgcttcctgccccccaccagcagccccagtgaacaccgcagggtggagcatggcagcgggcttacccggacccccagctctgaagagatcagccctactaagtttcctggattgtaccgcactggcgagccctcacctccccatgacatcctccatgagcctcctgatgtagtgtctgatgatgagaaagatcatgggaagaaaaaagggaaatttaagaaaaaggaaaagaggactgaaggctatgcagcctttcaggaagatagctctggagatgaggcagaaagtccttctaaaatgaagaggtccaagggaatccatgttttcaagaagcccagcttttctaaaaagaaggaaaaggattttaaaataaaagagaaacccaaagaagaaaagcataaagaagaaaagcacaaagaagaaaaacataaagagaagaagtcaaaagacttgacagcagctgatgttgttaaacagtggaaggaaaagaagaaaaagaaaaagccaattcaggagccagaggtgcctcagattgatgttccaaatctcaaacccatttttggaattcctttggctgatgcagtagagaggaccatgatgtatgatggcattcggctgccagccgttttccgtgaatgtatagattacgtagagaagtatggcatgaagtgtgaaggcatctacagagtatcaggaattaaatcaaaggtggatgagctaaaagcagcctatgaccgggaggagtctacaaacttggaagactatgagcctaacactgtagccagtttgctgaagcagtatttgcgagaccttccagagaatttgcttaccaaagagcttatgcccagatttgaagaggcttgtgggaggaccacggagactgagaaagtgcaggaattccagcgtttactcaaagaactgccagaatgtaactatcttctgatttcttggctcattgtgcacatggaccatgtcattgcaaaggaactggaaacaaaaatgaatatacagaacatttctatagtgctcagcccaactgtgcagatcagcaatcgagtcctgtatgtgtttttcacacatgtgcaagaactctttggaaatgtggtactaaagcaagtgatgaaacctctgcgatggtctaacatggccacgatgcccacgctgccagagacccaggcgggcatcaaggaggagatcaggagacaggagtttcttttgaattgtttacatcgagatctgcagggtgggataaaggatttgtctaaagaagaaagattatgggaagtacaaagaattttgacagccctcaaaagaaaactgagagaagctaaaagacaggagtgtgaaaccaagattgcacaagagatagccagtctttcaaaagaggatgtttccaaagaagagatgaatgaaaatgaagaagttataaatattctccttgctcaggagaatgagatcctgactgaacaggaggagctcctggccatggagcagtttctgcgccggcagattgcctcagaaaaagaagagattgaacgcctcagagctgagattgctgaaattcagagtcgccagcagcacggccgaagtgagactgaggagtactcctccgagagcgagagcgagagtgaggatgaggaggagctgcagatcattctggaagacttacagagacagaacgaagagctggaaataaagaacaatcatttgaatcaagcaattcatgaggagcgcgaggccatcatcgagctgcgcgtgcagctgcggctgctccagatgcagcgagccaaggccgagcagcaggcgcaggaggacgaggagcctgagtggcgcgggggtgccgtccagccgcccagagacggcgtccttgagccaaaagcagctaaagagcagccaaaggcaggcaaggagccggcaaagccatcgcccagcagggataggaaggagacgtccatctgagcagcctgcgtggccgtctggagtccgtgagactgaaaggacccgtgcatcttactgtaacccgggggccaggccggctctctcgctgtacattctgtaaaggtgtcttctcttctcagactcttcctctgtcacacgtctgactccttcacgtcaggctcaggttccatgggaggacgaagcagtggacgcattgtgggctttagggacagatgagttttccagatagtgtcagcttatttgaagattaattttctttgttaacttaaaataactattttaacccttgagtggcttctttttaaaccaaaaaccgtctttctttgcttttttatcacagcagaatcaggatctctttctcattcaaggggggaaccaccccaggtcagcgctgcgcctgctgtggccgccgcgagccacgccctctgggatctctggtaccgtcactcttgcttgtgccttccacaccttctcggtgcagatccctatgggggagctgcctcacgttctctgactggtcagagcagcgcctggtgggtgttccctggcccactctcctctctccttctgcagttctaaaccacagtctataagcccgagtcaccaggacggcctgtctggccacagacaggggctgcctgtggagcctgcccaccggcccccggcagtgcagtccagcggggaggaggctgcccgttcctgccagttcctcactgcggggaccagcaaaggccttctcactgggttggtcaaaggtagtcaccttggcctggtgcatccacagaggatgttgttcaaaccagaaatcttttaaacgactgaccttccttaaaaacagaatgactccgattgcttgcttgggctagaatgtacacgtctccttgcctgaataagccatatatatgctcttaaacaaaagtttgaaattatccatatcatctcagtgaacctactggtggactcccaattgacaagattgagcaatagaaaaaaattcctttcctttgaatgatagctgtgattcaccccaccccattttcttgtttctggtccatccgatgagacggatgctctgatgctctgaggcttctgggaggctgggccctggaggcaacgtgctgcaggcgcactctgtcagagtgaacagcaccgcgagacaggccaggctcgtggctcggaagacaaaccccacacacactcaaggggtcgaaaacaaaccccacacgagggctctcacctccttctcctaggtagtatttattttcagcacctgtttgatgcagtttttaatcctctacctattgcactgttgtgactcgttggccattatttgatttttgtacgaaaaaaagctttgttatagaaatcagcatactatttttttaaatctggagagaagatattctggtgactgaaagtatggtcgggtgtcagatataaatgtgcaaatgccttcttgctgtcctgtcggtctcagtacgttcactttatagctgctggcaatatcgaaggttccttttttgtttgtgtaaactctaatttctatcaaggtgtcatggatttttaaaattagtatttcattacaaatgtctcagcattggttaactaatttttgccaggaccattattgatcaagcaaataaattcaacagccatttgggaaaaagaaaagcttctagtttttttgtacacattctttctgtgaggagattgagtactctgcagctggcgaggagttggttgaggcacttcttcaaggccaagggggaacacagtgttttgtttccagctcactttgtacccctcacctctgcagacacggggagaaccccggacccctggcatgcatgctggcggcggcatgcctcccttccacaagcccatgctgctgcagagggagcctgtgtttgcaaaacccagtggactgggctgggtctgctgtctgagcagctcctggctccggtgggaactgcacacaagtccactggcctggcttggccccaggcattgcaattgacagacatttgcatttcatacggtaaatgaggactcagcacagccaaccataatcagcatgtctgggatagactggtctagaataaaaatgaagtttccattgctttgtttgctttaaaaattccacaattaaaatatctgtcattgaaagcttagacaaa

SEQ ID NO: 167995 - DNA, 4353 bp, Artificial Sequence
  derived and/or modified sequence
atcattgtaaacaggcagaggctgggcggggtgggaatggggcgcccgaggccggcctggggcgcagcgcaggaggcggctccggtggctgcggcggcagcgtgagcgcgaggaggcggaggctgcggcggggcggacggtcgcgcggcggcaggcacaggtgtaatggataggtaacagagaagacctcgtcccttcctagtcagggcatcagcatgactgagtgcttcctgccccccaccagcagccccagtgaacaccgcagggtggagcatggcagcgggcttacccggacccccagctctgaagagatcagccctactaagtttcctggattgtaccgcactggcgagccctcacctccccatgacatcctccatgagcctcctgatgtagtgtctgatgatgagaaagatcatgggaagaaaaaagggaaatttaagaaaaaggaaaagaggactgaaggctatgcagcctttcaggaagatagctctggagatgaggcagaaagtccttctaaaatgaagaggtccaagggaatccatgttttcaagaagcccagcttttctaaaaagaaggaaaaggattttaaaataaaagagaaacccaaagaagaaaagcataaagaagaaaagcacaaagaagaaaaacataaagagaagaagtcaaaagacttgacagcagctgatgttgttaaacagtggaaggaaaagaagaaaaagaaaaagccaattcaggagccagaggtgcctcagattgatgttccaaatctcaaacccatttttggaattcctttggctgatgcagtagagaggaccatgatgtatgatggcattcggctgccagccgttttccgtgaatgtatagattacgtagagaagtatggcatgaagtgtgaaggcatctacagagtatcaggaattaaatcaaaggtggatgagctaaaagcagcctatgaccgggaggagtctacaaacttggaagactatgagcctaacactgtagccagtttgctgaagcagtatttgcgagaccttccagagaatttgcttaccaaagagcttatgcccagatttgaagaggcttgtgggaggaccacggagactgagaaagtgcaggaattccagcgtttactcaaagaactgccagaatgtaactatcttctgatttcttggctcattgtgcacatggaccatgtcattgcaaaggaactggaaacaaaaatgaatatacagaacatttctatagtgctcagcccaactgtgcagatcagcaatcgagtcctgtatgtgtttttcacacatgtgcaagaactctttggaaatgtggtactaaagcaagtgatgaaacctctgcgatggtctaacatggccacgatgcccacgctgccagagacccaggcgggcatcaaggaggagatcaggagacaggagtttcttttgaattgtttacatcgagatctgcagggtgggataaaggatttgtctaaagaagaaagattatgggaagtacaaagaattttgacagccctcaaaagaaaactgagagaagctaaaagacaggagtgtgaaaccaagattgcacaagagatagccagtctttcaaaagaggatgtttccaaagaagagatgaatgaaaatgaagaagttataaatattctccttgctcaggagaatgagatcctgactgaacaggaggagctcctggccatggagcagtttctgcgccggcagattgcctcagaaaaagaagagattgaacgcctcagagctgagattgctgaaattcagagtcgccagcagcacggccgaagtgagactgaggagtactcctccgagagcgagagcgagagtgaggatgaggaggagctgcagatcattctggaagacttacagagacagaacgaagagctggaaataaagaacaatcatttgaatcaagcaattcatgaggagcgcgaggccatcatcgagctgcgcgtgcagctgcggctgctccagatgcagcgagccaaggccgagcagcaggcgcaggaggacgaggagcctgagtggcgcgggggtgccgtccagccgcccagagacggcgtccttgagccaaaagcagctaaagagcagccaaaggcaggcaaggagccggcaaagccatcgcccagcagggataggaaggagacgtccatctgagcagcctgcgtggccgtctggagtccgtgagactgaaaggacccgtgcatcttactgtaacccgggggccaggccggctctctcgctgtacattctgtaaaggtgtcttctcttctcagactcttcctctgtcacacgtctgactccttcacgtcaggctcaggttccatgggaggacgaagcagtggacgcattgtgggctttagggacagatgagttttccagatagtgtcagcttatttgaagattaattttctttgttaacttaaaataactattttaacccttgagtggcttctttttaaaccaaaaaccgtctttctttgcttttttatcacagcagaatcaggatctctttctcattcaaggggggaaccaccccaggtcagcgctgcgcctgctgtggccgccgcgagccacgccctctgggatctctggtaccgtcactcttgcttgtgccttccacaccttctcggtgcagatccctatgggggagctgcctcacgttctctgactggtcagagcagcgcctggtgggtgttccctggcccactctcctctctccttctgcagttctaaaccacagtctataagcccgagtcaccaggacggcctgtctggccacagacaggggctgcctgtggagcctgcccaccggcccccggcagtgcagtccagcggggaggaggctgcccgttcctgccagttcctcactgcggggaccagcaaaggccttctcactgggttggtcaaaggtagtcaccttggcctggtgcatccacagaggatgttgttcaaaccagaaatcttttaaacgactgaccttccttaaaaacagaatgactccgattgcttgcttgggctagaatgtacacgtctccttgcctgaataagccatatatatgctcttaaacaaaagtttgaaattatccatatcatctcagtgaacctactggtggactcccaattgacaagattgagcaatagaaaaaaattcctttcctttgaatgatagctgtgattcaccccaccccattttcttgtttctggtccatccgatgagacggatgctctgatgctctgaggcttctgggaggctgggccctggaggcaacgtgctgcaggcgcactctgtcagagtgaacagcaccgcgagacaggccaggctcgtggctcggaagacaaaccccacacacactcaaggggtcgaaaacaaaccccacacgagggctctcacctccttctcctaggtagtatttattttcagcacctgtttgatgcagtttttaatcctctacctattgcactgttgtgactcgttggccattatttgatttttgtacgaaaaaaagctttgttatagaaatcagcatactatttttttaaatctggagagaagatattctggtgactgaaagtatggtcgggtgtcagatataaatgtgcaaatgccttcttgctgtcctgtcggtctcagtacgttcactttatagctgctggcaatatcgaaggttccttttttgtttgtgtaaactctaatttctatcaaggtgtcatggatttttaaaattagtatttcattacaaatgtctcagcattggttaactaatttttgccaggaccattattgatcaagcaaataaattcaacagccatttgggaaaaagaaaagcttctagtttttttgtacacattctttctgtgaggagattgagtactctgcagctggcgaggagttggttgaggcacttcttcaaggccaagggggaacacagtgttttgtttccagctcactttgtacccctcacctctgcagacacggggagaaccccggacccctggcatgcatgctggcggcggcatgcctcccttccacaagcccatgctgctgcagagggagcctgtgtttgcaaaacccagtggactgggctgggtctgctgtctgagcagctcctggctccggtgggaactgcacacaagtccactggcctggcttggccccaggcattgcaattgacagacatttgcatttcatacggtaaatgaggactcagcacagccaaccataatcagcatgtctgggatagactggtctagaataaaaatgaagtttccattgctttgtttgctttaaaaattccacaattaaaatatctgtcattgaaagctt

SEQ ID NO: 167996 - DNA, 1309 bp, Artificial Sequence
  derived and/or modified sequence
tgtaatggataggtaacagagaagacctcgtcccttcctagtcagggcatcagcatgactgagtgcttcctgccccccaccagcagccccagtgaacaccgcagggtggagcatggcagcgggcttacccggacccccagctctgaagagatcagccctactaagtttcctggattgtaccgcactggcgagccctcacctccccatgacatcctccatgagcctcctgatgtagtgtctgatgatgagaaagatcatgggaagaaaaaagggaaatttaagaaaaaggaaaagaggactgaaggctatgcagcctttcaggaagatagctctggagatgaggcagaaagtccttctaaaatgaagaggtccaagggaatccatgttttcaagaagcccagcttttctaaaaagaaggaaaaggattttaaaataaaagagaaacccaaagaagaaaagcataaagaagaaaagcacaaagaagaaaaacataaagagaagaagtcaaaagacttgacagcagctgatgttgttaaacagtggaaggaaaagaagaaaaagaaaaagccaattcaggagccagaggtgcctcagattgatgttccaaatctcaaacccatttttggaattcctttggctgatgcagtagagaggaccatgatgtatgatggcattcggctgccagccgttttccgtgaatgtatagattacgtagagaagtatggcatgaagtgtgaaggcatctacagagtatcaggaattaaatcaaaggtggatgagctaaaagcagcctatgaccgggaggagtctacaaacttggaagactatgagcctaacactgtagccagtttgctgaagcagtatttgcgagaccttccagagaatttgcttaccaaagagcttatgcccagatttgaagaggcttgtgggaggaccacggagactgagaaagtgcagtccagcggggaggaggctgcccgttcctgccagttcctcactgcggggaccagcaaaggccttctcactgggttggtcaaaggtagtcaccttggcctggtgcatccacagaggatgttgttcaaaccagaaatcttttaaacgactgaccttccttaaaaacagaatgactccgattgcttgcttgggctagaatgtacacgtctccttgcctgaataagccatatatatgctcttaaacaaaagtttgaaattatccatatcatctcagtgaacctactggtggactcccaattgacaagattgagcaatagaaaaaaattcctttcctttgaatgatagctgtgattca

SEQ ID NO: 167997 - DNA, 1968 bp, Artificial Sequence
  derived and/or modified sequence
atgaccgagtgcttcctgccccccaccagcagccccagcgagcacagaagagtggagcacggcagcggcctgaccagaacccccagcagcgaggagatcagccccaccaagttccccggcctgtacagaaccggcgagcccagccccccccacgacatcctgcacgagccccccgacgtggtgagcgacgacgagaaggaccacggcaagaagaagggcaagttcaagaagaaggagaagagaaccgagggctacgccgccttccaggaggacagcagcggcgacgaggccgagagccccagcaagatgaagagaagcaagggcatccacgtgttcaagaagcccagcttcagcaagaagaaggagaaggacttcaagatcaaggagaagcccaaggaggagaagcacaaggaggagaagcacaaggaggagaagcacaaggagaagaagagcaaggacctgaccgccgccgacgtggtgaagcagtggaaggagaagaagaagaagaagaagcccatccaggagcccgaggtgccccagatcgacgtgcccaacctgaagcccatcttcggcatccccctggccgacgccgtggagagaaccatgatgtacgacggcatcagactgcccgccgtgttcagagagtgcatcgactacgtggagaagtacggcatgaagtgcgagggcatctacagagtgagcggcatcaagagcaaggtggacgagctgaaggccgcctacgacagagaggagagcaccaacctggaggactacgagcccaacaccgtggccagcctgctgaagcagtacctgagagacctgcccgagaacctgctgaccaaggagctgatgcccagattcgaggaggcctgcggcagaaccaccgagaccgagaaggtgcaggagttccagagactgctgaaggagctgcccgagtgcaactacctgctgatcagctggctgatcgtgcacatggaccacgtgatcgccaaggagctggagaccaagatgaacatccagaacatcagcatcgtgctgagccccaccgtgcagatcagcaacagagtgctgtacgtgttcttcacccacgtgcaggagctgttcggcaacgtggtgctgaagcaggtgatgaagcccctgagatggagcaacatggccaccatgcccaccctgcccgagacccaggccggcatcaaggaggagatcagaagacaggagttcctgctgaactgcctgcacagagacctgcagggcggcatcaaggacctgagcaaggaggagagactgtgggaggtgcagagaatcctgaccgccctgaagagaaagctgagagaggccaagagacaggagtgcgagaccaagatcgcccaggagatcgccagcctgagcaaggaggacgtgagcaaggaggagatgaacgagaacgaggaggtgatcaacatcctgctggcccaggagaacgagatcctgaccgagcaggaggagctgctggccatggagcagttcctgagaagacagatcgccagcgagaaggaggagatcgagagactgagagccgagatcgccgagatccagagcagacagcagcacggcagaagcgagaccgaggagtacagcagcgagagcgagagcgagagcgaggacgaggaggagctgcagatcatcctggaggacctgcagagacagaacgaggagctggagatcaagaacaaccacctgaaccaggccatccacgaggagagagaggccatcatcgagctgagagtgcagctgagactgctgcagatgcagagagccaaggccgagcagcaggcccaggaggacgaggagcccgagtggagaggcggcgccgtgcagccccccagagacggcgtgctggagcccaaggccgccaaggagcagcccaaggccggcaaggagcccgccaagcccagccccagcagagacagaaaggagaccagcatctag

SEQ ID NO: 167998 - DNA, 1044 bp, Artificial Sequence
  derived and/or modified sequence
atgaccgagtgcttcctgccccccaccagcagccccagcgagcacagaagagtggagcacggcagcggcctgaccagaacccccagcagcgaggagatcagccccaccaagttccccggcctgtacagaaccggcgagcccagccccccccacgacatcctgcacgagccccccgacgtggtgagcgacgacgagaaggaccacggcaagaagaagggcaagttcaagaagaaggagaagagaaccgagggctacgccgccttccaggaggacagcagcggcgacgaggccgagagccccagcaagatgaagagaagcaagggcatccacgtgttcaagaagcccagcttcagcaagaagaaggagaaggacttcaagatcaaggagaagcccaaggaggagaagcacaaggaggagaagcacaaggaggagaagcacaaggagaagaagagcaaggacctgaccgccgccgacgtggtgaagcagtggaaggagaagaagaagaagaagaagcccatccaggagcccgaggtgccccagatcgacgtgcccaacctgaagcccatcttcggcatccccctggccgacgccgtggagagaaccatgatgtacgacggcatcagactgcccgccgtgttcagagagtgcatcgactacgtggagaagtacggcatgaagtgcgagggcatctacagagtgagcggcatcaagagcaaggtggacgagctgaaggccgcctacgacagagaggagagcaccaacctggaggactacgagcccaacaccgtggccagcctgctgaagcagtacctgagagacctgcccgagaacctgctgaccaaggagctgatgcccagattcgaggaggcctgcggcagaaccaccgagaccgagaaggtgcagagcagcggcgaggaggccgccagaagctgccagttcctgaccgccggcaccagcaagggcctgctgaccggcctggtgaagggcagccacctgggcctggtgcacccccagagaatgctgttcaagcccgagatcttctag

SEQ ID NO: 167999 - protein, 224 aa, Artificial Sequence
  derived and/or modified sequence
MAQKEEAAVATEAASQNGEDLENLDDPEKLKELIELPPFEIVTGERLPANFFKFQFRNVEYSSGRNKTFLCYVVEAQGKGGQVQASRGYLEDEHAAAHAEEAFFNTILPAFDPALRYNVTWYVSSSPCAACADRIIKTLSKTKNLRLLILVGRLFMWEEPEIQAALKKLKEAGCKLRIMKPQDFEYVWQNFVEQEEGESKAFQPWEDIQENFLYYEEKLADILK

SEQ ID NO: 168000 - protein, 130 aa, Artificial Sequence
  derived and/or modified sequence
MAQKEEAAVATEAASQNGEDLENLDDPEKLKELIELPPFEIVTGERLPANFFKFQFRNVEYSSGRKLSSTPSCQPSTQPCGTMSPGMCPPAPVQRVLTALSKPLARPRTCVCSFWWVDSSCGRSRRSRLL

SEQ ID NO: 168001 - DNA, 675 bp, Artificial Sequence
  derived and/or modified sequence
atggcacagaaggaagaagctgccgtggctacagaggccgccagtcaaaatggcgaagacttggagaacctggatgatcctgagaaattaaaagagttaatcgaactcccaccgtttgagatcgtcacaggagaaagactacccgctaacttttttaaatttcaattccgaaatgtggaatactcctccggacggaacaaaaccttcctttgctatgtcgtggaggcccaaggaaagggcggtcaggtccaggcttccagagggtacctggaggatgagcacgcagctgcccatgccgaggaagctttcttcaatactatcctgccagcctttgaccctgcgctgaggtataacgtgacctggtacgtctccagcagcccttgtgcagcgtgtgctgacaggatcatcaagacattgtccaaaacaaagaacctccggctgttgattctggtcggcaggctgtttatgtgggaggagccagaaatacaagcggcattaaagaagctaaaggaagccggatgtaaattacggatcatgaagccacaagattttgagtacgtttggcaaaattttgttgagcaggaagaaggtgagtcaaaggcgttccaaccgtgggaggatatccaagagaacttcctgtactatgaggagaaacttgcagacattctgaaatag

SEQ ID NO: 168002 - DNA, 393 bp, Artificial Sequence
  derived and/or modified sequence
atggcccagaaagaggaagccgctgtcgctacggaggcagcctcacagaatggggaagacctcgaaaatctggacgatccggagaaactgaaggagctgatagaacttccgccatttgagatcgtaactggtgaacgccttcctgctaattttttcaaatttcagttcagaaatgtggaatacagttctggtcggaagctgtccagtactccatcctgtcagcctagcactcagccctgcggaacaatgagccctggcatgtgcccccctgcccctgttcagcgggtgctgactgctctttcaaaacctctcgctaggccaagaacttgcgtctgttcattttggtgggtggactccagctgcggccggtcccgcaggtctcgcctgctttag

SEQ ID NO: 168003 - DNA, 675 bp, Artificial Sequence
  derived and/or modified sequence
atggcccagaaggaggaggccgctgtggccacagaagctgccagccagaatggagaggacctggagaacctggatgatcctgagaagctgaaggagctgattgagctgcccccatttgaaattgtgactggagagcggctgcctgccaacttcttcaagttccagttcagaaatgtggagtacagcagtggaagaaacaagaccttcctgtgctacgtggtggaggcccagggcaaaggaggccaggtgcaggccagccggggctacctggaggatgagcacgccgccgcccatgctgaggaggccttcttcaacaccatcctgcctgcctttgatcctgccctgcgctacaacgtgacctggtacgtgagcagcagcccctgtgccgcctgtgccgaccgcatcatcaagaccctgagcaagaccaagaacctgcggctgctgatcctggtgggccgcctcttcatgtgggaggagcctgagatccaggccgccctgaagaagctgaaggaggccggctgcaagctgcgcatcatgaagccccaggactttgaatatgtgtggcagaactttgtggagcaggaggagggggagagcaaggccttccagccctgggaggacatccaggagaacttcctgtactatgaggagaagctggccgacatcctgaagtag

SEQ ID NO: 168004 - DNA, 393 bp, Artificial Sequence
  derived and/or modified sequence
atggcccagaaggaggaggccgctgtggccacagaagctgccagccagaatggagaggacctggagaacctggatgatcctgagaagctgaaggagctgattgagctgcccccatttgaaattgtgactggagagcggctgcctgccaacttcttcaagttccagttcagaaatgtggagtacagcagcggcaggaagctgagcagcacccccagctgccagcccagcacccagccctgtggcaccatgagccctggcatgtgccccccagcccctgtgcagagggtgctgacagccctgagcaagcccctggcccggcccaggacctgtgtgtgcagcttctggtgggtggacagcagctgtggccgcagcagaagaagccggctgctgtag

SEQ ID NO: 168005 - DNA, 675 bp, Artificial Sequence
  derived and/or modified sequence
atggcccagaaggaggaggccgccgtggccaccgaggccgccagccaaaacggcgaggatctagaaaatttggacgatcctgaaaagttgaaggaactgatagaactgccgccctttgagattgtcaccggggagaggcttcctgccaatttttttaagttccagttcaggaatgtggaatactccagtgggcgcaataaaacattcctgtgctacgtggtggaagcacagggaaagggagggcaagtacaggcctcaaggggatacttggaggatgaacacgccgctgctcacgccgaggaggccttctttaacactatactcccagcgttcgaccccgcccttagatataacgtgacctggtacgtgtcttccagcccctgtgcggcctgcgccgacagaatcattaagacactgtctaaaacaaaaaatctcagactgcttatcctcgtaggacgactgtttatgtgggaagagcccgagatccaggccgctctgaaaaagctgaaagaagctggctgcaagttgagaatcatgaaaccccaagacttcgagtacgtgtggcagaattttgtggagcaggaggagggtgagagcaaggccttccagccctgggaggacatacaggaaaatttcctctattatgaggagaagttagccgacatcctcaagtag

SEQ ID NO: 168006 - DNA, 393 bp, Artificial Sequence
  derived and/or modified sequence
atggcccagaaggaggaggccgccgtggccaccgaggccgccagccaaaatggcgaggacctggagaatctcgatgatcccgagaaactgaaggagctgatagagcttccaccttttgagatagtgaccggggaacggctcccagcaaacttttttaagttccagtttcggaatgtcgagtactcttctggccgaaaattgagttcgacaccctcctgtcagccctccacccaaccttgtggcacaatgtcccctggcatgtgtcccccagcacccgtgcagcgggtccttacagcgctttcgaaaccattagcccgcccaaggacttgcgtatgctcgttttggtgggtggactcctcatgtgggaggtcacgacggtcacgtctgctatag

SEQ ID NO: 168007 - DNA, 675 bp, Artificial Sequence
  derived and/or modified sequence
atggctcaaaaagaggaggcggctgttgcgaccgaagccgcaagccagaacggggaagatttagaaaacctagacgatcctgagaaactgaaggaactcattgagctgcccccatttgaaatcgtcactggagagcgcctgccggcaaacttttttaagtttcagttccgcaacgtcgagtattcctccggacggaataagacattcctttgctatgtcgtcgaagcacaggggaagggcggacaggtgcaggccagcagagggtatctagaagacgagcacgcagccgcacacgccgaagaagcgttcttcaataccatattgcctgcctttgacccggcactgcgctataacgtaacctggtatgtgagcagtagtccgtgtgcagcctgtgcagatcggatcataaaaaccctgtctaagacaaagaacttgcgactcttgatccttgtcggtcgtctcttcatgtgggaagagcctgaaatccaggccgctcttaagaaactcaaagaggcaggctgtaagctgagaatcatgaaaccccaggacttcgagtacgtctggcagaacttcgtggagcaagaagaaggagagtccaaagccttccagccctgggaggatatacaggaaaacttcctctactatgaagagaaactggcagatatcctcaagtag

SEQ ID NO: 168008 - DNA, 393 bp, Artificial Sequence
  derived and/or modified sequence
atggcccagaaagaggaggctgctgtcgctactgaagccgctagccaaaacggcgaagacttagagaacctggatgacccagagaagctgaaagagttgatcgaactgccaccttttgaaatcgtaaccggcgaaaggctccctgcaaacttcttcaagtttcaatttcggaacgtggagtactcttcgggcaggaaactgagttccacaccctcatgtcagccctctacacagccgtgcggcaccatgagtccaggtatgtgcccgccagccccagtccagcgtgttctgaccgctctgtccaagcctctggctcggcctagaacctgcgtgtgcagcttctggtgggtggacagttcttgcggccgtagccgcaggtctagattgctgtag

SEQ ID NO: 168009 - DNA, 1151 bp, Artificial Sequence
  derived and/or modified sequence
gcctctctcctctccctcagtgactcctgagccacagcccctccatggcccagaaggaagaggctgctgtggccactgaggctgcctcccagaatggggaggatctggagaacctggacgaccctgagaagctgaaagagctgattgagctgccgccctttgagattgtcacaggagaacggctgcctgccaacttctttaaattccagttccggaatgtggagtacagttccgggaggaacaagaccttcctctgctatgtggttgaagcacagggcaaggggggccaagtgcaggcatctcggggatacctagaggatgagcatgcggctgcccatgcagaggaagctttcttcaacaccatcctgccagccttcgacccagccctgcggtacaatgtcacctggtatgtgtcctccagcccctgtgcagcgtgtgctgaccgcattatcaaaacccttagcaagaccaagaacctgcgtctgctcattctggtgggtcgactcttcatgtgggaggagccggagatccaggctgctctgaagaagctgaaggaggctggctgtaaactgcgcatcatgaagccccaggacttcgaatatgtctggcagaattttgtggagcaagaagagggtgaatccaaggcctttcagccctgggaggacattcaggagaacttcctatactacgaggagaagttggcagacatcctgaagtagggcaactgggctttgcctcacgtattcctgctgccaccaagagacagcaatgacatgtacagccatctgggacatgcctgtcttcctaataccatttggagctggacaacatttgacaccaaccaatcatactggacaaggcccttagaggacttgaaatatacttctcatgctgtagtttatttaggctgtgactctctctctaatgctgctctcgggaaggacgaaagtgacctgcaaggagagaaatgcaaccatacatgggctccagtcaactatgggactgaaggtcctaattgctcacccaagggggctgcttaacacaaacagcctcagacccgaggtttagatttctgaaatatgcattttatgttaagttgggtatttttttaaaaaaagaaaaacagcaacattaataaaagaagtggtgtg

SEQ ID NO: 168010 - DNA, 1242 bp, Artificial Sequence
  derived and/or modified sequence
agtgactcctgagccacagcccctccatggcccagaaggaagaggctgctgtggccactgaggctgcctcccagaatggggaggatctggagaacctggacgaccctgagaagctgaaagagctgattgagctgccgccctttgagattgtcacaggagaacggctgcctgccaacttctttaaattccagttccggaatgtggagtacagttccgggaggaagctttcttcaacaccatcctgccagccttcgacccagccctgcggtacaatgtcacctggtatgtgtcctccagcccctgtgcagcgtgtgctgaccgcattatcaaaacccttagcaagaccaagaacctgcgtctgctcattctggtgggtcgactcttcatgtgggaggagccggagatccaggctgctctgaagaagctgaaggaggctggctgtaaactgcgcatcatgaagccccaggacttcgaatatgtctggcagaattttgtggagcaagaagagggtgaatccaaggcctttcagccctgggaggacattcaggagaacttcctatactacgaggagaagttggcagacatcctgaagtagggcaactgggctttgcctcacgtattcctgctgccaccaagagacagcaatgacatgtacagccatctgggacatgcctgtcttcctaataccatttggagctggacaacatttgacaccaaccaatcatactggacaaggcccttagaggacttgaaatatacttctcatgctgtagtttatttaggctgtgactctctctctaatgctgctctcgggaaggacgaaagtgacctgcaaggagagaaatgcaaccatacatgggctccagtcaactatgggactgaaggtcctaattgctcacccaagggggctgcttaacacaaacagcctcagacccgaggtttagatttctgaaatatgcattttatgttaagttgggtatttttttaaaaaaagaaaaacagcaacattaataaaagaagtggtgtgtttttcccgtggccagatttttaagaaacttgaacatctggaagttgccacagacaagcgagctagtccagacacagggacactccaggctatgaaccaagccatggttaaaccaagacttgcctagacaatgcagaataactctcccatacagacttcttacgacaatcaagtgagggcctttcccttctctgaaggcaagtaatagggcagaa

SEQ ID NO: 168011 - DNA, 675 bp, Artificial Sequence
  derived and/or modified sequence
atggcccagaaggaggaggccgccgtggccaccgaggccgccagccagaacggcgaggacctggagaacctggacgaccccgagaagctgaaggagctgatcgagctgccccccttcgagatcgtgaccggcgagagactgcccgccaacttcttcaagttccagttcagaaacgtggagtacagcagcggcagaaacaagaccttcctgtgctacgtggtggaggcccagggcaagggcggccaggtgcaggccagcagaggctacctggaggacgagcacgccgccgcccacgccgaggaggccttcttcaacaccatcctgcccgccttcgaccccgccctgagatacaacgtgacctggtacgtgagcagcagcccctgcgccgcctgcgccgacagaatcatcaagaccctgagcaagaccaagaacctgagactgctgatcctggtgggcagactgttcatgtgggaggagcccgagatccaggccgccctgaagaagctgaaggaggccggctgcaagctgagaatcatgaagccccaggacttcgagtacgtgtggcagaacttcgtggagcaggaggagggcgagagcaaggccttccagccctgggaggacatccaggagaacttcctgtactacgaggagaagctggccgacatcctgaagtag

SEQ ID NO: 168012 - DNA, 393 bp, Artificial Sequence
  derived and/or modified sequence
atggcccagaaggaggaggccgccgtggccaccgaggccgccagccagaacggcgaggacctggagaacctggacgaccccgagaagctgaaggagctgatcgagctgccccccttcgagatcgtgaccggcgagagactgcccgccaacttcttcaagttccagttcagaaacgtggagtacagcagcggcagaaagctgagcagcacccccagctgccagcccagcacccagccctgcggcaccatgagccccggcatgtgcccccccgcccccgtgcagagagtgctgaccgccctgagcaagcccctggccagacccagaacctgcgtgtgcagcttctggtgggtggacagcagctgcggcagaagcagaagaagcagactgctgtag

SEQ ID NO: 168013 - protein, 498 aa, Artificial Sequence
  derived and/or modified sequence
MFNYERPKHFIQSQNPCGSRLQPPGPETSSFSSQTKQSSIIIQPRQCTEQRFSASSTLSSHITMSSSAFPASPKQHAGSNPGQRVTTTYNQSPASFLSSILPSQPDYNSSKIPSAMDSNYQQSSAGQPINAKPSQTANAKPIPRTPDHEIQGSKEALIQDLERKLKCKDTLLHNGNQRLTYEEKMARRLLGPQNAAAVFQAQDDSGAQDSQQHNSEHARLQVPTSQVRSRSTSRGDVNDQDAIQEKFYPPRFIQVPENMSIDEGRFCRMDFKVSGLPAPDVSWYLNGRTVQSDDLHKMIVSEKGLHSLIFEVVRASDAGAYACVAKNRAGEATFTVQLDVLAKEHKRAPMFIYKPQSKKVLEGDSVKLECQISAIPPPKLFWKRNNEMVQFNTDRISLYQDNTGRVTLLIKDVNKKDAGWYTVSAVNEAGVTTCNTRLDVTARPNQTLPAPKQLRVRPTFSKYLALNGKGLNVKQAFNPEGEFQRLAAQSGLYESEEL

SEQ ID NO: 168014 - protein, 314 aa, Artificial Sequence
  derived and/or modified sequence
MARRLLGPQNAAAVFQAQDDSGAQDSQQHNSEHARLQVPTSQVRSRSTSRGDVNDQDAIQEKFYPPRFIQVPENMSIDEGRFCRMDFKVSGLPAPDVSWYLNGRTVQSDDLHKMIVSEKGLHSLIFEVVRASDAGAYACVAKNRAGEATFTVQLDVLAKEHKRAPMFIYKPQSKKVLEGDSVKLECQISAIPPPKLFWKRNNEMVQFNTDRISLYQDNTGRVTLLIKDVNKKDAGWYTVSAVNEAGVTTCNTRLDVTARPNQTLPAPKQLRVRPTFSKYLALNGKGLNVKQAFNPEGEFQRLAAQSGLYESEEL

SEQ ID NO: 168015 - DNA, 1497 bp, Artificial Sequence
  derived and/or modified sequence
atgttcaactacgaaagaccaaagcacttcatccagtcacagaatccctgtggttcaagattacaaccgcccggacccgagacgtcatccttttccagccaaaccaagcagtctagcatcataatccagccccggcaatgtaccgaacagcgcttcagcgcctccagcacactgagtagtcatatcaccatgtcttcctctgcttttcctgcaagtcccaaacagcacgccggcagcaacccgggacagcgcgtgactactacctacaaccaatcacccgcctcctttctcagtagcatccttccatcacagcctgattataattcgagcaagatcccttctgccatggattcaaactaccagcaatcctctgctgggcagccgatcaacgccaaaccaagtcagacagccaatgccaagcccatccctcgcactcctgaccatgagattcagggttccaaggaagctctgatacaggaccttgaaaggaaacttaaatgtaaggatacgctcctccataatgggaatcaacgcctgacatatgaggagaaaatggcccgccggttactcggcccccagaacgctgctgctgtcttccaggcgcaggacgacagtggggcccaggactctcagcagcataacagtgagcacgcgcgactacaagtccccacgagtcaggtgagatctcggagtacgtcccggggggacgtgaatgaccaggacgctatccaggagaaattttatcctcctaggtttattcaggtgccagagaatatgtccattgatgaagggcgcttttgccgaatggattttaaggtatctggtctccccgctcccgacgtgtcttggtatctaaacggccgcacagtgcagagtgatgacctccacaagatgattgtctcagaaaaaggtttacactcgctgatattcgaagtcgtaagagccagcgacgctggagcctacgcctgtgtggccaagaatagagccggtgaggccacctttacggtccaactggacgtccttgcaaaggagcataaacgggctcccatgtttatttacaaaccacagagtaaaaaagtcctggaaggcgattccgtaaagctcgaatgtcagattagcgctatcccacctcctaagttattttggaagcgcaacaatgaaatggtgcagttcaatacagatcgcatcagcctctatcaggataatactgggcgagtgactctcctaatcaaggacgtcaataaaaaggacgcaggttggtacaccgtttctgccgtgaacgaggcaggcgtaactacctgtaataccaggttagatgtgaccgctcgccccaatcagaccctacctgcacctaaacagctccgggtcaggccaacattcagcaaatatctggcactgaatggaaagggcctgaatgtgaagcaggccttcaacccagaaggcgaatttcagcgccttgccgcgcaatcgggcctatacgaatccgaggagctgtag

SEQ ID NO: 168016 - DNA, 1497 bp, Artificial Sequence
  derived and/or modified sequence
atgttcaactatgaaagacccaagcacttcatccagagccagaacccctgtggcagccggctgcagcccccaggccctgagaccagcagcttcagcagccagaccaagcagagcagcatcatcatccagccccggcagtgcacagagcagcgcttcagcgccagcagcaccctgagcagccacatcaccatgagcagcagcgccttccctgccagccccaagcagcacgccggcagcaaccctggccagagggtgaccaccacctacaaccagagccctgccagcttcctgagcagcatcctgcccagccagcctgactacaacagcagcaagatccccagcgccatggacagcaactaccagcagagcagcgctggccagcccatcaatgccaagcccagccagacagccaatgccaagcccatccccaggaccccagaccacgagatccagggcagcaaggaggccctgatccaggacctggagaggaagctgaagtgcaaggacaccctgctgcacaacggcaaccagaggctgacctatgaggagaagatggcccggcggctgctgggcccccagaatgctgctgctgtgttccaggcccaggatgattctggggcccaggacagccagcagcacaacagcgagcacgcccggctgcaggtgcccaccagccaggtgcgcagccgcagcaccagcagaggagatgtgaatgaccaggatgccatccaggagaagttctacccaccccgcttcatccaggtgcctgagaacatgagcattgatgagggccgcttctgcaggatggacttcaaggtgtctggcctgcctgccccagatgtgtcctggtacctgaatggccgcacagtgcagagtgatgacctgcacaagatgattgtgtctgagaagggcctgcacagcctcatctttgaggtggtgcgggccagtgatgctggggcctatgcctgtgtggccaagaacagagctggggaggccaccttcaccgtgcagctggatgtgctggccaaggagcacaagagggcccccatgttcatctacaagccccagagcaagaaggtgctggagggggacagcgtgaagctggagtgccagatcagcgccatccccccacccaagctgttctggaagaggaacaatgagatggtgcagttcaacacagaccgcatcagcctgtaccaggacaacacaggccgggtgaccctgctgatcaaggatgtgaacaagaaggatgctggctggtacacagtgtctgctgtgaatgaagctggggtgaccacctgcaacacccggctggatgtgacagcccggcccaaccagaccctgcctgcccccaagcagctgcgggtgcggcccaccttcagcaagtacctggccctgaatggcaagggcctgaatgtgaagcaggccttcaaccctgagggggagttccagaggctggccgcccagagcggcctgtatgaaagtgaggagctgtag

SEQ ID NO: 168017 - DNA, 2337 bp, Artificial Sequence
  derived and/or modified sequence
ggacaggcaagcacatcagatgtcactgtttggcagctgataaaagtcagtggtgctataatactaagcacagagccactagattagtctgtgagggaaggagatgcctcttccttcccttcaatagtgggttaaacccagctggcaccctctggaactacgggaacaatattcttcaagagaaggtcactctaccaaagccaggagcacagtattctcaggatctcaacaaggaagagcagaccaaggttgcttctgattccttacaaccttccgtaattccaggcttgtggccccaaattcagggccccacccttccaggaacaaatcattatagtaataatttgccttcatcttccatataccaactaagcatgtttaactacgaacgtccaaaacacttcatccagtcccaaaacccatgtggctccagattgcagcctcctggaccagaaacctccagcttctctagccagaccaaacagtcttccattatcatccagccccgccagtgtacagagcaaagattttctgcctcctcaacactgagctctcacatcaccatgtcctcctctgctttccctgcttctcccaagcagcatgctggctccaacccaggccaaagggttacaaccacctataaccagtccccagccagcttcctcagctccatattaccatcacagcctgattacaatagcagtaaaatcccttccgctatggattccaactatcaacagtcctcagctggccaacctataaatgcaaagccatcccaaactgcaaatgctaagcccataccaagaactcctgatcatgaaatacaaggatcaaaagaagctttgattcaagatttggaaagaaagctgaaatgcaaggacacccttcttcataatggaaatcaacgtctaacatatgaagagaagatggctcgcagattgctaggaccacagaatgcagctgctgtgtttcaagctcaggatgacagtggtgcacaagactcgcagcaacacaactcagaacatgcgcgactgcaagttcctacatcacaagtaagaagtagatcaacctcaaggggagatgtgaatgatcaggatgcaatccaggagaaattttacccaccacgtttcattcaagtgccagagaacatgtcgattgatgaaggaagattctgcagaatggacttcaaagtgagtggactgccagctcctgatgtgtcatggtatctaaatggaagaacagttcaatcagatgatttgcacaaaatgatagtgtctgagaagggtcttcattcactcatctttgaagtagtcagagcttcagatgcaggggcttatgcatgtgttgccaagaatagagcaggagaagccaccttcactgtgcagctggatgtccttgcaaaagaacataaaagagcaccaatgtttatctacaaaccacagagcaaaaaagttttagagggagattcagtgaaactagaatgccagatctcggctatacctccaccaaagcttttctggaaaagaaataatgaaatggtacaattcaacactgaccgaataagcttatatcaagataacactggaagagttactttactgataaaagatgtaaacaagaaagatgctgggtggtatactgtgtcagcagttaatgaagctggagtgactacatgtaacacaagattagacgttacggcacgtccaaaccaaactcttccagctcctaagcagttacgggttcgaccaacattcagcaaatatttagcacttaatgggaaaggtttgaatgtaaaacaagcttttaacccagaaggagaatttcagcgtttggcagctcaatctggactctatgaaagtgaagaactttaataactttaccaacattggaaaacagccaactacaccattagtaatatatttgattacatttttttgaaattaatccatagctgtattaacagattatggttttaattaggtaatatagttaatatatatttataatattatttatcctttgactcttgcacattctatgtacccctccgatttgtgaagcctacaggaaatctgggtatatggatttgtaactgcagaagactatcttaaaatacaggattttaacatttaagtcatgcacatttaacaattacaggttataaattagtatcaactttttaaacacatctaatgcttgtaataacgtttactggtactgctttctaaatactgttttacccgttttctcttgtaggaatactaacatggtatagattatctgagtgttccacagttgtatgtcaaaagaaaataaaattcaaatatttaaaacgga

SEQ ID NO: 168018 - DNA, 1497 bp, Artificial Sequence
  derived and/or modified sequence
atgttcaactacgagcggcccaagcacttcatccagagccagaacccctgtggatcccgcctgcagcctcccggccccgaaactagttccttcagctcacagaccaaacaatcatccataatcattcagccccgccaatgcacagaacaaagattttccgcgagctctaccctgtccagtcacattaccatgagctcttccgcattccccgcttccccgaaacagcatgctggatcaaaccctggccaaagggtgacaactacctacaatcagtcccctgctagtttcctgagtagcatcctgccctctcagcctgattacaactcatccaagattccaagtgctatggacagtaattaccaacaaagtagcgcgggtcagccaatcaacgccaaaccaagccaaactgccaatgctaaaccgatcccccggactcctgatcatgaaattcaggggagtaaagaagccctgatacaggacctggaacgtaagctgaaatgcaaggacaccctccttcataacggtaatcaaagactcacatacgaagaaaagatggcacggagactgctgggccctcagaacgctgccgcagttttccaggcgcaggacgacagcggcgcacaggactcgcagcagcataacagtgaacatgcccggctgcaggtgccaacctcccaagttcgtagcaggtccaccagcaggggggacgttaatgatcaggatgctatccaagagaaattttatcctccaaggtttatccaagtgccagagaacatgtctatcgatgagggacggttctgtcgtatggattttaaagtcagcggactgcctgcaccagacgtgtcgtggtacttgaatgggcggacagtgcagtctgatgacctgcacaaaatgatagtgtcggaaaagggccttcattcactgatctttgaagtcgtccgcgccagcgatgcgggggcctacgcctgcgtagctaagaaccgcgcaggcgaagcgaccttcactgttcaacttgatgtgttggcaaaagagcacaagagggcaccaatgtttatttataagcctcagagcaaaaaggttcttgaaggtgacagcgtgaaactggagtgtcaaataagcgcgatcccccctcctaaactgttctggaaaaggaataatgaaatggtgcagtttaatactgatcggatctccctttaccaggataataccggacgggtaactctgctaatcaaagacgtaaataaaaaggacgccgggtggtatacagttagcgccgtgaatgaggccggtgttacaacgtgcaatacccggttagatgtgactgcacgcccgaaccaaactctgccagccccaaagcaacttagggtgcgtccaacattctctaagtatttggcgttaaatggcaagggcctgaatgtgaagcaggctttcaaccccgagggcgagtttcaaaggctggcggcacagagtggcctgtacgagtcagaagagttatag

SEQ ID NO: 168019 - DNA, 1497 bp, Artificial Sequence
  derived and/or modified sequence
atgtttaactacgaaagacccaaacacttcattcagtcccaaaatccctgtggctcccgactccagccaccaggcccagaaacaagctctttcagttctcagactaagcagtccagcatcattattcagcctcgtcagtgtactgagcagaggttctcagctagcagcaccttgtcgtcacacatcacaatgtctagtagtgcttttcccgctagcccaaaacagcacgccggtagcaatcctggccagcgtgtgacaacaacctataaccagagcccagccagctttttaagcagtattctgccgagtcagcccgactataattcatccaaaatcccctctgccatggatagcaactatcagcagagctctgccggacagcccatcaacgcaaagccgtcgcagacggctaacgctaagccaatcccccgtacccccgaccacgagattcagggctccaaagaggcacttattcaagaccttgaaaggaagttgaagtgcaaagacacattacttcataatggaaatcagaggctgacgtacgaggagaagatggccagaagattactgggccctcagaacgctgcagcagtgtttcaggcacaggacgattctggggctcaagacagtcaacagcataatagcgaacatgccagactacaggttcccacttcacaagtccgatccagatccacctcacgaggagatgtgaatgaccaagatgctatccaggagaaattctaccccccaagatttattcaagtgcctgagaacatgagtatcgatgaaggacggttttgccgcatggatttcaaagttagtggactccccgcacctgatgtctcatggtacctaaatggccgaacagtccaaagtgatgacttgcataagatgatcgtaagcgaaaagggcctgcacagccttattttcgaggtggtccgagccagtgacgcaggagcatacgcctgcgtagccaagaaccgcgcaggcgaagcgaccttcacggtacagctggacgttctcgcaaaggagcacaagagggccccaatgtttatctataaacctcagagtaagaaagtcctggaaggcgattccgtgaagcttgaatgtcagatcagcgctatcccacctcccaaactgttctggaaaagaaacaatgagatggtccagttcaacactgacagaatttcactgtaccaggacaacaccggtagggtaacactgctgattaaagatgtgaataagaaagacgccggttggtacaccgtgtccgcggtgaatgaagccggtgtgacgacctgcaacacaaggcttgatgtgacggcaaggcctaatcagaccttgccagcacccaaacaacttagggtgcgaccaacattctcaaagtatctcgcccttaacggaaaaggactcaacgtcaagcaagccttcaatcccgaaggagaatttcaaagattggctgcccagtccggcttatatgagtccgaggagctatag

SEQ ID NO: 168020 - DNA, 1497 bp, Artificial Sequence
  derived and/or modified sequence
atgttcaactacgagagacccaagcacttcatccagagccagaacccctgcggcagcagactgcagccccccggccccgagaccagcagcttcagcagccagaccaagcagagcagcatcatcatccagcccagacagtgcaccgagcagagattcagcgccagcagcaccctgagcagccacatcaccatgagcagcagcgccttccccgccagccccaagcagcacgccggcagcaaccccggccagagagtgaccaccacctacaaccagagccccgccagcttcctgagcagcatcctgcccagccagcccgactacaacagcagcaagatccccagcgccatggacagcaactaccagcagagcagcgccggccagcccatcaacgccaagcccagccagaccgccaacgccaagcccatccccagaacccccgaccacgagatccagggcagcaaggaggccctgatccaggacctggagagaaagctgaagtgcaaggacaccctgctgcacaacggcaaccagagactgacctacgaggagaagatggccagaagactgctgggcccccagaacgccgccgccgtgttccaggcccaggacgacagcggcgcccaggacagccagcagcacaacagcgagcacgccagactgcaggtgcccaccagccaggtgagaagcagaagcaccagcagaggcgacgtgaacgaccaggacgccatccaggagaagttctacccccccagattcatccaggtgcccgagaacatgagcatcgacgagggcagattctgcagaatggacttcaaggtgagcggcctgcccgcccccgacgtgagctggtacctgaacggcagaaccgtgcagagcgacgacctgcacaagatgatcgtgagcgagaagggcctgcacagcctgatcttcgaggtggtgagagccagcgacgccggcgcctacgcctgcgtggccaagaacagagccggcgaggccaccttcaccgtgcagctggacgtgctggccaaggagcacaagagagcccccatgttcatctacaagccccagagcaagaaggtgctggagggcgacagcgtgaagctggagtgccagatcagcgccatccccccccccaagctgttctggaagagaaacaacgagatggtgcagttcaacaccgacagaatcagcctgtaccaggacaacaccggcagagtgaccctgctgatcaaggacgtgaacaagaaggacgccggctggtacaccgtgagcgccgtgaacgaggccggcgtgaccacctgcaacaccagactggacgtgaccgccagacccaaccagaccctgcccgcccccaagcagctgagagtgagacccaccttcagcaagtacctggccctgaacggcaagggcctgaacgtgaagcaggccttcaaccccgagggcgagttccagagactggccgcccagagcggcctgtacgagagcgaggagctgtag

SEQ ID NO: 168021 - protein, 348 aa, Artificial Sequence
  derived and/or modified sequence
MIPFPHPQVTDALGRYSNYILSSTVESPSLRSMNFEKQGERVLCFHGPLLYEAKCVKVAIKDKQVKYFIHYSGWNKNWDEWVPESRVLKYVDTNLQKQRELQKANQEQYAEGKMRGAAPGKKTSGLQQKNVEVKTKKNKQKTPGNGDGGSTSETPQPPRKKRARVDPTVENEETFMNRVEVKVKIPEELKPWLVDDWDLITRQKQLFYLPAKKNVDSILEDYANYKKSRGNTDNKEYAVNEVVAGIKEYFNVMLGTQLLYKFERPQYAEILADHPDAPMSQVYGAPHLLRLFVRIGAMLAYTPLDEKSLALLLNYLHDFLKYLAKNSATLFSASDYEVAPPEYHRKAV

SEQ ID NO: 168022 - protein, 323 aa, Artificial Sequence
  derived and/or modified sequence
MAPKQDPKPKFQEGERVLCFHGPLLYEAKCVKVAIKDKQVKYFIHYSGWNKNWDEWVPESRVLKYVDTNLQKQRELQKANQEQYAEGKMRGAAPGKKTSGLQQKNVEVKTKKNKQKTPGNGDGGSTSETPQPPRKKRARVDPTVENEETFMNRVEVKVKIPEELKPWLVDDWDLITRQKQLFYLPAKKNVDSILEDYANYKKSRGNTDNKEYAVNEVVAGIKEYFNVMLGTQLLYKFERPQYAEILADHPDAPMSQVYGAPHLLRLFVRIGAMLAYTPLDEKSLALLLNYLHDFLKYLAKNSATLFSASDYEVAPPEYHRKAV

SEQ ID NO: 168023 - DNA, 1852 bp, Artificial Sequence
  derived and/or modified sequence
gtcgttggctggagcagcggctgcgcgggtcgcggtgctgtgaggtctgcgggcgctggcaaatccggcccaggatgtagagctggcagtgcctgacggcgcgtctgacgcggagttgggtggggtagagagtagggggcggtagtcgggggtggtgggagaaggaggaggcggcgaatcacttataaatggcgccgaagcaggacccgaagcctaaattccaggagggtgagcgagtgctgtgctttcatgggcctcttctttatgaagcaaagtgtgtaaaggttgccataaaggacaaacaagtgaaatacttcatacattacagtggttggaataaaaattgggatgaatgggttccggagagcagagtactcaaatacgtggacaccaatttgcagaaacagcgagaacttcaaaaagccaatcaggagcagtatgcagaggggaagatgagaggggctgccccaggaaagaagacatctggtctgcaacagaaaaatgttgaagtgaaaacgaaaaagaacaaacagaaaacacctggaaatggagatggtggcagtaccagtgagacccctcagcctcctcggaagaaaagggcccgggtagatcctactgttgaaaatgaggaaacattcatgaacagagttgaagttaaagtaaagattcctgaagagctaaaaccgtggcttgttgatgactgggacttaattaccaggcaaaaacagctcttttatcttcctgccaagaagaatgtggattccattcttgaggattatgcaaattacaagaaatctcgtggaaacacagataataaggagtatgcggttaatgaagttgtggcagggataaaagaatacttcaacgtaatgttgggtacccagctactctataaatttgagagaccacagtatgctgaaattcttgcagatcatcccgatgcacccatgtcccaggtgtatggagcgccacatctcctgagattatttgtacgaattggagcaatgttggcttatacacctctggatgagaagagccttgctttattactcaattatcttcacgatttcctaaagtacctggcaaagaattctgcaactttgttcagtgccagcgattatgaagtggctcctcctgagtaccatcggaaagctgtgtgagaggcactctcactcacttatgtttggatctccgtaaacacatttttgttcttagtctatctcttgtacaaacgatgtgctttgaagatgttagtgtataacaattgatgtttgttttctgtttgattttaaacagagaaaaaataaaagggggtaatagctccttttttcttctttctttttttttttcatttcaaaattgctgccagtgttttcaatgatggacaacagagggatatgctgtagagtgttttattgcctagttgacaaagctgcttttgaatgctggtggttctattcctttgacactacgcacttttataatacatgttaatgctatatgacaaaatgctctgattcctagtgccaaaggttcaattcagtgtatataactgaacacactcatccatttgtgcttttgtttttttttatggtgcttaaagtaaagagcccatcctttgcaagtcatccatgttgttacttaggcattttatcttggctcaaattgttgaagaatggtggcttgtttcatggtttttgtatttgtgtctaatgcacgttttaacatgatagacgcaatgcattgtgtagctagttttctggaaaagtcaatcttttaggaattgtttttcagatcttcaataaattttttctttaaatttcaaaaaaaaaaaaaaaaaaaaaaaaaaaaa

SEQ ID NO: 168024 - DNA, 1047 bp, Artificial Sequence
  derived and/or modified sequence
atgattccttttccacaccctcaggtgactgacgcgctgggccgatacagcaactacattctctcaagcactgtcgaatctccctcgttgcgatccatgaattttgaaaagcagggagaacgcgtcctgtgcttccatggtcccttgctttacgaggccaagtgcgtgaaggtcgccatcaaggataaacaggtgaaatacttcatccattattctggttggaacaagaattgggacgagtgggtgcccgagtcaagggtcctgaaatacgtcgatacaaatttacagaagcagagggagctccaaaaggcaaaccaagagcagtatgccgaagggaaaatgcggggagcagcccccggtaaaaagactagcggccttcagcaaaagaatgtcgaagtcaaaacaaagaagaataagcagaaaactccgggaaatggcgatggagggagtactagcgaaacaccgcagccaccccgaaaaaagcgcgcgcgagtggatcccaccgttgaaaacgaagagacatttatgaatagagtcgaagtgaaggttaagattcccgaggaactgaaaccttggctggtcgatgactgggaccttataacccgacagaagcagcttttctatttacccgcaaagaagaacgtcgattccatcctggaggactatgccaactacaaaaaatctaggggtaacaccgataataaggaatatgccgtcaacgaggtggtagcagggatcaaagaatatttcaatgtgatgttgggaacccaactgttatacaaatttgaaagaccccagtacgctgaaatactggccgaccatccagatgctcccatgagtcaggtgtacggtgctccacatctgctacgcctgtttgttcgcatcggcgcaatgctcgcctacacaccccttgacgaaaagagcctggctctgttgctgaactacctgcacgacttcctgaagtaccttgccaaaaactctgcaaccctgttctccgcgagtgattacgaggtagcacccccagagtatcatagaaaggcggtgtag

SEQ ID NO: 168025 - DNA, 972 bp, Artificial Sequence
  derived and/or modified sequence
atggctccaaagcaggaccccaagccaaagtttcaggagggagaaagagtcctgtgtttccatgggcctctgctgtatgaagctaaatgcgttaaggtggccatcaaagataagcaggtgaaatactttatacactattcagggtggaacaagaattgggatgagtgggtgcctgagagtagagtgctgaagtacgtcgacaccaacctgcagaaacaaagggaactccaaaaagccaatcaggagcagtacgccgagggcaaaatgagaggagccgctccggggaagaagacatctggattacagcaaaagaatgttgaggtcaagactaagaaaaacaaacaaaagacccctggcaatggcgacgggggcagtactagcgaaacaccgcagcctccccgaaaaaaaagggcccgtgtggacccgacagtggaaaatgaagagacatttatgaaccgggtggaggtgaaggttaagatccccgaggaattgaaaccttggttagtagatgattgggatctcatcacgcggcagaaacagctgttctatctacctgctaagaagaatgtggactctattctggaggactatgcgaattataagaagagtagaggcaacaccgataacaaagaatacgctgtaaatgaagttgtggccggaattaaagaatattttaatgtcatgctaggcacccaactgctctataaattcgaaaggcctcagtatgccgagattctcgcagatcatcccgacgccccaatgagccaggtatatggtgcgcctcatctgctgaggctttttgtacggattggagccatgctggcttacacgccacttgacgaaaagagtctcgccttgctgcttaattacttacacgattttctgaaatatctggctaaaaactctgctacactgttcagcgcctctgattatgaagtggcgccaccagaatatcaccggaaagcagtgtag

SEQ ID NO: 168026 - DNA, 1047 bp, Artificial Sequence
  derived and/or modified sequence
atgatccccttcccccacccccaggtgacagatgccctgggccgctacagcaactacatcctgagcagcacagtggagagccccagcctgcgctccatgaactttgagaagcagggcgagcgggtgctgtgcttccacggccccctgctgtatgaggccaagtgtgtgaaggtggccatcaaggacaagcaggtgaagtacttcatccactacagcggctggaacaagaactgggatgagtgggtgcctgagagccgggtgctgaagtatgtggacaccaacctgcagaagcagcgggagctgcagaaggccaaccaggagcagtatgcagagggcaagatgagaggagctgcccctgggaagaagaccagcggcctgcagcagaagaatgtggaggtgaagaccaagaagaacaagcagaagaccccaggaaatggagatggcggcagcaccagcgagaccccccagccccccaggaagaagagggcccgggtggaccccaccgtggagaatgaggagaccttcatgaacagagtggaggtgaaggtgaagatccctgaggagctgaagccctggctggtggatgactgggacctgatcacccggcagaagcagctgttctacctgcctgccaagaagaatgtggacagcatcctggaggactatgccaactacaagaagagccggggcaacacagacaacaaggagtatgctgtgaatgaggtggtggccggcatcaaggagtacttcaacgtgatgctgggcacccagctgctgtacaagtttgagcggccccagtatgcagagatcctggccgaccacccagatgcccccatgagccaggtgtatggagccccccacctgctgcggctgtttgtgagaattggagccatgctggcctacacccccctggatgagaagagcctggccctgctgctgaactacctgcatgacttcctgaagtacctggccaagaacagcgccaccctcttcagcgccagtgactatgaggtggcccctcctgagtaccacaggaaggctgtgtag

SEQ ID NO: 168027 - DNA, 972 bp, Artificial Sequence
  derived and/or modified sequence
atggcccccaagcaggaccccaagcccaagttccaggagggggagcgggtgctgtgcttccacggccccctgctgtatgaggccaagtgtgtgaaggtggccatcaaggacaagcaggtgaagtacttcatccactacagcggctggaacaagaactgggatgagtgggtgcctgagagccgggtgctgaagtatgtggacaccaacctgcagaagcagcgggagctgcagaaggccaaccaggagcagtatgcagagggcaagatgagaggagctgcccctgggaagaagaccagcggcctgcagcagaagaatgtggaggtgaagaccaagaagaacaagcagaagaccccaggaaatggagatggcggcagcaccagcgagaccccccagccccccaggaagaagagggcccgggtggaccccaccgtggagaatgaggagaccttcatgaacagagtggaggtgaaggtgaagatccctgaggagctgaagccctggctggtggatgactgggacctgatcacccggcagaagcagctgttctacctgcctgccaagaagaatgtggacagcatcctggaggactatgccaactacaagaagagccggggcaacacagacaacaaggagtatgctgtgaatgaggtggtggccggcatcaaggagtacttcaacgtgatgctgggcacccagctgctgtacaagtttgagcggccccagtatgcagagatcctggccgaccacccagatgcccccatgagccaggtgtatggagccccccacctgctgcggctgtttgtgcgcatcggggccatgctggcctacacccccctggatgagaagagcctggccctgctgctgaactacctgcatgacttcctgaagtacctggccaagaacagcgccaccctcttcagcgccagtgactatgaggtggcccctcctgagtaccacaggaaggctgtgtag

SEQ ID NO: 168028 - DNA, 2274 bp, Artificial Sequence
  derived and/or modified sequence
aacccatggccgggaaaagaagctcctgctccccgctccactcccggcgtcttcacacttggggaagggagaggcaggaagtgcaaggaccgcgcaagacccggccccccgagccgccaggggccgcgccagcagcccagatgcggtgggcgggagctgggggggcggcggggtcccgcgaagacctgcgacctggcgccctcgccggctgtgtcccggccagcccgctttccaggcgagcctcgctaaggagtgtgagaaaccaaatcctcagtgggtaaaccgcgctccgtccagcccactcggacgagagctctcccgggagccaggcgcgttgctgcacccgaggtggggaaaccggagcccgaagagcggaaggggcttattccaggcgacaggcagtgtcagtaactgaatcaggggccgaggaagtttccccagaagcgcggcttcgctcccggcccggcccgaccccgactactgtcccctaatacccagggagcggaagacgcgaccaactccaggcacagcggagccggcgcggggtccacaaagcaaaaaagaatgatccccttcccccatcctcaagtgactgatgctcttggaagatactccaactatatcctgagtagcactgtggagagccccagtctgagaagcatgaactttgagaagcaaggtgagcgagtgctgtgctttcatgggcctcttctttatgaagcaaagtgtgtaaaggttgccataaaggacaaacaagtgaaatacttcatacattacagtggttggaataaaaattgggatgaatgggttccggagagcagagtactcaaatacgtggacaccaatttgcagaaacagcgagaacttcaaaaagccaatcaggagcagtatgcagaggggaagatgagaggggctgccccaggaaagaagacatctggtctgcaacagaaaaatgttgaagtgaaaacgaaaaagaacaaacagaaaacacctggaaatggagatggtggcagtaccagtgagacccctcagcctcctcggaagaaaagggcccgggtagatcctactgttgaaaatgaggaaacattcatgaacagagttgaagttaaagtaaagattcctgaagagctaaaaccgtggcttgttgatgactgggacttaattaccaggcaaaaacagctcttttatcttcctgccaagaagaatgtggattccattcttgaggattatgcaaattacaagaaatctcgtggaaacacagataataaggagtatgcggttaatgaagttgtggcagggataaaagaatacttcaacgtaatgttgggtacccagctactctataaatttgagagaccacagtatgctgaaattcttgcagatcatcccgatgcacccatgtcccaggtgtatggagcgccacatctcctgagattatttgtacgaattggagcaatgttggcttatacacctctggatgagaagagccttgctttattactcaattatcttcacgatttcctaaagtacctggcaaagaattctgcaactttgttcagtgccagcgattatgaagtggctcctcctgagtaccatcggaaagctgtgtgagaggcactctcactcacttatgtttggatctccgtaaacacatttttgttcttagtctatctcttgtacaaacgatgtgctttgaagatgttagtgtataacaattgatgtttgttttctgtttgattttaaacagagaaaaaataaaagggggtaatagctccttttttcttctttctttttttttttcatttcaaaattgctgccagtgttttcaatgatggacaacagagggatatgctgtagagtgttttattgcctagttgacaaagctgcttttgaatgctggtggttctattcctttgacactacgcacttttataatacatgttaatgctatatgacaaaatgctctgattcctagtgccaaaggttcaattcagtgtatataactgaacacactcatccatttgtgcttttgtttttttttatggtgcttaaagtaaagagcccatcctttgcaagtcatccatgttgttacttaggcattttatcttggctcaaattgttgaagaatggtggcttgtttcatggtttttgtatttgtgtctaatgcacgttttaacatgatagacgcaatgcattgtgtagctagttttctggaaaagtcaatcttttaggaattgtttttcagatcttcaataaattttttctttaaatttc

SEQ ID NO: 168029 - DNA, 1880 bp, Artificial Sequence
  derived and/or modified sequence
agtcccggcgtgccctggggcggcgcgggcgcaggggcgcgtgcgcggcgggctgtcgttggctggagcagcggctgcgcgggtcgcggtgctgtgaggtctgcgggcgctggcaaatccggcccaggatgtagagctggcagtgcctgacggcgcgtctgacgcggagttgggtggggtagagagtagggggcggtagtcgggggtggtgggagaaggaggaggcggcgaatcacttataaatggcgccgaagcaggacccgaagcctaaattccaggagggtgagcgagtgctgtgctttcatgggcctcttctttatgaagcaaagtgtgtaaaggttgccataaaggacaaacaagtgaaatacttcatacattacagtggttggaataaaaattgggatgaatgggttccggagagcagagtactcaaatacgtggacaccaatttgcagaaacagcgagaacttcaaaaagccaatcaggagcagtatgcagaggggaagatgagaggggctgccccaggaaagaagacatctggtctgcaacagaaaaatgttgaagtgaaaacgaaaaagaacaaacagaaaacacctggaaatggagatggtggcagtaccagtgagacccctcagcctcctcggaagaaaagggcccgggtagatcctactgttgaaaatgaggaaacattcatgaacagagttgaagttaaagtaaagattcctgaagagctaaaaccgtggcttgttgatgactgggacttaattaccaggcaaaaacagctcttttatcttcctgccaagaagaatgtggattccattcttgaggattatgcaaattacaagaaatctcgtggaaacacagataataaggagtatgcggttaatgaagttgtggcagggataaaagaatacttcaacgtaatgttgggtacccagctactctataaatttgagagaccacagtatgctgaaattcttgcagatcatcccgatgcacccatgtcccaggtgtatggagcgccacatctcctgagattatttgtacgaattggagcaatgttggcttatacacctctggatgagaagagccttgctttattactcaattatcttcacgatttcctaaagtacctggcaaagaattctgcaactttgttcagtgccagcgattatgaagtggctcctcctgagtaccatcggaaagctgtgtgagaggcactctcactcacttatgtttggatctccgtaaacacatttttgttcttagtctatctcttgtacaaacgatgtgctttgaagatgttagtgtataacaattgatgtttgttttctgtttgattttaaacagagaaaaaataaaagggggtaatagctccttttttcttctttctttttttttttcatttcaaaattgctgccagtgttttcaatgatggacaacagagggatatgctgtagagtgttttattgcctagttgacaaagctgcttttgaatgctggtggttctattcctttgacactacgcacttttataatacatgttaatgctatatgacaaaatgctctgattcctagtgccaaaggttcaattcagtgtatataactgaacacactcatccatttgtgcttttgtttttttttatggtgcttaaagtaaagagcccatcctttgcaagtcatccatgttgttacttaggcattttatcttggctcaaattgttgaagaatggtggcttgtttcatggtttttgtatttgtgtctaatgcacgttttaacatgatagacgcaatgcattgtgtagctagttttctggaaaagtcaatcttttaggaattgtttttcagatcttcaataaattttttctttaaatttcaaa

SEQ ID NO: 168030 - DNA, 855 bp, Artificial Sequence
  derived and/or modified sequence
caggacccgaagcctaaattccaggaggttgggatgaatgggttccggagagcagagtactcaaatacgtggacaccaatttgcagaaacagcgagaacttcaaaaagccaatcaggagcagtatgcagaggggaagatgagaggggctgccccaggaaagaagacatctggtctgcaacagaaaaatgttgaagtgaaaacgaaaaagaacaaacagaaaacacctggaaatggagatggtggcagtaccagtgagacccctcagcctcctcggaagaaaagggcccgggtagatcctactgttgaaaatgaggaaacattcatgaacagagttgaagttaaagtaaagattcctgaagagctaaaaccgtggcttgttgatgactgggacttaattaccaggcaaaaacagctcttttatcttcctgccaagaagaatgtggattccattcttgaggattatgcaaattacaagaaatctcgtggaaacacagataataaggagtatgcggttaatgaagttgtggcagggataaaagaatacttcaacgtaatgttgggtacccagctactctataaatttgagagaccacagtatgctgaaattcttgcagatcatcccgatgcacccatgtcccaggtgtatggagcgccacatctcctgagattatttgtacgaattggagcaatgttggcttatacacctctggatgagaagagccttgctttattactcaattatcttcacgatttcctaaagtacctggcaaagaattctgcaactttgttcagtgccagcgattatgaagtggctcctcctgagtaccatcggaaagctgtgtgagaggcactct

SEQ ID NO: 168031 - DNA, 1468 bp, Artificial Sequence
  derived and/or modified sequence
gaatcacttataaatggcgccgaagcaggacccgaagcctaaattccaggagggtgagtgtgcgcctttgggaaaaaggcacctaacggcgcaggagatagaggcgggctcgaggtgattgaggcttgagggccgggggcggcgcgggctgcgccctgagaaggcggcggtcagtgctttgtgcggggaaagcgcattgcggatggcaattccggtgagcgagtgctgtgctttcatgggcctcttctttatgaagcaaagtgtgtaaaggttgccataaaggacaaacaagtgaaatacttcatacattacagtggttggaataaaaattgggatgaatgggttccggagagcagagtactcaaatacgtggacaccaatttgcagaaacagcgagaacttcaaaaagccaatcaggagcagtatgcagaggggaagatgagaggggctgccccaggaaagaagacatctggtctgcaacagaaaaatgttgaagtgaaaacgaaaaagaacaaacagaaaacacctggaaatggagatggtggcagtaccagtgagacccctcagcctcctcggaagaaaagggcccgggtagatcctactgttgaaaatgaggaaacattcatgaacagagttgaagttaaagtaaagattcctgaagagctaaaaccgtggcttgttgatgactgggacttaattaccaggcaaaaacagctcttttatcttcctgccaagaagaatgtggattccattcttgaggattatgcaaattacaagaaatctcgtggaaacacagataataaggagtatgcggttaatgaagttgtggcagggataaaagaatacttcaacgtaatgttgggtacccagctactctataaatttgagagaccacagtatgctgaaattcttgcagatcatcccgatgcacccatgtcccaggtgtatggagcgccacatctcctgagattatttgtacgaattggagcaatgttggcttatacacctctggatgagaagagccttgctttattactcaattatcttcacgatttcctaaagtacctggcaaagaattctgcaactttgttcagtgccagcgattatgaagtggctcctcctgagtaccatcggaaagctgtgtgagaggcactctcactcacttatgtttggatctccgtaaacacatttttgttcttagtctatctcttgtacaaacgatgtgctttgaagatgttagtgtataacaattgatgtttgttttctgtttgattttaaacagagaaaaaataaaagggggtaatagctccttttttcttctttctttttttttttcatttcaaaattgctgccagtgttttcaatgatggacaacagagggatatgctgtagagtgttttattgcctagttgacaaagctgcttttgaatgctggtggttctattcctttgacactacgcacttttat

SEQ ID NO: 168032 - DNA, 1047 bp, Artificial Sequence
  derived and/or modified sequence
atgatccccttcccccacccccaggtgaccgacgccctgggccggtactcgaattacatcctctcctccactgttgagagtcctagtctacgcagcatgaatttcgagaaacaaggcgagagagtcctctgttttcatggccccttgctgtatgaagctaaatgtgttaaagtcgcaattaaagacaagcaagtgaaatacttcatccattacagcggctggaacaagaattgggatgaatgggtgccagaaagccgtgtacttaaatatgttgatacgaacctgcagaaacaacgagagctgcagaaagctaatcaagaacagtacgccgaagggaagatgcgcggcgccgctccaggcaaaaagactagcggacttcagcagaagaatgttgaggtgaaaacaaaaaaaaacaaacagaagacaccaggaaacggtgatgggggctccacctcggagaccccgcagccgccccgaaaaaaaagagcccgcgttgaccccactgtggagaacgaggaaactttcatgaatcgggtcgaggtgaaggtgaagattccggaggaactgaagccttggctggtcgatgattgggacctcataacaaggcaaaagcagctcttctatttacctgctaagaagaatgtggatagcatcttagaagactacgccaactacaagaagagccgcggcaatactgacaataaagaatacgctgtgaatgaagtagtcgctggcataaaggaatacttcaacgtgatgctgggaacacagttactctataaatttgagcgaccgcagtatgcagaaattttggccgatcatccagacgctcccatgtcacaggtctatggtgcaccacacctcctcaggttgtttgtccgaatcggagcaatgctggcatatactccactggatgaaaaaagcttggcccttctgctgaattatctgcacgacttcctgaaatatctggccaagaacagtgccaccctcttttctgcttctgattacgaggtggccccacctgagtaccatcggaaagctgtgtag

SEQ ID NO: 168033 - DNA, 972 bp, Artificial Sequence
  derived and/or modified sequence
atggcccccaagcaggaccccaagcccaagttccaggagggcgagagggtcctttgtttccacggcccactgctgtacgaagcgaaatgcgttaaagtggccataaaagacaaacaggtgaagtacttcatccactattccggatggaataaaaactgggatgagtgggttcccgaatctcgggtactaaagtacgtcgacacaaatttacaaaagcagcgagaactccaaaaagctaatcaagagcagtatgccgaaggaaagatgaggggggccgcccctgggaagaaaaccagcgggttgcagcagaagaatgttgaggttaaaactaaaaagaacaagcagaaaaccccaggaaacggggacgggggctctactagcgaaactccccaaccacctcggaagaagcgcgcaagggtcgaccccactgtggagaacgaagagacatttatgaaccgcgtagaagttaaagtcaaaattccggaagagctgaagccttggctggtcgacgattgggacttgattaccaggcagaagcaacttttctacctcccagcgaagaagaatgtcgattcaatcctagaagactacgcaaattacaagaagtcgcggggaaatactgataacaaggaatacgcagtgaatgaagtagtggctggaatcaaggaatattttaatgtgatgttgggtacacagttgttatacaagttcgaacgtcctcagtatgccgagattcttgccgatcaccccgacgccccaatgtcgcaggtgtatggagccccccatctgttaaggctcttcgtcagaatcggagctatgctcgcctacaccccgcttgacgagaaaagtcttgctctactcctgaattacttacacgacttcctaaagtacctggctaagaatagtgcaaccctgttctctgcgtcagattacgaagtggccccccccgaataccatcgtaaggccgtctag

SEQ ID NO: 168034 - DNA, 1047 bp, Artificial Sequence
  derived and/or modified sequence
atgatccctttcccccacccccaggtgacagacgctctgggcaggtacagcaattacattttgtccagtaccgtcgagtccccctccttgaggagtatgaacttcgaaaagcagggagagagggtcctgtgctttcatggacctttgctgtacgaggccaagtgtgtgaaagtggctattaaggacaaacaggtgaagtacttcatacactattcagggtggaacaagaactgggatgaatgggtgccagaatcccgagtgttgaagtacgttgacactaatcttcagaagcagcgggagctgcaaaaggccaaccaggagcagtacgcggagggaaagatgcgcggagcagccccagggaagaagacaagcggcttacagcagaaaaatgttgaggtgaagaccaaaaaaaataaacagaagaccccagggaatggagacggcggtagtacctccgagactccacagcctccaagaaaaaagagggccagagtggacccaactgtggagaacgaagaaactttcatgaatcgtgtggaagtcaaagttaagatccccgaagagctcaaaccatggctggtcgacgactgggatttaataactcgccagaagcagcttttttacttgccagccaaaaagaatgtcgactcaatcctcgaggattatgcaaactacaagaaatctagaggcaatactgataacaaagagtatgccgtgaacgaggtcgtggccggaataaaggagtacttcaatgttatgttaggcacgcaacttctatacaagttcgagcgtccccagtacgcagagatcctcgcagaccacccggacgccccaatgtctcaggtctatggagctccacacctcttacgattattcgtgcgcatcggtgctatgctcgcatataccccattggacgaaaaatctctggccctcctcttaaactacctgcatgattttctgaagtacctggcgaagaacagtgcgactctttttagcgcgtcggattacgaagtcgctccaccagaatatcatcggaaggcggtgtag

SEQ ID NO: 168035 - DNA, 972 bp, Artificial Sequence
  derived and/or modified sequence
atggcccctaagcaggacccgaaacccaaatttcaggagggggagagggttctgtgttttcatggcccattactctatgaagcgaaatgcgtcaaggtggcaatcaaagataaacaggtgaagtattttatccattattccggctggaacaagaattgggatgagtgggtgcctgaatcacgggttttgaaatatgtggacacgaacctgcaaaaacaaagggaactgcagaaagcaaatcaagagcagtacgcagagggcaaaatgcgaggagcagcccctggaaagaaaacatccggcctacagcagaagaatgtggaggtcaaaactaaaaaaaacaagcaaaagacacccggtaatggcgacggaggaagcacaagcgagactcctcagccgccaagaaagaaacgagcacgcgtggaccctactgtggaaaatgaagaaaccttcatgaacagagtggaggtgaaagtgaaaatccctgaagaattgaaaccttggctcgtggatgactgggaccttatcacccggcagaagcagctgttctacttgccagctaaaaaaaacgtggacagcattttagaggactatgcaaactataagaaaagccgcggaaataccgataataaggagtacgccgtgaacgaggttgtggcgggaatcaaggagtacttcaatgtgatgttgggcacccagctgctttacaaattcgagcgcccacaatatgccgaaattctggccgatcaccctgacgcccctatgtcacaggtgtatggagccccacacctgttgcggctctttgtgcggataggggcaatgctggcatacacgccgctggatgaaaagagtcttgctcttctattaaattaccttcatgatttcctgaagtacctcgccaaaaatagcgccacccttttctccgcaagcgattatgaagtcgccccacccgagtatcacaggaaggctgtctag

SEQ ID NO: 168036 - DNA, 1047 bp, Artificial Sequence
  derived and/or modified sequence
atgatccccttcccccacccccaggtgaccgacgccctgggcagatacagcaactacatcctgagcagcaccgtggagagccccagcctgagaagcatgaacttcgagaagcagggcgagagagtgctgtgcttccacggccccctgctgtacgaggccaagtgcgtgaaggtggccatcaaggacaagcaggtgaagtacttcatccactacagcggctggaacaagaactgggacgagtgggtgcccgagagcagagtgctgaagtacgtggacaccaacctgcagaagcagagagagctgcagaaggccaaccaggagcagtacgccgagggcaagatgagaggcgccgcccccggcaagaagaccagcggcctgcagcagaagaacgtggaggtgaagaccaagaagaacaagcagaagacccccggcaacggcgacggcggcagcaccagcgagaccccccagccccccagaaagaagagagccagagtggaccccaccgtggagaacgaggagaccttcatgaacagagtggaggtgaaggtgaagatccccgaggagctgaagccctggctggtggacgactgggacctgatcaccagacagaagcagctgttctacctgcccgccaagaagaacgtggacagcatcctggaggactacgccaactacaagaagagcagaggcaacaccgacaacaaggagtacgccgtgaacgaggtggtggccggcatcaaggagtacttcaacgtgatgctgggcacccagctgctgtacaagttcgagagaccccagtacgccgagatcctggccgaccaccccgacgcccccatgagccaggtgtacggcgccccccacctgctgagactgttcgtgagaatcggcgccatgctggcctacacccccctggacgagaagagcctggccctgctgctgaactacctgcacgacttcctgaagtacctggccaagaacagcgccaccctgttcagcgccagcgactacgaggtggccccccccgagtaccacagaaaggccgtgtag

SEQ ID NO: 168037 - DNA, 972 bp, Artificial Sequence
  derived and/or modified sequence
atggcccccaagcaggaccccaagcccaagttccaggagggcgagagagtgctgtgcttccacggccccctgctgtacgaggccaagtgcgtgaaggtggccatcaaggacaagcaggtgaagtacttcatccactacagcggctggaacaagaactgggacgagtgggtgcccgagagcagagtgctgaagtacgtggacaccaacctgcagaagcagagagagctgcagaaggccaaccaggagcagtacgccgagggcaagatgagaggcgccgcccccggcaagaagaccagcggcctgcagcagaagaacgtggaggtgaagaccaagaagaacaagcagaagacccccggcaacggcgacggcggcagcaccagcgagaccccccagccccccagaaagaagagagccagagtggaccccaccgtggagaacgaggagaccttcatgaacagagtggaggtgaaggtgaagatccccgaggagctgaagccctggctggtggacgactgggacctgatcaccagacagaagcagctgttctacctgcccgccaagaagaacgtggacagcatcctggaggactacgccaactacaagaagagcagaggcaacaccgacaacaaggagtacgccgtgaacgaggtggtggccggcatcaaggagtacttcaacgtgatgctgggcacccagctgctgtacaagttcgagagaccccagtacgccgagatcctggccgaccaccccgacgcccccatgagccaggtgtacggcgccccccacctgctgagactgttcgtgagaatcggcgccatgctggcctacacccccctggacgagaagagcctggccctgctgctgaactacctgcacgacttcctgaagtacctggccaagaacagcgccaccctgttcagcgccagcgactacgaggtggccccccccgagtaccacagaaaggccgtgtag

SEQ ID NO: 168038 - protein, 256 aa, Artificial Sequence
  derived and/or modified sequence
MAAAVGRLLRASVARHVSAIPWGISATAALRPAACGRTSLTNLLCSGSSQAKLFSTSSSCHAPAVTQHAPYFKGTAVVNGEFKDLSLDDFKGKYLVLFFYPLDFTFVCPTEIVAFSDKANEFHDVNCEVVAVSVDSHFSHLAWINTPRKNGGLGHMNIALLSDLTKQISRDYGVLLEGSGLALRGLFIIDPNGVIKHLSVNDLPVGRSVEETLRLVKAFQYVETHGEVCPANWTPDSPTIKPSPAASKEYFQKVNQ

SEQ ID NO: 168039 - protein, 238 aa, Artificial Sequence
  derived and/or modified sequence
MAAAVGRLLRASVARHVSAIPWGISATAALRPAACGRTSLTNLLCSGSSQAPYFKGTAVVNGEFKDLSLDDFKGKYLVLFFYPLDFTFVCPTEIVAFSDKANEFHDVNCEVVAVSVDSHFSHLAWINTPRKNGGLGHMNIALLSDLTKQISRDYGVLLEGSGLALRGLFIIDPNGVIKHLSVNDLPVGRSVEETLRLVKAFQYVETHGEVCPANWTPDSPTIKPSPAASKEYFQKVNQ

SEQ ID NO: 168040 - DNA, 771 bp, Artificial Sequence
  derived and/or modified sequence
atggcagccgccgtcggccgactgctcagagcctctgtagccaggcatgtaagcgcaataccatgggggatttcggcaacagccgctctgcggcccgctgcatgcgggagaacttcactgactaacctgctttgctccggctcgagtcaggcgaaactgttttctacctccagttcctgtcatgcccctgccgtgacccaacatgccccctactttaagggaaccgccgtcgtaaatggggaatttaaggacctgagcctcgacgattttaaaggcaaatatcttgtgctattcttttacccgttggattttacatttgtgtgtccgaccgagattgtggcctttagcgacaaggccaatgaatttcatgacgtaaactgtgaggttgtggccgtcagtgtggactcccacttcagccatttagcctggattaatactcctcggaagaacggtggccttgggcacatgaatatagccctgttgagtgatttgacaaagcagatcagcagggactatggcgtgcttctagagggcagtggtctggcgctcagagggctgttcatcattgaccccaatggcgtaattaagcacctgtccgtaaacgatctgccggtcggccgatctgtggaggagaccctgcggcttgtgaaggcgtttcagtacgtggaaacccacggcgaagtgtgccctgcgaattggacacctgattctcccacaatcaagccctccccagcagcttccaaggagtacttccagaaagtcaaccagtag

SEQ ID NO: 168041 - DNA, 717 bp, Artificial Sequence
  derived and/or modified sequence
atggctgcggctgtggggcgcctgctgcgagcctccgtggctagacatgtgtccgctattccatggggtatctccgccacagccgccctgcgacccgccgcttgcggcaggacatcgctgactaacttgctttgttctggctccagtcaggccccgtactttaaagggacggcagttgtaaatggggaattcaaagatctcagcctcgacgattttaagggcaagtacctggtcctctttttttaccctctcgatttcaccttcgtgtgtccaaccgaaatcgtcgcattcagcgataaggccaacgagttccacgatgtgaactgcgaggtagtagccgtgagcgtggatagccatttttcccacctggcatggatcaacacccccagaaagaatggaggcctcgggcacatgaacatcgccctgctaagcgacctgaccaagcaaattagcagggattacggagtgctcttggagggtagcgggctggcactcagaggacttttcattattgatcctaatggtgtcatcaaacacctgtccgtgaatgacctgccagtggggcggagtgtggaggagacattgaggctagtaaaggcctttcaatatgtggaaacacacggggaagtatgtccagcaaactggactccggactctccaactataaaacccagtcccgccgccagcaaggaatatttccagaaagttaaccaatag

SEQ ID NO: 168042 - DNA, 771 bp, Artificial Sequence
  derived and/or modified sequence
atggctgctgctgtgggccgcctgctgcgggcctctgtggcccggcacgtgtctgccatcccctggggcatcagcgccacagctgccctgcggcctgctgcctgtggccgcaccagcctgaccaacctgctgtgcagcggcagcagccaggccaagctgttcagcaccagcagcagctgccacgccccagctgtgacccagcacgccccctacttcaagggcacagctgtggtgaatggagagttcaaggacctgagcctggatgacttcaagggcaagtacctggtgctcttcttctaccccctggacttcacctttgtgtgccccacagagatcgtggccttcagtgacaaggccaatgagttccatgatgtgaactgtgaggtggtggccgtgtctgtggacagccacttcagccacctggcctggatcaacacccccaggaagaatggaggcctgggccacatgaacatcgccctgctgagtgacctgaccaagcagatcagccgggactatggagtgctgctggagggcagcggcctggccctgcggggcctcttcatcatcgaccccaacggggtcatcaagcacctgtctgtgaatgacctgcctgtgggccgctctgtggaggagaccctgcggctggtgaaggccttccagtatgtggagacccatggagaggtgtgcccagccaactggaccccagacagccccaccatcaagcccagccctgctgccagcaaggagtacttccagaaggtgaaccagtag

SEQ ID NO: 168043 - DNA, 717 bp, Artificial Sequence
  derived and/or modified sequence
atggctgctgctgtgggccgcctgctgcgggcctctgtggcccggcacgtgtctgccatcccctggggcatcagcgccacagctgccctgcggcctgctgcctgtggccgcaccagcctgaccaacctgctgtgcagcggcagcagccaggccccctacttcaagggcacagctgtggtgaatggagagttcaaggacctgagcctggatgacttcaagggcaagtacctggtgctcttcttctaccccctggacttcacctttgtgtgccccacagagatcgtggccttcagtgacaaggccaatgagttccatgatgtgaactgtgaggtggtggccgtgtctgtggacagccacttcagccacctggcctggatcaacacccccaggaagaatggaggcctgggccacatgaacatcgccctgctgagtgacctgaccaagcagatcagccgggactatggagtgctgctggagggcagcggcctggccctgcggggcctcttcatcatcgaccccaacggggtcatcaagcacctgtctgtgaatgacctgcctgtgggccgctctgtggaggagaccctgcggctggtgaaggccttccagtatgtggagacccatggagaggtgtgcccagccaactggaccccagacagccccaccatcaagcccagccctgctgccagcaaggagtacttccagaaggtgaaccagtag

SEQ ID NO: 168044 - DNA, 771 bp, Artificial Sequence
  derived and/or modified sequence
atggccgccgccgtgggccggctgctgcgggccagcgtggcccggcacgtgagtgcaatcccttggggaattagcgccacggccgcactgcgccctgcggcttgtggaagaacaagtctgaccaatttactatgttctgggtctagccaggccaaattgttctctacctctagctcctgtcacgcccctgccgtgacccagcatgccccctactttaaagggacagctgttgttaacggtgagttcaaagacttgtccttagacgatttcaaaggtaagtacctggttctatttttttaccctctcgattttacattcgtatgcccaacagagatcgtggctttttctgacaaagccaatgaatttcacgacgtcaattgtgaagtggtggccgtatccgtggattcgcatttcagccacctcgcttggattaacactccccgaaaaaacggaggcctcggtcacatgaatatcgcactgctttctgatctcacgaagcaaatttctcgggactatggggtcctactcgaaggatccggcctggctctgaggggcctctttataatagaccccaatggggttatcaaacatctgagcgtcaatgatctccccgtagggaggagcgtcgaggaaacactcagacttgtgaaggccttccagtacgtggaaacacatggggaggtgtgccccgctaactggacaccagacagtcccaccatcaagcccagcccagcggcctccaaagaatattttcaaaaggtgaatcagtag

SEQ ID NO: 168045 - DNA, 717 bp, Artificial Sequence
  derived and/or modified sequence
atggccgccgccgtgggccggctgctgcgggccagcgtggcccggcacgtaagcgccattccatggggaatctccgctacagcggcactgaggcccgccgcctgcggacgaacatctctgaccaatctgctctgttcgggcagcagccaggctccctacttcaagggcacagccgtggtgaatggcgaattcaaggacttgtccctcgatgactttaaaggcaagtacctggtgctctttttctatcctctggatttcactttcgtgtgccccaccgaaatagtggcattctcagataaggccaacgaatttcatgatgtcaactgcgaagtcgttgcagtgtctgtggacagccatttctctcacctggcatggattaatacccccagaaaaaacggaggacttggccatatgaatattgccctactcagcgatctcacaaagcaaatcagcagggactatggagttcttctggaaggatctggcttggccttgagggggctatttatcatcgatcccaacggcgtcattaagcatttgtctgtcaatgatctacccgtgggccggtctgtggaggagacccttcggctggtgaaggctttccagtatgtcgaaacacacggagaggtgtgccctgccaactggactcctgactctccaaccataaagccatcaccggcagccagcaaagagtatttccagaaggtcaatcaatag

SEQ ID NO: 168046 - DNA, 1584 bp, Artificial Sequence
  derived and/or modified sequence
ccctgcgtctctgcccgccccgtggcgcccgagtgcactgaagatggcggctgctgtaggacggttgctccgagcgtcggttgcccgacatgtgagtgccattccttggggcatttctgccactgcagccctcaggcctgctgcatgtggaagaacgagcttgacaaatttattgtgttctggttccagtcaagcaaaattattcagcaccagttcctcatgccatgcacctgctgtcacccagcatgcaccctattttaagggtacagccgttgtcaatggagagttcaaagacctaagccttgatgactttaaggggaaatatttggtgcttttcttctatcctttggatttcacctttgtgtgtcctacagaaattgttgcttttagtgacaaagctaacgaatttcacgacgtgaactgtgaagttgtcgcagtctcagtggattcccactttagccatcttgcctggataaatacaccaagaaagaatggtggtttgggccacatgaacatcgcactcttgtcagacttaactaagcagatttcccgagactacggtgtgctgttagaaggttctggtcttgcactaagaggtctcttcataattgaccccaatggagtcatcaagcatttgagcgtcaacgatctcccagtgggccgaagcgtggaagaaaccctccgcttggtgaaggcgttccagtatgtagaaacacatggagaagtctgcccagcgaactggacaccggattctcctacgatcaagccaagtccagctgcttccaaagagtactttcagaaggtaaatcagtagatcacccatgtgtatctgcaccttctcaactgagagaagaaccacagttgaaacctgcttttatcattttcaagatggttatttgtagaaggcaaggaaccaattatgcttgtattcataagtattactctaaatgttttgtttttgtaattctggctaagaccttttaaacatggttagttgctagtacaaggaatcctttattggtaacatcttggtggctggctagctagtttctacagaacataatttgcctctatagaaggctattcttagatcatgtctcaatggaaacactcttctttcttagccttacttgaatcttgcctataataaagtagagcaacacacattgaaagcttctgatcaacggtcctgaaattttcatcttgaatgtctttgtattaaactgaattttcttttaagctaacaaagatcataattttcaatgattagccgtgtaactcctgcaatgaatgtttatgtgattgaagcaaatgtgaatcgtattattttaaaaagtggcagagtgacttaactgatcatgcatgatccctcatccctgaaattgagtttatgtagtcattttacttattttattcattagctaactttgtctatgtatatttctagatattgattagtgtaatcgattataaaggatatttatcaaatccagggattgcattttgaaattataattattttctttgctgaagtattcattgtaaaacatacaaaataaacatattttaaaacatttgcatttt

SEQ ID NO: 168047 - DNA, 1537 bp, Artificial Sequence
  derived and/or modified sequence
ccctgcgtctctgcccgccccgtggcgcccgagtgcactgaagatggcggctgctgtaggacggttgctccgagcgtcggttgcccgacatgtgagtgccattccttggggcatttctgccactgcagccctcaggcctgctgcatgtggaagaacgagcttgacaaatttattgtgttctggttccagtcaagcaccctattttaagggtacagccgttgtcaatggagagttcaaagacctaagccttgatgactttaaggggaaatatttggtgcttttcttctatcctttggatttcacctttgtgtgtcctacagaaattgttgcttttagtgacaaagctaacgaatttcacgacgtgaactgtgaagttgtcgcagtctcagtggattcccactttagccatcttgcctggataaatacaccaagaaagaatggtggtttgggccacatgaacatcgcactcttgtcagacttaactaagcagatttcccgagactacggtgtgctgttagaaggttctggtcttgcactaagaggtctcttcataattgaccccaatggagtcatcaagcatttgagcgtcaacgatctcccagtgggccgaagcgtggaagaaaccctccgcttggtgaaggcgttccagtatgtagaaacacatggagaagtctgcccagcgaactggacaccggattctcctacgatcaagccaagtccagctgcttccaaagagtactttcagaaggtaaatcagtagatcacccatgtgtatctgcaccttctcaactgagagaagaaccacagttgaaacctgcttttatcattttcaagatggttatttgtagaaggcaaggaaccaattatgcttgtattcataagtattactctaaatgttttgtttttgtaattctggctaagaccttttaaacatggttagttgctagtacaaggaatcctttattggtaacatcttggtggctggctagctagtttctacagaacataatttgcctctatagaaggctattcttagatcatgtctcaatggaaacactcttctttcttagccttacttgaatcttgcctataataaagtagagcaacacacattgaaagcttctgatcaacggtcctgaaattttcatcttgaatgtctttgtattaaactgaattttcttttaagctaacaaagatcataattttcaatgattagccgtgtaactcctgcaatgaatgtttatgtgattgaagcaaatgtgaatcgtattattttaaaaagtggcagagtgacttaactgatcatgcatgatccctcatccctgaaattgagtttatgtagtcattttacttattttattcattagctaactttgtctatgtatatttctagatattgattagtgtaatcgattataaaggatatttatcaaatccagggattgcattttgaaattataattattttctttgctgaagtattcattgtaaaacatacaaaataaacatattttaaaacatttgcattttaccacca

SEQ ID NO: 168048 - DNA, 771 bp, Artificial Sequence
  derived and/or modified sequence
atggctgccgcagtcgggagattgttacgcgcttccgtggccaggcacgttagcgccattccctggggcatatctgcaaccgcagccctcaggccagctgcctgtggtcgtacatcactcaccaacctactgtgcagtggcagcagtcaggccaagctcttttcaacctcctcaagctgccacgcacctgccgtgacgcagcacgccccatacttcaaaggaacagccgtggtaaatggcgagttcaaggatcttagcttagatgacttcaaaggcaaatacctggtgctattcttctaccctctcgattttacttttgtgtgtccaaccgaaatcgtggcttttagcgacaaagcgaacgagttccacgacgttaattgtgaggtagtcgctgtctctgtggatagtcacttcagccacctggcttggataaatacacctaggaagaacggtgggttggggcacatgaacatcgccttactatcggacctcacaaagcagatatcaagggattatggtgtactcttagagggtagcggtctggccctcagaggcctttttatcattgatcctaacggagtgattaagcacctgtcggttaacgacctgcccgttggcagatccgttgaagagaccctccggctcgtgaaggctttccaatacgtcgaaacgcacggtgaggtatgcccggctaactggacccccgatagtcctacaatcaaaccttcaccagccgcttccaaagagtactttcaaaaagtgaatcaatag

SEQ ID NO: 168049 - DNA, 717 bp, Artificial Sequence
  derived and/or modified sequence
atggccgctgctgtcggccgtctattaagagccagtgtggcgcgacacgtctccgctattccgtggggtattagcgcaaccgctgccctacggccagccgcatgcggacgtacatccttgacgaacctgctatgtagtgggtcaagccaggcgccatacttcaaaggaactgccgtagtgaatggtgaattcaaggatctttcccttgatgatttcaaaggcaagtacctcgtgttgtttttttaccctctagatttcacattcgtgtgccctactgagattgtggcattctctgacaaggcgaacgagtttcacgatgtgaattgcgaggtagttgctgttagcgttgatagccacttttcccacctggcgtggatcaacactccgaggaaaaatggcggtctagggcacatgaatattgccttgctatcagatttaaccaagcaaatttcgcgtgattacggagtgctgttggaaggatcagggctggccctgaggggcttattcattatcgatcccaatggggtcattaaacatttgagcgtcaacgatttgcctgtcggcaggtccgtggaagagaccttaagactggttaaggccttccaatacgtcgagacccacggggaggtgtgcccagcaaactggactccagacagcccaaccatcaagccatcacctgccgcaagtaaggagtactttcagaaggtgaatcagtag

SEQ ID NO: 168050 - DNA, 771 bp, Artificial Sequence
  derived and/or modified sequence
atggccgccgccgtgggcagactgctgagagccagcgtggccagacacgtgagcgccatcccctggggcatcagcgccaccgccgccctgagacccgccgcctgcggcagaaccagcctgaccaacctgctgtgcagcggcagcagccaggccaagctgttcagcaccagcagcagctgccacgcccccgccgtgacccagcacgccccctacttcaagggcaccgccgtggtgaacggcgagttcaaggacctgagcctggacgacttcaagggcaagtacctggtgctgttcttctaccccctggacttcaccttcgtgtgccccaccgagatcgtggccttcagcgacaaggccaacgagttccacgacgtgaactgcgaggtggtggccgtgagcgtggacagccacttcagccacctggcctggatcaacacccccagaaagaacggcggcctgggccacatgaacatcgccctgctgagcgacctgaccaagcagatcagcagagactacggcgtgctgctggagggcagcggcctggccctgagaggcctgttcatcatcgaccccaacggcgtgatcaagcacctgagcgtgaacgacctgcccgtgggcagaagcgtggaggagaccctgagactggtgaaggccttccagtacgtggagacccacggcgaggtgtgccccgccaactggacccccgacagccccaccatcaagcccagccccgccgccagcaaggagtacttccagaaggtgaaccagtag

SEQ ID NO: 168051 - DNA, 717 bp, Artificial Sequence
  derived and/or modified sequence
atggccgccgccgtgggcagactgctgagagccagcgtggccagacacgtgagcgccatcccctggggcatcagcgccaccgccgccctgagacccgccgcctgcggcagaaccagcctgaccaacctgctgtgcagcggcagcagccaggccccctacttcaagggcaccgccgtggtgaacggcgagttcaaggacctgagcctggacgacttcaagggcaagtacctggtgctgttcttctaccccctggacttcaccttcgtgtgccccaccgagatcgtggccttcagcgacaaggccaacgagttccacgacgtgaactgcgaggtggtggccgtgagcgtggacagccacttcagccacctggcctggatcaacacccccagaaagaacggcggcctgggccacatgaacatcgccctgctgagcgacctgaccaagcagatcagcagagactacggcgtgctgctggagggcagcggcctggccctgagaggcctgttcatcatcgaccccaacggcgtgatcaagcacctgagcgtgaacgacctgcccgtgggcagaagcgtggaggagaccctgagactggtgaaggccttccagtacgtggagacccacggcgaggtgtgccccgccaactggacccccgacagccccaccatcaagcccagccccgccgccagcaaggagtacttccagaaggtgaaccagtag

SEQ ID NO: 168052 - protein, 540 aa, Artificial Sequence
  derived and/or modified sequence
MNSTGHLQDAPNATSLHVPHSQEGNSTSLQEGLQDLIHTATLVTCTFLLAVIFCLGSYGNFIVFLSFFDPAFRKFRTNFDFMILNLSFCDLFICGVTAPMFTFVLFFSSASSIPDAFCFTFHLTSSGFIIMSLKTVAVIALHRLRMVLGKQPNRTASFPCTVLLTLLLWATSFTLATLATLKTSKSHLCLPMSSLIAGKGKAILSLYVVDFTFCVAVVSVSYIMIAQTLRKNAQVRKCPPVITVDASRPQPFMGVPVQGGGDPIQCAMPALYRNQNYNKLQHVQTRGYTKSPNQLVTPAASRLQLVSAINLSTAKDSKAVVTCVIIVLSVLVCCLPLGISLVQVVLSSNGSFILYQFELFGFTLIFFKSGLNPFIYSRNSAGLRRKVLWCLQYIGLGFFCCKQKTRLRAMGKGNLEVNRNKSSHHETNSAYMLSPKPQKKFVDQACGPSHSKESMVSPKISAGHQHCGQSSSTPINTRIEPYYSIYNSSPSQEESSPCNLQPVNSFGFANSYIAMHYHTTNDLVQEYDSTSAKQIPVPSV

SEQ ID NO: 168053 - DNA, 2115 bp, Artificial Sequence
  derived and/or modified sequence
gtgactgcgcctctgcgcccgcgtcttgccgcggctcccgggatgcgcggaggcggtggcgatggcgatgatgcctctagtcctgcatcatccagagcggcaggcggagctggggtccggactgcgagatggaggaggggcggcgctgcggccacccggcaggcttatctgtcttgggcctcttttgtcacatattgctcatctgtgagctgaggccctgactcactgagtatttttggggagcagaagaaggagacatttctctccgaaaatgaactcaacaggccaccttcaggatgcccccaatgccacctcgctccatgtgcctcactcacaggaaggaaacagcacctctctccaggagggtcttcaggatctcatccacacagccaccttggtgacctgtacttttctactggcggtcatcttctgcctgggttcctatggcaacttcattgtcttcttgtccttcttcgatccagccttcaggaaattcagaaccaactttgatttcatgatcctgaacctgtccttctgtgacctcttcatttgtggagtgacagcccccatgttcacctttgtgttattcttcagctcagccagtagtatcccggatgctttctgcttcactttccatctcaccagttcaggcttcatcatcatgtctctgaagacagtggcagtgatcgccctgcaccggctccggatggtgttggggaaacagcctaatcgcacggcctcctttccctgcaccgtactcctcaccctgcttctctgggccaccagtttcacccttgccaccttggctaccttgaaaaccagcaagtcccacctctgtcttcccatgtccagtctgattgctggaaaagggaaagccattttgtctctctatgtggtcgacttcaccttctgtgttgctgtggtctctgtctcttacatcatgattgctcagaccctgcggaagaacgctcaagtcagaaagtgcccccctgtaatcacagtcgatgcttccagaccacagcctttcatgggggtccctgtgcagggaggtggagatcccatccagtgtgccatgccggctctgtataggaaccagaattacaacaaactgcagcacgttcagacccgtggatataccaagagtcccaaccaactggtcacccctgcagcaagccgactccagctcgtatcagccatcaacctctccactgccaaggattccaaagccgtggtcacctgtgtgatcattgtgctgtcagtcctggtgtgctgtcttccactggggatttccttggtacaggtggttctctccagcaatgggagcttcattctttaccagtttgaattgtttggatttactcttatatttttcaagtcaggattaaacccttttatatattctcggaacagtgcagggctgagaaggaaagtgctctggtgcctccaatacataggcctgggttttttctgctgcaaacaaaagactcgacttcgagccatgggaaaagggaacctcgaagtcaacagaaacaaatcctcccatcatgaaacaaactctgcctacatgttatctccaaagccacagaagaaatttgtggaccaggcttgtggcccaagtcattcaaaagaaagtatggtgagtcccaagatctctgctggacatcaacactgtggtcagagcagctcgacccccatcaacactcggattgaaccttactacagcatctataacagcagcccttcccaggaggagagcagcccatgtaacttacagccagtaaactcttttggatttgccaattcatatattgccatgcattatcacaccactaatgacttagtgcaggaatatgacagcacttcagccaagcagattccagtcccctccgtttaaagtcatggaggctataggatcttatgtaaacagtttttgtttctgatagtaatggactttattctaacttgagatcagtggcggatcaaaacctacaagattcaactgaaaagttggcagttatggttttctttcatctgatgtgtcagtatctgttgatttgctttgtagtttgttgacatcttaagatttgatgtgaaagttttagattttttaccctg

SEQ ID NO: 168054 - DNA, 1623 bp, Artificial Sequence
  derived and/or modified sequence
atgaattcaacgggccacctgcaggacgcacccaacgccacaagcctgcatgtgccacatagccaagagggaaacagtaccagccttcaggaaggcttgcaggatttgattcacaccgccacgctggtgacttgcacttttctgttagccgtcatattctgccttgggtcttacggaaatttcatcgtattcctttcattttttgatcccgccttcaggaaattccggaccaattttgatttcatgattttgaatttgagcttctgcgatctgtttatctgcggggtcactgcacctatgtttacatttgtgttgttttttagttccgcctcgtccattccagacgctttttgtttcactttccacctgacctcaagtggcttcattatcatgagcctgaaaacagtcgctgtaattgccctgcacagactgaggatggttcttgggaaacagccaaatcgaacagcttcttttccctgcacggtcttgctaactttgctcctgtgggccacaagtttcactcttgcgacgctggcaacgcttaaaaccagcaagtcacatctttgtctgcctatgtcaagcctcattgccggcaaaggtaaggctattctcagtttgtacgtggtggactttaccttttgtgtcgccgtcgtgtccgtcagttacatcatgattgcacaaaccctccggaagaatgcccaggtgcgtaagtgccccccagtcatcacggtggacgctagtcgccctcagccatttatgggcgtacccgtgcagggcgggggagatcctatccagtgtgccatgcccgccctgtaccggaatcaaaattataacaagctgcagcatgtgcagactcgggggtacacaaagagtcccaaccagctggtgacacctgccgcgtcaagattgcagttagttagcgctatcaacctctctacggcaaaagactcgaaggctgtcgtgacatgcgtcatcatagtgttgagcgtactggtctgctgtttaccactgggtatcagtcttgtacaggttgtgttaagttcaaacggctcttttatcctctaccagttcgaactctttgggttcaccttaatcttctttaaatccggactaaatccgtttatttattccaggaattccgctggcctccgcaggaaggtgttatggtgtctccagtacatcggcttgggcttcttctgttgtaaacagaagacgaggcttcgcgccatgggcaaagggaacctggaagtgaaccgtaacaagtcttcacaccacgaaactaactctgcttatatgctttccccaaaaccccaaaagaaatttgtggaccaggcgtgcggaccttcacacagtaaggagtccatggtatcccctaagattagcgccggtcaccagcattgtggacagagtagcagtacaccaatcaacaccaggatcgagccttattactctatctataattcatccccaagtcaggaggaaagttcgccttgcaatctccagcctgttaactccttcggcttcgcaaatagctatatagcaatgcattaccatacaacaaacgatctggtccaggagtatgacagcaccagcgctaaacaaattccagtacctagcgtctag

SEQ ID NO: 168055 - DNA, 1623 bp, Artificial Sequence
  derived and/or modified sequence
atgaacagcacaggccacctgcaggatgccccaaatgccaccagcctgcacgtgccccacagccaggagggcaacagcaccagcctgcaggagggcctgcaggacctgatccacacagccaccctggtgacctgcaccttcctgctggccgtcatcttctgcctgggcagctatggcaacttcatcgtgttcctgtccttctttgatcctgccttcaggaagttccgcaccaactttgacttcatgatcctgaacctgtccttctgtgacctcttcatctgtggggtgacagcccccatgttcacctttgtgctcttcttcagcagcgccagcagcatcccagatgccttctgcttcaccttccacctgaccagcagcggcttcatcatcatgagcctgaagacagtggccgtgattgccctgcaccggctgaggatggtgctgggcaagcagcccaacagaacagccagcttcccctgcaccgtgctgctgaccctgctgctgtgggccaccagcttcaccctggccaccctggccaccctgaagaccagcaagagccacctgtgcctgcccatgagcagcctgattgctgggaagggcaaggccatcctgagcctgtatgtggtggacttcaccttctgtgtggccgtggtgtctgtgtcctacatcatgattgcccagaccctgaggaagaatgcccaggtgaggaaatgtcctcctgtgatcaccgtggatgccagccggccccagcccttcatgggcgtgcctgtgcagggcggcggggaccccatccagtgtgccatgcctgccctgtacagaaaccagaactacaacaagctgcagcacgtgcagacccggggctacaccaagagccccaaccagctggtgaccccagctgccagccggctgcagctggtgtctgccatcaacctgagcacagccaaggacagcaaggctgtggtgacctgtgtgatcatcgtgctgtctgtgctggtgtgctgcctgcccctgggcatcagcctggtgcaggtggtgctgagcagcaatggcagcttcatcctgtaccagtttgagctgtttggcttcaccctcatcttcttcaagagcggcctgaaccccttcatctacagcaggaacagcgctggcctgcggaggaaggtgctgtggtgcctgcagtacatcggcctgggcttcttctgctgcaagcagaagacccggctgcgggccatgggcaagggcaacctggaggtgaacagaaacaagagcagccaccacgagaccaacagcgcctacatgctgagccccaagccccagaagaagtttgtggaccaggcctgtggccccagccacagcaaggagagcatggtgagccccaagatctctgctggccaccagcactgcggccagagcagcagcacccccatcaacaccagaattgagccctactacagcatctacaacagcagccccagccaggaggagagcagcccctgcaacctgcagcctgtgaacagctttggatttgccaacagctacatcgccatgcactaccacaccaccaatgacctggtgcaggagtatgacagcaccagcgccaagcagatccctgtgcccagcgtgtag

SEQ ID NO: 168056 - DNA, 1623 bp, Artificial Sequence
  derived and/or modified sequence
atgaacagcaccggccacctgcaggacgcccccaacgccaccagcctgcacgtgccacattcccaggagggaaattcaacatcactgcaggaaggcctccaggatctgatccacaccgcaaccctggtcacatgcactttcttgttggccgtgatcttttgcctgggatcgtacggtaactttatagtcttcctgtccttcttcgatcctgccttcagaaaatttcgtactaacttcgactttatgatcctgaacctcagtttctgtgacttgtttatttgcggtgttaccgcccctatgttcacatttgtgctgtttttctcctccgcttcttccataccagacgccttttgctttactttccacctaactagcagcggatttatcatcatgagtcttaaaaccgtcgcagtgatagccctgcaccgcctgaggatggtcctcggtaagcaacccaacaggacggccagttttccatgcactgtactgttgacactcctcctatgggctactagttttacgcttgccaccctcgcgaccttaaaaacgtcaaagagtcatctatgcttgccaatgagcagtctcattgcaggtaaggggaaagccatcctttctctctatgtcgtcgatttcacattctgcgtcgccgttgtttctgtgagctacattatgatcgcccagaccctgagaaaaaacgctcaagtccgcaagtgtccaccagtgattacagtggatgcaagccggccacaacctttcatgggcgtcccagtgcaaggagggggggatccaatccagtgtgccatgccggctctctaccgaaatcagaattataacaaattgcaacatgtccaaactaggggctacactaaaagccccaatcagcttgtcacccccgccgctagtcgtctgcaactggttagcgccattaatctgagtacagctaaggacagcaaagccgtggtgacctgcgtgattatcgtgttatctgtgttggtgtgctgtttacctctcggcatatcccttgtgcaggtggttctttcttctaacggctcctttattctctaccagtttgagcttttcgggttcaccctcattttctttaaaagtggtcttaatccatttatatacagtaggaattccgctggtttaagaaggaaggtcctgtggtgtctccagtacatcgggctgggatttttctgttgcaaacagaaaacgaggctaagagctatgggtaagggaaacctcgaggtaaaccgaaacaaaagcagccaccacgagactaacagcgcttacatgttgtccccaaagccacaaaagaagttcgtcgaccaggcatgcggaccttctcactctaaagaaagcatggtttctccaaaaattagtgccggtcaccagcactgtggacaaagttccagtactccgatcaacacaagaatagagccatactacagtatctacaactcgtccccatctcaggaggagagcagtccctgcaacctgcagcctgtgaatagcttcggcttcgccaactcctatattgcgatgcactaccatactaccaacgaccttgtgcaggagtatgatagtacctcggcaaagcaaattcccgtaccgagcgtatag

SEQ ID NO: 168057 - DNA, 1623 bp, Artificial Sequence
  derived and/or modified sequence
atgaatagtactggacatttgcaagacgcaccaaatgctacctcgctccatgtgccgcattctcaggaagggaattcaacatctctgcaggaaggtttgcaggacttgatccataccgccacgctggtcacatgtaccttcctgctggccgtcatattttgcctcggatcttacggtaactttatcgttttcttgagcttttttgaccctgcttttcgcaagttccgcacaaacttcgactttatgatcctgaatctttctttctgtgacctgttcatctgcggcgtcaccgcgccaatgttcacctttgtcctcttcttttcttcggcttcctcaatccctgacgcattctgtttcacttttcacctcacctcatccggctttattattatgtccctcaaaactgtggccgtaatagctctgcaccggctgagaatggtgctcggcaaacaaccaaatcgaaccgcctcctttccatgcactgtcctactcacgctgcttctttgggcaacgagtttcaccctggcgacattggccactctaaagactagtaagtctcacctatgcttgcccatgagctcacttatcgcgggtaagggcaaagctatcctgtctctttatgtcgtagacttcaccttttgcgtggccgtggtgtcagtctcttatataatgatcgctcagactctaagaaaaaatgctcaggtgagaaaatgtccacccgtgatcacagtggatgccagccgccctcagccattcatgggtgtgcccgtgcagggcggaggagatcccattcagtgcgctatgccagccctgtaccgaaaccagaactataacaagctgcaacacgtgcagactagggggtataccaagagcccaaatcagctggtaacaccagcggcttcaaggctccagctggtatcagccattaacctatcaactgctaaagactctaaggcggttgtgacttgtgtgataattgtgttgagcgttttggtctgttgcttacctttgggcatctccctcgtccaagttgtgttaagctccaacggttccttcattttgtaccagtttgagctgtttgggttcactctgatcttcttcaaaagcggacttaatccgtttatttactcgcgcaacagcgcgggactgagaaggaaagtactgtggtgcctccagtacatcggcctgggatttttctgttgtaaacaaaaaactcgcctgcgtgccatgggaaagggtaaccttgaggtgaaccgtaataagagtagccaccacgagacaaactccgcgtatatgctgtccccaaaaccgcagaaaaaattcgtggaccaggcatgcggaccgagccacagtaaagagtcgatggtgagtccaaagatatctgctggacaccaacactgtggtcaatcgagctctacaccaatcaacacacggattgaaccgtattatagcatctacaattcatctccttctcaggaggagagctctccatgtaacctgcaaccggtgaattcttttggttttgccaactcatatatcgctatgcattatcacacaactaacgaccttgttcaagaatatgatagtacctctgctaagcagatcccagttcccagtgtgtag

SEQ ID NO: 168058 - DNA, 1623 bp, Artificial Sequence
  derived and/or modified sequence
atgaacagcaccggccacctgcaggacgcccccaacgccaccagcctgcacgtgccccacagccaggagggcaacagcaccagcctgcaggagggcctgcaggacctgatccacaccgccaccctggtgacctgcaccttcctgctggccgtgatcttctgcctgggcagctacggcaacttcatcgtgttcctgagcttcttcgaccccgccttcagaaagttcagaaccaacttcgacttcatgatcctgaacctgagcttctgcgacctgttcatctgcggcgtgaccgcccccatgttcaccttcgtgctgttcttcagcagcgccagcagcatccccgacgccttctgcttcaccttccacctgaccagcagcggcttcatcatcatgagcctgaagaccgtggccgtgatcgccctgcacagactgagaatggtgctgggcaagcagcccaacagaaccgccagcttcccctgcaccgtgctgctgaccctgctgctgtgggccaccagcttcaccctggccaccctggccaccctgaagaccagcaagagccacctgtgcctgcccatgagcagcctgatcgccggcaagggcaaggccatcctgagcctgtacgtggtggacttcaccttctgcgtggccgtggtgagcgtgagctacatcatgatcgcccagaccctgagaaagaacgcccaggtgagaaagtgcccccccgtgatcaccgtggacgccagcagaccccagcccttcatgggcgtgcccgtgcagggcggcggcgaccccatccagtgcgccatgcccgccctgtacagaaaccagaactacaacaagctgcagcacgtgcagaccagaggctacaccaagagccccaaccagctggtgacccccgccgccagcagactgcagctggtgagcgccatcaacctgagcaccgccaaggacagcaaggccgtggtgacctgcgtgatcatcgtgctgagcgtgctggtgtgctgcctgcccctgggcatcagcctggtgcaggtggtgctgagcagcaacggcagcttcatcctgtaccagttcgagctgttcggcttcaccctgatcttcttcaagagcggcctgaaccccttcatctacagcagaaacagcgccggcctgagaagaaaggtgctgtggtgcctgcagtacatcggcctgggcttcttctgctgcaagcagaagaccagactgagagccatgggcaagggcaacctggaggtgaacagaaacaagagcagccaccacgagaccaacagcgcctacatgctgagccccaagccccagaagaagttcgtggaccaggcctgcggccccagccacagcaaggagagcatggtgagccccaagatcagcgccggccaccagcactgcggccagagcagcagcacccccatcaacaccagaatcgagccctactacagcatctacaacagcagccccagccaggaggagagcagcccctgcaacctgcagcccgtgaacagcttcggcttcgccaacagctacatcgccatgcactaccacaccaccaacgacctggtgcaggagtacgacagcaccagcgccaagcagatccccgtgcccagcgtgtag

SEQ ID NO: 168059 - DNA, 438 bp, Artificial Sequence
  derived and/or modified sequence
atgttctcctgggtgtcaaaggacgcgagacgcaagaaagaaccagaactctttcagactgttgccgagggactgaggcagctttatgcacagaagctcctgcctttggaggaacattatcgcttccatgagttccacagccctgcccttgaggacgcggatttcgacaacaaacctatggtgctattggtgggacagtatagcacagggaagactaccttcatccggcacctcattgagcaggactttccaggtatgaggatcggcccagagcccaccacagactctttcattgccgtgatgcatggcccgacggagggggtggtgcccggcaatgccctagttgtggacccccgccggccatttaggaaattgaacgctttcggcaacgccttcctcaatcgatttatgtgcgcacaactgccgaacccagtatag

SEQ ID NO: 168060 - DNA, 447 bp, Artificial Sequence
  derived and/or modified sequence
atgttttcctgggtgagtaaggacgcccgccgcaagaaagagccagagttattccagaccgtggctgagggcttgaggcagctatacgctcagaagctgttgccactggaagagcactaccggtttcacgaattccacagccctgccttggaggatgctgatttcgataacaaaccaatggtgctcctcgtgggtcagtacagtaccggcaagaccaccttcattcggcacctgattgagcaggactttcccggcatgagaatcggtcctgagcctactacggatagcttcatagcagtcatgcacggaccgactgaaggagtggtaccaggaaacgccctggttgtcgacccccgcaggccatttcggaagctcaacgcctttggcaacgccttcctgaatagattcatgtgtgcccagctgcctaacccagtgttagacagttag

SEQ ID NO: 168061 - DNA, 438 bp, Artificial Sequence
  derived and/or modified sequence
atgttctcctgggtgtccaaggatgcccggaggaagaaggagcctgagctgttccagacagtggccgagggcctgcggcagctgtatgcccagaagctgctgcccctggaggagcactaccgcttccacgagttccacagccctgccctggaggatgctgactttgacaacaagcccatggtgctgctggtgggccagtacagcacaggcaagaccaccttcatccgccacctgattgagcaggacttccctggcatgagaattggccctgagcccaccacagacagcttcatcgctgtgatgcacggccccacagaaggagtggtgcctggaaatgccctggtggtggacccccggcggcccttcaggaagctgaatgcctttggaaatgccttcctgaaccgcttcatgtgtgcccagctgcccaaccctgtgtag

SEQ ID NO: 168062 - DNA, 447 bp, Artificial Sequence
  derived and/or modified sequence
atgttctcctgggtgtccaaggatgcccggaggaagaaggagcctgagctgttccagacagtggccgagggcctgcggcagctgtatgcccagaagctgctgcccctggaggagcactaccgcttccacgagttccacagccctgccctggaggatgctgactttgacaacaagcccatggtgctgctggtgggccagtacagcacaggcaagaccaccttcatccgccacctgattgagcaggacttccctggcatgagaattggccctgagcccaccacagacagcttcatcgctgtgatgcacggccccacagaaggagtggtgcctggaaatgccctggtggtggacccccggcggcccttcaggaagctgaatgcctttggaaatgccttcctgaaccgcttcatgtgtgcccagctgcccaaccctgtgctggacagctag

SEQ ID NO: 168063 - DNA, 438 bp, Artificial Sequence
  derived and/or modified sequence
atgttcagctgggtgagcaaggacgcccggcggaagaaggagcccgaactcttccagacggtcgccgagggcctccgccaactgtatgcacaaaaactcctgccactagaggagcactacaggttccacgagttccactcaccagccttagaggatgcagacttcgataataaacctatggtcctgctcgtggggcaatatagtacaggcaagactacattcatcaggcacctgattgagcaggatttcccgggcatgcgcatcggtccagaacccactacggactcctttatcgctgtgatgcatggacctacggagggagttgtccccggtaatgctctagttgtggatcctcggcgcccattccgcaaattgaacgccttcggtaacgctttcctgaatcggttcatgtgtgcccagctcccaaaccccgtttag

SEQ ID NO: 168064 - DNA, 447 bp, Artificial Sequence
  derived and/or modified sequence
atgttcagctgggtgagcaaggacgcccggcggaagaaggagcccgaactgtttcagacagttgccgaggggctgcgccagctgtatgcccaaaagctgctccctttggaggagcattaccggttccatgagttccatagtccagccctagaagatgctgattttgataataagcccatggttctgctggtggggcagtacagcaccgggaagaccacgttcatcagacatttgatcgagcaggattttcccggtatgagaattggtcccgagcctactaccgattcttttatagccgtgatgcatggtcccactgaaggtgtggtacccgggaacgcgctcgtggtggacccgagaaggccgtttcgaaagctgaatgcgtttgggaacgcattcctgaatagattcatgtgtgctcagctgcctaatcctgtacttgattcttag

SEQ ID NO: 168065 - DNA, 438 bp, Artificial Sequence
  derived and/or modified sequence
atgtttagctgggtgtcaaaggacgctcgaaggaaaaaggaaccagaactttttcagaccgtggccgagggtctccgccagctgtatgctcagaaactcttaccattggaggagcattacagattccacgaattccactctcctgccttggaagacgccgactttgacaacaaaccgatggttctgcttgttggccagtactcaacaggtaaaacaacctttatacggcacctcattgagcaggacttccccggaatgagaatcggacctgagcccacaaccgactctttcattgcagtgatgcacggtccaaccgaaggcgtcgtccccggaaacgcacttgtggtggatcccaggaggcccttccggaagctgaacgcgttcggaaatgcctttcttaacaggtttatgtgcgcacaactgccgaacccagtttag

SEQ ID NO: 168066 - DNA, 447 bp, Artificial Sequence
  derived and/or modified sequence
atgttctcgtgggtgtcgaaagatgctcggaggaaaaaagagccggaattgtttcaaaccgtagctgagggcctgcgacagctgtatgctcagaaactgctgcctctggaagaacattatcgctttcacgaatttcattcgccagctctggaggacgccgattttgataacaagccaatggttctactcgtgggacaatatagtacaggaaagacaacatttattagacacctgattgaacaggactttccaggaatgaggatcggccctgagcccaccaccgattctttcatagccgtcatgcacggcccaacggagggggttgtaccagggaatgctctggtcgtggaccctcgtcgcccttttcgcaagctaaatgcctttggtaacgccttcctgaaccggtttatgtgtgctcagttaccaaatccagtccttgacagttag

SEQ ID NO: 168067 - DNA, 438 bp, Artificial Sequence
  derived and/or modified sequence
atgttcagctgggtgagcaaggacgccagaagaaagaaggagcccgagctgttccagaccgtggccgagggcctgagacagctgtacgcccagaagctgctgcccctggaggagcactacagattccacgagttccacagccccgccctggaggacgccgacttcgacaacaagcccatggtgctgctggtgggccagtacagcaccggcaagaccaccttcatcagacacctgatcgagcaggacttccccggcatgagaatcggccccgagcccaccaccgacagcttcatcgccgtgatgcacggccccaccgagggcgtggtgcccggcaacgccctggtggtggaccccagaagacccttcagaaagctgaacgccttcggcaacgccttcctgaacagattcatgtgcgcccagctgcccaaccccgtgtag

SEQ ID NO: 168068 - DNA, 447 bp, Artificial Sequence
  derived and/or modified sequence
atgttcagctgggtgagcaaggacgccagaagaaagaaggagcccgagctgttccagaccgtggccgagggcctgagacagctgtacgcccagaagctgctgcccctggaggagcactacagattccacgagttccacagccccgccctggaggacgccgacttcgacaacaagcccatggtgctgctggtgggccagtacagcaccggcaagaccaccttcatcagacacctgatcgagcaggacttccccggcatgagaatcggccccgagcccaccaccgacagcttcatcgccgtgatgcacggccccaccgagggcgtggtgcccggcaacgccctggtggtggaccccagaagacccttcagaaagctgaacgccttcggcaacgccttcctgaacagattcatgtgcgcccagctgcccaaccccgtgctggacagctag

SEQ ID NO: 168069 - protein, 797 aa, Artificial Sequence
  derived and/or modified sequence
MAHRCLRLWGRGGCWPRGLQQLLVPGGVGPGEQPCLRTLYRFVTTQARASRNSLLTDIIAAYQRFCSRPPKGFEKYFPNGKNGKKASEPKEVMGEKKESKPAATTRSSGGGGGGGGKRGGKKDDSHWWSRFQKGDIPWDDKDFRMFFLWTALFWGGVMFYLLLKRSGREITWKDFVNNYLSKGVVDRLEVVNKRFVRVTFTPGKTPVDGQYVWFNIGSVDTFERNLETLQQELGIEGENRVPVVYIAESDGSFLLSMLPTVLIIAFLLYTIRRGPAGIGRTGRGMGGLFSVGETTAKVLKDEIDVKFKDVAGCEEAKLEIMEFVNFLKNPKQYQDLGAKIPKGAILTGPPGTGKTLLAKATAGEANVPFITVSGSEFLEMFVGVGPARVRDLFALARKNAPCILFIDEIDAVGRKRGRGNFGGQSEQENTLNQLLVEMDGFNTTTNVVILAGTNRPDILDPALLRPGRFDRQIFIGPPDIKGRASIFKVHLRPLKLDSTLEKDKLARKLASLTPGFSGADVANVCNEAALIAARHLSDSINQKHFEQAIERVIGGLEKKTQVLQPEEKKTVAYHEAGHAVAGWYLEHADPLLKVSIIPRGKGLGYAQYLPKEQYLYTKEQLLDRMCMTLGGRVSEEIFFGRITTGAQDDLRKVTQSAYAQIVQFGMNEKVGQISFDLPRQGDMVLEKPYSEATARLIDDEVRILINDAYKRTVALLTEKKADVEKVALLLLEKEVLDKNDMVELLGPRPFAEKSTYEEFVEGTGSLDEDTSLPEGLKDWNKEREKEKEEPPGEKVAN

SEQ ID NO: 168070 - protein, 812 aa, Artificial Sequence
  derived and/or modified sequence
GAGGRRRRVESLGSSVSRRRASLPGGLSPSRARFPRPPVVACPRLREQPCLRTLYRFVTTQARASRNSLLTDIIAAYQRFCSRPPKGFEKYFPNGKNGKKASEPKEVMGEKKESKPAATTRSSGGGGGGGGKRGGKKDDSHWWSRFQKGDIPWDDKDFRMFFLWTALFWGGVMFYLLLKRSGREITWKDFVNNYLSKGVVDRLEVVNKRFVRVTFTPGKTPVDGQYVWFNIGSVDTFERNLETLQQELGIEGENRVPVVYIAESDGSFLLSMLPTVLIIAFLLYTIRRGPAGIGRTGRGMGGLFSVGETTAKVLKDEIDVKFKDVAGCEEAKLEIMEFVNFLKNPKQYQDLGAKIPKGAILTGPPGTGKTLLAKATAGEANVPFITVSGSEFLEMFVGVGPARVRDLFALARKNAPCILFIDEIDAVGRKRGRGNFGGQSEQENTLNQLLVEMDGFNTTTNVVILAGTNRPDILDPALLRPGRFDRQIFIGPPDIKGRASIFKVHLRPLKLDSTLEKDKLARKLASLTPGFSGADVANVCNEAALIAARHLSDSINQKHFEQAIERVIGGLEKKTQVLQPEEKKTVAYHEAGHAVAGWYLEHADPLLKVSIIPRGKGLGYAQYLPKEQYLYTKEQLLDRMCMTLGGRVSEEIFFGRITTGAQDDLRKVTQSAYAQIVQFGMNEKVGQISFDLPRQGDMVLEKPYSEATARLIDDEVRILINDAYKRTVALLTEKKADVEKVALLLLEKEVLDKNDMVELLGPRPFAEKSTYEEFVEGTGSLDEDTSLPEGLKDWNKEREKEKEEPPGEKVAN

SEQ ID NO: 168071 - DNA, 2394 bp, Artificial Sequence
  derived and/or modified sequence
atggcccacagatgcctgcggctgtggggccgaggtggctgttggcctaggggactccagcagttattagtgcccggcggggtggggccgggtgagcagccttgtcttcgcaccttgtatcgcttcgttaccacccaggcccgcgctagccgcaatagcctgcttaccgacataatagccgcttatcagaggttctgctctcgaccccctaagggctttgagaagtacttccccaatgggaaaaatggcaagaaggcctctgagccaaaggaggtcatgggagaaaagaaagagtcaaaacccgctgccaccactcggagttctggcggtggcggtggtgggggggggaaaagaggggggaagaaggatgattcccattggtggtctagattccagaagggagacatcccatgggacgacaaggacttccgcatgtttttcctctggacggccctcttctggggcggggtgatgttttacttgcttcttaagcgttccggtagagagattacatggaaggattttgtgaataactacctgtcaaaaggagtggtggaccgcctcgaggttgttaataaacggttcgtaagggtaacatttacgcctggtaagactcctgtcgacgggcagtacgtttggttcaacattggcagtgttgacacctttgagaggaatctggagacgctccagcaggaactggggatcgaaggggaaaatcgcgtgccagtcgtgtatattgccgaatcggacgggtcttttctgctgagcatgctgcccacggtgctgatcatcgcgtttctcctgtacactatccgcagaggccctgctgggatcgggcgtactggcaggggcatgggcggcctgttctcggtgggggaaacgacagctaaagtgcttaaggatgagatagacgtgaagtttaaggacgttgctggatgcgaagaagctaagctcgaaataatggagtttgtgaatttcctcaagaaccctaaacagtaccaagatttgggagcaaagatcccgaagggtgctattctaacagggcctcctgggaccgggaagaccctgttggccaaagccactgccggtgaggcgaatgtgccctttatcactgttagtggatcggagttcctggagatgtttgtgggagtgggacctgctagagtacgtgacctctttgcgctggcaaggaagaatgccccgtgcatcttatttatcgacgagatcgatgccgtcggcaggaagcggggccgtggcaattttggaggacaaagcgagcaggagaatactctgaatcagctgctggtggagatggacggctttaatactaccactaatgtggtgattctcgccggcactaaccggccggacatcctggacccagcccttctgcgaccgggccgtttcgaccgacagatcttcatcgggccaccagatatcaaaggccgcgcctccattttcaaggttcatctgcggcccctgaagctagattccacactggaaaaagataagctcgctcgtaaactggcaagtcttactccaggtttctctggagcagatgtggcgaacgtgtgtaacgaagccgcgctgatcgccgctcgacatctgtcagacagcattaaccaaaagcacttcgagcaagcaatcgagcgcgttatcggaggcctggagaaaaagacccaagttctccagcctgaggagaaaaagacagtcgcttaccacgaagccggacatgcagttgcaggttggtaccttgaacacgcagatccattactcaaggtgagcattatcccaagggggaaaggtctgggctatgctcaatatctgcccaaagaacaatacctctacaccaaagagcaactcctcgataggatgtgtatgacacttgggggtcgtgtctctgaagagattttcttcggcagaattactacaggggctcaggatgatctgcgcaaagtcacacagagtgcctatgcacagatcgtgcagtttggcatgaacgaaaaggtgggtcaaatctcatttgatttacctaggcagggagacatggtcctcgagaaaccctactcggaagctacggctcggttaattgatgatgaagttcggattctcattaacgatgcatacaaacgcaccgtagccttgctcacagagaaaaaggctgacgtggagaaggtggcattactcttgctagagaaagaggttctcgacaagaacgacatggtggagctgctcggacccagacccttcgccgagaaatccacatatgaggagttcgttgagggcaccgggtccctcgacgaggatacgagtttgcctgaaggcctgaaagattggaacaaagagcgggaaaaagaaaaggaagagccccccggagaaaaggtggccaactag

SEQ ID NO: 168072 - DNA, 2439 bp, Artificial Sequence
  derived and/or modified sequence
ggtgcaggcggtaggcgccgcagagttgaatctctgggctcaagtgtatcacggaggcgcgcctctcttccagggggactctccccgagccgcgctcgcttcccccggcccccagttgtcgcctgtccgaggctgcgcgagcagccatgcttgaggaccctgtacaggttcgtgactacccaggccagagcaagccgaaactcactcctgacggatataatcgcagcctaccagaggttctgctcccggcctccgaagggtttcgaaaagtacttccctaacgggaaaaacgggaaaaaggctagcgagcccaaggaggtgatgggggagaagaaagaatctaagccggccgccaccaccagaagcagcggggggggcggcggcggcggcggaaagcgaggaggaaagaaagacgacagtcattggtggtcccgcttccagaagggagatatcccttgggatgataaggattttaggatgtttttcctctggacagctcttttctggggcggtgtgatgttctatttgctacttaaacggtctggcagagaaattacctggaaagactttgtcaacaactacctgagtaagggagtcgtggatcgtctcgaggtcgtgaacaaacgttttgtgcgcgtgacctttacgcctggaaagaccccagttgacggccagtatgtctggttcaacattgggagcgtggacactttcgagaggaatttggaaacgctccagcaagaattgggcatcgaaggtgagaaccgggtgcctgtggtctacatcgccgagtccgacgggtccttccttctctccatgctgccaaccgtgctgataatcgctttccttctgtacactatacgtaggggacctgccggcattggcaggacaggtcgaggcatgggagggctcttcagcgtcggtgaaactaccgccaaagtactgaaggatgaaatcgatgtaaaattcaaggacgtcgcaggttgtgaggaggccaagttggagatcatggaattcgtgaatttcttaaaaaatcccaagcagtaccaagacctgggagcaaagattcccaagggcgcaatattaaccggcccacctggcacgggaaaaactctattagctaaagcaacggcaggggaggcaaacgtaccatttattactgtgagcggcagcgagtttcttgagatgtttgttggggttggacccgcaagagtccgggatctttttgccctggccaggaagaatgcaccctgtatcctgttcatcgacgaaatcgatgctgttgggagaaagcgtggtagaggcaacttcggtgggcagtcagaacaggagaacacgctcaatcagttattggttgagatggacggtttcaacacaacaacaaacgtagtgattttggcggggacaaaccgccctgatatcctcgatccagccttattgcgtccaggccgcttcgatcgacaaatattcatcggaccccctgacatcaaaggaagggcaagcatctttaaagtgcacctgcgccccctgaagctggatagcactctggagaaggataaactggccagaaaactagcttcactcacacccggcttcagtggagccgacgtcgctaatgtctgtaacgaggccgcccttatcgccgcaaggcacctttcagactctattaatcagaagcatttcgagcaagcgatcgagagggttatcggaggtcttgagaagaaaacgcaggtcctgcaaccagaagaaaaaaagacagtcgcatatcatgaggcgggtcatgccgtggcaggctggtatttggaacacgctgaccccctcctgaaggttagcatcatccctcgcggcaagggcttggggtatgctcaatatctgccaaaggagcagtacctgtacactaaagaacagctgctggatagaatgtgtatgacactgggcgggcgggtgtccgaggagatctttttcgggcggatcactacaggggctcaagacgacctgagaaaggttacccaatcagcttatgcacaaatcgtgcagttcggcatgaatgagaaggtgggacagatttctttcgacttgcctcgtcagggagacatggttcttgagaaaccatactccgaagctaccgcccgactcattgacgatgaggtccgcatattgattaatgatgcgtataagagaacagtggccctcttgaccgagaaaaaggcagacgttgagaaggtggctttgctgctgctcgagaaggaggtgttagataagaatgatatggtggaattgctgggtccaagaccatttgccgaaaagagtacctatgaagagttcgtcgaaggtacaggaagtctcgacgaagatacgtccctccccgaaggtctgaaagattggaataaggagcgtgaaaaagagaaggaggagcctcctggtgagaaggtggccaactag

SEQ ID NO: 168073 - DNA, 2394 bp, Artificial Sequence
  derived and/or modified sequence
atggcccaccgctgcctgcggctgtggggccggggcggctgctggccccggggcctgcagcagctgctggtgcctggaggagtgggccctggagagcagccctgcctgcggaccctgtacagatttgtgaccacccaggcccgggccagcaggaacagcctgctgacagacatcatcgccgcctaccagcgcttctgcagcaggcctcccaagggctttgagaagtacttccccaacgggaagaatggcaagaaggccagcgagcccaaggaggtgatgggagagaagaaggagagcaagccagctgccaccaccaggagcagcggcggcggcggcggcggcggcggcaagagaggaggcaagaaggatgacagccactggtggagccgcttccagaagggggacatcccctgggatgacaaggacttcaggatgttcttcctgtggacagccctcttctggggcggcgtgatgttctacctgctgctgaagaggagcggccgggagatcacctggaaggactttgtgaacaactacctgagcaagggcgtggtggaccggctggaggtggtgaacaagagatttgtgcgggtgaccttcacccctgggaagacccctgtggatggccagtatgtgtggttcaacatcggctctgtggacacctttgagaggaacctggagaccctgcagcaggagctgggcattgaaggagagaacagagtgcctgtggtgtacatcgccgagagtgatggcagcttcctgctgtccatgctgcccaccgtgctgatcatcgccttcctgctgtacaccatccggcggggccctgctggcatcggccgcacaggccggggcatgggcggcctcttctctgtgggggagaccacagccaaggtgctgaaggatgaaattgatgtgaagttcaaggatgtggccggctgtgaggaggccaagctggagatcatggagtttgtgaacttcctgaagaaccccaagcagtaccaggacctgggcgccaagatccccaagggggccatcctgactggacctcctggcaccgggaagaccctgctggccaaggccacagctggggaggccaacgtgcccttcatcaccgtgtctggcagcgagttcctggagatgtttgtgggcgtgggccctgcccgggtgcgggacctgtttgccctggccaggaagaatgccccctgcatcctcttcattgatgaaattgatgctgtgggcaggaagaggggccggggcaactttggaggccagagcgagcaggagaacaccctgaaccagctgctggtggagatggatggcttcaacaccaccaccaacgtggtgatcctggccggcaccaacagaccagacatcctggaccctgccctgctgcggcccggccgctttgaccggcagatcttcatcggccccccagacatcaagggccgggccagcatcttcaaggtgcacctgcggcccctgaagctggacagcaccctggagaaggacaagctggccaggaagctggccagcctgaccccaggcttctctggagcagatgtggccaacgtgtgcaatgaggccgccctgattgctgcccggcacctgagtgacagcatcaaccagaagcactttgagcaggccatcgagcgggtgattggaggcctggagaagaagacccaggtgctgcagcctgaggagaagaagacagtggcctaccacgaggccggccatgctgtggccggctggtacctggagcacgccgaccccctgctgaaggtgtccatcatcccccggggcaagggcctgggctacgcccagtacctgcccaaggagcagtacctgtacaccaaggagcagctgctggacaggatgtgcatgaccctgggcggccgggtgtctgaggagatcttcttcggccgcatcaccaccggggcccaggatgacctgaggaaggtgacccagagcgcctatgcccagatcgtgcagtttggcatgaatgagaaggtgggccagatcagctttgacctgccccggcagggcgacatggtgctggagaagccctacagcgaggccacagcccggctgattgatgatgaggtgcgcatcctgatcaatgatgcctacaagaggacagtggccctgctgacagagaagaaggcagatgtggagaaggtggccctgctgctgctggagaaggaggtgctggacaagaatgacatggtggagctgctgggcccccggccctttgctgagaagagcacctatgaggagtttgtggagggcaccggcagcctggatgaggacaccagcctgcctgagggcctgaaggactggaacaaggagcgggagaaggagaaggaggagcccccaggagagaaggtggccaactag

SEQ ID NO: 168074 - DNA, 2439 bp, Artificial Sequence
  derived and/or modified sequence
ggggccggcggcagaagaagaagagtggagagcctgggcagctctgtgtccagaagaagagccagcctgcccggcggcctgagccccagccgggcccgcttccccaggcctcctgtggtggcctgcccccggctgcgggagcagccctgcctgcggaccctgtacagatttgtgaccacccaggcccgggccagcaggaacagcctgctgacagacatcatcgccgcctaccagcgcttctgcagccggccccccaagggctttgagaagtacttccccaacgggaagaatggcaagaaggccagcgagcccaaggaggtgatgggagagaagaaggagagcaagccagctgccaccaccaggagcagcggcggcggcggcggcggcggcggcaagaggggcggcaagaaggatgacagccactggtggagccgcttccagaagggggacatcccctgggatgacaaggacttcaggatgttcttcctgtggacagccctcttctggggcggcgtgatgttctacctgctgctgaagaggagcggccgggagatcacctggaaggactttgtgaacaactacctgagcaaaggagtggtggaccggctggaggtggtgaacaagagatttgtgcgggtgaccttcaccccaggcaagacccctgtggatggccagtatgtgtggttcaacatcggctctgtggacacctttgaaagaaacctggagaccctgcagcaggagctgggcatcgagggagaaaatagagtgcctgtggtgtacatcgccgagagtgatggcagcttcctgctgtccatgctgcccaccgtgctgatcatcgccttcctgctgtacaccatcagaagaggccctgctggcattggaagaacaggccggggcatgggcggcctcttctctgtgggggagaccacagccaaggtgctgaaggatgaaattgatgtgaagttcaaggatgtggccggctgtgaggaggccaagctggagatcatggagtttgtgaacttcctgaagaaccccaagcagtaccaggacctgggcgccaagatccccaagggggccatcctgaccggccccccaggcaccgggaagaccctgctggccaaggccacagctggggaggccaacgtgcccttcatcaccgtgtctggcagcgagttcctggagatgtttgtgggcgtgggccctgcccgggtgcgggacctgtttgccctggccaggaagaatgccccctgcatcctcttcattgatgaaattgatgctgtgggcaggaagaggggccggggcaactttggaggccagagcgagcaggagaacaccctgaaccagctgctggtggagatggatggcttcaacaccaccaccaacgtggtgatcctggccggcaccaacagaccagacatcctggaccctgccctgctgcggcccggccgctttgaccggcagatcttcatcggccccccagacatcaagggccgggccagcatcttcaaggtgcacctgcggcccctgaagctggacagcaccctggagaaggacaagctggccaggaagctggccagcctgaccccaggcttcagcggggctgatgtggccaacgtgtgcaatgaagctgccctgattgctgcccggcacctgagtgacagcatcaaccagaagcactttgagcaggccatcgagagggtcatcggcggcctggagaagaagacccaggtgctgcagcctgaggagaagaagacagtggcctaccatgaagctggccatgctgtggccggctggtacctggagcacgccgaccccctgctgaaggtgtccatcatcccccggggcaagggcctgggctacgcccagtacctgcccaaggagcagtacctgtacaccaaggagcagctgctggacaggatgtgcatgaccctgggcggccgggtgtctgaggagatcttcttcggccgcatcaccactggagcccaggatgacctgaggaaggtgacccagagcgcctatgcccagatcgtgcagtttggcatgaatgagaaggtgggccagatcagctttgacctgccccggcagggcgacatggtgctggagaagccctacagcgaggccacagcccggctgattgatgatgaggtgcgcatcctgatcaatgatgcctacaagaggacagtggccctgctgacagagaagaaggcagatgtggagaaggtggccctgctgctgctggagaaggaggtgctggacaagaatgacatggtggagctgctgggcccccggccctttgctgagaagagcacctatgaggagtttgtggagggcaccggcagcctggatgaggacaccagcctgcctgagggcctgaaggactggaacaaggagcgggagaaggagaaggaggagcccccaggagagaaggtggccaactag

SEQ ID NO: 168075 - DNA, 3185 bp, Artificial Sequence
  derived and/or modified sequence
ggctggcggcaggagacgccgcgttgagagcttgggctcctccgtgagccgccggcgcgcttcgctgcctggcggcctttccccgagccgagcccgcttcccgaggccgccagtcgtcgcctgcccgcgcctgcgcagcgtcccgggccgagagggccacggcggcggccatggcgcaccgctgtttgcggctgtggggccggggcggctgctggccccgcggcctacagcagctcctcgtgcctggcggcgtgggcccgggcgagcagccctgcctccggacgctttaccgatttgttacaactcaagcaagggccagcagaaattctcttttgacagatataattgctgcttatcaaagattctgttctcgacccccaaaaggatttgaaaaatactttcctaatggaaaaaatggaaaaaaagctagtgaacctaaagaagttatgggagagaaaaaagaatcaaagccagctgctaccacacgctcttctggaggaggaggtggtggcggtggaaaacgaggtggcaagaaagatgattctcactggtggtccaggtttcagaagggtgacattccatgggacgacaaggatttcaggatgttcttcctctggactgctctgttctggggtggagtcatgttttacttgctgctcaagagatccgggagagaaatcacttggaaggactttgtcaataactatctttcaaaaggagtagtagacagattggaagtcgtcaacaagcgttttgttcgagtgacctttacaccaggaaaaactcctgttgatgggcaatacgtttggtttaatattggcagtgtggacacctttgaacggaatctggaaactttacagcaggaattgggcatagaaggagaaaatcgggtgcctgttgtctacattgctgaaagtgatggctcttttctgctgagcatgctgcctacggtgctcatcatcgccttcttgctctacaccatcagaagagggcctgctggcattggccggacaggccgagggatgggcggactcttcagtgtcggagaaaccactgccaaggtcttaaaggatgaaattgatgtgaagttcaaagatgtggctggctgtgaggaggccaagctagagatcatggaatttgtgaatttcttgaaaaacccaaagcagtatcaagacctaggagcaaaaatcccaaagggtgccattctcactggtcctccaggcactgggaagacgctgctagctaaggccacagccggagaagccaatgtccccttcatcaccgttagtggatctgagtttttggagatgttcgttggtgtgggccctgctagagtccgagacttatttgcccttgctcggaagaatgccccttgcatcctcttcatcgatgaaatcgatgcggtgggaaggaagagaggaagaggcaactttggagggcagagtgagcaggagaacacactcaaccagctgctggtggagatggatggttttaatacaacaacaaatgtcgtcattttggccggcaccaatcgaccagatatcctggaccccgcgctgcttaggccggggcgtttcgacaggcagatctttattggaccaccagacataaaaggaagagcttctattttcaaagttcatctccgaccgctaaaactggacagtaccctggagaaggataaattggcaagaaaactggcatctttaactccagggttttcaggtgctgatgttgctaatgtctgtaatgaagctgcgttgattgctgcaaggcatctgtcagattccataaatcagaaacactttgaacaggcaattgaacgagtgattggtggcttagagaagaaaacgcaggttctgcagcctgaggagaagaagactgtggcataccacgaagcaggccatgcggttgccggctggtatctggagcacgcagacccgcttttaaaggtatccatcatcccacgtggcaaaggactaggttatgctcagtatttaccaaaagaacaatacctctataccaaagagcagctcttggataggatgtgtatgactttaggtggtcgagtctctgaagaaatcttctttggaagaattacaactggtgctcaagatgacttgagaaaagtaactcagagtgcatatgcccaaattgttcagtttggcatgaatgaaaaggttgggcaaatctcctttgacctcccacgtcagggggacatggtattggagaaaccttacagtgaagccactgcaagattgatagatgatgaagtacgaatacttattaatgatgcttataaaagaacagtagctcttctcacagaaaagaaagctgacgtggagaaggttgctcttctgttgttagaaaaagaagtattagataagaatgatatggttgaacttttgggccccagaccatttgcggaaaaatctacctatgaagaatttgtggaaggcactggcagcttggatgaggacacctcacttccagaaggccttaaggactggaacaaggagcgggaaaaggagaaagaggagcccccgggtgagaaagttgccaactagaggcccagagggaggccatctcagtctgtccactgtggtttcagctggtgcattatttcagctgtggctttcagaagaatgggaatgctgcgctgattttagccagccactggcccagctgaaatgatggggaaaggagtccttagtcctttcagcctcagaggtcacagtgggtggcaggtgactttccggaggccttgagggaaatgcacactgtcccatagcctcattgggctcccagacgtgctggaaaggttgagcccagagtggccgaggctggaccctgtggcaccaagtggggtcggctgaccgtgtggcagggatcgttgcactggactcttggcgtgtgggaagggatgctttctctttgtcgcccactcttcattcctgtttctcctcagttcccctgtgcagatgggctgtgaaattaaattggagtcttgataagaacattttaatttgacttaatattttaaagattgaatccagatcacttgttgctgtcttaatggaatggttttctacaggagctgtaacatacttaaaaatatgaatgtattatgtaaatatggcttctttacataaaaaataaaatgtcaacactgtacttttctgaacaca

SEQ ID NO: 168076 - DNA, 2860 bp, Artificial Sequence
  derived and/or modified sequence
ggggctggcggcaggagacgccgcgttgagagcttgggctcctccgtgagccgccggcgcgcttcgctgcctggcggcctttccccgagccgagcccgcttcccgaggccgccagtcgtcgcctgcccgcgcctgcgcgagcagccctgcctccggacgctttaccgatttgttacaactcaagcaagggccagcagaaattctcttttgacagatataattgctgcttatcaaagattctgttctcgacccccaaaaggatttgaaaaatactttcctaatggaaaaaatggaaaaaaagctagtgaacctaaagaagttatgggagagaaaaaagaatcaaagccagctgctaccacacgctcttctggaggaggaggtggtggcggtggaaaacgaggtggcaagaaagatgattctcactggtggtccaggtttcagaagggtgacattccatgggacgacaaggatttcaggatgttcttcctctggactgctctgttctggggtggagtcatgttttacttgctgctcaagagatccgggagagaaatcacttggaaggactttgtcaataactatctttcaaaaggagtagtagacagattggaagtcgtcaacaagcgttttgttcgagtgacctttacaccaggaaaaactcctgttgatgggcaatacgtttggtttaatattggcagtgtggacacctttgaacggaatctggaaactttacagcaggaattgggcatagaaggagaaaatcgggtgcctgttgtctacattgctgaaagtgatggctcttttctgctgagcatgctgcctacggtgctcatcatcgccttcttgctctacaccatcagaagagggcctgctggcattggccggacaggccgagggatgggcggactcttcagtgtcggagaaaccactgccaaggtcttaaaggatgaaattgatgtgaagttcaaagatgtggctggctgtgaggaggccaagctagagatcatggaatttgtgaatttcttgaaaaacccaaagcagtatcaagacctaggagcaaaaatcccaaagggtgccattctcactggtcctccaggcactgggaagacgctgctagctaaggccacagccggagaagccaatgtccccttcatcaccgttagtggatctgagtttttggagatgttcgttggtgtgggccctgctagagtccgagacttatttgcccttgctcggaagaatgccccttgcatcctcttcatcgatgaaatcgatgcggtgggaaggaagagaggaagaggcaactttggagggcagagtgagcaggagaacacactcaaccagctgctggtggagatggatggttttaatacaacaacaaatgtcgtcattttggccggcaccaatcgaccagatatcctggaccccgcgctgcttaggccggggcgtttcgacaggcagatctttattggaccaccagacataaaaggaagagcttctattttcaaagttcatctccgaccgctaaaactggacagtaccctggagaaggataaattggcaagaaaactggcatctttaactccagggttttcaggtgctgatgttgctaatgtctgtaatgaagctgcgttgattgctgcaaggcatctgtcagattccataaatcagaaacactttgaacaggcaattgaacgagtgattggtggcttagagaagaaaacgcaggttctgcagcctgaggagaagaagactgtggcataccacgaagcaggccatgcggttgccggctggtatctggagcacgcagacccgcttttaaaggtatccatcatcccacgtggcaaaggactaggttatgctcagtatttaccaaaagaacaatacctctataccaaagagcagctcttggataggatgtgtatgactttaggtggtcgagtctctgaagaaatcttctttggaagaattacaactggtgctcaagatgacttgagaaaagtaactcagagtgcatatgcccaaattgttcagtttggcatgaatgaaaaggttgggcaaatctcctttgacctcccacgtcagggggacatggtattggagaaaccttacagtgaagccactgcaagattgatagatgatgaagtacgaatacttattaatgatgcttataaaagaacagtagctcttctcacagaaaagaaagctgacgtggagaaggttgctcttctgttgttagaaaaagaagtattagataagaatgatatggttgaacttttgggccccagaccatttgcggaaaaatctacctatgaagaatttgtggaaggcactggcagcttggatgaggacacctcacttccagaaggccttaaggactggaacaaggagcgggaaaaggagaaagaggagcccccgggtgagaaagttgccaactagaggcccagagggaggccatctcagtctgtccactgtggtttcagctggtgcattatttcagctgtggctttcagaagaatgggaatgctgcgctgattttagccagccactggcccagctgaaatgatggggaaaggagtccttagtcctttcagcctcagaggtcacagtgggtggcaggtgactttccggaggccttgagggaaatgcacactgtcccatagcctcattgggctcccagacgtgctggaaaggttgagcccagagtggccgaggctggaccctgtggcaccaagtggggtcggctgaccgtgtggcagggatcgttgcactggactcttggcgtgtgggaagggatgctttctctttgtcgcccactcttcattcctgtttctcctcagttcccctgtgcagatgggct

SEQ ID NO: 168077 - DNA, 2394 bp, Artificial Sequence
  derived and/or modified sequence
atggcccaccggtgcctgcggctgtggggccggggcggctgctggcctcgcggcctacaacagttactggttcccggaggagtcggacccggcgagcagccttgcctgcgcaccctgtacaggttcgtgacaactcaggcgagagccagtagaaattccttgcttacagatattattgcagcctatcagagattttgctctcgcccacccaaagggtttgaaaagtactttccaaatgggaaaaacggaaaaaaggccagcgaacctaaggaagtgatgggagagaaaaaggagtcgaagccagcagccaccacgcgatcctctggtggggggggtggaggtggtggaaagcgcggcggaaagaaagatgatagccattggtggtccaggtttcagaaaggcgacataccctgggacgataaagacttcaggatgttctttctttggacggccctcttctggggcggcgtcatgttttatctcctgttaaagaggtctggtagggaaatcacgtggaaggactttgtgaataattacttgagtaaaggcgtggtggatcgcctggaggtggtcaacaagcggtttgtcagagtgacattcacccccgggaagacaccagtggatggacagtatgtttggttcaatatcggaagcgttgatacctttgagagaaacctggaaaccctgcagcaggagctgggcattgagggcgagaatcgggtccccgtggtctacattgcggaatctgatggatcttttctgctctcgatgctcccaaccgttctcataatcgccttcctgctgtataccattcgccgcggcccggcaggtataggccgaaccggccgagggatggggggactgttttcggtcggtgaaaccactgcaaaggtgctaaaagacgagattgatgtgaagttcaaagatgtcgctggatgtgaggaagctaaacttgagatcatggagttcgtcaactttctgaagaaccctaagcaataccaagacctgggcgcaaaaataccaaaaggcgcaatccttactggtccacccggtacaggaaagactttgttggccaaagccaccgccggtgaggctaatgtaccattcataaccgttagtggttctgaatttctcgagatgtttgtcggtgtgggaccagcacgcgtacgggacctgttcgcactcgcccgcaagaatgcaccatgcatactttttattgacgaaatcgatgccgtgggaaggaagaggggacgggggaacttcggcggacagagcgaacaggaaaatacactaaatcaactcctggtggagatggacggcttcaataccactactaatgtagtaatccttgccgggacaaaccgacccgatattctcgaccccgccctactgcgtcctggaagattcgatcgccagatctttattgggcccccagatatcaaggggcgcgccagtatcttcaaagtacatctgcggccgctgaagttggattctaccctagagaaggataaattggctcggaagttggcatcactcacccccgggttttccggcgccgatgtagcaaatgtgtgcaatgaggccgcccttatcgccgccaggcacctctctgattcaataaaccagaaacatttcgaacaggccatagagagagtaataggaggactggaaaagaaaacccaggtattgcaacctgaggagaaaaagactgtggcatatcacgaagcgggtcacgccgttgccggctggtatcttgaacatgccgacccactgctaaaggtatccatcatcccccggggaaagggcctcggctatgctcaataccttcctaaagagcagtatctctatactaaagaacagttgctggaccggatgtgcatgacactcggaggtagggtatcagaggagatttttttcggacggattaccaccggagcgcaagacgatctgcggaaggtcacccagagcgcttatgctcagatagttcagtttggaatgaacgagaaagtgggccaaatatctttcgacttgcctaggcagggggatatggtgctggaaaagccatactctgaggccaccgcccgcttgatagacgatgaagtgagaatacttatcaatgatgcttacaagcgcaccgtggccttgctaacagaaaaaaaagcggatgtggaaaaggtagcactcttgctcctcgagaaagaagtcctagacaagaatgatatggtcgagctcttgggcccccgacccttcgccgaaaagtcaacctatgaggaatttgttgagggtaccgggtctcttgacgaggataccagcctgccagaagggctgaaggactggaacaaagaaagggagaaggaaaaggaagagccccccggcgaaaaagtcgcaaattag

SEQ ID NO: 168078 - DNA, 2439 bp, Artificial Sequence
  derived and/or modified sequence
ggcgccggcggccggcggcggcgggtggagagcctgggcagcagcgtgtcacgccggagagcttccttgcctgggggtttaagccctagtcgggccaggtttccacgaccaccagtcgtggcttgtcccagacttcgcgagcagccatgcctcagaactctgtatagatttgtcacaacccaggctcgtgcatcaaggaacagccttctgactgatatcatcgccgcttatcagaggttttgctcgaggccacctaagggttttgagaagtactttccgaatggaaagaatggaaagaaagctagcgaacctaaagaggttatgggtgagaaaaaggagtctaagcctgctgcgaccacccgttcatccggcggggggggcgggggaggcgggaagagaggtggcaagaaagacgacagtcactggtggtctcgcttccagaagggagacattccttgggatgataaagactttaggatgttctttctgtggacagccctgttctggggcggcgtgatgttctacctacttctgaagcgaagcggcagagagatcacctggaaagatttcgtcaataattatttatctaagggcgtagtggaccgactggaagttgttaataagcgattcgtgcgggtaacattcacacctgggaaaacacccgtggatggccagtatgtctggttcaatattgggtctgtggacacgtttgaaagaaacctggagactctccagcaagagctggggattgagggtgagaatagggtgcctgtggtgtatatagctgaatcagatggcagtttcctgctatccatgcttcctactgtcctgatcattgctttcctgctgtataccattagacgtggccccgcagggattggcagaacaggcagggggatgggtgggcttttcagtgtaggggaaacaactgccaaggtacttaaggacgagatcgacgtaaagttcaaagatgtggccggatgcgaagaagccaagttagagatcatggagtttgtcaattttctgaaaaatcccaaacagtatcaggacctgggcgcaaagatacccaaaggagctatcctgacaggaccacccggtactggaaaaactctactggctaaggctacagccggggaggctaacgtcccatttatcacggttagtgggagcgagttcctggaaatgtttgtcggggtgggaccagctagggtgcgcgacctgttcgctctagccaggaagaatgctccctgcattctgttcatcgacgagattgatgccgtgggtagaaaaagggggagaggcaactttgggggacagtctgagcaagagaatacccttaatcaacttcttgtggagatggacgggtttaatacaacaactaacgtcgttatcttagctggcaccaatcggcccgatatcctcgatccagcgttactgaggcctggaagatttgaccggcagatttttatcgggcctccagatatcaagggcagggctagcatttttaaggtgcatctgagacccctgaagctagactctactctggagaaagacaagctcgcacgaaaactggcatccctgactcccggcttctccggagccgacgtggcaaacgtgtgcaatgaagctgccctgatcgcagctagacacttatccgactctatcaatcagaaacattttgagcaggccatagagcgggtgattgggggcttggagaagaaaactcaggtcctccagcccgaagagaagaagactgtggcctaccacgaagccgggcatgctgtggcaggctggtatctcgagcatgcagacccccttctgaaagttagtatcataccaagagggaagggcctcggttatgcccagtatctaccaaaagagcagtacctgtatacaaaagaacagctccttgaccgtatgtgcatgacattagggggccgggtatcagaggaaattttctttggacggatcacaaccggcgctcaggatgatctgagaaaggtgacacagagtgcttacgctcagatcgttcagttcgggatgaacgaaaaagtcggccagatatccttcgatcttcccaggcagggcgacatggttcttgagaaaccgtacagcgaagctacggccaggctaatcgacgacgaggtgcgaatactcattaatgacgcatacaagagaacagtggctctgctgaccgagaaaaaggccgacgtggaaaaagtggcgcttctcctgttggagaaggaggttctcgacaagaacgacatggtggagctgctgggccctcgtccattcgctgagaagtcaacctatgaggaattcgttgaaggtaccggctcactggacgaagatactagtctgcctgaaggattaaaggactggaacaaagagagggagaaggagaaagaggagccgcctggagagaaagtcgccaattag

SEQ ID NO: 168079 - DNA, 2394 bp, Artificial Sequence
  derived and/or modified sequence
atggcacatcggtgtctgaggctgtgggggaggggcggatgctggcccaggggactccagcaactcctagtccctgggggagtgggtcccggagaacagccttgcttgcgcacgctgtacagattcgtgactacacaggcccgagcatcgcggaattcactgctaacggacatcattgccgcttaccagcgcttctgctctcggccacccaagggcttcgagaaatacttccctaatggtaagaacggcaaaaaagcgagcgagcctaaggaggtgatgggcgagaaaaaggagagtaagcccgctgccaccacgcggagtagcggcggtggcggaggcggaggcggaaaaagagggggaaagaaggacgactcccactggtggtccagattccaaaagggggacataccatgggacgacaaggacttcaggatgttctttctgtggaccgctctgttctggggaggggtgatgttttacctgcttctaaagaggtccggcagggagatcacatggaaagacttcgtgaacaactatctgtcgaaaggagtcgtcgacagactggaggtagtgaataagcgcttcgtgcgggtcacgttcaccccaggcaagacacccgtggatgggcagtacgtgtggtttaatattggcagcgtggacacgtttgagcgcaaccttgaaacccttcagcaggagctgggcatcgagggcgagaaccgggtgcctgttgtgtatatagcagagtctgatgggtcctttttattaagcatgctgcccacagtattaataattgcattcctcttatacacaatccgccgtgggcctgccggaatcggaagaaccggaaggggaatggggggtcttttttcagtcggagagactacagcaaaggttcttaaggatgaaatcgatgtgaagtttaaagatgtggccggttgcgaggaggccaagctggaaatcatggagtttgtcaatttcttgaaaaaccctaaacaataccaggatctgggtgctaagatccccaagggagccattctgacaggaccgccaggtaccggaaagaccctgctggctaaagctaccgcaggagaggctaacgtccctttcatcacagtctccggatcggaattcctggaaatgttcgtgggtgtgggaccagctagagtgcgcgacctttttgctctagccaggaaaaacgccccttgcatcctgtttatagatgaaatagacgctgtcggcagaaagcggggaaggggaaatttcggcggtcaatctgagcaagaaaatacgctgaaccaactgctcgttgagatggatggttttaatactacaacaaacgtggtgatccttgctggaacaaatcgaccagatatcctggaccccgctttgttgcgcccagggcgtttcgaccgtcagatcttcatcggacccccagatattaaaggaagagcgtcgatcttcaaagtacatctacgaccactcaaactggactctaccttagaaaaagacaagctcgcccgtaagttggcttcattgactccaggtttctccggagccgacgtcgctaatgtgtgcaatgaagcagccttgatcgcggcacggcacctgtctgacagcatcaaccagaagcatttcgaacaggcaatcgagcgggtaatcggagggctggaaaaaaagacacaggtgctgcagccggaagagaaaaaaactgtggcataccatgaagctggacatgctgtagccggatggtatctagaacatgcagatccccttctgaaggtgtccatcatcccgcgtggcaagggactgggctacgcccagtaccttccgaaggaacagtacctctacactaaggagcagctccttgatcggatgtgcatgaccttaggagggagggtcagcgaggaaattttttttgggagaatcacaactggagctcaggacgacctccgcaaagtgacacagtccgcctatgcacagattgttcagttcgggatgaacgaaaaagtcggtcagataagttttgatctcccgaggcagggagacatggtgttggaaaagccttatagcgaggccaccgcacggctcatcgacgacgaggtgcgcatcctgatcaacgatgcctacaagcgaacagtggcattactaacagaaaaaaaagcagatgttgagaaggtggccctacttttgcttgaaaaagaagtgctcgacaaaaatgatatggtggaattgctcggccctagaccattcgctgagaaatcaacctatgaggagttcgtagaaggtacggggtcgctcgatgaagacacctccctgccagaggggctgaaggactggaacaaggaaagagaaaaggagaaggaagagccgcctggagaaaaagtggccaattag

SEQ ID NO: 168080 - DNA, 2439 bp, Artificial Sequence
  derived and/or modified sequence
ggggctggtggccgacggagaagggtcgaatcactggggtcctcagtctccaggcgccgagcttccctcccgggaggcttatctcctagtcgcgctcgtttcccacgcccacccgtagttgcttgtccaaggcttcgcgagcagccatgtctacggaccctgtaccggtttgtaaccacacaggctcgcgctagccgcaactcactcctgacagatatcatcgccgcttaccaaaggttctgtagccgtcctccaaaagggttcgagaaatattttcccaatggcaagaacggcaaaaaggcctctgagcccaaggaggtcatgggcgagaagaaggaatctaaaccggctgccaccactagatcatctggagggggtggaggaggaggtgggaagagaggtgggaagaaagacgatagccactggtggtcgaggttccagaagggcgatattccgtgggacgataaagacttccgaatgttcttcctctggacagccctgttttggggtggagttatgttctatctccttttgaagagaagtgggcgagagatcacttggaaagatttcgtgaacaattacctgagcaagggcgttgtggataggctggaggtagtgaacaaaagattcgtcagagtcacctttacaccaggcaaaactcccgtggatggccaatatgtgtggttcaacattggtagtgtggataccttcgagaggaacctcgagacgttgcaacaggagctggggattgagggcgaaaatcgggtacctgttgtgtatatcgccgagtccgatggatcgttcctcctcagcatgctaccaaccgttttaatcatcgcttttctgctgtataccatccgcaggggccctgctggtattgggagaaccggcagaggtatgggtggtctcttctctgtgggcgaaacaactgccaaagttctcaaggatgagattgatgtcaaatttaaagatgtggccggatgcgaagaagctaaattagaaatcatggagtttgttaattttttaaaaaatcctaagcaataccaggatctgggcgctaagatccccaagggcgcaatcctgaccggccctccgggaactggaaagactcttctggcaaaagccactgccggtgaggcgaacgtaccatttattactgtgagcggctcagaatttttggaaatgtttgttggtgtgggacccgctagggtgcgtgatcttttcgcactcgctcgcaagaacgcgccatgcattctgttcatcgacgagatcgatgcagtcggacgtaaaaggggtcgcggaaacttcggcggacagagcgagcaggagaacacacttaatcagctactggttgaaatggacgggtttaataccacaaccaatgtcgtcatcttggctggaacaaacagacccgacatcttggacccagctctgctaaggccaggaaggttcgacaggcagatcttcataggacctccagacatcaagggtagagcgagcatctttaaagtccatctgcgcccactgaaacttgactccacccttgagaaagataagctggctagaaaactggccagtctaacccctggcttctctggggcagatgtcgctaacgtctgcaacgaagctgccctgattgcggctcgtcacctgtccgactcaatcaatcagaaacacttcgaacaagctatcgaaagggtgatcgggggactggagaagaaaacacaggtgcttcagccggaggaaaagaagacagtggcctaccacgaggccggtcacgctgttgcgggatggtacttggagcatgcagatccgctcctgaaggttagcataattccacgcggtaaaggcctggggtacgctcaatatcttcctaaggagcagtacctttatacaaaagagcagcttctggaccgaatgtgcatgaccctgggaggccgagtcagtgaggagattttttttggacgaattacaacaggggctcaggacgatctccgcaaggttacccagtcagcttacgcccagatcgtccaattcgggatgaatgagaaagtcgggcagatatctttcgacctccccagacagggagacatggtgctcgagaagccttatagtgaggccacggctcggctgatcgacgatgaggttaggatcttaatcaatgatgcgtataaacgtaccgtggcccttttaacagagaagaaggcagacgttgaaaaagtggccctcttactgcttgagaaagaagttctcgataaaaacgatatggttgagctgctggggccacggccattcgctgaaaaaagcacctacgaagagtttgttgaagggacaggctcattagacgaggatacctccctgcccgaaggactcaaagactggaataaggagagagagaaggagaaggaggagccgccaggtgagaaggtcgccaactag

SEQ ID NO: 168081 - DNA, 2394 bp, Artificial Sequence
  derived and/or modified sequence
atggcccacagatgcctgagactgtggggcagaggcggctgctggcccagaggcctgcagcagctgctggtgcccggcggcgtgggccccggcgagcagccctgcctgagaaccctgtacagattcgtgaccacccaggccagagccagcagaaacagcctgctgaccgacatcatcgccgcctaccagagattctgcagcagaccccccaagggcttcgagaagtacttccccaacggcaagaacggcaagaaggccagcgagcccaaggaggtgatgggcgagaagaaggagagcaagcccgccgccaccaccagaagcagcggcggcggcggcggcggcggcggcaagagaggcggcaagaaggacgacagccactggtggagcagattccagaagggcgacatcccctgggacgacaaggacttcagaatgttcttcctgtggaccgccctgttctggggcggcgtgatgttctacctgctgctgaagagaagcggcagagagatcacctggaaggacttcgtgaacaactacctgagcaagggcgtggtggacagactggaggtggtgaacaagagattcgtgagagtgaccttcacccccggcaagacccccgtggacggccagtacgtgtggttcaacatcggcagcgtggacaccttcgagagaaacctggagaccctgcagcaggagctgggcatcgagggcgagaacagagtgcccgtggtgtacatcgccgagagcgacggcagcttcctgctgagcatgctgcccaccgtgctgatcatcgccttcctgctgtacaccatcagaagaggccccgccggcatcggcagaaccggcagaggcatgggcggcctgttcagcgtgggcgagaccaccgccaaggtgctgaaggacgagatcgacgtgaagttcaaggacgtggccggctgcgaggaggccaagctggagatcatggagttcgtgaacttcctgaagaaccccaagcagtaccaggacctgggcgccaagatccccaagggcgccatcctgaccggcccccccggcaccggcaagaccctgctggccaaggccaccgccggcgaggccaacgtgcccttcatcaccgtgagcggcagcgagttcctggagatgttcgtgggcgtgggccccgccagagtgagagacctgttcgccctggccagaaagaacgccccctgcatcctgttcatcgacgagatcgacgccgtgggcagaaagagaggcagaggcaacttcggcggccagagcgagcaggagaacaccctgaaccagctgctggtggagatggacggcttcaacaccaccaccaacgtggtgatcctggccggcaccaacagacccgacatcctggaccccgccctgctgagacccggcagattcgacagacagatcttcatcggcccccccgacatcaagggcagagccagcatcttcaaggtgcacctgagacccctgaagctggacagcaccctggagaaggacaagctggccagaaagctggccagcctgacccccggcttcagcggcgccgacgtggccaacgtgtgcaacgaggccgccctgatcgccgccagacacctgagcgacagcatcaaccagaagcacttcgagcaggccatcgagagagtgatcggcggcctggagaagaagacccaggtgctgcagcccgaggagaagaagaccgtggcctaccacgaggccggccacgccgtggccggctggtacctggagcacgccgaccccctgctgaaggtgagcatcatccccagaggcaagggcctgggctacgcccagtacctgcccaaggagcagtacctgtacaccaaggagcagctgctggacagaatgtgcatgaccctgggcggcagagtgagcgaggagatcttcttcggcagaatcaccaccggcgcccaggacgacctgagaaaggtgacccagagcgcctacgcccagatcgtgcagttcggcatgaacgagaaggtgggccagatcagcttcgacctgcccagacagggcgacatggtgctggagaagccctacagcgaggccaccgccagactgatcgacgacgaggtgagaatcctgatcaacgacgcctacaagagaaccgtggccctgctgaccgagaagaaggccgacgtggagaaggtggccctgctgctgctggagaaggaggtgctggacaagaacgacatggtggagctgctgggccccagacccttcgccgagaagagcacctacgaggagttcgtggagggcaccggcagcctggacgaggacaccagcctgcccgagggcctgaaggactggaacaaggagagagagaaggagaaggaggagccccccggcgagaaggtggccaactag

SEQ ID NO: 168082 - DNA, 2439 bp, Artificial Sequence
  derived and/or modified sequence
ggcgccggcggcagaagaagaagagtggagagcctgggcagcagcgtgagcagaagaagagccagcctgcccggcggcctgagccccagcagagccagattccccagaccccccgtggtggcctgccccagactgagagagcagccctgcctgagaaccctgtacagattcgtgaccacccaggccagagccagcagaaacagcctgctgaccgacatcatcgccgcctaccagagattctgcagcagaccccccaagggcttcgagaagtacttccccaacggcaagaacggcaagaaggccagcgagcccaaggaggtgatgggcgagaagaaggagagcaagcccgccgccaccaccagaagcagcggcggcggcggcggcggcggcggcaagagaggcggcaagaaggacgacagccactggtggagcagattccagaagggcgacatcccctgggacgacaaggacttcagaatgttcttcctgtggaccgccctgttctggggcggcgtgatgttctacctgctgctgaagagaagcggcagagagatcacctggaaggacttcgtgaacaactacctgagcaagggcgtggtggacagactggaggtggtgaacaagagattcgtgagagtgaccttcacccccggcaagacccccgtggacggccagtacgtgtggttcaacatcggcagcgtggacaccttcgagagaaacctggagaccctgcagcaggagctgggcatcgagggcgagaacagagtgcccgtggtgtacatcgccgagagcgacggcagcttcctgctgagcatgctgcccaccgtgctgatcatcgccttcctgctgtacaccatcagaagaggccccgccggcatcggcagaaccggcagaggcatgggcggcctgttcagcgtgggcgagaccaccgccaaggtgctgaaggacgagatcgacgtgaagttcaaggacgtggccggctgcgaggaggccaagctggagatcatggagttcgtgaacttcctgaagaaccccaagcagtaccaggacctgggcgccaagatccccaagggcgccatcctgaccggcccccccggcaccggcaagaccctgctggccaaggccaccgccggcgaggccaacgtgcccttcatcaccgtgagcggcagcgagttcctggagatgttcgtgggcgtgggccccgccagagtgagagacctgttcgccctggccagaaagaacgccccctgcatcctgttcatcgacgagatcgacgccgtgggcagaaagagaggcagaggcaacttcggcggccagagcgagcaggagaacaccctgaaccagctgctggtggagatggacggcttcaacaccaccaccaacgtggtgatcctggccggcaccaacagacccgacatcctggaccccgccctgctgagacccggcagattcgacagacagatcttcatcggcccccccgacatcaagggcagagccagcatcttcaaggtgcacctgagacccctgaagctggacagcaccctggagaaggacaagctggccagaaagctggccagcctgacccccggcttcagcggcgccgacgtggccaacgtgtgcaacgaggccgccctgatcgccgccagacacctgagcgacagcatcaaccagaagcacttcgagcaggccatcgagagagtgatcggcggcctggagaagaagacccaggtgctgcagcccgaggagaagaagaccgtggcctaccacgaggccggccacgccgtggccggctggtacctggagcacgccgaccccctgctgaaggtgagcatcatccccagaggcaagggcctgggctacgcccagtacctgcccaaggagcagtacctgtacaccaaggagcagctgctggacagaatgtgcatgaccctgggcggcagagtgagcgaggagatcttcttcggcagaatcaccaccggcgcccaggacgacctgagaaaggtgacccagagcgcctacgcccagatcgtgcagttcggcatgaacgagaaggtgggccagatcagcttcgacctgcccagacagggcgacatggtgctggagaagccctacagcgaggccaccgccagactgatcgacgacgaggtgagaatcctgatcaacgacgcctacaagagaaccgtggccctgctgaccgagaagaaggccgacgtggagaaggtggccctgctgctgctggagaaggaggtgctggacaagaacgacatggtggagctgctgggccccagacccttcgccgagaagagcacctacgaggagttcgtggagggcaccggcagcctggacgaggacaccagcctgcccgagggcctgaaggactggaacaaggagagagagaaggagaaggaggagccccccggcgagaaggtggccaactag

SEQ ID NO: 168083 - protein, 527 aa, Artificial Sequence
  derived and/or modified sequence
MLNNLLLFSLQISLIGTTLGGNVLIWPMEGSHWLNVKIIIDELIKKEHNVTVLVASGALFITPTSNPSLTFEIYRVPFGKERIEGVIKDFVLTWLENRPSPSTIWRFYQEMAKVIKDFHMVSQEICDGVLKNQQLMAKLKKSKFEVLVSDPVFPCGDIVALKLGIPFMYSLRFSPASTVEKHCGKVPYPPSYVPAVLSELTDQMSFTDRIRNFISYHLQDYMFETLWKSWDSYYSKALGRPTTLCETMGKAEIWLIRTYWDFEFPRPYLPNFEFVGGLHCKPAKPLPKEMEEFIQSSGKNGVVVFSLGSMVKNLTEEKANLIASALAQIPQKVLWRYKGKKPATLGNNTQLFDWIPQNDLLGHPKTKAFITHGGTNGIYEAIYHGVPMVGVPMFADQPDNIAHMKAKGAAVEVNLNTMTSVDLLSALRTVINEPSYKENAMRLSRIHHDQPVKPLDRAVFWIEFVMRHKGAKHLRVAAHDLTWFQYHSLDVIGFLLVCVTTAIFLVIQCCLFSCQKFGKIGKKKKRE

SEQ ID NO: 168084 - protein, 158 aa, Artificial Sequence
  derived and/or modified sequence
MLNNLLLFSLQISLIGTTLGGNVLIWPMEGSHWLNVKIIIDELIKKEHNVTVLVASGALFITPTSNPSLTFEIYRVPFGKERIEGVIKDFVLTWLENRPSPSTIWRFYQEMAKVIKDFHMVSQEICDGVLKNQQLMAKLKKSKFEVLVSDPVFPCGDI

SEQ ID NO: 168085 - DNA, 1584 bp, Artificial Sequence
  derived and/or modified sequence
atgctgaacaacctgctgctgttcagcctgcagatcagcctgatcggcaccaccctgggcggcaacgtgctgatctggcccatggagggcagccactggctgaacgtgaagatcatcatcgacgagctgatcaagaaggagcacaacgtgaccgtgctggtggccagcggcgccctgttcatcacccccaccagcaaccccagcctgaccttcgagatctacagagtgcccttcggcaaggagagaatcgagggcgtgatcaaggacttcgtgctgacctggctggagaacagacccagccccagcaccatctggagattctaccaggagatggccaaggtgatcaaggacttccacatggtgagccaggagatctgcgacggcgtgctgaagaaccagcagctgatggccaagctgaagaagagcaagttcgaggtgctggtgagcgaccccgtgttcccctgcggcgacatcgtggccctgaagctgggcatccccttcatgtacagcctgagattcagccccgccagcaccgtggagaagcactgcggcaaggtgccctacccccccagctacgtgcccgccgtgctgagcgagctgaccgaccagatgagcttcaccgacagaatcagaaacttcatcagctaccacctgcaggactacatgttcgagaccctgtggaagagctgggacagctactacagcaaggccctgggcagacccaccaccctgtgcgagaccatgggcaaggccgagatctggctgatcagaacctactgggacttcgagttccccagaccctacctgcccaacttcgagttcgtgggcggcctgcactgcaagcccgccaagcccctgcccaaggagatggaggagttcatccagagcagcggcaagaacggcgtggtggtgttcagcctgggcagcatggtgaagaacctgaccgaggagaaggccaacctgatcgccagcgccctggcccagatcccccagaaggtgctgtggagatacaagggcaagaagcccgccaccctgggcaacaacacccagctgttcgactggatcccccagaacgacctgctgggccaccccaagaccaaggccttcatcacccacggcggcaccaacggcatctacgaggccatctaccacggcgtgcccatggtgggcgtgcccatgttcgccgaccagcccgacaacatcgcccacatgaaggccaagggcgccgccgtggaggtgaacctgaacaccatgaccagcgtggacctgctgagcgccctgagaaccgtgatcaacgagcccagctacaaggagaacgccatgagactgagcagaatccaccacgaccagcccgtgaagcccctggacagagccgtgttctggatcgagttcgtgatgagacacaagggcgccaagcacctgagagtggccgcccacgacctgacctggttccagtaccacagcctggacgtgatcggcttcctgctggtgtgcgtgaccaccgccatcttcctggtgatccagtgctgcctgttcagctgccagaagttcggcaagatcggcaagaagaagaagagagagtag

SEQ ID NO: 168086 - DNA, 1584 bp, Artificial Sequence
  derived and/or modified sequence
atgctgaataatctgcttcttttctctctgcagatatccttgatcggtaccaccctgggcgggaacgtactgatctggcccatggagggatcacactggctgaatgtgaaaatcattattgatgaactcattaaaaaagaacacaatgtcactgttctggttgcatctggggccctttttattactcctacgagcaaccccagtttgactttcgaaatataccgcgtacctttcggcaaggaacggatagaaggcgttattaaggatttcgtgttgacctggctggagaacagaccaagtccgtctaccatctggcgtttctaccaggagatggcaaaggtgataaaggactttcatatggttagccaggagatttgtgatggagtgctgaagaaccagcagttgatggccaagcttaaaaagagtaagttcgaggtgctggttagcgatccagtttttccttgtggtgatatcgtcgcgttgaaactggggatccccttcatgtatagccttagattctcgccagctagcactgtggagaagcactgcggcaaggtgccatatcctccttcctatgtgccagcagttttgagcgagctgaccgaccagatgtctttcaccgaccgaattaggaatttcatttcctaccatctccaggactacatgtttgagactctgtggaaatcctgggatagttattacagtaaagcattggggcgcccgacgaccctctgcgaaactatggggaaagctgagatttggctgatccgcacctattgggattttgaattcccaagaccttacctaccaaactttgaattcgtgggcggactccattgcaaaccagcgaagcctttgcccaaagagatggaagagtttatccaaagcagcgggaagaatggcgtggtagtcttttctcttggatccatggtgaagaatctgactgaagagaaagccaaccttatcgcttccgccctggctcaaatccctcaaaaggtgttatggcgctacaagggtaaaaagcctgccacactgggaaacaacacacagctgtttgactggatcccacaaaatgatttgctggggcatcctaaaaccaaagctttcatcacacacgggggcaccaatggcatttacgaagctatataccatggtgtccccatggtgggggtcccgatgtttgctgatcagcctgataatattgctcacatgaaagccaaaggagcagcagtggaagttaacctgaatactatgacgtccgtggacctgttgagcgcattgagaactgtgatcaacgagcccagctacaaggaaaacgccatgcggctgtcccgcatccaccacgaccagccggtgaaaccattagacagggccgtgttctggatcgagttcgtaatgcggcacaaaggggcgaagcacctgagagtggcagctcatgatctcacttggtttcagtatcactctctcgatgtgataggtttcttgctcgtttgcgtgactacggccatttttctagtgatccagtgttgtctcttttcttgccagaagttcgggaagattggaaagaagaagaaacgcgaatag

SEQ ID NO: 168087 - DNA, 1584 bp, Artificial Sequence
  derived and/or modified sequence
atgctgaacaacctgctgctcttcagcctgcagatcagcctgattggcaccaccctgggcggcaatgtgctgatctggcccatggagggcagccactggctgaatgtgaagatcatcattgatgagctgatcaagaaggagcacaacgtgacagtgctggtggccagcggggccctcttcatcacccccaccagcaaccccagcctgacctttgagatctacagagtgccctttgggaaggagagaattgaaggagtcatcaaggactttgtgctgacctggctggagaaccggcccagccccagcaccatctggaggttctaccaggagatggccaaggtgatcaaggacttccacatggtgtcccaggagatctgtgatggagtgctgaagaaccagcagctgatggccaagctgaagaagagcaagtttgaggtgctggtgtctgaccctgtgttcccctgtggggacatcgtggccctgaagctgggcatccccttcatgtacagcctgcgcttctccccagccagcacagtggagaagcactgcggcaaggtgccctacccacccagctatgtgcctgctgtgctgtctgagctgacagaccagatgtccttcacagaccgcatccggaacttcatctcctaccacctgcaggactacatgtttgagaccctgtggaagtcctgggacagctactacagcaaggccctgggccggcccaccaccctgtgtgagaccatgggcaaggccgagatctggctgatccgcacctactgggactttgagttcccccggccctacctgcccaactttgaatttgtgggcggcctgcactgcaagccagccaagcccctgcccaaggagatggaggagttcatccagagcagcggcaagaatggagtggtggtgttcagcctgggctccatggtgaagaacctgacagaggagaaggccaacctgattgccagcgccctggcccagatcccccagaaggtgctgtggagatacaagggcaagaagccagccaccctgggcaacaacacccagctgtttgactggatcccccagaatgacctgctgggccaccccaagaccaaggccttcatcacccacggcggcaccaacggcatctatgaggccatctaccacggcgtgcccatggtgggcgtgcccatgtttgctgaccagcctgacaacatcgcccacatgaaggccaagggagctgctgtggaggtgaacctgaacaccatgacctctgtggacctgctgagcgccctgaggacagtcatcaatgagcccagctacaaggaaaatgccatgaggctgagccgcatccaccacgaccagcctgtgaagcccctggacagagctgtgttctggattgaatttgtgatgaggcacaagggggccaagcacctgcgggtggccgcccatgacctgacctggttccagtaccacagcctggatgtgattggcttcctgctggtgtgtgtgaccacagccatcttcctggtgatccagtgctgcctcttcagctgccagaagtttgggaagattggcaagaagaagaagcgggagtag

SEQ ID NO: 168088 - DNA, 1584 bp, Artificial Sequence
  derived and/or modified sequence
atgctgaacaacctgctgctgttcagcctgcagatcagcctgatcggaacaaccctgggcggcaacgtccttatctggcctatggagggttcccactggctaaacgttaagataattatagacgaactgatcaaaaaagagcacaacgtcacggtgctcgtcgccagcggggccctctttatcacacctacgtctaaccctagcttaacattcgagatttatcgtgtgccttttggcaaagagcgtatcgagggagtgattaaagacttcgtgctcacttggctcgaaaaccggccaagtccaagcacaatatggcgattttaccaggagatggcaaaggtaatcaaagacttccatatggtcagccaggagatctgcgacggggttctgaagaatcaacaattgatggcaaagctcaaaaaatccaaattcgaagtcttggtgtccgatcctgtattcccttgcggtgacatcgttgccctaaagctgggaattccatttatgtacagtttgcggttcagccctgcaagcactgtggagaaacattgtggaaaggtgccttacccgccctcttacgtgcctgcggtgctctcagagctgacagatcagatgtcctttacggatcgaattcggaacttcatatcttaccatctccaggattacatgtttgaaactctgtggaagtcatgggattcttactattctaaggccttgggccgacctacaaccctctgcgagaccatgggtaaggccgaaatatggctgatccgcacttactgggattttgaatttccacgcccctacctgcccaactttgagtttgtaggagggctgcattgcaagcccgcgaaaccactgcccaaggaaatggaagaattcatccaaagcagcggcaagaacggcgttgtagtgttctctttaggctcaatggtgaagaatttgaccgaggagaaagctaatctcattgcgtctgcgctcgcgcaaattccccaaaaggtgctgtggcgctacaagggtaaaaagcccgcaacccttggaaataacacacagctgtttgattggatccctcagaacgatttgctgggacatccaaagactaaagctttcataacccacggtggaaccaacggcatatacgaagcaatctatcacggcgttcctatggttggagtcccaatgttcgctgaccagccggataatatcgcccacatgaaggctaaaggcgctgccgtagaggtgaatcttaacacaatgacttctgtagacttactctcggccctccgtacagttatcaacgagcctagttataaggagaatgcgatgcgactctcccggatccatcatgaccagccagtgaaaccactcgatcgcgccgtcttttggatcgaatttgtaatgcgccataagggcgccaagcatctgcgggtggccgcccacgacctgacgtggtttcagtatcacagcctggatgtgatcgggtttctgctggtgtgtgtgaccacagccatattccttgttattcagtgctgtcttttcagctgccagaaattcggaaagatcggcaagaaaaagaaaagagaatag

SEQ ID NO: 168089 - DNA, 1584 bp, Artificial Sequence
  derived and/or modified sequence
atgctcaacaaccttctgttgtttagcctccagatctctctcattggaaccaccctggggggaaacgtcttgatttggcccatggagggctcacattggctgaacgtaaagatcattattgatgaattgattaagaaagaacacaacgtcaccgtgctggttgccagtggcgcactgttcattacacctacgagtaacccttctcttacatttgagatttaccgggttccgtttggaaaggaaaggatcgaaggcgtcattaaggatttcgtcttgacctggctggagaaccgaccatccccttccaccatttggagattctaccaagagatggccaaagtgattaaggacttccacatggtctctcaagagatttgtgatggtgtgttaaagaaccaacagctaatggctaaactgaaaaagtcaaaattcgaagtcttggtttcagaccccgtgtttccatgcggagatatcgtagcgctgaagctggggatcccctttatgtactcactgcgctttagtcctgctagtaccgtggagaagcactgtggaaaggttccgtaccccccatcttacgtgcctgccgtactctctgagctcactgaccagatgtctttcaccgaccggattcgtaattttatatcataccacctgcaggactacatgttcgaaactttgtggaaatcctgggatagctattacagcaaggccctgggccgaccgacaactctgtgcgagaccatgggcaaagcagagatctggctcatcagaacgtattgggacttcgagttccctaggccctatctccccaacttcgagttcgtcggcggactgcactgtaagcccgctaagccactgccaaaggagatggaggagttcatccaatccagtggaaaaaacggagtcgtggttttttctctcggatcgatggtgaagaacctcacggaagagaaggcaaatttgatcgcgagcgctctagcccaaatcccccagaaagtactgtggagatataaggggaagaaacctgccacgttggggaacaacacgcagctcttcgactggatccctcagaacgacctcctcggacaccctaaaacgaaggcatttattacccatggtggcaccaacggaatttatgaggccatttatcacggggtgcctatggtcggagtgcccatgttcgctgatcagcctgataatatcgctcacatgaaagccaaaggtgcagcagtggaggtgaatctgaacacaatgacaagcgtggacctcctgtctgcactccgcaccgtgatcaacgaaccatcctataaagaaaatgctatgaggctgtctagaattcatcacgatcagccagtgaagccactggaccgtgccgtgttctggatcgaattcgtcatgcggcacaagggggcaaaacatctgcgggtggccgcacacgacctgacatggtttcagtatcatagcctggatgtaattgggttcttgctggtgtgcgttactacagctatctttttagtcatacagtgctgtctcttcagctgtcagaagtttggaaaaattgggaaaaaaaaaaaaagagagtag

SEQ ID NO: 168090 - DNA, 2595 bp, Artificial Sequence
  derived and/or modified sequence
agcagagaaaaacatttgcttcacatctcatcaaatcttctgcatcaagccacatcatgttaaacaaccttctgctgttctcccttcagataagtctcataggaaccactcttggtgggaatgttttgatttggccaatggaaggtagtcattggctaaatgttaagataattatagatgagctcattaaaaaggagcataatgtgactgtcctagttgcctctggtgcacttttcatcacaccaacctctaacccatctctgacatttgaaatatatagggtgccctttggcaaagaaagaatagaaggagtaattaaggacttcgttttgacatggctggaaaatagaccatctccttcaaccatttggagattctatcaggagatggccaaagtaatcaaggacttccacatggtgtctcaggagatctgtgatggcgttcttaaaaaccaacagctgatggcaaagctaaagaaaagcaagtttgaagtcctggtgtctgatccagtatttccttgtggcgatatagtagctttaaaacttggaattccatttatgtactccttgaggttttctccagcctcaacagtggaaaagcactgtgggaaggtaccataccctccttcctatgttcctgctgttttatcagaactcaccgaccaaatgtctttcactgacagaataagaaatttcatctcctaccacctacaggactacatgtttgaaactctttggaaatcatgggattcatactatagtaaagctttaggaagacccactacgttatgtgagactatggggaaagctgaaatttggttaatccgaacatattgggattttgaatttcctcgtccatacttacctaattttgagtttgttggaggattgcactgcaaacctgccaaacctttacctaaggaaatggaagaatttatccagagctcaggtaaaaatggtgttgtggtgttttctctgggatcaatggtcaaaaaccttacagaagaaaaggccaatcttattgcctcagcccttgcccagattccacagaaggttttatggagatacaaaggaaagaaaccagccacattaggaaacaatactcagctctttgattggataccccagaatgatcttcttggacatcccaaaaccaaagcttttatcactcatggtggaactaatgggatctacgaagctatttaccacggagtccctatggtgggagttcccatgtttgctgatcagcctgataacattgctcacatgaaggccaaaggagcagctgtggaagtgaacctaaacacaatgacaagtgtggatttgcttagcgctttgagaacagtcattaatgaaccttcttataaagagaatgctatgaggttatcaagaattcaccatgatcaacctgtaaagcccctggatcgagcagtcttctggatcgagtttgtcatgcgccacaaaggagccaagcaccttcgggttgcagcccatgacctcacctggttccagtaccactctttggatgtaattgggttcttgctggtctgtgtgacaacggctatatttttggtcatacaatgttgtttgttttcctgtcaaaaatttggtaagataggaaagaagaaaaaaagagaataggtcaagaaaaagaggaaatatatatatttttaagtttggcaaaatcctgagtagtgtagtcctattaattccagacaaaaggagtttaacaaaaacacgtctcccatcctgtttccaaattttctatttctctacctgcgataagcctactgataaagcctagattttggcatgattattattaacttgtgagttatagtcttctatttttcctttgtctctccctgctgactataccctcttcctgtcacttttctgacacaaggatactacctaattttaaatatgttctattcatagtatcaaattattttatcgttaaccttaattaatgattaacaatatgctgaatcctggtaatgcatacagtgtagatggaatttgataggtgtaaggaagagtcaaattcacaaatttccatataccaaacaaatcagggagccaccgtaggagagtagtgtgttatgagaaaggtaatgatttccttttttaataaaaacaaactcttctgcttgctcaatgtttcaggagttagagaatgaattttaagtgtgacgtgcgtccctattaaatgtctacaaaattttcattaagcatatctagaaaatcacggcataacttgcctgcctttcttcaacatatattcttatataacctgtagtggaagatttgggtactgtctttaataaatcaatcaatcgactcttttatttcaaggagaaagttctatgttatatgttgaaggtgaacagatcatatttagaggatataacaattagaaatctagaaaataattatcatttttataaaatttttagtcaactgtacaaataattacataaaacatcaattaattatgcttaaaaatcactaatgttcataatatataatcactatttgtaatcaaaagtttaattttatgccaaaaaataaaaaatgcttacttggaatttga

SEQ ID NO: 168091 - protein, 314 aa, Artificial Sequence
  derived and/or modified sequence
MGARGALLLALLLARAGLRKPESQEAAPLSGPCGRRVITSRIVGGEDAELGRWPWQGSLRLWDSHVCGVSLLSHRWALTAAHCFETYSDLSDPSGWMVQFGQLTSMPSFWSLQAYYTRYFVSNIYLSPRYLGNSPYDIALVKLSAPVTYTKHIQPICLQASTFEFENRTDCWVTGWGYIKEDEALPSPHTLQEVQVAIINNSMCNHLFLKYSFRKDIFGDMVCAGNAQGGKDACFGDSGGPLACNKNGLWYQIGVVSWGVGCGRPNRPGVYTNISHHFEWIQKLMAQSGMSQPDPSWPLLFFPLLWALPLLGPV

SEQ ID NO: 168092 - DNA, 945 bp, Artificial Sequence
  derived and/or modified sequence
atgggggcaagaggcgccctgttgctcgctctgctcctggctcgagcagggctcagaaaacctgagtcacaggaggcggctccgctatccggcccgtgtggacgtcgggtgatcacctccagaatagtaggaggagaagacgccgagctcggcaggtggccatggcaggggagcttaaggctctgggatagccatgtgtgcggggtatccctgctaagtcatagatgggctctgacagcagcacactgttttgaaacctactccgatctgtcagatccctccggatggatggtccaatttgggcagctgacatccatgccttcattttggtcactccaagcttattatacaaggtatttcgtatcaaacatctacttgagccctcgatatctgggaaattctccctatgatattgccctggtgaagctgagcgccccagtgacctacactaagcacatccagccaatttgtctacaagcctcaacctttgagttcgaaaacaggactgattgttgggtgactggatgggggtatatcaaggaagacgaggccctgccatcgccgcacacactgcaagaggtgcaggtggctatcatcaataatagcatgtgtaaccacctgtttcttaagtacagcttccgaaaagacatctttggggacatggtgtgcgcgggaaacgcccaagggggcaaggacgcgtgttttggagattctggtgggccattggcctgcaacaagaacggactctggtatcagatcggggttgttagctggggagtcggctgcgggagaccaaacagacccggggtgtatactaatatcagccaccattttgaatggatccagaagctgatggcacagtctggcatgagtcagccagaccccagctggccactcctgttcttccctctcttgtgggccctacctttactaggccctgtttag

SEQ ID NO: 168093 - DNA, 945 bp, Artificial Sequence
  derived and/or modified sequence
atgggcgcccggggggccctgctgctggccctgctgctggcccgggccggcctgaggaagccagagagccaggaggccgcccccctgagcggcccctgtggcagaagagtcatcaccagccgcatcgtgggcggggaggatgctgagctgggccgctggccctggcagggcagcctgcggctgtgggacagccacgtgtgtggggtgtccctgctgagccaccgctgggccctgacagctgcccactgctttgagacctacagcgacctgagtgaccccagcggctggatggtgcagtttggccagctgacctccatgcccagcttctggagcctgcaggcctactacacccgctactttgtgagcaacatctacctgagcccccgctacctgggcaacagcccctatgacatcgccctggtgaagctgagcgcccctgtgacctacaccaagcacatccagcccatctgcctgcaggccagcacctttgaatttgagaacagaacagactgctgggtgacaggctggggctacatcaaggaggatgaggccctgcccagcccccacaccctgcaggaggtgcaggtggccatcatcaacaacagcatgtgcaaccacctgttcctgaagtacagcttcaggaaggacatctttggagacatggtgtgtgctggaaatgcccagggcggcaaggatgcctgctttggagacagcggcggccccctggcctgcaacaagaatggcctgtggtaccagattggagtggtgtcctggggcgtgggctgcggccggcccaacagacctggggtgtacaccaacatcagccaccactttgagtggatccagaagctgatggcccagagcggcatgagccagcctgaccccagctggcccctgctcttcttccccctgctgtgggccctgcccctgctgggccctgtgtag

SEQ ID NO: 168094 - DNA, 945 bp, Artificial Sequence
  derived and/or modified sequence
atgggcgcccggggcgccctgctgctggccctgctgctggcccgggcaggcctgcggaagcccgaaagccaggaggcggcaccattgagtggcccttgcggccgcagagtcatcaccagtagaattgtggggggcgaagacgccgaactggggcggtggccctggcagggttctttgaggctgtgggactctcatgtgtgtggagtgagcctgttgagtcaccggtgggctttaacagcggctcattgtttcgagacgtatagcgacctgtcagaccccagtggttggatggttcagtttggccagctgacatctatgccctccttttggagcttgcaggcatattatacacggtacttcgtgtcgaacatttatctcagtcccaggtatttgggaaactccccttatgacatcgccctggtcaagctcagcgcgcctgtgacatataccaaacatattcagcccatctgtctccaagctagcacctttgagtttgaaaaccgtacggattgttgggtgactggctgggggtacatcaaagaggacgaagccctgccctccccccacacgcttcaagaagtccaagtggcaattattaacaactccatgtgcaaccatctgttcttgaagtattccttcaggaaggatattttcggcgatatggtgtgcgctgggaatgcccaggggggcaaggacgcatgctttggggactccggcggtcctctggcctgcaataagaatggactgtggtatcagataggagtcgtttcctggggcgtggggtgcggccggccgaatcgccccggcgtctatactaacataagccatcacttcgaatggatccaaaagcttatggcacagtcagggatgtctcagcctgacccctcctggccacttctctttttccccctgttatgggcactccctctattggggcctgtgtag

SEQ ID NO: 168095 - DNA, 945 bp, Artificial Sequence
  derived and/or modified sequence
atgggagcacgcggagcactgctgctggccctgcttctggccagagctgggctcagaaaacctgaatcccaggaagcagctcccctgagtggaccttgtggcaggagagtgattacatccagaattgttggaggggaggatgcggaactcggccgatggccatggcaaggatctctgagattatgggactcccacgtgtgtggggtcagccttctgagtcaccgctgggccttaactgcagctcattgcttcgagacatattctgatctttctgacccctccggatggatggtgcagtttggacagctgacgtctatgccttcgttttggagcctgcaggcctactatacccggtacttcgtcagcaacatatatctgagcccccgatacctgggcaatagtccatacgatatcgctttggtgaaattgagcgcacctgttacctacacgaagcatatccagccaatctgcttgcaggccagtacatttgagtttgagaataggaccgattgctgggtgactggctggggatacatcaaagaggacgaggcgcttccatccccacacaccttacaggaagttcaggtcgcgatcattaacaactcaatgtgcaatcatctcttcttaaagtactcctttcgtaaggacattttcggagatatggtatgcgccggtaacgcgcagggaggcaaggatgcgtgcttcggggactctggtggaccacttgcgtgcaataagaacgggctgtggtatcagattggggtggtatcctggggggtaggctgtgggaggcctaatagacctggggtgtataccaacattagccaccactttgaatggattcagaagctgatggcccagtctggtatgtcacaacctgaccccagctggcctctgctgttttttcctctactttgggccctcccactattagggccagtttag

SEQ ID NO: 168096 - DNA, 1101 bp, Artificial Sequence
  derived and/or modified sequence
gagaggaggcagagggggcgtcaggccgcgggagaggaggccatgggcgcgcgcggggcgctgctgctggcgctgctgctggctcgggctggactcaggaagccggagtcgcaggaggcggcgccgttatcaggaccatgcggccgacgggtcatcacgtcgcgcatcgtgggtggagaggacgccgaactcgggcgttggccgtggcaggggagcctgcgcctgtgggattcccacgtatgcggagtgagcctgctcagccaccgctgggcactcacggcggcgcactgctttgaaacctatagtgaccttagtgatccctccgggtggatggtccagtttggccagctgacttccatgccatccttctggagcctgcaggcctactacacccgttacttcgtatcgaatatctatctgagccctcgctacctggggaattcaccctatgacattgccttggtgaagctgtctgcacctgtcacctacactaaacacatccagcccatctgtctccaggcctccacatttgagtttgagaaccggacagactgctgggtgactggctgggggtacatcaaagaggatgaggcactgccatctccccacaccctccaggaagttcaggtcgccatcataaacaactctatgtgcaaccacctcttcctcaagtacagtttccgcaaggacatctttggagacatggtttgtgctggcaatgcccaaggcgggaaggatgcctgcttcggtgactcaggtggacccttggcctgtaacaagaatggactgtggtatcagattggagtcgtgagctggggagtgggctgtggtcggcccaatcggcccggtgtctacaccaatatcagccaccactttgagtggatccagaagctgatggcccagagtggcatgtcccagccagacccctcctggccgctactctttttccctcttctctgggctctcccactcctggggccggtctgagcctacctgagcccatgcagcctggggccactgccaagtcaggccctggttctcttctgtcttgtttggtaataaacacattccagttgatgccttgcagggcattcttcaaaa

SEQ ID NO: 168097 - DNA, 945 bp, Artificial Sequence
  derived and/or modified sequence
atgggcgcccgaggcgctctgctgcttgcactcctgctagcccgagcaggattaaggaagcctgaatcgcaggaagcggcccctttatcaggaccctgcggaaggagagtcattacgtcccggattgttggaggcgaggatgccgagctgggccggtggccctggcagggctccctgcgcttatgggacagtcacgtttgtggagtttctcttctgtcacatcgatgggcattaacggccgctcactgttttgagacctatagtgacctgagtgatccttctggatggatggtccagtttggacagttgacaagtatgccctccttctggtcattgcaggcttactacacgaggtactttgtgtcaaatatatatctgagcccaagatacctgggaaactccccctatgacatagcactagtgaaactctccgccccagtgacgtacaccaaacacatacagccaatctgcctgcaagcatcaacttttgaattcgaaaaccggactgactgttgggtaaccggttggggctacataaaagaggacgaagctttaccgagccctcacacgctgcaggaagtgcaggttgctatcatcaataactcaatgtgcaatcatctcttccttaaatactcttttcgaaaggacattttcggagatatggtgtgtgccggaaatgctcaggggggaaaggacgcatgctttggtgatagtggtggtcctttagcctgcaacaagaacggtctctggtaccagatcggagtcgtctcctggggtgtaggatgtggcagaccaaatcgcccgggggtgtatactaacatcagccatcacttcgaatggattcagaagctcatggcccaatctggtatgtcccagcctgacccgtcttggcccttgttgttctttcctctgctgtgggctctgccactgttaggacctgtgtag

SEQ ID NO: 168098 - DNA, 945 bp, Artificial Sequence
  derived and/or modified sequence
atgggcgcaaggggtgcactcctcttggccctgctcctggctcgcgcgggactgaggaaacccgagtcacaagaggctgcccctctaagtggcccttgcggcagaagagtgataacttcccgtattgtgggcggagaggacgcggaactgggcagatggccttggcagggaagtctgagactatgggattcacacgtctgcggcgtgtccctcttaagtcatcgatgggctcttacggctgcacattgctttgaaacctacagcgatctttcagatccatcgggctggatggtacagttcggacaactgacaagcatgcccagcttttggtctctccaggcttactatacgcgttatttcgtgagtaacatctacctcagtccgcgctatctcggcaatagtccgtatgacatagcactggtcaagctttctgccccagtgacctataccaaacatattcaaccaatctgcctccaagcttctacctttgagttcgagaacagaacagactgctgggtgacaggatggggctatattaaggaagacgaagctctgcccagcccacacacccttcaagaagttcaagtggccataatcaacaactcaatgtgtaatcacttgttcctgaaatactcctttagaaaagatatttttggcgatatggtttgtgctggaaatgctcagggaggaaaagatgcctgtttcggtgacagcggggggccgttggcatgcaacaagaacgggttgtggtaccaaattggcgtggtctcctggggggttggctgcggtagacctaacaggcctggcgtatataccaatatttcacaccattttgagtggatccagaagttgatggcacaaagcggtatgagtcagccagatccatcatggcctctcctctttttccccctgttgtgggctcttcctcttttaggtcccgtctag

SEQ ID NO: 168099 - DNA, 945 bp, Artificial Sequence
  derived and/or modified sequence
atgggcgccagaggcgccctgctgctggccctgctgctggccagagccggcctgagaaagcccgagagccaggaggccgcccccctgagcggcccctgcggcagaagagtgatcaccagcagaatcgtgggcggcgaggacgccgagctgggcagatggccctggcagggcagcctgagactgtgggacagccacgtgtgcggcgtgagcctgctgagccacagatgggccctgaccgccgcccactgcttcgagacctacagcgacctgagcgaccccagcggctggatggtgcagttcggccagctgaccagcatgcccagcttctggagcctgcaggcctactacaccagatacttcgtgagcaacatctacctgagccccagatacctgggcaacagcccctacgacatcgccctggtgaagctgagcgcccccgtgacctacaccaagcacatccagcccatctgcctgcaggccagcaccttcgagttcgagaacagaaccgactgctgggtgaccggctggggctacatcaaggaggacgaggccctgcccagcccccacaccctgcaggaggtgcaggtggccatcatcaacaacagcatgtgcaaccacctgttcctgaagtacagcttcagaaaggacatcttcggcgacatggtgtgcgccggcaacgcccagggcggcaaggacgcctgcttcggcgacagcggcggccccctggcctgcaacaagaacggcctgtggtaccagatcggcgtggtgagctggggcgtgggctgcggcagacccaacagacccggcgtgtacaccaacatcagccaccacttcgagtggatccagaagctgatggcccagagcggcatgagccagcccgaccccagctggcccctgctgttcttccccctgctgtgggccctgcccctgctgggccccgtgtag

SEQ ID NO: 168100 - protein, 212 aa, Artificial Sequence
  derived and/or modified sequence
MNLFRFLGDLSHLLAIILLLLKIWKSRSCAGISGKSQVLFAVVFTARYLDLFTNYISLYNTCMKVVYIACSFTTVWLIYSKFKATYDGNHDTFRVEFLVVPTAILAFLVNHDFTPLEILWTFSIYLESVAILPQLFMVSKTGEAETITSHYLFALGVYRTLYLFNWIWRYHFEGFFDLIAIVAGLVQTVLYCDFFYLYITKVLKGKKLSLPA

SEQ ID NO: 168101 - DNA, 639 bp, Artificial Sequence
  derived and/or modified sequence
atgaacctgttcagattcctgggcgacctgagccacctgctggccatcatcctgctgctgctgaagatctggaagagcagaagctgcgccggcatcagcggcaagagccaggtgctgttcgccgtggtgttcaccgccagatacctggacctgttcaccaactacatcagcctgtacaacacctgcatgaaggtggtgtacatcgcctgcagcttcaccaccgtgtggctgatctacagcaagttcaaggccacctacgacggcaaccacgacaccttcagagtggagttcctggtggtgcccaccgccatcctggccttcctggtgaaccacgacttcacccccctggagatcctgtggaccttcagcatctacctggagagcgtggccatcctgccccagctgttcatggtgagcaagaccggcgaggccgagaccatcaccagccactacctgttcgccctgggcgtgtacagaaccctgtacctgttcaactggatctggagataccacttcgagggcttcttcgacctgatcgccatcgtggccggcctggtgcagaccgtgctgtactgcgacttcttctacctgtacatcaccaaggtgctgaagggcaagaagctgagcctgcccgcctag

SEQ ID NO: 168102 - DNA, 639 bp, Artificial Sequence
  derived and/or modified sequence
atgaacttatttagatttctgggggatttgagccacctcttagccatcatactgctccttttgaaaatttggaagagtcggtcttgcgctgggatctcaggaaagtcacaggtcctgtttgctgtggtctttaccgctcgatacctggacctctttaccaactacatcagcttgtataacacatgcatgaaagtggtctacatagcttgctcctttacgactgtttggctgatatactcaaaattcaaagcaacatacgatggtaaccatgacacctttcgtgtggaatttttggtggtgccaactgcaatactggccttccttgttaaccacgactttacaccgctagaaattctgtggacattttcaatctacctggaatccgtggcaatattgccccaactgtttatggtcagcaagaccggggaggctgagactataacttctcactacttgtttgcccttggagtgtaccggaccctttatctgttcaactggatttggcgctaccacttcgagggatttttcgacctcattgcgatagtggccggcttggtgcagaccgttctgtactgtgatttcttctacctctacataacaaaagtgctgaaaggcaaaaagctctccctgcccgcctag

SEQ ID NO: 168103 - DNA, 1557 bp, Artificial Sequence
  derived and/or modified sequence
ctcttcccggctccagctccgccgccagctccagcctttgctccccctcccaaagtcccctccccggagcggagcgcacctagggtccctcttccgtccccccagcccagctacccgttcagaccagcagcctcggggggcacccccccgccagcctgcctccctcccgctcagccctgccagggttccccagccatgaatctcttccgattcctgggagacctctcccacctcctcgccatcatcttgctactgctcaaaatctggaagtcccgctcgtgcgccggaatttcagggaagagccaggtcctgtttgctgtggtgttcactgcccgatatctggacctcttcaccaactacatctcactctacaacacgtgtatgaaggtggtctacatagcctgctccttcaccacggtctggttgatttatagcaagttcaaagctacttacgatgggaaccatgacacgttcagagtggagttcctggtcgttcccacagccattctggcgttcctggtcaatcatgacttcacccctctggagatcctctggaccttctccatctacctggagtcagtggccatcttgccgcagctgttcatggtgagcaagaccggcgaggcggagaccatcaccagccactacttgtttgcgctaggcgtttaccgcacgctctatctcttcaactggatctggcgctaccatttcgagggcttcttcgacctcatcgccattgtggcaggcctggtccagacagtcctctactgcgatttcttctacctctatatcaccaaagtcctaaaggggaagaagttgagtttgccggcatagccccggtcctctccatctctctcctcggcagcagcgggaggcagaggaaggcggcagaagatgaagagctttcccatccaggggtgacttttttaagaacccacctcttgtgctccccatcccgcctcctgccgggtttcagggggacagtggaggatccaggtcttggggagctcaggacttgggctgtttgtagttttttgccttttagacaagaaaaaaaaatctttccactctttagtttttgattctgatgactcgtttttcttctactctgtggccccaatttttataaagtgtttttgagtgtcctatgggccggggcagggtccaagatcttttcccttccccaggcccctcggctccctcccagatcccacccccagccccactggttgccaaacactaaatctgccgacacccatctgccccacctcctgccatggccatgaaccgcgacccccactaaatttctagattggggatagggagaaagggaggcccaggaaggtctcccctgattttttttcatagtaatttttttccccagagtttgaattttttggtcttctcctggttttttggcaaattaggggggcccggggctcaagtgcgggaagggggctggcccgaggatcccatggctctcacaccatgtttttgtacagaactgatggttgaatctttgttctcttgaaataaacagaagaaaatgaaaccttt

SEQ ID NO: 168104 - DNA, 639 bp, Artificial Sequence
  derived and/or modified sequence
atgaacctcttccgcttcctgggggacctgagccacctgctggccatcatcctgctgctgctgaagatctggaagagccgcagctgtgccggcatcagcggcaagagccaggtgctgtttgctgtggtgttcaccgcccgctacctggacctcttcaccaactacatcagcctgtacaacacctgcatgaaggtggtgtacatcgcctgcagcttcaccaccgtgtggctgatctacagcaagttcaaggccacctatgatggcaaccacgacaccttccgggtggagttcctggtggtgcccacagccatcctggccttcctggtgaaccacgacttcacccccctggagatcctgtggaccttcagcatctacctggagagcgtggccatcctgccccagctgttcatggtgtccaagacaggagaggccgagaccatcaccagccactacctgtttgccctgggcgtgtaccgcaccctgtacctgttcaactggatctggagataccactttgagggcttctttgacctgattgccatcgtggccggcctggtgcagacagtgctgtactgtgacttcttctacctgtacatcaccaaggtgctgaagggcaagaagctgagcctgcctgcctag

SEQ ID NO: 168105 - DNA, 639 bp, Artificial Sequence
  derived and/or modified sequence
atgaacctgttccggttcctgggcgacctgagccacctgctggccatcattttgctgctcctcaagatttggaaatcccggagttgtgccggtatttctggcaagagccaagtcctgtttgcagtggtattcacggcccggtatcttgacctctttactaactacataagtttatataatacctgcatgaaagtcgtctacatagcatgcagcttcacaaccgtgtggttaatttatagtaagtttaaggccacctatgatgggaaccacgacactttccgggttgaattcctagtcgttcccaccgccatcctggccttcctggtgaatcatgattttacacctctggagatcctatggacttttagtatttacttagagtcagtggccattctgccacagctcttcatggtctctaagacgggggaagctgagactattacttcacactacctcttcgcgctaggggtttacagaaccttatacctgttcaactggatctggaggtaccattttgagggattcttcgatctgatcgccatagtggctggcctggttcagaccgtcctgtactgtgacttcttctatctgtacataacaaaagtgctcaaggggaaaaaactctcgctgccagcctag

SEQ ID NO: 168106 - DNA, 639 bp, Artificial Sequence
  derived and/or modified sequence
atgaatctgtttcgattcctcggagatctgagccatctcctggcaattatactgctgctcctcaagatttggaagagtcgctcttgtgccggaatcagcgggaaaagccaggtgctcttcgctgtggtattcacggctcggtatctcgacttatttaccaactatatctctttgtacaacacctgcatgaaggtggtgtacatcgcctgctcttttactaccgtgtggctgatctacagcaagtttaaagctacctacgatggaaaccatgatacgttcagggtcgagttccttgtggttcctaccgcaattctggcttttctcgtcaatcatgatttcacgcctttggaaattctctggaccttttccatttacctggagtcagtggccattttgccccagttgtttatggtatctaagaccggggaagctgaaactatcacgtctcattatctgttcgctctgggtgtgtaccgcaccctgtacttattcaactggatctggcggtaccattttgagggcttctttgatctgattgcgattgtggcgggactggtacagaccgtgttatactgcgatttcttctatctctatatcacaaaggtcctgaaaggtaaaaaactgtcgctcccggcttag

SEQ ID NO: 168107 - protein, 418 aa, Artificial Sequence
  derived and/or modified sequence
MIHSLFLINSSGDIFLEKHWKSVVSRSVCDYFFEAQERATEAENVPPVIPTPHHYLLSVYRHKIFFVAVIQTEVPPLFVIEFLHRVVDTFQDYFGVCSEPVIKDNVVVVYEVLEEMLDNGFPLATESNILKELIKPPTILRTVVNTITGSTNVGDQLPTGQLSVVPWRRTGVKYTNNEAYFDVIEEIDAIIDKSGSTITAEIQGVIDACVKLTGMPDLTLSFMNPRLLDDVSFHPCVRFKRWESERILSFIPPDGNFRLLSYHVSAQNLVAIPVYVKHNISFRDSSSLGRFEITVGPKQTMGKTIEGVTVTSQMPKGVLNMSLTPSQGTHTFDPVTKMLSWDVGKINPQKLPSLKGTMSLQAGASKPDENPTINLQFKIQQLAISGLKVNRLDMYGEKYKPFKGIKYMTKAGKFQVRT

SEQ ID NO: 168108 - protein, 139 aa, Artificial Sequence
  derived and/or modified sequence
MIHSLFLINSSGDIFLEKHWKSVVSRSVCDYFFEAQERATEAENVPPVIPTPHHYLLSVYRHKIFFVAVIQTEVPPLFVIEFLHRVVDTFQDYFGVCSEPVIKDNVVVVYEVLEEMLDNGFPLATESNILKELIKPPTI

SEQ ID NO: 168109 - protein, 273 aa, Artificial Sequence
  derived and/or modified sequence
MIHSLFLINSSGDIFLEKHWKSVVSRSVCDYFFEAQERATEAENVPPVIPTPHHYLLSVYRHKIFFVAVIQTEVPPLFVIEFLHRVVDTFQDYFGVCSEPVIKDNVVVVYEVLEEMLDNGFPLATESNILKELIKPPTILRTVVNTITGSTNVGDQLPTGQLSVVPWRRTGVKYTNNEAYFDVIEEIDAIIDKSGSTITAEIQGVIDACVKLTGMPDLTLSFMNPRLLDDVSFHPCVRFKRWESERILSFIPPDGNFRLLSYHVSAQKCCLGM

SEQ ID NO: 168110 - DNA, 1257 bp, Artificial Sequence
  derived and/or modified sequence
atgatccacagcctgttcctgatcaacagcagcggcgacatcttcctggagaagcactggaagagcgtggtgagcagaagcgtgtgcgactacttcttcgaggcccaggagagagccaccgaggccgagaacgtgccccccgtgatccccaccccccaccactacctgctgagcgtgtacagacacaagatcttcttcgtggccgtgatccagaccgaggtgccccccctgttcgtgatcgagttcctgcacagagtggtggacaccttccaggactacttcggcgtgtgcagcgagcccgtgatcaaggacaacgtggtggtggtgtacgaggtgctggaggagatgctggacaacggcttccccctggccaccgagagcaacatcctgaaggagctgatcaagccccccaccatcctgagaaccgtggtgaacaccatcaccggcagcaccaacgtgggcgaccagctgcccaccggccagctgagcgtggtgccctggagaagaaccggcgtgaagtacaccaacaacgaggcctacttcgacgtgatcgaggagatcgacgccatcatcgacaagagcggcagcaccatcaccgccgagatccagggcgtgatcgacgcctgcgtgaagctgaccggcatgcccgacctgaccctgagcttcatgaaccccagactgctggacgacgtgagcttccacccctgcgtgagattcaagagatgggagagcgagagaatcctgagcttcatcccccccgacggcaacttcagactgctgagctaccacgtgagcgcccagaacctggtggccatccccgtgtacgtgaagcacaacatcagcttcagagacagcagcagcctgggcagattcgagatcaccgtgggccccaagcagaccatgggcaagaccatcgagggcgtgaccgtgaccagccagatgcccaagggcgtgctgaacatgagcctgacccccagccagggcacccacaccttcgaccccgtgaccaagatgctgagctgggacgtgggcaagatcaacccccagaagctgcccagcctgaagggcaccatgagcctgcaggccggcgccagcaagcccgacgagaaccccaccatcaacctgcagttcaagatccagcagctggccatcagcggcctgaaggtgaacagactggacatgtacggcgagaagtacaagcccttcaagggcatcaagtacatgaccaaggccggcaagttccaggtgagaacctag

SEQ ID NO: 168111 - DNA, 33 bp, Artificial Sequence
  derived and/or modified sequence
atgatccacagcctgttcctgatcaacagctag

SEQ ID NO: 168112 - DNA, 420 bp, Artificial Sequence
  derived and/or modified sequence
atgatccacagcctgttcctgatcaacagcagcggcgacatcttcctggagaagcactggaagagcgtggtgagcagaagcgtgtgcgactacttcttcgaggcccaggagagagccaccgaggccgagaacgtgccccccgtgatccccaccccccaccactacctgctgagcgtgtacagacacaagatcttcttcgtggccgtgatccagaccgaggtgccccccctgttcgtgatcgagttcctgcacagagtggtggacaccttccaggactacttcggcgtgtgcagcgagcccgtgatcaaggacaacgtggtggtggtgtacgaggtgctggaggagatgctggacaacggcttccccctggccaccgagagcaacatcctgaaggagctgatcaagccccccaccatctag

SEQ ID NO: 168113 - DNA, 822 bp, Artificial Sequence
  derived and/or modified sequence
atgatccacagcctgttcctgatcaacagcagcggcgacatcttcctggagaagcactggaagagcgtggtgagcagaagcgtgtgcgactacttcttcgaggcccaggagagagccaccgaggccgagaacgtgccccccgtgatccccaccccccaccactacctgctgagcgtgtacagacacaagatcttcttcgtggccgtgatccagaccgaggtgccccccctgttcgtgatcgagttcctgcacagagtggtggacaccttccaggactacttcggcgtgtgcagcgagcccgtgatcaaggacaacgtggtggtggtgtacgaggtgctggaggagatgctggacaacggcttccccctggccaccgagagcaacatcctgaaggagctgatcaagccccccaccatcctgagaaccgtggtgaacaccatcaccggcagcaccaacgtgggcgaccagctgcccaccggccagctgagcgtggtgccctggagaagaaccggcgtgaagtacaccaacaacgaggcctacttcgacgtgatcgaggagatcgacgccatcatcgacaagagcggcagcaccatcaccgccgagatccagggcgtgatcgacgcctgcgtgaagctgaccggcatgcccgacctgaccctgagcttcatgaaccccagactgctggacgacgtgagcttccacccctgcgtgagattcaagagatgggagagcgagagaatcctgagcttcatcccccccgacggcaacttcagactgctgagctaccacgtgagcgcccagaagtgctgcctgggcatgtag

SEQ ID NO: 168114 - DNA, 1257 bp, Artificial Sequence
  derived and/or modified sequence
atgatccactcactgttccttatcaattctagtggcgatatttttctggagaagcattggaaatctgtggtgtctaggagcgtgtgcgattacttttttgaggcccaggagagagccactgaagctgaaaatgtgccccctgtgatccctactccacaccactatctgttgagtgtataccgccacaaaattttttttgtggctgtgatacaaaccgaggtgccaccactgtttgttatcgaattcctgcaccgggtggttgatactttccaggactacttcggagtttgttctgagcccgtgattaaggacaatgtggtcgtggtctacgaggtcctcgaggaaatgctggacaacggatttcccttagcaaccgagtccaacatcttgaaagaattgattaagccccctaccattctccggaccgtcgtcaatactatcactggaagtactaatgtgggggatcagctgcccaccggccagctcagcgtggtcccttggcgaagaaccggagtgaaatataccaacaatgaggcttatttcgacgtgatcgaggagatcgatgcaattatcgataaaagcggttctactatcacggccgagatacaaggcgttatagacgcttgtgttaaactcacaggtatgccggatctcacactgagtttcatgaatccacgactcctggatgacgtaagctttcacccgtgcgttcgcttcaaacgctgggagtctgagagaattctctcatttatcccgcctgatgggaatttcaggctcctgtcataccacgtaagtgcacagaacttggtggcgatcccggtgtatgtgaaacacaacatttcctttagggatagctcttcacttggtaggttcgagatcaccgtgggccccaagcaaacgatgggcaagactatcgagggggttaccgtcactagtcaaatgccgaaaggggtgctgaacatgagcttgaccccatctcaggggacccataccttcgaccccgtcaccaagatgctgagttgggacgtcggtaaaatcaacccacagaaactgccctccctgaaaggcaccatgtctctgcaggctggtgcaagcaagcctgacgaaaatcctacaattaatttgcagtttaaaatacagcaactggctatttccgggctgaaggtcaatagactggatatgtacggggaaaaatataagccttttaagggtataaagtatatgactaaggctgggaaatttcaggttaggacgtag

SEQ ID NO: 168115 - DNA, 1257 bp, Artificial Sequence
  derived and/or modified sequence
atgattcacagtttattcctgataaattcatccggagacatctttctggagaagcactggaagagcgtggtttctcgatccgtttgcgactatttcttcgaagcacaggagcgtgcaacggaagctgagaatgtgccacccgttattcccacgccccaccactatctgttgtccgtttatcggcacaaaatcttcttcgtcgctgtcatccagacagaggtcccgccacttttcgttatcgagtttctgcacagggtggtcgacacattccaggattatttcggagtgtgcagcgaacccgtcatcaaggataacgtcgtggtggtatatgaggttttggaagaaatgctcgataatggattccctctcgccactgaatctaacattcttaaggagctgattaaacctccaacaattcttcgcaccgtagtgaacactataaccggtagcacgaacgtcggggatcaactgcccacagggcagctgtcagtggttccctggcggagaacaggggtgaagtacacaaacaatgaagcttatttcgacgtcattgaggagatcgacgcaattatcgacaagagtggatctacaattactgccgagattcagggggtcatcgacgcgtgtgtcaagctgacaggcatgcccgacctgacactttcctttatgaacccccggctcttggacgatgtgtcattccacccttgcgtccgcttcaagcgctgggagtccgagcggatcctgtctttcattccacctgatggcaatttccgactcctaagctaccacgtatccgctcagaatttggttgccattccggtctacgtgaaacataatatctccttcagagattccagttctctaggaaggttcgaaataacagtcggcccaaaacaaaccatgggcaagactatagagggcgtcactgtcactagtcagatgcccaaaggggttctgaatatgtcacttacaccaagccaaggtacccatacattcgaccctgttaccaaaatgctctcttgggacgtagggaaaatcaacccccagaagttacctagcctgaaggggacaatgtctttgcaagctggcgcctctaaacccgatgagaatccaaccattaacttgcagttcaagatccagcagctcgccatctcagggctcaaagtgaaccggctggatatgtatggtgagaaatataagccatttaagggaataaagtacatgacaaaggcagggaaatttcaggtccgcacatag

SEQ ID NO: 168116 - DNA, 33 bp, Artificial Sequence
  derived and/or modified sequence
atgattcacagtctgttcttgattaatagctag

SEQ ID NO: 168117 - DNA, 1257 bp, Artificial Sequence
  derived and/or modified sequence
atgatccactctcttttcctgattaacagcagcggggatatcttccttgagaagcactggaaatcagtcgtatctcgatccgtctgcgactacttcttcgaggcgcaggagcgtgccactgaggcagaaaacgtaccccccgtgatccccaccccacaccattacctcctgtctgtctataggcacaaaatttttttcgtggctgtcatacagacagaggtgccaccgctgttcgtgattgaatttctccacagggtggtcgacacttttcaggattattttggggtgtgctctgaacctgtgatcaaagacaatgtggtggtcgtgtatgaggtcctggaggaaatgttagataacggctttcccttggcaactgaatcaaatattcttaaagaactaatcaagcctcctactattttgaggacggttgtgaacaccatcaccgggtccacaaatgtgggggaccagctccccactggacagttatccgttgttccctggcgaagaactggagttaagtacacgaacaacgaggcttactttgatgttattgaggagatcgacgccatcatcgacaaatccgggtcaaccatcacagcagaaattcagggtgtgatcgatgcttgtgtgaaacttaccggcatgcctgatcttactctgagtttcatgaatccaagactactggatgacgtgagtttccacccatgcgttcgctttaaaaggtgggagtccgagagaatactctcatttattcccccagatggaaacttcaggctgttatcctatcatgtatcagcccagaacctggtcgctatcccagtgtacgtcaaacacaacatttcttttagagactcctccagcctgggcagattcgaaattaccgtagggcccaagcagacaatggggaagacaattgagggtgtcaccgtaacatctcagatgcctaaaggtgtgctcaatatgtcattgactccttctcagggaactcacacattcgatccagtaactaagatgcttagctgggatgtgggtaagatcaatcctcagaagttaccctcgctgaagggcacaatgtccctgcaggccggagcctccaaacccgacgaaaatcccactatcaacctccagtttaagattcagcaactggccatttctggcctcaaagtgaatcggctcgacatgtacggcgagaagtataaacctttcaaaggcataaagtatatgactaaggctggcaagtttcaggtgcgcacatag

SEQ ID NO: 168118 - DNA, 420 bp, Artificial Sequence
  derived and/or modified sequence
atgatacactctctgttcctgatcaactccagtggggacatattcctcgagaaacactggaagtcggtggtttccagatctgtgtgcgactacttcttcgaagctcaggagagagccacagaagcggaaaacgttcccccagtaatcccgactccccaccactacctcctgtctgtttatcgccacaaaatcttctttgttgccgtcatccagacagaggtgccccccctttttgtgattgaattccttcatagggtggtggacacattccaggactacttcggtgtctgctctgaacccgtgattaaggataatgtggtggttgtatacgaggttcttgaggaaatgctcgataacggtttccctttggccacggagtccaatattctgaaagagctcattaagccccccacaatctag

SEQ ID NO: 168119 - DNA, 822 bp, Artificial Sequence
  derived and/or modified sequence
atgattcacagtctctttctgattaatagtagtggagacatcttccttgagaagcactggaaatccgtcgtcagcaggtccgtctgtgattacttttttgaggctcaagagagggctacagaggcggagaacgtgcccccagtcatcccgacccctcaccattacctcttaagtgtgtatcggcacaagatattctttgtggccgttatccagacagaggtaccaccattgttcgttattgagttcctgcaccgcgtggtggatacctttcaagattactttggtgtttgttccgaaccggttattaaggacaatgtcgtagtcgtttacgaagtgttggaggagatgctcgacaatgggttccctctagctacggagtccaacattctgaaggagctgattaagcctccaaccatactgcgcaccgttgtgaacacaataaccggaagtactaacgtcggcgatcaacttcctaccggtcagctgagcgtggtgccttggagaaggaccggcgtgaaatacaccaataatgaagcatacttcgatgtgattgaggaaatcgatgccatcatagacaaaagcggcagtaccattacagcggaaatccagggcgtcattgatgcttgcgtgaaactgactggaatgcccgatctgactctgagcttcatgaatcccagattattggacgacgtgtctttccatccttgcgtcagatttaaacgctgggagagcgaacgcatcctttccttcatccctcccgatggtaacttcaggctcctcagttaccacgtgtccgcccagaagtgttgtctggggatgtag

SEQ ID NO: 168120 - DNA, 3661 bp, Artificial Sequence
  derived and/or modified sequence
atacccaatcagcggccttcaggcgcagatcgtgggcggagcggtagccaggccgcgggccggccaatcagcgggcgagcggctgcctcagcgcgcgcggcgggcggggcggggcctgtccgcgcctaggagcagtgggcgctgagagcagcaaggccagggagggccttttggttgaatggaactgaatatcgctgcttttgtttttagagttgaaaacttacagagtcctgaggctttcagactgaaaaaggctttcttctgtcactgacaatcgccaccatgatccatagtcttttcttgatcaactcctctggagacattttcctggagaaacattggaaaagtgtggtcagccgttctgtttgtgattacttttttgaggcgcaagagagagctactgaggcagaaaatgtgcctccggttatccctacccctcaccactatctcttaagtgtttaccgccacaagatcttttttgtggccgtgatccagacggaggtcccccctctgtttgtcattgagtttcttcaccgagtggtggacacatttcaggattattttggagtctgttcagagccagtgatcaaagacaatgtagttgtggtttatgaggtattggaagagatgcttgacaatggttttccattggctaccgagtcgaacattcttaaagaactcataaagcctcctaccatccttcgaacggttgtcaacaccatcacaggaagcacgaatgtgggtgaccagcttcccactgggcagctgtcagtggtgccttggcgacggactggggtgaaatataccaacaatgaggcctattttgatgtgattgaagagattgatgcaattattgataaatcaggctccacaattactgctgagatccagggggtgattgatgcctgtgtcaagctgactggcatgccagaccttacactttccttcatgaaccctaggttgttggatgatgtcagcttccatccttgtgttcgtttcaaacgctgggaatctgagcgcatcctctccttcatccctcctgatggaaacttccgcctgctgtcttaccatgtcagtgcacagaatctggttgcaatcccagtgtatgtcaaacataacatcagtttccgggacagtagttcccttggacgctttgaaataacggtgggacccaagcagacgatggggaagaccattgagggagtgactgtcaccagccagatgcccaagggggtcctgaacatgagccttactccatcacaggggacacacacattcgacccagtcacaaagatgctgtcttgggatgtaggaaaaataaatccacaaaagctaccaagtttgaaggggaccatgagtcttcaggctggagcttccaaaccagatgaaaaccccacaattaacctgcagtttaagatccagcagctggccatttctggactcaaggtgaatcgtctggatatgtatggagaaaagtacaaaccctttaagggcataaaatacatgaccaaagctgggaagttccaagttcgaacctgaagggagcatttgctgagggaatagtcttgcacattttttcatttcttacttgtctaaaagtaaaaaaaaatatcagcctgtctcctaggtcagtcccctcctggacccacccgctcccttttttccttagccttcagtgccatggaactaatcaagggaggaaaaggtcaccagggagaactggacagaactgaaacacagcaacaccagttctcaaggacaaggtgtgtgatgggggtaggaagcttggtgcttatgtaaccattttaaacgtggtttctataggaaagaccaacatttgtttagcttgcttggctttaattatctaaagccaatgaaagacttctttgttgattttttaagatagaaagattaaaaagaaagaaagatgggaagaaaatgaatgtcagtcaaggaaaggccacttaaggatctgctctatgaaggagaagaaagaggaaaaagaagtaaaggagttaggaggagacacttaaatgaaagattggcaagaaaagcagtcggactctaccttaaggagggatgggaaggaaagagttgagttggtttctttctgattcctctactcatgtagaaaacacttgtacttctggaaatggactggagactttttaaatttgagtccactattgacatggaaaccccagtggaatcagattttccctcaaagaccatgatggtatcggactagttttcagacactgcctgttgctgtccatcagcacttggtctcttatcttcagtgagaaggtgacccgccttcttcccatggtggctgcctaaagtgcttcttttctaacccaaaacagttctactcacttccttttacagaattcaccggccattttcctgttacctgatccttctacaggatttttaaaaagtaagagagtttcagagaagccgatcccataatccccagtgcagccagggtttgtgtgtcatcgtactggagtagagggccgactcttcccatgaaggtgagcacagctgtgagtgagtgagctcatatctccatttgtcagtgctggactggtaccagatcgtaaccttcccgttggtcggaaacttttccatctgtcgccctagaaaaagagaaagcttaccatcgagggtgtggttgatccttgaagctgcttggtaaagttatcatttcctcagtcttttcttttgtactcctatcatgtattcattaatatctaccagtcccttttcattctaagacaaaacatttctcctaaatctctgaataaaatcagtgctgtaggaagatggactgtgttgatcatgggtgtaagcaacccagtttaagaaacatggcaactaaagggatacctcaggctttctttcccagtgggtcatttttgtcctagttcagtgtgtctgttactatttaaatatttatacaaaagggtttttgtttatagcttaaggaatgatactgtgctctgcttggtgcatggagaaaaaggaagacccgtactctccacaccctagagcttttctctaaatattgtgcaaagtttttgctagttttatcttctgactttgggactagtttttgctgcagagttgtgttgctttgtgattttcctctgggatagtgtactgtacacaaccagatgtgttccacactccgtgactccgcagtttgtcctggagtgacatacacatccaccatggaaagggaagcatctctgcctgtggattctcaagtacttggaagcacctctcctgaggaacctacaggattctaaggtttcctaggtcactgaacaactaatcttggtccctgaatatttctaggtttgtaagtgcagcagttttatttcctctagaactcatcctgtttcaagggaagtacctaagaagatatagagtgtttctagggtaagggacctgcaggtgtaagcatagatgaaataactgtcctgtcacatgtgcagcaggccatggagtgtagcgggcatcgctgccgccattcctgcagcatcaccataagcagtgcagggtgtctccatcgagctgtttggttccatgtgtgtttaacatgtgcagaagtagcttctctgtttaagtttaataaagttgagtttcaccagtc

SEQ ID NO: 168121 - DNA, 3545 bp, Artificial Sequence
  derived and/or modified sequence
aatcagcgggcgagcggctgcctcagcgcgcgcggcgggcggggcggggcctgtccgcgcctaggagcagtgggcgctgagagcagcaaggccagagttgaaaacttacagagtcctgaggctttcagactgaaaaaggctttcttctgtcactgacaatcgccaccatgatccatagtcttttcttgatcaactcctctggagacattttcctggagaaacattggaaaagtgtggtcagccgttctgtttgtgattacttttttgaggcgcaagagagagctactgaggcagaaaatgtgcctccggttatccctacccctcaccactatctcttaagtgtttaccgccacaagatcttttttgtggccgtgatccagacggaggtcccccctctgtttgtcattgagtttcttcaccgagtggtggacacatttcaggattattttggagtctgttcagagccagtgatcaaagacaatgtagttgtggtttatgaggtattggaagagatgcttgacaatggttttccattggctaccgagtcgaacattcttaaagaactcataaagcctcctaccatccttcgaacggttgtcaacaccatcacaggaagcacgaatgtgggtgaccagcttcccactgggcagctgtcagtggtgccttggcgacggactggggtgaaatataccaacaatgaggcctattttgatgtgattgaagagattgatgcaattattgataaatcaggctccacaattactgctgagatccagggggtgattgatgcctgtgtcaagctgactggcatgccagaccttacactttccttcatgaaccctaggttgttggatgatgtcagcttccatccttgtgttcgtttcaaacgctgggaatctgagcgcatcctctccttcatccctcctgatggaaacttccgcctgctgtcttaccatgtcagtgcacagaatctggttgcaatcccagtgtatgtcaaacataacatcagtttccgggacagtagttcccttggacgctttgaaataacggtgggacccaagcagacgatggggaagaccattgagggagtgactgtcaccagccagatgcccaagggggtcctgaacatgagccttactccatcacaggggacacacacattcgacccagtcacaaagatgctgtcttgggatgtaggaaaaataaatccacaaaagctaccaagtttgaaggggaccatgagtcttcaggctggagcttccaaaccagatgaaaaccccacaattaacctgcagtttaagatccagcagctggccatttctggactcaaggtgaatcgtctggatatgtatggagaaaagtacaaaccctttaagggcataaaatacatgaccaaagctgggaagttccaagttcgaacctgaagggagcatttgctgagggaatagtcttgcacattttttcatttcttacttgtctaaaagtaaaaaaaaatatcagcctgtctcctaggtcagtcccctcctggacccacccgctcccttttttccttagccttcagtgccatggaactaatcaagggaggaaaaggtcaccagggagaactggacagaactgaaacacagcaacaccagttctcaaggacaaggtgtgtgatgggggtaggaagcttggtgcttatgtaaccattttaaacgtggtttctataggaaagaccaacatttgtttagcttgcttggctttaattatctaaagccaatgaaagacttctttgttgattttttaagatagaaagattaaaaagaaagaaagatgggaagaaaatgaatgtcagtcaaggaaaggccacttaaggatctgctctatgaaggagaagaaagaggaaaaagaagtaaaggagttaggaggagacacttaaatgaaagattggcaagaaaagcagtcggactctaccttaaggagggatgggaaggaaagagttgagttggtttctttctgattcctctactcatgtagaaaacacttgtacttctggaaatggactggagactttttaaatttgagtccactattgacatggaaaccccagtggaatcagattttccctcaaagaccatgatggtatcggactagttttcagacactgcctgttgctgtccatcagcacttggtctcttatcttcagtgagaaggtgacccgccttcttcccatggtggctgcctaaagtgcttcttttctaacccaaaacagttctactcacttccttttacagaattcaccggccattttcctgttacctgatccttctacaggatttttaaaaagtaagagagtttcagagaagccgatcccataatccccagtgcagccagggtttgtgtgtcatcgtactggagtagagggccgactcttcccatgaaggtgagcacagctgtgagtgagtgagctcatatctccatttgtcagtgctggactggtaccagatcgtaaccttcccgttggtcggaaacttttccatctgtcgccctagaaaaagagaaagcttaccatcgagggtgtggttgatccttgaagctgcttggtaaagttatcatttcctcagtcttttcttttgtactcctatcatgtattcattaatatctaccagtcccttttcattctaagacaaaacatttctcctaaatctctgaataaaatcagtgctgtaggaagatggactgtgttgatcatgggtgtaagcaacccagtttaagaaacatggcaactaaagggatacctcaggctttctttcccagtgggtcatttttgtcctagttcagtgtgtctgttactatttaaatatttatacaaaagggtttttgtttatagcttaaggaatgatactgtgctctgcttggtgcatggagaaaaaggaagacccgtactctccacaccctagagcttttctctaaatattgtgcaaagtttttgctagttttatcttctgactttgggactagtttttgctgcagagttgtgttgctttgtgattttcctctgggatagtgtactgtacacaaccagatgtgttccacactccgtgactccgcagtttgtcctggagtgacatacacatccaccatggaaagggaagcatctctgcctgtggattctcaagtacttggaagcacctctcctgaggaacctacaggattctaaggtttcctaggtcactgaacaactaatcttggtccctgaatatttctaggtttgtaagtgcagcagttttatttcctctagaactcatcctgtttcaagggaagtacctaagaagatatagagtgtttctagggtaagggacctgcaggtgtaagcatagatgaaataactgtcctgtcacatgtgcagcaggccatggagtgtagcgggcatcgctgccgccattcctgcagcatcaccataagcagtgcagggtgtctccatcgagctgtttggttccatgtgtgtttaacatgtgcagaagtagcttctctgtttaagtttaataaagttgagtttcaccagt

SEQ ID NO: 168122 - DNA, 3669 bp, Artificial Sequence
  derived and/or modified sequence
atacccaatcagcggccttcaggcgcagatcgtgggcggagcggtagccaggccgcgggccggccaatcagcgggcgagcggctgcctcagcgcgcgcggcgggcggggcggggcctgtccgcgcctaggagcagtgggcgctgagagcagcaaggccagggagggctatcttcaggctcatgcaggaggggaagattgggcctggtcttgaaagatggagttgaaaacttacagagtcctgaggctttcagactgaaaaaggctttcttctgtcactgacaatcgccaccatgatccatagtcttttcttgatcaactcctctggagacattttcctggagaaacattggaaaagtgtggtcagccgttctgtttgtgattacttttttgaggcgcaagagagagctactgaggcagaaaatgtgcctccggttatccctacccctcaccactatctcttaagtgtttaccgccacaagatcttttttgtggccgtgatccagacggaggtcccccctctgtttgtcattgagtttcttcaccgagtggtggacacatttcaggattattttggagtctgttcagagccagtgatcaaagacaatgtagttgtggtttatgaggtattggaagagatgcttgacaatggttttccattggctaccgagtcgaacattcttaaagaactcataaagcctcctaccatccttcgaacggttgtcaacaccatcacaggaagcacgaatgtgggtgaccagcttcccactgggcagctgtcagtggtgccttggcgacggactggggtgaaatataccaacaatgaggcctattttgatgtgattgaagagattgatgcaattattgataaatcaggctccacaattactgctgagatccagggggtgattgatgcctgtgtcaagctgactggcatgccagaccttacactttccttcatgaaccctaggttgttggatgatgtcagcttccatccttgtgttcgtttcaaacgctgggaatctgagcgcatcctctccttcatccctcctgatggaaacttccgcctgctgtcttaccatgtcagtgcacagaatctggttgcaatcccagtgtatgtcaaacataacatcagtttccgggacagtagttcccttggacgctttgaaataacggtgggacccaagcagacgatggggaagaccattgagggagtgactgtcaccagccagatgcccaagggggtcctgaacatgagccttactccatcacaggggacacacacattcgacccagtcacaaagatgctgtcttgggatgtaggaaaaataaatccacaaaagctaccaagtttgaaggggaccatgagtcttcaggctggagcttccaaaccagatgaaaaccccacaattaacctgcagtttaagatccagcagctggccatttctggactcaaggtgaatcgtctggatatgtatggagaaaagtacaaaccctttaagggcataaaatacatgaccaaagctgggaagttccaagttcgaacctgaagggagcatttgctgagggaatagtcttgcacattttttcatttcttacttgtctaaaagtaaaaaaaaatatcagcctgtctcctaggtcagtcccctcctggacccacccgctcccttttttccttagccttcagtgccatggaactaatcaagggaggaaaaggtcaccagggagaactggacagaactgaaacacagcaacaccagttctcaaggacaaggtgtgtgatgggggtaggaagcttggtgcttatgtaaccattttaaacgtggtttctataggaaagaccaacatttgtttagcttgcttggctttaattatctaaagccaatgaaagacttctttgttgattttttaagatagaaagattaaaaagaaagaaagatgggaagaaaatgaatgtcagtcaaggaaaggccacttaaggatctgctctatgaaggagaagaaagaggaaaaagaagtaaaggagttaggaggagacacttaaatgaaagattggcaagaaaagcagtcggactctaccttaaggagggatgggaaggaaagagttgagttggtttctttctgattcctctactcatgtagaaaacacttgtacttctggaaatggactggagactttttaaatttgagtccactattgacatggaaaccccagtggaatcagattttccctcaaagaccatgatggtatcggactagttttcagacactgcctgttgctgtccatcagcacttggtctcttatcttcagtgagaaggtgacccgccttcttcccatggtggctgcctaaagtgcttcttttctaacccaaaacagttctactcacttccttttacagaattcaccggccattttcctgttacctgatccttctacaggatttttaaaaagtaagagagtttcagagaagccgatcccataatccccagtgcagccagggtttgtgtgtcatcgtactggagtagagggccgactcttcccatgaaggtgagcacagctgtgagtgagtgagctcatatctccatttgtcagtgctggactggtaccagatcgtaaccttcccgttggtcggaaacttttccatctgtcgccctagaaaaagagaaagcttaccatcgagggtgtggttgatccttgaagctgcttggtaaagttatcatttcctcagtcttttcttttgtactcctatcatgtattcattaatatctaccagtcccttttcattctaagacaaaacatttctcctaaatctctgaataaaatcagtgctgtaggaagatggactgtgttgatcatgggtgtaagcaacccagtttaagaaacatggcaactaaagggatacctcaggctttctttcccagtgggtcatttttgtcctagttcagtgtgtctgttactatttaaatatttatacaaaagggtttttgtttatagcttaaggaatgatactgtgctctgcttggtgcatggagaaaaaggaagacccgtactctccacaccctagagcttttctctaaatattgtgcaaagtttttgctagttttatcttctgactttgggactagtttttgctgcagagttgtgttgctttgtgattttcctctgggatagtgtactgtacacaaccagatgtgttccacactccgtgactccgcagtttgtcctggagtgacatacacatccaccatggaaagggaagcatctctgcctgtggattctcaagtacttggaagcacctctcctgaggaacctacaggattctaaggtttcctaggtcactgaacaactaatcttggtccctgaatatttctaggtttgtaagtgcagcagttttatttcctctagaactcatcctgtttcaagggaagtacctaagaagatatagagtgtttctagggtaagggacctgcaggtgtaagcatagatgaaataactgtcctgtcacatgtgcagcaggccatggagtgtagcgggcatcgctgccgccattcctgcagcatcaccataagcagtgcagggtgtctccatcgagctgtttggttccatgtgtgtttaacatgtgcagaagtagcttctctgtttaagtttaataaagttgagtttcaccagt

SEQ ID NO: 168123 - DNA, 574 bp, Artificial Sequence
  derived and/or modified sequence
aggagtgggggcgcgcgagggtcggggcggggtctcaggatgcagccgggcggcctctcagggctgcggacgcggcggggagagagttgaaaacttacagagtcctgaggctttcagactgaaaaaggctttcttctgtcactgacaatcgccaccatgatccatagtcttttcttgatcaactcctctggagacattttcctggagaaacattggaaaagtgtggtcagccgttctgtttgtgattacttttttgaggcgcaagagagagctactgaggcagaaaatgtgcctccggttatccctacccctcaccactatctcttaagtgtttaccgccacaagatcttttttgtggccgtgatccagacggaggtcccccctctgtttgtcattgagtttcttcaccgagtggtggacacatttcaggattattttggagtctgttcagagccagtgatcaaagacaatgtagttgtggtttatgaggtattggaagagatgcttgacaatggttttccattggctaccgagtcgaacattcttaaagaactcataaagcctcctaccatcc

SEQ ID NO: 168124 - DNA, 1212 bp, Artificial Sequence
  derived and/or modified sequence
cgctgagagcagcaaggccagagttgaaaacttacagagtcctgaggctttcagactgaaaaaggctttcttctgtcactgacaatcgccaccatgatccatagtcttttcttgatcaactcctctggagacattttcctggagaaacattggaaaagtgtggtcagccgttctgtttgtgattacttttttgaggcgcaagagagagctactgaggcagaaaatgtgcctccggttatccctacccctcaccactatctcttaagtgtttaccgccacaagatcttttttgtggccgtgatccagacggaggtcccccctctgtttgtcattgagtttcttcaccgagtggtggacacatttcaggattattttggagtctgttcagagccagtgatcaaagacaatgtagttgtggtttatgaggtattggaagagatgcttgacaatggttttccattggctaccgagtcgaacattcttaaagaactcataaagcctcctaccatccttcgaacggttgtcaacaccatcacaggaagcacgaatgtgggtgaccagcttcccactgggcagctgtcagtggtgccttggcgacggactggggtgaaatataccaacaatgaggcctattttgatgtgattgaagagattgatgcaattattgataaatcaggctccacaattactgctgagatccagggggtgattgatgcctgtgtcaagctgactggcatgccagaccttacactttccttcatgaaccctaggttgttggatgatgtcagcttccatccttgtgttcgtttcaaacgctgggaatctgagcgcatcctctccttcatccctcctgatggaaacttccgcctgctgtcttaccatgtcagtgcacagaaatgctgtcttgggatgtaggaaaaataaatccacaaaagctaccaagtttgaaggggaccatgagtcttcaggctggagcttccaaaccagatgaaaaccccacaattaacctgcagtttaagatccagcagctggccatttctggactcaaggtgaatcgtctggatatgtatggagaaaagtacaaaccctttaagggcataaaatacatgaccaaagctgggaagttccaagttcgaacctgaagggagcatttgctgagggaatagtcttgcacattttttcatttcttacttgtctaaaagtaaaaaaaaa

SEQ ID NO: 168125 - DNA, 1257 bp, Artificial Sequence
  derived and/or modified sequence
atgatccacagcctcttcctgatcaacagcagcggggacatcttcctggagaagcactggaagtctgtggtgagccgctctgtgtgtgactacttctttgaggcccaggagcgggccacagaagcagaaaatgtgccccctgtgatccccaccccccaccactacctgctgtctgtgtaccgccacaagatcttctttgtggccgtcatccagacagaggtgcccccactcttcgtcatcgagttcctgcaccgggtggtggacaccttccaggactactttggagtgtgcagcgagcccgtcatcaaggacaacgtggtggtggtgtatgaggtgctggaggagatgctggacaatggcttccccctggccacagagagcaacatcctgaaggagctgatcaagccacccaccatcctgaggacagtggtgaacaccatcaccggcagcaccaacgtgggggaccagctgcccaccggccagctgtctgtggtgccctggaggagaactggagtgaagtacaccaacaatgaggcctactttgatgtgattgaggagattgatgccatcatcgacaagagcggcagcaccatcacagctgagatccagggcgtgattgatgcctgtgtgaagctgaccggcatgccagacctgaccctgtccttcatgaacccccggctgctggatgatgtgtccttccacccctgtgtgcgcttcaagcgctgggagagcgagcgcatcctgtccttcatccccccagatggcaacttccggctgctgagctaccacgtgtctgcccagaacctggtggccatccctgtgtatgtgaagcacaacatctccttccgggacagcagcagcctgggccgctttgagatcaccgtgggccccaagcagaccatgggcaagaccattgaaggagtgacagtgaccagccagatgcccaagggcgtgctgaacatgagcctgacccccagccagggcacccacacctttgatcctgtgaccaagatgctgtcctgggatgtgggcaagatcaacccccagaagctgcccagcctgaagggcaccatgagcctgcaggccggggccagcaagccagatgagaaccccaccatcaacctgcagttcaagatccagcagctggccatcagcggcctgaaggtgaaccggctggacatgtatggagagaagtacaagcccttcaagggcatcaagtacatgaccaaggccggcaagttccaggtgaggacatag

SEQ ID NO: 168126 - DNA, 33 bp, Artificial Sequence
  derived and/or modified sequence
atgatccacagcctcttcctgatcaacagctag

SEQ ID NO: 168127 - DNA, 420 bp, Artificial Sequence
  derived and/or modified sequence
atgatccacagcctcttcctgatcaacagcagcggggacatcttcctggagaagcactggaagtctgtggtgagccgctctgtgtgtgactacttctttgaggcccaggagcgggccacagaagcagaaaatgtgccccctgtgatccccaccccccaccactacctgctgtctgtgtaccgccacaagatcttctttgtggccgtcatccagacagaggtgcccccactcttcgtcatcgagttcctgcaccgggtggtggacaccttccaggactactttggagtgtgcagcgagcccgtcatcaaggacaacgtggtggtggtgtatgaggtgctggaggagatgctggacaatggcttccccctggccacagagagcaacatcctgaaggagctgatcaagccacccaccatctag

SEQ ID NO: 168128 - DNA, 822 bp, Artificial Sequence
  derived and/or modified sequence
atgatccacagcctcttcctgatcaacagcagcggggacatcttcctggagaagcactggaagtctgtggtgagccgctctgtgtgtgactacttctttgaggcccaggagcgggccacagaagcagaaaatgtgccccctgtgatccccaccccccaccactacctgctgtctgtgtaccgccacaagatcttctttgtggccgtcatccagacagaggtgcccccactcttcgtcatcgagttcctgcaccgggtggtggacaccttccaggactactttggagtgtgcagcgagcccgtcatcaaggacaacgtggtggtggtgtatgaggtgctggaggagatgctggacaatggcttccccctggccacagagagcaacatcctgaaggagctgatcaagccacccaccatcctgaggacagtggtgaacaccatcaccggcagcaccaacgtgggggaccagctgcccaccggccagctgtctgtggtgccctggaggagaactggagtgaagtacaccaacaatgaggcctactttgatgtgattgaggagattgatgccatcatcgacaagagcggcagcaccatcacagctgagatccagggcgtgattgatgcctgtgtgaagctgaccggcatgccagacctgaccctgtccttcatgaacccccggctgctggatgatgtgtccttccacccctgtgtgcgcttcaagcgctgggagagcgagcgcatcctgtccttcatccccccagatggcaacttccggctgctgagctaccacgtgtctgcccagaagtgctgcctgggcatgtag

SEQ ID NO: 168129 - DNA, 1257 bp, Artificial Sequence
  derived and/or modified sequence
atgatccacagcctgttcctgatcaacagcagcggcgacatcttcttggagaagcattggaaaagtgttgtgtccaggagtgtctgtgattacttctttgaagcccaggagcgtgccactgaggccgaaaatgtaccaccagtgatccctaccccccatcactacctcctttcagtttaccgccacaagattttttttgtggcggtgatccagacggaagtgcctccactgtttgtgatcgaatttctccatagggtcgtggacaccttccaggattatttcggcgtttgctcagaaccagtcattaaagacaatgtggtggtggtgtacgaggtgctggaagagatgttggacaatggcttccctctcgctacagaaagcaatattctcaaagaactgatcaagccccccaccattcttcgaacagtggtgaataccatcactggatccacgaacgtcggggaccagctacccactggacaactcagcgtggtaccctggcgccggactggtgtcaagtacactaacaacgaagcttacttcgatgtgatagaggagatagacgctattattgacaaatctggttctactattacagctgagattcagggcgtgatcgatgcctgtgtgaaactgactggtatgcccgacctcacattgtctttcatgaatcccaggttgctcgatgacgtgagttttcatccgtgcgtgcgcttcaagcggtgggagagcgaaaggattctttcatttatccctcctgatggtaacttcagactccttagctatcacgtgagcgcccagaacctggtggctattccagtttatgtgaagcacaatatcagtttcagagacagtagcagtctgggaagatttgagattactgtcggaccaaaacagaccatgggcaaaacaatagaaggcgtcactgtgactagccaaatgccaaagggcgtgcttaatatgagtctcacgccaagccagggcactcacacctttgatcctgtgaccaagatgctgagttgggatgtgggcaagattaacccccagaagctgcctagcctgaagggtactatgtcactccaagcaggcgccagcaaacctgatgagaaccccacaattaacctgcagttcaagattcagcaattagcgatctctggcctgaaagtgaataggctggacatgtatggtgagaagtacaagccctttaagggcatcaagtacatgaccaaggctggaaaatttcaggtgagaacttag

SEQ ID NO: 168130 - DNA, 1257 bp, Artificial Sequence
  derived and/or modified sequence
atgatccacagcctgttcctgatcaacagcagcggcgacatcttcctggagaagcattggaaatcagtggtctcccgctccgtgtgtgattactttttcgaagcacaggagcgtgccactgaagctgaaaatgtcccccctgtgattccaacaccacaccactacctcttgagtgtctaccggcacaaaatcttttttgtggccgtgattcagaccgaagtcccgcccctctttgtgattgaatttttacatcgagtcgttgatacctttcaggactactttggagtgtgcagtgaacctgtcataaaggacaatgttgtggtcgtgtatgaggtgttggaagagatgttagataacggctttcccctggcaacggaatccaatatcctgaaggaattgatcaaacctccaactatcctgcgtaccgttgtaaacaccataactggctcaactaacgtcggtgaccagctcccaactggacagctgtccgtcgtgccctggcgccggactggtgttaagtacactaacaatgaagcttacttcgacgtgattgaggaaatcgatgccatcattgataaaagtgggagtactattacagctgaaattcaaggagtcatcgacgcttgcgtgaagcttaccgggatgccagacttgacactgtcttttatgaatccccggctcctggatgacgttagcttccatccttgtgtgcgcttcaagcgatgggagtctgaaaggatcttatcattcattcccccagacgggaacttccgactgttgagctaccatgttagcgcccagaacctcgtggccatcccggtttacgtgaaacacaatattagcttcagggactcctcttccttggggcgcttcgagatcaccgtgggccccaaacagacaatgggaaagaccatagagggggtaacagtgacatcacaaatgcctaagggcgtactgaatatgagcttgaccccatcacagggtacacacaccttcgaccctgtgaccaagatgctaagctgggatgtaggaaagattaatccacagaagttaccctccctgaaaggaaccatgtccttacaggcaggtgcaagtaaacctgatgaaaatccaacaatcaacctgcagtttaaaattcaacaattagccatctctggcctcaaggtgaatcggcttgacatgtatggggaaaagtataagcctttcaaaggcattaagtatatgacgaaagccggcaagttccaggtgcggacatag

SEQ ID NO: 168131 - DNA, 1257 bp, Artificial Sequence
  derived and/or modified sequence
atgatccacagcctgttcctgatcaacagcagcggcgacatcttcctagagaagcattggaagagcgtagttagcaggagcgtgtgcgattattttttcgaggcgcaggagagggctaccgaggcagaaaatgtacctcctgtcatacctacacctcaccactaccttctctctgtgtaccgacataagatcttctttgtggccgttatccagactgaggtaccccccctcttcgtgatcgagtttctgcatagggtcgtggacacattccaagactattttggtgtctgttccgaacctgtcatcaaagataacgttgtggtggtgtatgaagtgttggaagaaatgctcgacaacggatttccgctggcgacagaaagtaacattctcaaagaactgatcaagccgccaacgatcctgagaaccgtcgtcaataccatcacggggagcacaaatgttggcgatcagctcccgaccggtcagttatcagtcgtgccctggcgacgaacaggggtgaagtacacaaataacgaggcctattttgacgtcattgaggagatagacgccattattgataaatcaggcagcacaatcacagcggagattcagggggtcattgatgcttgtgttaagttgaccggtatgccagacctcactctttcttttatgaatcccaggctccttgacgacgtgtctttccacccttgtgtgagatttaaacggtgggagagcgaaagaattctgtccttcattcctcccgacggcaatttccgccttctatcgtatcacgtgtcggcccagaatcttgtagccatccctgtgtacgtaaagcataatatcagctttagggattcctcctccctgggcaggtttgagattacagtcgggcccaaacaaactatgggtaaaactatagagggcgttaccgtaacatcccagatgcccaagggagtgctcaatatgtccctgactccctctcaagggacacatacattcgaccctgttaccaaaatgctgtcctgggacgtgggcaaaattaatccacagaagctccctagccttaagggtacgatgagtctccaggctggggcatctaaacccgatgagaacccaacaatcaacctgcaattcaaaattcaacagctggctatttcaggcctgaaagtcaatcggctcgacatgtacggagagaaatacaagccattcaaagggatcaaatacatgacaaaggctggaaaatttcaagtcagaacctag

SEQ ID NO: 168132 - DNA, 420 bp, Artificial Sequence
  derived and/or modified sequence
atgatccacagcctgttcctgatcaacagcagcggcgacatcttcttggagaaacattggaagtcggtggtgtcaaggtcagtgtgtgactacttcttcgaagcccaggaacgcgctaccgaggctgaaaacgtgccacccgtcatccctactccacaccattaccttctgtcagtttatcggcacaagatttttttcgtggctgtgattcaaacagaagtgcctcccctgttcgtgatcgaatttctacacagagtggtcgacactttccaagattactttggcgtatgcagcgagcccgtaattaaagataatgtggtagttgtgtacgaagtcctggaggaaatgctagacaatggcttccctctggccacggaaagcaatatcttgaaggagctgataaaacccccaaccatctag

SEQ ID NO: 168133 - DNA, 822 bp, Artificial Sequence
  derived and/or modified sequence
atgatccacagcctgttcctgatcaacagcagcggcgacatcttcctggagaagcactggaagagcgtagtgagccgttcagtatgtgattatttttttgaagcccaggagcgggcaactgaggcagagaatgtgccaccggtgatccctacacctcaccactatctcctctctgtgtacaggcataaaatcttcttcgtagccgtcattcagaccgaagtgccacctctgtttgtcatcgaatttctacacagagtggtcgatacctttcaagactacttcggtgtgtgttctgaacccgttattaaggacaacgtggtcgtcgtgtatgaggtcctggaggaaatgctggacaatggatttcccttggctacagaaagcaacattctgaaagagttgatcaaacctcctacaatactgagaactgtggttaataccatcactggctccacgaacgtgggtgaccagctcccaacaggccagctatccgtggttccatggcggaggacgggggttaagtacactaataatgaggcctacttcgacgtgattgaggaaatagatgcaattattgacaaatccggcagcactataacagctgagattcagggtgtaatcgacgcttgcgttaaactcactggaatgccggatttgacactctcattcatgaacccacgactgctagatgatgtgagctttcatccttgtgtgcgttttaagcggtgggaaagtgagaggattttgagcttcatccctccagacggaaacttccgactcttgagctaccacgtgagtgcgcaaaaatgttgtttgggaatgtag

SEQ ID NO: 168134 - DNA, 1257 bp, Artificial Sequence
  derived and/or modified sequence
atgatacacagcctcttccttataaattcatcaggagatattttcttggagaagcactggaaaagcgtggttagccgttccgtatgtgactatttcttcgaagcacaggagagggctacagaggcagagaatgttccacccgtgattcctactcctcaccactacctactgtcagtatacaggcacaaaattttttttgtggccgttattcaaactgaggtgcctccgttgttcgtgattgaatttctccacagagtggtggacactttccaagactattttggtgtgtgcagcgagcctgtgatcaaagacaatgtggtggtggtgtacgaggtcctggaggagatgctggacaatggctttcctttagcaacagaaagtaatattctcaaggaacttattaaaccacctaccatcctccgcaccgtggtgaataccatcacaggcagtacaaatgtgggcgaccaattgccaaccggacaattaagcgttgttccttggcgaagaaccggagttaaatataccaacaacgaggcctacttcgatgtaattgaggagatcgatgcgatcatcgacaagtccggctccacaatcaccgccgagatccagggagtgatcgatgcctgcgtgaaattaacaggtatgcccgatcttacactgtccttcatgaacccacgattactggatgatgttagcttccatccttgcgttaggtttaaacgctgggagtccgagcgtatcctgtcattcatcccccctgatggtaatttccggctactgtcttaccacgtctcagctcagaatctcgtggctatccccgtttacgtcaaacataacattagcttcagagatagttcctccctgggccgatttgaaattactgttggacccaagcaaactatggggaaaacaatcgaaggagtcaccgtcacttcacaaatgccgaagggtgtgttgaacatgtccctgacaccttctcagggcactcacacattcgaccccgtcacaaaaatgctgagctgggatgtaggtaagattaacccccagaagctcccctctctgaaagggacaatgagtctccaggcaggcgcaagcaagcccgacgagaaccccaccataaacttgcagttcaaaatacagcagctcgccatcagtggcctgaaagtcaacagactggatatgtatggcgagaagtataagccctttaagggaatcaagtacatgactaaagcgggaaaattccaggtccgtacatag

SEQ ID NO: 168135 - DNA, 1257 bp, Artificial Sequence
  derived and/or modified sequence
atgatccattcactgttcctaatcaacagtagtggagacatctttctggaaaaacactggaagtcagtggtctctcgaagcgtctgtgattacttcttcgaggcgcaagaaagagccactgaagccgaaaatgttccccctgtcatccctactcctcaccattacctgctctctgtttaccggcacaagattttcttcgtggcagtgatccagactgaagttcctccactcttcgtcatcgagttcctccaccgcgtggtagacacattccaagactatttcggggtctgtagcgaaccggttataaaggacaatgtcgtggtcgtatatgaagtgctggaggagatgctcgacaacggatttcctctggccacagagtccaacatcctgaaggagctgattaagccgccaaccatcttacgaacggtcgtcaacaccataactgggtcaacaaatgtgggtgatcagctgcccactgggcagttgagtgtagtgccttggagaaggacgggggtcaagtacacaaacaatgaagcctactttgatgtgatcgaagagattgacgctatcatcgataaaagcgggtccacgataactgccgagatacagggggtgatcgatgcttgcgtgaagctaacaggaatgcccgacctaaccctttcgtttatgaatcctcgcttgctggatgacgtaagttttcacccgtgtgtcagatttaagaggtgggaatcagagcgcattctgtccttcatcccacccgacgggaattttagattactttcataccatgtgtcagctcagaatttggttgcaatccctgtgtatgtgaaacacaatatcagttttcgagactccagctctctgggccgatttgagattactgtgggaccaaaacagacaatgggtaaaaccatcgaaggcgtaactgtgacatcccagatgcccaaaggtgtcctcaacatgtccctaaccccatcccagggcacccacactttcgaccccgtcactaagatgctgagttgggacgtaggcaaaatcaatcctcaaaagttgccctctttgaaagggaccatgtcactccaggcaggtgcaagtaagccagatgaaaatccgacaatcaacctccagtttaagatccagcagctcgccatcagtggactcaaagtgaataggcttgacatgtacggcgagaagtacaagccttttaagggtattaaatacatgaccaaggctggtaagtttcaggtgcgcacgtag

SEQ ID NO: 168136 - DNA, 33 bp, Artificial Sequence
  derived and/or modified sequence
atgattcactcacttttcctgataaactcttag

SEQ ID NO: 168137 - DNA, 1257 bp, Artificial Sequence
  derived and/or modified sequence
atgattcactccctgttcctcatcaactctagcggggatatctttctggaaaagcactggaagtccgttgtatcacggtccgtctgcgactattttttcgaagcgcaggagagagcaaccgaagccgagaatgtaccacctgtcatcccaaccccgcaccactatctcctgtctgtctataggcacaaaattttctttgtggctgttatccagacggaggtacctccactctttgtgattgagttcttacatcgcgtcgtggataccttccaggactacttcggtgtctgttcagagccagtcataaaggacaatgtagttgtggtttacgaagtcctggaagagatgttggataacgggttccctcttgccacagaatcgaatatcctgaaagaacttattaaacctcctacgattcttaggactgtcgtgaacacgattaccggctctacaaacgtgggggaccagctgcccaccggacagctgagcgtggtgccctggaggaggacaggagtaaaatacacgaataatgaggcctatttcgacgtgatcgaggaaattgacgccattatagataaatcagggagtacaattacagctgagatccagggtgtcattgatgcctgtgtgaagctaactggcatgcccgacctgaccctaagctttatgaatcctagactcttggacgacgtttcattccacccgtgcgtccgcttcaaacgttgggaatcagaaaggattttgtcattcatcccacccgatggaaacttccgcctgctgtcatatcacgtgagtgcccaaaatcttgttgccatacccgtgtacgtgaaacacaacatcagcttccgtgattcctcctctttgggccgttttgagattactgtgggaccgaaacagactatgggcaagactatagaaggcgttactgtgacttcccagatgcccaagggagtgctaaatatgtccctgactccctcccagggaacacatacctttgatcctgttaccaagatgctgagttgggacgtgggcaagatcaacccacagaagctcccaagcttaaaggggacgatgtctctgcaggcaggcgcttccaaacctgacgagaatcctactatcaatttgcagtttaagattcaacagcttgcaatctctggactgaaggtgaacaggctcgacatgtatggcgagaagtacaagcctttcaagggcatcaagtatatgacaaaggctggtaaattccaagttaggacatag

SEQ ID NO: 168138 - DNA, 420 bp, Artificial Sequence
  derived and/or modified sequence
atgattcactctctgttcctcatcaacagctcaggggacatttttcttgagaagcactggaagtcagttgtttcacgcagtgtttgtgactactttttcgaggcccaagaacgcgctacggaggctgagaatgtgccccctgtgatcccaacgccacaccattatcttctttcagtttacaggcataaaatcttcttcgttgctgttattcagactgaagtgccccctctgtttgtcatcgagttcctgcatcgcgtcgttgatacatttcaagactattttggagtttgctctgagccagttatcaaagataacgtcgtggtcgtgtacgaggtactcgaagaaatgctagataatgggtttccactcgccaccgagtcaaacatactcaaagagttaattaagccccctacgatctag

SEQ ID NO: 168139 - DNA, 822 bp, Artificial Sequence
  derived and/or modified sequence
atgattcatagtctcttcttaattaactcatctggagatatctttcttgagaagcattggaagtccgtggttagccgtagtgtatgcgattatttttttgaggctcaagagagggccaccgaagctgagaatgtaccacctgtgatcccaaccccacaccactatctactttcagtgtatcgacacaagatttttttcgtcgcggtgatccagacagaggttcctcccctgttcgtaatcgaattcctccaccgggtcgtggataccttccaagactattttggcgtatgtagtgagccagttatcaaagataacgtcgttgttgtctatgaagtgctcgaagagatgctggataacggatttccattagcaactgagagcaatatactgaaagagcttatcaaacctccaactatcctgcgcacagttgtgaataccattactggaagcactaacgttggagaccaactgccaactggccaactgagcgtggtgccctggagaaggacaggtgtcaagtatacaaataacgaagcttacttcgacgtaatcgaggagatcgatgctatcatcgataaaagtggcagcaccatcaccgccgagatacagggcgtgatcgacgcttgtgtaaagctaacgggcatgccagacctgactctgtcatttatgaatccaaggttgctggacgacgttagcttccacccatgcgtccggtttaagcggtgggaatctgaaaggattttgagttttatcccccctgacggaaatttcagactgctgtcctaccacgtctctgcccaaaagtgctgtctcggaatgtag

SEQ ID NO: 168140 - protein, 445 aa, Artificial Sequence
  derived and/or modified sequence
MSKLPRELTRDLERSLPAVASLGSSLSHSQSLSSHLLPPPEKRRAISDVRRTFCLFVTFDLLFISLLWIIELNTNTGIRKNLEQEIIQYNFKTSFFDIFVLAFFRFSGLLLGYAVLRLRHWWVIAVTTLVSSAFLIVKVILSELLSKGAFGYLLPIVSFVLAWLETWFLDFKVLPQEAEEERWYLAAQVAVARGPLLFSGALSEGQFYSPPESFAGSDNESDEEVAGKKSFSAQEREYIRQGKEATAVVDQILAQEENWKFEKNNEYGDTVYTIEVPFHGKTFILKTFLPCPAELVYQEVILQPERMVLWNKTVTACQILQRVEDNTLISYDVSAGAAGGVVSPRDFVNVRRIERRRDRYLSSGIATSHSAKPPTHKYVRGENGPGGFIVLKSASNPRVCTFVWILNTDLKGRLPRYLIHQSLAATMFEFAFHLRQRISELGARA

SEQ ID NO: 168141 - protein, 196 aa, Artificial Sequence
  derived and/or modified sequence
MSKLPRELTRDLERSLPAVASLGSSLSHSQSLSSHLLPPPEKRRAISDVRRTFCLFVTFDLLFISLLWIIELNTNTGIRKNLEQEIIQYNFKTSFFDIFVLAFFRFSGLLLGYAVLRLRHWWVIAVTTLVSSAFLIVKVILSELLSKGAFGYLLPIVSFVLAWLETWFLDFKVLPQEAEEERWYLAAQVAVARGPL

SEQ ID NO: 168142 - DNA, 1338 bp, Artificial Sequence
  derived and/or modified sequence
atgagcaagctgcccagagagctgaccagagacctggagagaagcctgcccgccgtggccagcctgggcagcagcctgagccacagccagagcctgagcagccacctgctgcccccccccgagaagagaagagccatcagcgacgtgagaagaaccttctgcctgttcgtgaccttcgacctgctgttcatcagcctgctgtggatcatcgagctgaacaccaacaccggcatcagaaagaacctggagcaggagatcatccagtacaacttcaagaccagcttcttcgacatcttcgtgctggccttcttcagattcagcggcctgctgctgggctacgccgtgctgagactgagacactggtgggtgatcgccgtgaccaccctggtgagcagcgccttcctgatcgtgaaggtgatcctgagcgagctgctgagcaagggcgccttcggctacctgctgcccatcgtgagcttcgtgctggcctggctggagacctggttcctggacttcaaggtgctgccccaggaggccgaggaggagagatggtacctggccgcccaggtggccgtggccagaggccccctgctgttcagcggcgccctgagcgagggccagttctacagcccccccgagagcttcgccggcagcgacaacgagagcgacgaggaggtggccggcaagaagagcttcagcgcccaggagagagagtacatcagacagggcaaggaggccaccgccgtggtggaccagatcctggcccaggaggagaactggaagttcgagaagaacaacgagtacggcgacaccgtgtacaccatcgaggtgcccttccacggcaagaccttcatcctgaagaccttcctgccctgccccgccgagctggtgtaccaggaggtgatcctgcagcccgagagaatggtgctgtggaacaagaccgtgaccgcctgccagatcctgcagagagtggaggacaacaccctgatcagctacgacgtgagcgccggcgccgccggcggcgtggtgagccccagagacttcgtgaacgtgagaagaatcgagagaagaagagacagatacctgagcagcggcatcgccaccagccacagcgccaagccccccacccacaagtacgtgagaggcgagaacggccccggcggcttcatcgtgctgaagagcgccagcaaccccagagtgtgcaccttcgtgtggatcctgaacaccgacctgaagggcagactgcccagatacctgatccaccagagcctggccgccaccatgttcgagttcgccttccacctgagacagagaatcagcgagctgggcgccagagcctag

SEQ ID NO: 168143 - DNA, 591 bp, Artificial Sequence
  derived and/or modified sequence
atgagcaagctgcccagagagctgaccagagacctggagagaagcctgcccgccgtggccagcctgggcagcagcctgagccacagccagagcctgagcagccacctgctgcccccccccgagaagagaagagccatcagcgacgtgagaagaaccttctgcctgttcgtgaccttcgacctgctgttcatcagcctgctgtggatcatcgagctgaacaccaacaccggcatcagaaagaacctggagcaggagatcatccagtacaacttcaagaccagcttcttcgacatcttcgtgctggccttcttcagattcagcggcctgctgctgggctacgccgtgctgagactgagacactggtgggtgatcgccgtgaccaccctggtgagcagcgccttcctgatcgtgaaggtgatcctgagcgagctgctgagcaagggcgccttcggctacctgctgcccatcgtgagcttcgtgctggcctggctggagacctggttcctggacttcaaggtgctgccccaggaggccgaggaggagagatggtacctggccgcccaggtggccgtggccagaggccccctgtag

SEQ ID NO: 168144 - DNA, 1338 bp, Artificial Sequence
  derived and/or modified sequence
atgtctaagttgccacgggaactgaccagagatctggagcgttcactgcccgccgtcgcaagcctgggctccagcctgtcccatagccagagtctgtcctcacatctgctgccaccacctgagaaacggcgtgcgatctcggatgttaggcggacgttctgcctgtttgttacctttgacctgctcttcataagtttactgtggatcatcgagctcaatactaacaccggtatcagaaaaaatcttgaacaggagataatccagtacaacttcaaaactagcttttttgatatcttcgttcttgcttttttcagattttcaggactattgctgggctatgccgtgctaagactgcgccattggtgggtcatagcagttacaaccttggtgagctctgctttccttattgtgaaggtcatcttgtcggagctactctccaagggcgcatttgggtatctgcttcctatcgtgtctttcgtacttgcttggctggagacctggtttttggactttaaggtgttacctcaggaagcagaggaagagaggtggtatctggccgcgcaggtcgcagttgcccgaggaccacttctgttctccggagccctctccgaaggacaattctactctccaccggagtcattcgctggcagcgataacgaaagcgatgaggaggtggctggaaagaagagctttagtgctcaagagcgcgagtacattaggcagggcaaggaagctaccgccgtggtggaccagatactggcccaggaggaaaactggaaatttgagaagaataacgaatacggtgacactgtgtacacaatcgaagttcccttccatgggaagacttttattctgaaaacttttctgccttgtccggcagaactggtgtatcaggaggtcattcttcagccggaaagaatggtgctttggaacaagactgtgaccgcctgtcaaatcctccagcgggttgaagacaatacactgatctcctatgatgtgagtgccggcgcggccggcggtgtcgtcagtcctagggactttgtgaacgttcgtaggatcgaacgcaggagagaccgctacctgtcaagcgggattgcgacaagtcactctgcaaaacccccaacccacaaatacgtacgaggcgagaatggcccagggggcttcatcgtgctcaagtccgcttctaatccacgagtatgcaccttcgtctggattctcaacaccgacctaaaagggcgcctgccgaggtacctcattcaccagtctctcgctgccacgatgttcgagttcgcttttcatcttcgccagcgaatctccgagctgggcgcaagggcatag

SEQ ID NO: 168145 - DNA, 591 bp, Artificial Sequence
  derived and/or modified sequence
atgagcaaacttccccgggaactaactcgcgatcttgagcggtcgctgcctgccgtggccagcctgggtagttcactgtcccattcccagtccctgtcctcccatctcttaccaccgcccgaaaagcggcgagcgatcagcgatgtccgaaggacattctgtctgttcgtgactttcgacctactcttcatctccctcctctggattattgaactaaacaccaatacaggaattaggaaaaatttggaacaagagataatccagtataacttcaagacatccttcttcgacatattcgtcctggctttctttcggttttccggcctgcttctgggttatgccgtgttgaggctgcgccactggtgggtaattgccgtgacaacactggtttcctctgcattcttgattgttaaagtcatcttgtcagaactattaagcaagggggcttttggctatctactgccgattgtcagctttgtcctagcatggttagaaacttggttcctcgactttaaagtcctgccacaggaggccgaggaagagcgttggtacctcgctgcccaggtagctgtcgctagagggccactgtag

SEQ ID NO: 168146 - DNA, 1338 bp, Artificial Sequence
  derived and/or modified sequence
atgagcaagctgccccgggagctgacccgggacctggagaggagcctgcctgctgtggccagcctgggcagcagcctgagccacagccagagcctgagcagccacctgctgcccccacctgagaagagaagagccatcagtgatgtgcggaggaccttctgcctgtttgtgacctttgacctgctcttcatcagcctgctgtggatcatcgagctgaacaccaacacaggcatcaggaagaacctggagcaggagatcatccagtacaacttcaagaccagcttctttgacatctttgtgctggccttcttccgcttcagcggcctgctgctgggctatgctgtgctgcggctgcggcactggtgggtgattgctgtgaccaccctggtgagcagcgccttcctgattgtgaaggtgatcctgtctgagctgctgagcaaaggagccttcggctacctgctgcccatcgtgtcctttgtgctggcctggctggagacctggttcctggacttcaaggtgctgccccaggaggccgaggaggagcgctggtacctggccgcccaggtggccgtggcccggggccccctgctcttcagcggggccctgtctgagggccagttctacagccccccagagagctttgctggcagtgacaatgaaagtgatgaggaggtggccggcaagaagagcttcagcgcccaggagcgggagtacatccggcagggcaaggaggccacagctgtggtggaccagatcctggcccaggaggagaactggaagtttgagaagaacaatgaatatggagacacagtgtacaccatcgaggtgcccttccacggcaagaccttcatcctgaagaccttcctgccctgcccagctgagctggtgtaccaggaggtgatcctgcagcctgagaggatggtgctgtggaacaagacagtgacagcctgccagatcctgcagagggtggaggacaacaccctcatctcctatgatgtgtctgctggagctgctgggggcgtggtgagcccccgggactttgtgaatgtgagaagaattgaaagaagaagagaccgctacctgagcagcggcatcgccaccagccacagcgccaagccacccacccacaagtatgtgcggggggagaatggacctgggggcttcatcgtgctgaagagcgccagcaacccccgggtgtgcacctttgtgtggatcctgaacacagacctgaagggccgcctgccccgctacctgatccaccagagcctggccgccaccatgtttgaatttgccttccacctgcggcagaggatcagcgagctgggcgcccgggcctag

SEQ ID NO: 168147 - DNA, 591 bp, Artificial Sequence
  derived and/or modified sequence
atgagcaagctgccccgggagctgacccgggacctggagaggagcctgcctgctgtggccagcctgggcagcagcctgagccacagccagagcctgagcagccacctgctgcccccacctgagaagagaagagccatcagtgatgtgcggaggaccttctgcctgtttgtgacctttgacctgctcttcatcagcctgctgtggatcatcgagctgaacaccaacacaggcatcaggaagaacctggagcaggagatcatccagtacaacttcaagaccagcttctttgacatctttgtgctggccttcttccgcttcagcggcctgctgctgggctatgctgtgctgcggctgcggcactggtgggtgattgctgtgaccaccctggtgagcagcgccttcctgattgtgaaggtgatcctgtctgagctgctgagcaaaggagccttcggctacctgctgcccatcgtgtcctttgtgctggcctggctggagacctggttcctggacttcaaggtgctgccccaggaggccgaggaggagcgctggtacctggccgcccaggtggccgtggcccggggccccctgtag

SEQ ID NO: 168148 - DNA, 1338 bp, Artificial Sequence
  derived and/or modified sequence
atgagcaagctgccccgggagctgacccgggacctggagcggagcttgcctgctgtggcaagcctcggaagttctctgagccatagtcagtctttgtcgagccatttactccccccccctgaaaagcggcgagcgataagcgacgtccgccgcactttttgcctcttcgttaccttcgacctgctatttatatcgttactctggatcattgagcttaatacaaacacaggcatcagaaaaaacctcgaacaggagattatacagtataacttcaaaacctctttctttgacatcttcgtgctggctttttttcgcttttcgggcctcttgctgggatatgccgtgcttcgcttgcgccactggtgggtaatcgccgtgacaacactggtgagcagcgcttttctgatcgtgaaagttattctatcggagctcctgtcaaaaggtgcatttggatacttgctcccaatcgtgagcttcgttttagcgtggttggaaacttggtttctcgacttcaaggtcctcccccaggaagccgaagaggaaagatggtatctggccgcccaagtcgctgtggcacggggacctctgctattttcaggagctctgtccgagggtcagttttattctccccccgaatcttttgccggatccgataacgaaagtgatgaagaagtcgccgggaagaaaagtttcagtgctcaagaacgggaatatatacgccagggcaaggaggctacagcagttgtagaccagatactggcccaggaggagaattggaaattcgagaaaaacaatgagtacggcgatacagtatacacaattgaggtgccttttcatggaaagacattcattcttaaaaccttcctcccttgcccggcagagcttgtctatcaggaggtgatcctccagcctgagaggatggtcctatggaacaagacagtgaccgcctgtcagattctgcagcgtgtcgaagacaacacactgatttcatacgatgtatctgctggtgctgcaggcggcgtagtgagccccagggactttgtaaatgtgcgtagaattgagcgccggagggatcgctacctgtcttctggcatcgctacatcccattcggcaaaaccgcccacccataaatacgtgaggggagagaatggtccgggcggtttcattgtcctgaagagcgcatctaatcctcgagtatgtacgtttgtttggatcttgaatactgatctgaaggggcggctgcctcgctatctcatccatcagagcttggctgctactatgttcgagttcgcattccacttgaggcagcggatatctgaattgggcgctagagcttag

SEQ ID NO: 168149 - DNA, 591 bp, Artificial Sequence
  derived and/or modified sequence
atgagcaagctgccccgggagctgacccgggacctggagcggagcctacccgccgtggcctccttaggaagcagcctgtcacactcccagtccctgagttctcacctgttacccccaccagaaaagcgtagagccatctctgatgtcaggcgtactttttgcttgttcgtgacattcgacttgttgtttatttccctattgtggattatcgaacttaacactaacacaggcattagaaagaatttggaacaggaaatcattcagtataatttcaaaacctcctttttcgatatcttcgtactggccttttttagattctctggtctgttactcgggtacgcagtgctgaggctgagacactggtgggttatcgccgtgactaccttggtcagctcggcattcctgatagtcaaagtcatcttgtccgagctgctgtctaaaggagctttcggatatttacttcctatcgtgagcttcgttttggcatggcttgaaacttggtttttggacttcaaagtattgccccaggaggccgaagaagaacgttggtatctcgccgctcaggtggccgtggctagagggcctttatag

SEQ ID NO: 168150 - DNA, 1338 bp, Artificial Sequence
  derived and/or modified sequence
atgagcaagctgcctagggagctaaccagggatctcgagaggtccttgccagcagtggcctctctgggttcgagcctcagtcactcccaaagcctgtccagtcacctcctgccacctcctgagaagcggagggctatatcagacgtaagacggaccttctgcttgttcgtgacatttgacctactgttcatttccttgttatggattattgagctgaacaccaacactggtattaggaagaacctggaacaggaaatcatccagtataatttcaaaacgtccttctttgacatcttcgtgcttgccttcttcaggttttccgggctcctgttgggttacgccgtcctgcgcctccggcattggtgggtcatcgccgtgactaccttagtgtcttccgcttttcttatcgtcaaagtgatcctttctgaactcctgtccaagggggcattcgggtatcttttgccaatcgtgagctttgtgctggcttggctcgagacatggttcctcgactttaaagtgctcccccaggaggctgaagaggaacgctggtatctggcggcacaggtggcagtggcccgtggacccttattgttcagcggggctttgtctgagggccaattttattctccccctgaatcttttgccggttcagacaacgagagcgatgaggaagtcgcaggtaaaaaatcctttagcgcacaggagcgagagtatatcagacaggggaaagaagcaactgctgtcgtcgaccagatcctcgcacaggaagagaactggaaattcgagaaaaacaatgaatacggggacaccgtgtacaccattgaggtaccgttccatggaaaaactttcatactcaaaactttcctgccctgccccgctgagcttgtctaccaagaggttatactccagccagaacggatggtcctatggaacaagaccgttactgcatgtcaaatcttgcagcgggtggaagataacacccttatatcctacgatgttagcgctggtgcggctgggggagtggtgagccccagagattttgtgaatgttcgccgtatcgaaaggcgcagagacaggtacctatccagcggcattgcgacttcccacagcgcaaaaccacctactcacaagtatgtcagaggcgagaatggacctggcggtttcattgtgttgaagtccgccagcaaccctagagtgtgtacgtttgtgtggattctgaacacggatctgaaagggagactccccaggtatctaatacaccaaagtctcgctgctactatgtttgagtttgccttccatctgcgccagaggataagcgagctcggtgccagggcatag

SEQ ID NO: 168151 - DNA, 591 bp, Artificial Sequence
  derived and/or modified sequence
atgagcaaactcccgagagaactgactagagatttagagagatcactccccgctgtagcttccctggggtcctccctctcccatagccagagcttatcctcacatcttttaccccctcccgagaagcgacgcgctatttccgacgtccgcagaaccttctgcctgtttgtgacatttgaccttttgttcattagccttctgtggataatcgaactgaacacaaacacaggtattagaaagaatctggagcaagaaattatacagtacaacttcaagaccagcttcttcgacatttttgttctggcattcttccgcttctcagggcttctcttgggctatgcagttttaaggttgagacactggtgggtgatagccgtgactaccctcgtaagctcagcctttctgatcgtcaaggtcattttgagtgagctgctttctaagggcgctttcggctatctgctccccattgtgtcattcgtccttgcttggttggagacttggtttctcgactttaaggttctaccccaggaagcagaagaggagagatggtacctcgccgcacaggtggcagtagcacggggtcctctttag

SEQ ID NO: 168152 - DNA, 2132 bp, Artificial Sequence
  derived and/or modified sequence
ggcggggccgcaggcgaacgcaagtcccgcttcgctctcgggggcggactcagcggcggaagtggcgctgccggaagatcttcttccgctctgaggcgctactgaggccgcggagccggactgcggttggggcgggaagagccggggccgtggctgacatggagcagccctgctgctgaggccgcgccctccccgccctgaggtgggggcccaccaggatgagcaagctgcccagggagctgacccgagacttggagcgcagcctgcctgccgtggcctccctgggctcctcactgtcccacagccagagcctctcctcgcacctccttccgccgcctgagaagcgaagggccatctctgatgtccgccgcaccttctgtctcttcgtcaccttcgacctgctcttcatctccctgctctggatcatcgaactgaataccaacacaggcatccgtaagaacttggagcaggagatcatccagtacaactttaaaacttccttcttcgacatctttgtcctggccttcttccgcttctctggactgctcctaggctatgccgtgctgcggctccggcactggtgggtgattgcggtcacgacgctggtgtccagtgcattcctcattgtcaaggtcatcctctctgagctgctcagcaaaggggcatttggctacctgctccccatcgtctcttttgtcctcgcctggttggagacctggttccttgacttcaaagtcctaccccaggaagctgaagaggagcgatggtatcttgccgcccaggttgctgttgcccgtggacccctgctgttctccggtgctctgtccgagggacagttctattcacccccagaatcctttgcagggtctgacaatgaatcagatgaagaagttgctgggaagaaaagtttctctgctcaggagcgggagtacatccgccaggggaaggaggccacggcagtggtggaccagatcttggcccaggaagagaactggaagtttgagaagaataatgaatatggggacaccgtgtacaccattgaagttccctttcacggcaagacgtttatcctgaagaccttcctgccctgtcctgcggagctcgtgtaccaggaggtgatcctgcagcccgagaggatggtgctgtggaacaagacagtgactgcctgccagatcctgcagcgagtggaagacaacaccctcatctcctatgacgtgtctgcaggggctgcgggcggcgtggtctccccaagggacttcgtgaatgtccggcgcattgagcggcgcagggaccgatacttgtcatcagggatcgccacctcacacagtgccaagcccccgacgcacaaatatgtccggggagagaatggccctgggggcttcatcgtgctcaagtcggccagtaacccccgtgtttgcacctttgtctggattcttaatacagatctcaagggccgcctgccccggtacctcatccaccagagcctcgcggccaccatgtttgaatttgcctttcacctgcgacagcgcatcagcgagctgggggcccgggcgtgactgtgccccctcccaccctgcgggccagggtcctgtcgccaccacttccagagccagaaagggtgccagttgggctcgcactgcccacatgggacctggccccaggctgtcaccctccaccgagccacgcagtgcctggagttgactgactgagcaggctgtggggtggagcactggactccggggccccactggctggaggaagtggggtctggcctgttgatgtttacatggcgccctgcctcctggaggaccagattgctctgccccaccttgccagggcagggtctgggctgggcacctgacttggctggggaggaccagggccctgggcagggcagggcagcctgtcacccgtgtgaagatgaaggggctcttcatctgcctgcgctctcgtcggtttttttaggattattgaaagagtctgggacccttgttggggagtgggtggcaggtgggggtgggctgctggccatgaatctctgcctctcccaggctgtccccctcctcccagggcctcctgggggacctttgtattaagccaattaaaaacatgaatttaaaaaaaaaaaaaaa

SEQ ID NO: 168153 - DNA, 673 bp, Artificial Sequence
  derived and/or modified sequence
caggaccagaggctggagctcagggctaggcctgccctgctgctgaggccgcgccctccccgccctgaggtgggggcccaccaggatgagcaagctgcccagggagctgacccgagacttggagcgcagcctgcctgccgtggcctccctgggctcctcactgtcccacagccagagcctctcctcgcacctccttccgccgcctgagaagcgaagggccatctctgatgtccgccgcaccttctgtctcttcgtcaccttcgacctgctcttcatctccctgctctggatcatcgaactgaataccaacacaggcatccgtaagaacttggagcaggagatcatccagtacaactttaaaacttccttcttcgacatctttgtcctggccttcttccgcttctctggactgctcctaggctatgccgtgctgcggctccggcactggtgggtgattgcggtcacgacgctggtgtccagtgcattcctcattgtcaaggtcatcctctctgagctgctcagcaaaggggcatttggctacctgctccccatcgtctcttttgtcctcgcctggttggagacctggttccttgacttcaaagtcctaccccaggaagctgaagaggagcgatggtatcttgccgcccaggttgctgttgcccgtggacccctg

SEQ ID NO: 168154 - protein, 305 aa, Artificial Sequence
  derived and/or modified sequence
MENSQLCKLFIGGLNVQTSESGLRGHFEAFGTLTDCVVVVNPQTKRSRCFGFVTYSNVEEADAAMAASPHAVDGNTVELKRAVSREDSARPGAHAKVKKLFVGGLKGDVAEGDLIEHFSQFGTVEKAEIIADKQSGKKRGFGFVYFQNHDAADKAAVVKFHPIQGHRVEVKKAVPKEDIYSGGGGGGSRSSRGGRGGRGRGGGRDQNGLSKGGGGGYNSYGGYGGGGGGGYNAYGGGGGGSSYGGSDYGNGFGGFGSYSQHQSSYGPMKSGGGGGGGGSSWGGRSNSGPYRGGYGGGGGYGGSSF

SEQ ID NO: 168155 - DNA, 918 bp, Artificial Sequence
  derived and/or modified sequence
atggaaaattcccagctatgcaagttatttatcggtggtctgaacgtgcagaccagtgagagcggtttgcgcggccacttcgaggccttcggcactcttacggattgcgtggtcgtggttaatcctcagacaaagcggagcagatgttttggtttcgtgacatattctaacgtggaggaggctgatgctgcaatggcagccagccctcacgcggtggacggcaacaccgtcgagctgaagcgtgcagtaagcagggaggactccgcccgacccggcgctcatgccaaagtcaagaagctctttgtgggaggcctcaaaggcgacgtagctgagggtgacctaatagagcattttagccagtttggtaccgtcgagaaggcggagatcattgcggataagcaatcagggaaaaagcgggggtttggctttgtctacttccagaatcatgacgccgccgataaggccgccgtggtaaagttccaccctattcaggggcacagggtggaggtgaaaaaagctgtccctaaagaggacatctactcggggggcggtggcgggggttctagaagcagcagaggtggcagagggggtaggggcagaggcggaggcagagaccaaaacgggttgtccaaaggcgggggaggcggctataatagctatggtggctacggaggtgggggagggggaggttacaatgcatacggaggaggcggtgggggatcctcctatggcggatcagactatggtaacggtttcgggggatttggctcatactctcaacaccagtcaagttacggccctatgaagtcgggtggaggcggcggcggcggcggatcatcctgggggggaaggtcgaattccggaccatacagaggggggtacgggggcggaggaggttatggtggttctagcttctag

SEQ ID NO: 168156 - DNA, 918 bp, Artificial Sequence
  derived and/or modified sequence
atggagaacagccagctgtgcaagctgttcatcggcggcctgaatgtgcagaccagcgagagcggcctgcggggccactttgaggccttcggcaccctgacagactgtgtggtggtggtgaacccccagaccaagaggagccgctgcttcggctttgtgacctacagcaatgtggaggaggctgatgctgccatggccgccagcccccatgctgtggatggcaacacagtggagctgaagagagctgtgtcccgggaggacagcgcccggcctggggcccacgccaaggtgaagaagctgtttgtgggcggcctgaagggagatgtggccgagggggacctgattgagcacttcagccagtttggaacagtggagaaggccgagatcatcgctgacaagcagagcggcaagaagaggggctttggatttgtgtacttccagaaccatgatgctgctgacaaggctgctgtggtgaagttccaccccatccagggccaccgggtggaggtgaagaaggctgtgcccaaggaggacatctacagcggcggcggcggcggcggcagccgcagcagcagaggaggccggggcggccggggccggggcggcggccgggaccagaatggcctgagcaaaggaggcggcggcggctacaacagctatggaggctatggaggcggcggcggcggcggctacaatgcctacggcggcggcggcggcggcagcagctatggaggcagtgactatggaaatggatttggaggcttcggcagctacagccagcaccagagcagctatggccccatgaagagcggcggcggcggcggcggcggcggcagctcctggggcggccgcagcaacagcggcccctaccggggcggctacggcggcggcggcggctacggcggcagcagcttctag

SEQ ID NO: 168157 - DNA, 918 bp, Artificial Sequence
  derived and/or modified sequence
atggagaacagccagctgtgcaagctgttcatcggcggcctgaacgttcagactagcgaatcaggcctaagggggcactttgaggcctttggcacactgaccgactgtgtagtcgtggttaacccccagaccaaacgaagccggtgctttggatttgtgacctattcaaacgtggaagaagctgatgccgctatggccgcctcaccgcacgcggtggacggcaacaccgtcgaacttaagcgcgctgtctcccgcgaggattctgctagacctggagctcacgcaaaagttaagaagctgtttgtgggaggcttgaagggtgacgtggcggagggagatttaatcgaacatttctcccagttcggcacggtcgaaaaagccgaaattattgctgacaaacagtcaggcaaaaagcggggatttggatttgtatactttcagaaccacgatgcagctgacaaagccgccgtggtgaaattccatccaattcagggacatagggtcgaggtgaaaaaagcagtgcccaaggaggacatctacagtggcggcggcggtggagggagccgcagtagccgaggcggccggggtggaaggggcaggggaggcggtagagaccaaaatgggctgtcaaaaggcgggggtggtggctacaatagttacggggggtacggaggaggggggggaggcgggtacaatgcatatggaggcggagggggaggctcgagctacggggggagcgactatggaaacgggttcggcgggttcggctcatattcacagcatcagagcagctatgggcccatgaagagcggggggggcgggggcgggggtggctcctcatggggggggcggagtaattcaggaccttatcgcgggggatatggtggcgggggagggtacggtggaagcagcttctag

SEQ ID NO: 168158 - DNA, 918 bp, Artificial Sequence
  derived and/or modified sequence
atggagaactcccagctgtgcaaactgttcatcggtggtctcaatgtgcagaccagcgagtccggactccggggtcactttgaagcttttggtacacttactgactgcgttgtggtggtgaatcctcaaactaaacgatcacgatgttttggatttgtgacttatagcaacgtggaagaggcagacgctgcgatggcagcctcaccacatgcagtggacggcaatacagtggaactgaaacgcgctgtatcccgggaagactcagctcggcctggcgctcatgcaaaggtgaagaagctgttcgtgggcggattaaagggagatgtcgctgagggggacctcattgagcatttctcccagtttgggaccgtcgagaaagctgagatcattgcagataagcagtccggaaagaaacgtgggtttggcttcgtgtattttcagaaccatgatgctgccgacaaagctgcggttgtgaagttccaccctattcagggacatcgggtggaggttaagaaagccgtgcctaaagaagatatttatagtggaggtggtggtggcggttccaggagtagtcggggtggccgtggcggacgtggaagggggggagggagggatcagaatggactgtcgaagggcggtggtggcggatataatagctacgggggatacggtggagggggtggcggaggatacaacgcatatggtgggggaggtggaggcagcagctacgggggaagcgactacggcaacggctttgggggatttggcagttactctcagcatcagtccagctatggcccaatgaagtctgggggagggggaggtggtgggggttcctcctggggtggcaggagcaatagcgggccttacagaggagggtacgggggaggaggagggtacggtgggtcctctttttag

SEQ ID NO: 168159 - DNA, 918 bp, Artificial Sequence
  derived and/or modified sequence
atggagaacagccagctgtgcaagctgttcatcggcggcctgaacgtgcagaccagcgagagcggcctgagaggccacttcgaggccttcggcaccctgaccgactgcgtggtggtggtgaacccccagaccaagagaagcagatgcttcggcttcgtgacctacagcaacgtggaggaggccgacgccgccatggccgccagcccccacgccgtggacggcaacaccgtggagctgaagagagccgtgagcagagaggacagcgccagacccggcgcccacgccaaggtgaagaagctgttcgtgggcggcctgaagggcgacgtggccgagggcgacctgatcgagcacttcagccagttcggcaccgtggagaaggccgagatcatcgccgacaagcagagcggcaagaagagaggcttcggcttcgtgtacttccagaaccacgacgccgccgacaaggccgccgtggtgaagttccaccccatccagggccacagagtggaggtgaagaaggccgtgcccaaggaggacatctacagcggcggcggcggcggcggcagcagaagcagcagaggcggcagaggcggcagaggcagaggcggcggcagagaccagaacggcctgagcaagggcggcggcggcggctacaacagctacggcggctacggcggcggcggcggcggcggctacaacgcctacggcggcggcggcggcggcagcagctacggcggcagcgactacggcaacggcttcggcggcttcggcagctacagccagcaccagagcagctacggccccatgaagagcggcggcggcggcggcggcggcggcagcagctggggcggcagaagcaacagcggcccctacagaggcggctacggcggcggcggcggctacggcggcagcagcttctag

SEQ ID NO: 168160 - DNA, 2965 bp, Artificial Sequence
  derived and/or modified sequence
gcccagataggggagcggaggtggcggcggcggcggtagcggtggccttggttgtcttccagtctcctcggctcgccctttagccggcaccgctccccttccctcccccttcctctcttccttccttccctccccttccctttttcccttccccgtcggtgagcggcgggggtggctccagcaacggctgggcccaagctgtgtagaggccttaaccaacgataacggcggcgacggcgaaacctcggagctcgcagggcgggggcaaggcccgggccttggagatggagaattctcagttgtgtaagctgttcatcggcggcctcaatgtgcagacgagtgagtcgggcctgcgcggccactttgaggcctttgggactctgacggactgcgtggtggtggtgaatccccagaccaagcgctcccgttgctttggcttcgtgacctactccaatgtggaggaggcggacgccgccatggccgcctcgccccatgccgtggacggcaacactgtggagctgaagcgggcggtgtcccgggaggattcggcgcggcccggtgcccacgccaaggttaagaagctctttgtcggaggccttaaaggagacgtggctgagggcgacctgatcgagcacttctcgcagtttggcaccgtggaaaaggccgagattattgccgacaagcagtccggcaagaagcgtggattcggcttcgtgtatttccagaatcacgacgcggcagacaaggccgcggtggtcaagttccatccgattcagggccatcgcgtggaggtgaagaaagcagtccccaaggaggatatctactccggtgggggtggaggcggctcccgatcctcccggggcggccgaggcggccgggggcgcggcggtggtcgagaccagaacggcctttccaagggcggcggcggcggttacaacagctacggtggttacggcggcggcggaggcggcggctacaatgcctacggaggcggcggcggcggttcgtcctacggtgggagcgactacggtaacggcttcggcggcttcggcagctacagccagcatcagtcctcctatgggcccatgaagagcggcggcggcggcggcggtggaggcagtagctggggcggtcgcagtaatagtggaccttacagaggcggctatggcggtgggggtggctatggaggcagctccttctaaaagaaaatttaaaatgcctgggagtggctataggggtagctctttccaacagcccaagtggggtcaactcctaagccccaccccctcacacacaccgccttccctgttttgcccttgggggagccacttctaaggctgcttacccttgggggtgttcctctatttgcctgccacctctcttgtctctccctctgaagatggactcggccccacatacacatttttgtgttacagtcattgatggactctatttttttattattacttggaccttggtcgtttttatactagcaaaatgtcttgttttaatttgtgttttttggggggagggagggagtgaacttgctgattctgtagcaaaacctgggtgggggttggggtggggggtagtttactttgttgtaaggacttgataacctggctacagcgttttctatgaaatctacttggatcccatgcctgaaatttggaagcatatgtacaaaaatcatttttacgttttatttttaataaatcattgtgtttgaccgtacatgtctaacattttttttctaggatccattccgtaccgttttttaagggatatttgtttaagactttacgtgttaattctttattcttgatgtgtacttagagaaacttaagaggtcctgtggtttttttcccctctcctgttgccctgctagttgcgtgttgaattatatcccttacaggcaaaacttttgaagtggtggatgtggctttttaaactcttaagtttctgtgcatccatctcttgtactaagcgaattgtttatcatcttgacatggttggtcatttctatgacaatttacttcaaactgtgtactgtgtagttctatatagtttgtgttaagcatgtcattcatataaactgtttaaaatttttcagatggcctagtttcatccctcttactggtttgtctgtaatgaatggttaaaaataagggttatattttaccctcaaatgcgtttttgtactttcagagcaggtttaaacgttttttttttttttttcctatatccgaactgttggcctcatggaaatccctttcccgatctttgtagcaccatctactggcagaatggcagagtagctgcgaaacaatttgtttaaaaacttgcttaagacaattgcatcagatttggaagttttgccatcaaaattctttgcagaattggaagttaacacatttgcttgtaactgagatgggcttcacaggaatgtagttgccagttcatatcacaatagccctttctatatgaggtttgaaaatgtaaactgctatgcatagcttgggcaatagccctaaattgctatgacaactaatgaaccagctacgtatactggtattttaggtgcaagttgtaaagcaaaatatctgtgtattctgcttggttaacaaatgtatatttgtagccctttcctgcaatagcattcaagttgttgtttataagagaagaacaaaagtgataataggtgaaaattgcctttctggatagaaatagagaatagcaacgtttatggatatcacaaataaagaattcaattctttacatgattgagtgagagtatgtataacctggtgggtgggttcagagtaccttttaatctagtatgcttaacttgatgttaatatttaacttaaatatttgacttacatgttgacgttgaaggctcaaagctatactaagaagctttctgaaagattgggctttaaaataaaataatattttaatattg

SEQ ID NO: 168161 - protein, 252 aa, Artificial Sequence
  derived and/or modified sequence
MKNEIAAVVFFFTRLVRKHDKLKKEAVERFAEKLTLILQEKYKNHWYPEKPSKGQAYRCIRVNKFQRVDPDVLKACENSCILYSDLGLPKELTLWVDPCEVCCRYGEKNNAFIVASFENKDENKDEISRKVTRALDKVTSDYHSGSSSSDEETSKEMEVKPSSVTAAASPVYQISELIFPPLPMWHPLPRKKPGMYRGNGHQNHYPPPVPFGYPNQGRKNKPYRPIPVTWVPPPGMHCDRNHWINPHMLAPH

SEQ ID NO: 168162 - DNA, 759 bp, Artificial Sequence
  derived and/or modified sequence
atgaagaatgaaatcgcggccgtggttttctttttcactcgactggtgcgcaagcacgacaagctgaagaaggaagcagtggagcggtttgcagagaagctcaccctgatcctccaggagaaatacaaaaaccattggtatccggagaagccttctaagggacaagcctaccgatgtatccgggtgaacaagtttcagcgcgtggatcccgacgtcctgaaggcatgtgagaacagttgcatactgtactctgacctgggcttgcctaaagagcttacgctgtgggtagacccttgtgaggtgtgttgcagatacggagaaaagaataacgctttcatcgtcgcttcgttcgagaataaggacgagaataaggatgagatctctcgtaaggtcacaagggctttagataaagtgacctcagattaccactctggaagcagcagctcggacgaagagacctcaaaagaaatggaggtcaaaccctcctccgtaactgcggctgcgtccccggtataccaaattagtgagctcatatttccccctcttcccatgtggcatcccctacctcgcaaaaagccaggcatgtacaggggcaacggtcatcagaatcattacccaccgcctgtgccctttggctatcccaatcagggaagaaaaaacaagccttacagaccaattcccgtgacctgggtgcctccaccaggcatgcactgcgatcgcaatcactggattaacccgcatatgctcgcaccccactag

SEQ ID NO: 168163 - DNA, 141 bp, Artificial Sequence
  derived and/or modified sequence
atgaagaacgagatcgccgcggtggtgtttttttttacacgcctcgtgagaaagcatgacaagctgaagaaagaagcagtggagcgatttgccgaaaagctgaccctcattctccaggagaaatacaagaatcactggtag

SEQ ID NO: 168164 - DNA, 759 bp, Artificial Sequence
  derived and/or modified sequence
atgaagaatgaaattgctgctgtggtgttcttcttcacccggctggtgaggaagcatgacaagctgaagaaggaggccgtggagagatttgctgagaagctgaccctcatcctgcaggagaagtacaagaaccactggtacccagagaagcccagcaagggccaggcctaccgctgcatccgggtgaacaagttccagagggtggaccctgatgtgctgaaggcctgtgagaacagctgcatcctgtacagcgacctgggcctgcccaaggagctgaccctgtgggtggacccctgtgaggtgtgctgccgctatggagagaagaacaatgccttcatcgtggccagctttgagaacaaggatgagaacaaggatgagatcagcaggaaggtgacccgggccctggacaaggtgaccagtgactaccacagcggcagcagcagcagtgatgaggagaccagcaaggagatggaggtgaagcccagctctgtgacagctgctgccagccctgtgtaccagatcagcgagctgatcttcccccccctgcccatgtggcaccccctgcccaggaagaagccaggcatgtacagaggaaatggccaccagaaccactacccacctcctgtgcccttcggctaccccaaccagggcaggaagaacaagccctaccggcccatccctgtgacctgggtgcccccacctggcatgcactgtgacaggaaccactggatcaacccccacatgctggccccccactag

SEQ ID NO: 168165 - DNA, 141 bp, Artificial Sequence
  derived and/or modified sequence
atgaagaatgaaattgctgctgtggtgttcttcttcacccggctggtgaggaagcatgacaagctgaagaaggaggccgtggagagatttgctgagaagctgaccctcatcctgcaggagaagtacaagaaccactggtag

SEQ ID NO: 168166 - DNA, 759 bp, Artificial Sequence
  derived and/or modified sequence
atgaagaacgagatcgccgccgtggtgttcttcttcacccggctggttagaaagcacgataagctcaaaaaagaggcagtcgaaagattcgccgagaagttgaccctcatactccaggagaagtacaaaaaccactggtaccccgaaaaaccctctaagggccaggcctaccgatgcattagggttaacaaattccagagggtggaccctgatgtgttgaaggcctgtgagaactcatgtatcctgtatagcgatctgggactccccaaggagttaacgctttgggttgacccatgcgaagtttgctgtcgctacggagagaagaacaatgcatttatcgtggcaagcttcgagaacaaggacgaaaacaaagatgaaatcagccgaaaagtgaccagggccctggacaaggtgacatccgactaccattctggatctagtagctccgatgaggaaacaagcaaggagatggaggttaaacccagtagtgtgactgccgccgcgtctcctgtgtatcagatttccgagttaattttcccaccattgcctatgtggcaccccttgcccaggaaaaagcccggaatgtatagaggcaacggacaccagaaccactaccctccaccagttccattcggctacccaaaccagggtcggaagaacaagccttatcgacctatccccgtgacctgggttcccccacccgggatgcattgtgatagaaatcactggatcaatccacatatgctggcacctcattag

SEQ ID NO: 168167 - DNA, 141 bp, Artificial Sequence
  derived and/or modified sequence
atgaagaacgagatcgccgccgtggtgttcttcttcacccggctggtcaggaagcatgacaaactcaaaaaggaggccgtagagaggtttgccgagaagctgacactcattctgcaggaaaagtacaaaaatcattggtag

SEQ ID NO: 168168 - DNA, 759 bp, Artificial Sequence
  derived and/or modified sequence
atgaaaaatgagatcgcagctgtagttttcttctttacaaggctggtgcggaagcatgacaaactcaaaaaggaagcagtggagagattcgcagaaaagctcaccctcattctccaagagaagtacaagaaccattggtatccagagaagccaagcaagggtcaggcatacaggtgcatccgggtcaataagttccagcgggtagatcccgatgtcctcaaagcatgtgaaaattcttgtatactctacagcgatctgggactgccgaaggagctcacactgtgggtggatccttgcgaagtgtgctgtagatacggggagaaaaacaatgcctttattgtggccagctttgagaataaggacgagaataaagacgagatctcacggaaagttacccgggcattggacaaagttacatctgactatcactctggctccagctcatcagatgaagagacaagcaaggagatggaggtcaaacctagctctgttacagccgctgctagcccagtctaccagatctctgagcttatctttccacctttgcctatgtggcaccccctgcccaggaagaagccaggaatgtaccgagggaacgggcaccagaaccattatccgcctccggtaccatttggatatccaaaccaaggcaggaagaacaagccttataggcctataccagtcacatgggtccctcctcctggcatgcattgcgaccgaaaccactggataaatccacatatgttggctccacattag

SEQ ID NO: 168169 - DNA, 141 bp, Artificial Sequence
  derived and/or modified sequence
atgaagaatgagattgctgccgtggtgtttttctttactcgcttggttaggaagcatgacaaactgaaaaaggaagctgtcgaacggtttgctgagaagttaacgctcattctccaggagaagtacaagaatcactggtag

SEQ ID NO: 168170 - DNA, 1456 bp, Artificial Sequence
  derived and/or modified sequence
tcttccgggccgcgagccccctgcgcgccgctttggggctgcgctcactcgtgtgcgcgctcgtccgcccgccagtcctctcaacgcgcgcttggccgcccgacgacgcgggagccgcacgcgccggacgaggctcgctgcgctccctgttgcccagcgcgggcccgttgaggcggagccctcagttcccggccaggacacggtctgggccgccgaatctccggccgaagagcggcggcggcagcggcgggaaaaaaatgaagaatgaaattgctgccgttgtcttctttttcacaaggctagttcgaaaacatgataagttgaaaaaagaggcagttgagaggtttgctgagaaattgaccctaatacttcaagaaaaatataaaaatcactggtatccagaaaaaccatcgaaaggacaggcctacagatgtattcgtgtcaataaatttcagagagttgatcctgatgtcctgaaagcctgtgaaaacagctgcatcttgtatagtgacctgggcttgccaaaggagctcactctctgggtggacccatgtgaggtgtgctgtcggtatggagagaaaaacaatgcattcattgttgccagctttgaaaataaagatgagaacaaggatgagatctccaggaaagttaccagggcccttgataaggttacctctgattatcattcaggatcctcttcttcagatgaagaaacaagtaaggaaatggaagtgaaacccagttcggtgactgcagccgcaagtcctgtgtaccagatttcagaacttatatttccacctcttccaatgtggcaccctttgcccagaaaaaagccaggaatgtatcgagggaatggccatcagaatcactatcctcctcctgttccatttggttatccaaatcagggaagaaaaaataaaccatatcgcccaattccagtgacatgggtacctcctcctggaatgcattgtgaccggaatcactggattaatcctcacatgttagcacctcactaacttcgtttttgattgtgttggtgtcatgttgagaaaaaggtagaataaaccttactacacattaaaagttaaaagttcttactaatagtagtgaagttagatgggccaaaccatcaaacttatttttatagaagttattgagaataatctttcttaaaaaatatatgcactttagatattgatatagtttgagaaattttattaaagttagtcaagtgcctaagtttttaatattggacttgagtatttatatattgtgcatcaactctgttggatacgagaacactgtagaagtggacgatttgttctagcacctttgagaatttactttatggagcgtatgtaagttatttatatacaaggaaatctattttatgtcgttgtttaagagaattgtgtgaaatcatgtagttgcaaataaaaaatagtttgaggcatga

SEQ ID NO: 168171 - DNA, 759 bp, Artificial Sequence
  derived and/or modified sequence
atgaagaacgagatcgccgccgtggtgttcttcttcaccagactggtgagaaagcacgacaagctgaagaaggaggccgtggagagattcgccgagaagctgaccctgatcctgcaggagaagtacaagaaccactggtaccccgagaagcccagcaagggccaggcctacagatgcatcagagtgaacaagttccagagagtggaccccgacgtgctgaaggcctgcgagaacagctgcatcctgtacagcgacctgggcctgcccaaggagctgaccctgtgggtggacccctgcgaggtgtgctgcagatacggcgagaagaacaacgccttcatcgtggccagcttcgagaacaaggacgagaacaaggacgagatcagcagaaaggtgaccagagccctggacaaggtgaccagcgactaccacagcggcagcagcagcagcgacgaggagaccagcaaggagatggaggtgaagcccagcagcgtgaccgccgccgccagccccgtgtaccagatcagcgagctgatcttcccccccctgcccatgtggcaccccctgcccagaaagaagcccggcatgtacagaggcaacggccaccagaaccactaccccccccccgtgcccttcggctaccccaaccagggcagaaagaacaagccctacagacccatccccgtgacctgggtgcccccccccggcatgcactgcgacagaaaccactggatcaacccccacatgctggccccccactag

SEQ ID NO: 168172 - DNA, 141 bp, Artificial Sequence
  derived and/or modified sequence
atgaagaacgagatcgccgccgtggtgttcttcttcaccagactggtgagaaagcacgacaagctgaagaaggaggccgtggagagattcgccgagaagctgaccctgatcctgcaggagaagtacaagaaccactggtag

SEQ ID NO: 168173 - protein, 185 aa, Artificial Sequence
  derived and/or modified sequence
MGKKQNKKKVEEVLEEEEEEYVVEKVLDRRVVKGKVEYLLKWKGFSDEDNTWEPEENLDCPDLIAEFLQSQKTAHETDKSEGGKRKADSDSEDKGEESKPKKKKEESEKPRGFARGLEPERIIGATDSSGELMFLMKWKNSDEADLVPAKEANVKCPQVVISFYEERLTWHSYPSEDDDKKDDKN

SEQ ID NO: 168174 - protein, 110 aa, Artificial Sequence
  derived and/or modified sequence
MGKKQNKKKVEEVLEEEEEEYVVEKVLDRRVVKGKVEYLLKWKGFSDEDNTWEPEENLDCPDLIAEFLQSQKTAHETDKSEGGKRKADSDSEDKGEESKPKKKKEESEKP

SEQ ID NO: 168175 - DNA, 2443 bp, Artificial Sequence
  derived and/or modified sequence
gtgagggaacgcgctttcgaggcggaggttaggagcggggagcgcgcccgggtccagcgtcctgcttctccgcttcccgcgctgagctcttcgcctgtcgctgaggcgtcggtgccagctgcgtgaaggatggagagggcggggcgcgaatcctgagccagagactgagtgcttgggggtgggccgagcacttgggggccgctcttcggggcccgggtggtctggaacaatgttgcttggctgggcggctgcgggatagggcggaaggggacaggcttgaggcttggataggcgtgaggaggcgcatacgaccgcacaacccgaggtttgtaactgtattcggaagacgccgggtccggctgggactgccagaggaacctggctttgcaggactacggaggagtaacgtcgagtgaattggaagagggcccagggccgcacaagcagcgtcaccctttacaccagaaagctggcgggcactatggggaaaaaacaaaacaagaagaaagtggaggaggtgctagaagaggaggaagaggaatatgtggtggaaaaagttctcgaccgtcgagtggtaaagggcaaagtggagtacctcctaaagtggaagggattctcagatgaggacaacacatgggagccagaagagaacctggattgccccgacctcattgctgagtttctgcagtcacagaaaacagcacatgagacagataaatcagagggaggcaagcgcaaagctgattctgattctgaagataagggagaggagagcaaaccaaagaagaagaaagaagagtcagaaaagccacgaggctttgctcgaggtttggagccggagcggattattggagctacagactccagtggagagctcatgttcctgatgaaatggaaaaactctgatgaggctgacctggtccctgccaaggaagccaatgtcaagtgcccacaggttgtcatatccttctatgaggaaaggctgacgtggcattcctacccctcggaggatgatgacaaaaaagatgacaagaactaacgctcctgagtaccagcccctgtcacatctgactgtgggtttcaagtgggaagggaaggagttctacttgtcttgacaccatagaggtggcttgagaagatgtcctttgaagagccagtatagtttctgtgccctgcagcagcccaagtgctttaaagccgtttcaagctgtatagtttgcacacccatcccagtggaggggaaaggggataagtgtttcaaggcaaccttttctgcactttgctgcgaaaagcaaagggccttctatgaaggacaaaacttgcagaattgggtgtgtgggagagcaaaaaaatactgtagatcttcaaagagcatctccacaacccacagccttcttcccaatagtgttaactctgcatttttacagcgtagcatgtgtgtagtttttggctattactggtgtattatttgggggagggagggatggggaggggagaaagggagatgggtagcatcattttgattaacatttggggcctgataggggaaatggtgaagcaatggaaaagaacagacaactaatgatttgcttctatgtccagaatattttacctttaaaaaaatgtcattggcaccataaataaggactgtgagagactgtttaaaagctgtgaaagtctgaaacctataagccaaggtgttccctgcctaaacttattgctgttcccacaaaggactaagcctgttcataagttaccaaagttgccattttggagatggaaattgacgaggagggaaggtcttttattggagagtatacagtacaagcagatcattctgccttagaggtgctaattcccgaaattagaagaccctttcttttccagtaacgaagttataaatatcagcttgttcatccaagccactggctgaggtgttaggaagaggaagagggtggtagaggaggtaagacagtagggaaagacaagggcccatgctcttagtggggaaaactcttggagccgtttactttgagctttgaacactgaaaccattgttggcagggttcagtcactgacagcacaagtttcactgaattgatccaagagtttagtgatttcaaaagccttggtctcaggagaagattaaactttcatattgggcagtggttcactttaaaacacacacatacacacacaaaacaattttttaagaaatcctaataagtaacatacccaaaatgctctgtcttgagtcatgagaaccatcagttcttgatattgtctagacttgcatctagagctacgttgtaaaattcttttaggcatgtgttagatttctgtgtaaactttgtttaaatgtaaacttcatactacattgtcagtttttgtcttaataaaactatagatttataatccctgaaaaaaaaaaaaaaaaaaaaaa

SEQ ID NO: 168176 - DNA, 558 bp, Artificial Sequence
  derived and/or modified sequence
atgggcaagaagcagaacaagaagaaggtggaggaggtgctggaggaggaggaggaggagtacgtggtggagaaggtgctggacagaagagtggtgaagggcaaggtggagtacctgctgaagtggaagggcttcagcgacgaggacaacacctgggagcccgaggagaacctggactgccccgacctgatcgccgagttcctgcagagccagaagaccgcccacgagaccgacaagagcgagggcggcaagagaaaggccgacagcgacagcgaggacaagggcgaggagagcaagcccaagaagaagaaggaggagagcgagaagcccagaggcttcgccagaggcctggagcccgagagaatcatcggcgccaccgacagcagcggcgagctgatgttcctgatgaagtggaagaacagcgacgaggccgacctggtgcccgccaaggaggccaacgtgaagtgcccccaggtggtgatcagcttctacgaggagagactgacctggcacagctaccccagcgaggacgacgacaagaaggacgacaagaactag

SEQ ID NO: 168177 - DNA, 333 bp, Artificial Sequence
  derived and/or modified sequence
atgggcaagaagcagaacaagaagaaggtggaggaggtgctggaggaggaggaggaggagtacgtggtggagaaggtgctggacagaagagtggtgaagggcaaggtggagtacctgctgaagtggaagggcttcagcgacgaggacaacacctgggagcccgaggagaacctggactgccccgacctgatcgccgagttcctgcagagccagaagaccgcccacgagaccgacaagagcgagggcggcaagagaaaggccgacagcgacagcgaggacaagggcgaggagagcaagcccaagaagaagaaggaggagagcgagaagccctag

SEQ ID NO: 168178 - DNA, 558 bp, Artificial Sequence
  derived and/or modified sequence
atgggaaaaaagcagaataagaaaaaggttgaagaggtccttgaggaggaagaggaagagtatgtagttgagaaagtactggatagacgcgtggtgaagggcaaagtcgagtaccttctgaaatggaagggcttctcagatgaggacaatacatgggagccagaggaaaatttggattgccctgacctgatcgctgaatttctacaatcacagaaaactgcccatgagaccgacaagtctgagggaggaaagaggaaggctgattccgattccgaggataaaggagaggagtccaaacccaagaaaaaaaaggaagaaagtgagaagccgaggggctttgctagggggctggagcccgagcgcataatcggggccaccgatagctctggagagttgatgttcctgatgaagtggaaaaacagtgacgaggccgatctggtcccagctaaagaggccaatgtcaaatgcccccaggtcgtgattagcttctacgaagagcggcttacttggcattcctacccaagcgaggacgacgataaaaaggacgacaaaaattag

SEQ ID NO: 168179 - DNA, 333 bp, Artificial Sequence
  derived and/or modified sequence
atgggtaaaaaacagaacaaaaagaaggtcgaagaagtgctcgaagaggaagaagaggagtacgtggtcgaaaaggtgttagatcgccgcgtggtcaagggcaaggtggagtatctgctcaagtggaaaggtttcagcgacgaggacaatacttgggaaccagaagagaatttggactgtcctgacctgatcgctgaattcttgcaatctcagaagactgcccacgagaccgataagagcgaaggtgggaaacggaaagccgatagcgactccgaagataagggcgaggagagcaagcccaagaaaaaaaaggaggagtccgagaagccatag

SEQ ID NO: 168180 - DNA, 558 bp, Artificial Sequence
  derived and/or modified sequence
atgggcaagaagcagaacaagaagaaggtggaggaggtgctggaggaggaggaggaggagtatgtggtggagaaggtgctggacagaagagtggtgaagggcaaggtggagtacctgctgaagtggaagggcttcagtgatgaggacaacacctgggagcctgaggagaacctggactgcccagacctgattgctgagttcctgcagagccagaagacagcccatgaaacagacaagtctgagggcggcaagaggaaggctgacagcgacagcgaggacaagggggaggagagcaagcccaagaagaagaaggaggagagcgagaagccccggggctttgcccggggcctggagcctgagcgcatcattggagccacagacagcagtggagagctgatgttcctgatgaagtggaagaacagtgatgaggccgacctggtgcctgccaaggaggccaacgtgaagtgcccccaggtggtgatctccttctatgaggagcggctgacctggcacagctaccccagtgaagatgatgacaagaaggatgacaagaactag

SEQ ID NO: 168181 - DNA, 333 bp, Artificial Sequence
  derived and/or modified sequence
atgggcaagaagcagaacaagaagaaggtggaggaggtgctggaggaggaggaggaggagtatgtggtggagaaggtgctggacagaagagtggtgaagggcaaggtggagtacctgctgaagtggaagggcttcagtgatgaggacaacacctgggagcctgaggagaacctggactgcccagacctgattgctgagttcctgcagagccagaagacagcccatgaaacagacaagtctgagggcggcaagaggaaggctgacagcgacagcgaggacaagggggaggagagcaagcccaagaagaagaaggaggagagcgagaagccctag

SEQ ID NO: 168182 - DNA, 2232 bp, Artificial Sequence
  derived and/or modified sequence
gaggcccatggtgccgtgcggcgggtcgttgcgcctgcgcggtgcgagcggcgggcagcgcagactgcgaggctcttttgttcggctgaggggagggccgttggccggggcctgcggtacgccgcttcagtgagggacgccactgcggccacccggcttgctgccttcctgggcgccactcccccaggcgacccgacgcgacgcgccagcagcgcagcaccgattcctctcgggctcttgggcgctgctctgagcagcgtcaccctttacaccagaaagctggcgggcactatggggaaaaaacaaaacaagaagaaagtggaggaggtgctagaagaggaggaagaggaatatgtggtggaaaaagttctcgaccgtcgagtggtaaagggcaaagtggagtacctcctaaagtggaagggattctcagatgaggacaacacatgggagccagaagagaacctggattgccccgacctcattgctgagtttctgcagtcacagaaaacagcacatgagacagataaatcagagggaggcaagcgcaaagctgattctgattctgaagataagggagaggagagcaaaccaaagaagaagaaagaagagtcagaaaagccacgaggctttgctcgaggtttggagccggagcggattattggagctacagactccagtggagagctcatgttcctgatgaaatggaaaaactctgatgaggctgacctggtccctgccaaggaagccaatgtcaagtgcccacaggttgtcatatccttctatgaggaaaggctgacgtggcattcctacccctcggaggatgatgacaaaaaagatgacaagaactaacgctcctgagtaccagcccctgtcacatctgactgtgggtttcaagtgggaagggaaggagttctacttgtcttgacaccatagaggtggcttgagaagatgtcctttgaagagccagtatagtttctgtgccctgcagcagcccaagtgctttaaagccgtttcaagctgtatagtttgcacacccatcccagtggaggggaaaggggataagtgtttcaaggcaaccttttctgcactttgctgcgaaaagcaaagggccttctatgaaggacaaaacttgcagaattgggtgtgtgggagagcaaaaaaatactgtagatcttcaaagagcatctccacaacccacagccttcttcccaatagtgttaactctgcatttttacagcgtagcatgtgtgtagtttttggctattactggtgtattatttgggggagggagggatggggaggggagaaagggagatgggtagcatcattttgattaacatttggggcctgataggggaaatggtgaagcaatggaaaagaacagacaactaatgatttgcttctatgtccagaatattttacctttaaaaaaatgtcattggcaccataaataaggactgtgagagactgtttaaaagctgtgaaagtctgaaacctataagccaaggtgttccctgcctaaacttattgctgttcccacaaaggactaagcctgttcataagttaccaaagttgccattttggagatggaaattgacgaggagggaaggtcttttattggagagtatacagtacaagcagatcattctgccttagaggtgctaattcccgaaattagaagaccctttcttttccagtaacgaagttataaatatcagcttgttcatccaagccactggctgaggtgttaggaagaggaagagggtggtagaggaggtaagacagtagggaaagacaagggcccatgctcttagtggggaaaactcttggagccgtttactttgagctttgaacactgaaaccattgttggcagggttcagtcactgacagcacaagtttcactgaattgatccaagagtttagtgatttcaaaagccttggtctcaggagaagattaaactttcatattgggcagtggttcactttaaaacacacacatacacacacaaaacaattttttaagaaatcctaataagtaacatacccaaaatgctctgtcttgagtcatgagaaccatcagttcttgatattgtctagacttgcatctagagctacgttgtaaaattcttttaggcatgtgttagatttctgtgtaaactttgtttaaatgtaaacttcatactacattgtcagtttttgtcttaataaaactatagatttataatccctga

SEQ ID NO: 168183 - DNA, 2422 bp, Artificial Sequence
  derived and/or modified sequence
gtgagggaacgcgctttcgaggcggaggttaggagcggggagcgcgcccgggtccagcgtcctgcttctccgcttcccgcgctgagctcttcgcctgtcgctgaggcgtcggtgccagctgcgtgaaggatggagagggcggggcgcgaatcctgagccagagactgagtgcttgggggtgggccgagcacttgggggccgctcttcggggcccgggtggtctggaacaatgttgcttggctgggcggctgcgggatagggcggaaggggacaggcttgaggcttggataggcgtgaggaggcgcatacgaccgcacaacccgaggtttgtaactgtattcggaagacgccgggtccggctgggactgccagaggaacctggctttgcaggactacggaggagtaacgtcgagtgaattggaagagggcccagggccgcacaagcagcgtcaccctttacaccagaaagctggcgggcactatggggaaaaaacaaaacaagaagaaagtggaggaggtgctagaagaggaggaagaggaatatgtggtggaaaaagttctcgaccgtcgagtggtaaagggcaaagtggagtacctcctaaagtggaagggattctcagatgaggacaacacatgggagccagaagagaacctggattgccccgacctcattgctgagtttctgcagtcacagaaaacagcacatgagacagataaatcagagggaggcaagcgcaaagctgattctgattctgaagataagggagaggagagcaaaccaaagaagaagaaagaagagtcagaaaagccacgaggctttgctcgaggtttggagccggagcggattattggagctacagactccagtggagagctcatgttcctgatgaaatggaaaaactctgatgaggctgacctggtccctgccaaggaagccaatgtcaagtgcccacaggttgtcatatccttctatgaggaaaggctgacgtggcattcctacccctcggaggatgatgacaaaaaagatgacaagaactaacgctcctgagtaccagcccctgtcacatctgactgtgggtttcaagtgggaagggaaggagttctacttgtcttgacaccatagaggtggcttgagaagatgtcctttgaagagccagtatagtttctgtgccctgcagcagcccaagtgctttaaagccgtttcaagctgtatagtttgcacacccatcccagtggaggggaaaggggataagtgtttcaaggcaaccttttctgcactttgctgcgaaaagcaaagggccttctatgaaggacaaaacttgcagaattgggtgtgtgggagagcaaaaaaatactgtagatcttcaaagagcatctccacaacccacagccttcttcccaatagtgttaactctgcatttttacagcgtagcatgtgtgtagtttttggctattactggtgtattatttgggggagggagggatggggaggggagaaagggagatgggtagcatcattttgattaacatttggggcctgataggggaaatggtgaagcaatggaaaagaacagacaactaatgatttgcttctatgtccagaatattttacctttaaaaaaatgtcattggcaccataaataaggactgtgagagactgtttaaaagctgtgaaagtctgaaacctataagccaaggtgttccctgcctaaacttattgctgttcccacaaaggactaagcctgttcataagttaccaaagttgccattttggagatggaaattgacgaggagggaaggtcttttattggagagtatacagtacaagcagatcattctgccttagaggtgctaattcccgaaattagaagaccctttcttttccagtaacgaagttataaatatcagcttgttcatccaagccactggctgaggtgttaggaagaggaagagggtggtagaggaggtaagacagtagggaaagacaagggcccatgctcttagtggggaaaactcttggagccgtttactttgagctttgaacactgaaaccattgttggcagggttcagtcactgacagcacaagtttcactgaattgatccaagagtttagtgatttcaaaagccttggtctcaggagaagattaaactttcatattgggcagtggttcactttaaaacacacacatacacacacaaaacaattttttaagaaatcctaataagtaacatacccaaaatgctctgtcttgagtcatgagaaccatcagttcttgatattgtctagacttgcatctagagctacgttgtaaaattcttttaggcatgtgttagatttctgtgtaaactttgtttaaatgtaaacttcatactacattgtcagtttttgtcttaataaaactatagatttataatccctga

SEQ ID NO: 168184 - DNA, 558 bp, Artificial Sequence
  derived and/or modified sequence
atgggcaagaagcagaacaagaagaaggtggaggaggtgctggaggaggaggaagaggagtacgttgtagagaaggtgttggacagacgagtggtcaaggggaaagtcgaatatcttctcaaatggaaaggattctccgacgaggataacacttgggaaccggaggagaatctcgactgccccgacctgattgccgagtttcttcagtcccaaaagaccgcacacgagactgacaaaagcgagggaggaaaacgtaaagctgacagcgactcggaggacaaaggagaggagtccaaacccaagaaaaaaaaagaagagtccgagaagccgcgcggatttgcacggggcctggaacccgagagaatcataggcgccaccgactccagcggggagctgatgttcctcatgaagtggaagaacagtgatgaagccgacctggtccctgcaaaggaagccaacgttaagtgtccccaggtcgtgatctcattctacgaagagaggctgacttggcactcttatccttctgaagacgatgacaagaaggatgataagaactag

SEQ ID NO: 168185 - DNA, 333 bp, Artificial Sequence
  derived and/or modified sequence
atgggcaagaagcagaacaagaagaaggtggaggaggtgctggaggaggaggaagaagaatacgtcgtggagaaagtcctcgacagaagggtcgtgaaaggaaaagtggaatacctcctcaagtggaagggcttcagcgacgaggataatacgtgggagcccgaggaaaacctcgactgtcccgacctgatcgccgagtttctgcagtcccagaaaaccgcccatgagacagataagtccgagggcgggaaacgcaaggcagacagcgatagtgaggacaaaggagaagaatctaagccaaaaaaaaaaaaagaggagagcgagaagccatag

SEQ ID NO: 168186 - DNA, 558 bp, Artificial Sequence
  derived and/or modified sequence
atgggcaagaaacaaaacaagaaaaaggtcgaggaggtgttggaggaggaggaggaagagtatgtcgtagaaaaggtcctggacagaagagtggtgaagggcaaggtagagtacctgctgaagtggaagggtttctcagacgaggacaatacctgggaaccagaagagaatctggactgcccggacctgatcgccgagttcctccagtcccagaagacggcccatgaaaccgacaagagtgaaggcggtaaaagaaaagctgattccgactcggaggataaaggcgaagagtccaaacccaagaaaaagaaggaggaaagtgagaaaccgagaggcttcgccagggggctcgaaccagaacgcattattggtgccacggattcttctggggagctgatgtttttaatgaaatggaaaaattccgatgaggctgacctcgtccccgcaaaagaggccaatgtgaaatgcccccaggtggttatcagcttttacgaagaacggcttacctggcattcctaccccagtgaggacgacgacaagaaagacgataagaattag

SEQ ID NO: 168187 - DNA, 333 bp, Artificial Sequence
  derived and/or modified sequence
atgggcaagaaacagaacaaaaagaaggtcgaggaagtgctggaagaggaggaagaagagtacgtcgtggagaaggtcctcgacaggcgcgtagtgaaaggcaaggtcgaatacctgttgaaatggaagggcttttcagacgaagataatacatgggagccggaggagaacttagattgccccgaccttattgctgaattcttacagagtcagaaaaccgctcacgagaccgacaagtctgaggggggaaaaaggaaagccgattccgactctgaggataagggcgaagagagtaagcccaaaaagaagaaggaggaaagtgagaagccatag

SEQ ID NO: 168188 - DNA, 544 bp, Artificial Sequence
  derived and/or modified sequence
gccgcccttgcatcctgatgggtccttacagtggggaggctgtaagaataattcaagttttccatctggaaagcatttgcttcgcaaacagccacagcttacagactacaagcagtttagaaacaagactaccacctgaatatactacacatgccttcacctgccttttgatgattgcagcgtcaccctttacaccagaaagctggcgggcactatggggaaaaaacaaaacaagaagaaagtggaggaggtgctagaagaggaggaagaggaatatgtggtggaaaaagttctcgaccgtcgagtggtaaagggcaaagtggagtacctcctaaagtggaagggattctcagatgaggacaacacatgggagccagaagagaacctggattgccccgacctcattgctgagtttctgcagtcacagaaaacagcacatgagacagataaatcagagggaggcaagcgcaaagctgattctgattctgaagataagggagaggagagcaaaccaaagaagaagaaagaagagtcagaaaagcca

SEQ ID NO: 168189 - DNA, 558 bp, Artificial Sequence
  derived and/or modified sequence
atgggaaaaaagcagaataagaaaaaggtggaagaggtcttagaggaagaggaggaggagtacgtcgtggaaaaagtccttgacaggcgcgtggtgaaagggaaagtcgagtatcttctgaagtggaaaggcttctcggacgaggataacacttgggagcctgaggagaacctggattgtccagatctaattgccgaatttctgcagtctcagaaaactgcccatgagacagacaaaagtgaaggaggtaagaggaaagccgacagtgacagcgaggacaaaggagaagagtctaagccaaagaagaagaaggaagagtctgaaaagccaagaggcttcgcccgcgggctggaacctgaacggatcatcggtgccaccgactcctcaggcgagctaatgttccttatgaagtggaagaatagcgacgaggcagatctggtgccagcaaaggaagcaaatgtgaaatgccctcaggtcgtgatcagcttttatgaagagagattgacctggcattcctatccctctgaggacgatgataaaaaggatgacaaaaactag

SEQ ID NO: 168190 - DNA, 558 bp, Artificial Sequence
  derived and/or modified sequence
atgggcaagaagcagaacaagaagaaggtggaggaggtgctggaggaagaagaggaagaatacgttgtggaaaaggtgctcgaccgcagggtcgtcaagggcaaagtggagtacctcttgaaatggaaaggtttctccgatgaagacaacacatgggaacccgaagaaaatctggactgtccagacctgatcgccgagttccttcagtcccagaaaaccgcccatgaaacagacaaatccgaaggtgggaaacggaaggccgacagtgattcggaagataagggggaagaaagcaagccaaaaaaaaagaaagaggaaagtgagaagcccagagggttcgcccggggcctggagcctgagcgcattatcggtgcaaccgattcctccggggaactcatgtttttaatgaagtggaagaatagcgacgaggccgatctggtgccagccaaggaagccaacgtcaagtgtcctcaggtagtcatatctttctacgaggagaggctcacatggcattcctatcctagcgaagatgacgacaaaaaggatgataagaattag

SEQ ID NO: 168191 - DNA, 558 bp, Artificial Sequence
  derived and/or modified sequence
atgggcaaaaaacagaataagaagaaggtcgaggaggtgctggaggaagaagaggaggagtacgtggttgaaaaagtccttgatcgtcgagttgtgaaagggaaagtggagtacctgctgaagtggaaggggttcagtgacgaggataatacctgggagcctgaggaaaacttggattgccccgaccttattgcagaatttctgcagtcgcaaaaaaccgcacacgagaccgacaagtctgagggtgggaaaagaaaagctgacagtgactcagaagataagggagaggagtctaaaccaaagaaaaagaaagaagagagcgaaaagcccagaggttttgcacggggacttgagccagaaaggataatcggggctaccgattcttccggcgagctgatgttcttgatgaagtggaagaatagcgacgaagcagacttggtccccgcaaaagaggcaaatgtgaagtgtccacaggtggtcatcagcttttacgaagaaaggttaacctggcactcatatccctcagaggacgacgataagaaggacgataagaactag

SEQ ID NO: 168192 - protein, 309 aa, Artificial Sequence
  derived and/or modified sequence
MAPKFPDSVEELRAAGNESFRNGQYAEASALYGRALRVLQAQGSSDPEEESVLYSNRAACHLKDGNCRDCIKDCTSALALVPFSIKPLLRRASAYEALEKYPMAYVDYKTVLQIDDNVTSAVEGINRMTRALMDSLGPEWRLKLPSIPLVPVSAQKRWNSLPSENHKEMAKSKSKETTATKNRVPSAGDVEKARVLKEEGNELVKKGNHKKAIEKYSESLLCSNLESATYSNRALCYLVLKQYTEAVKDCTEALKLDGKNVKAFYRRAQAHKALKDYKSSFADISNLLQIEPRNGPAQKLRQEVKQNLH

SEQ ID NO: 168193 - DNA, 930 bp, Artificial Sequence
  derived and/or modified sequence
atggcccccaagttccccgacagcgtggaggagctgagagccgccggcaacgagagcttcagaaacggccagtacgccgaggccagcgccctgtacggcagagccctgagagtgctgcaggcccagggcagcagcgaccccgaggaggagagcgtgctgtacagcaacagagccgcctgccacctgaaggacggcaactgcagagactgcatcaaggactgcaccagcgccctggccctggtgcccttcagcatcaagcccctgctgagaagagccagcgcctacgaggccctggagaagtaccccatggcctacgtggactacaagaccgtgctgcagatcgacgacaacgtgaccagcgccgtggagggcatcaacagaatgaccagagccctgatggacagcctgggccccgagtggagactgaagctgcccagcatccccctggtgcccgtgagcgcccagaagagatggaacagcctgcccagcgagaaccacaaggagatggccaagagcaagagcaaggagaccaccgccaccaagaacagagtgcccagcgccggcgacgtggagaaggccagagtgctgaaggaggagggcaacgagctggtgaagaagggcaaccacaagaaggccatcgagaagtacagcgagagcctgctgtgcagcaacctggagagcgccacctacagcaacagagccctgtgctacctggtgctgaagcagtacaccgaggccgtgaaggactgcaccgaggccctgaagctggacggcaagaacgtgaaggccttctacagaagagcccaggcccacaaggccctgaaggactacaagagcagcttcgccgacatcagcaacctgctgcagatcgagcccagaaacggccccgcccagaagctgagacaggaggtgaagcagaacctgcactag

SEQ ID NO: 168194 - DNA, 930 bp, Artificial Sequence
  derived and/or modified sequence
atggcccctaaattccctgattctgtcgaagaactgcgggcagctggcaatgaatcgtttcgaaatgggcagtacgctgaagcctccgcgctttacggcagggccctccgcgtgctgcaggcccaaggcagctccgatcccgaggaagaatctgtgttgtactctaacagagcagcctgccatctgaaagacggcaattgtagagactgtatcaaagattgcacttctgctctggctctcgtccccttttcaatcaagcccctcttacgacgtgcgagcgcgtacgaagccctggaaaaatacccgatggcctatgtggactacaagacagtgctgcagatcgacgataacgttacctcagcagtggagggcatcaaccgcatgacgagagcactcatggattccctggggcctgagtggcgattaaaactcccatccattcccctggtgcctgtatctgcccagaagaggtggaactccctcccgagcgagaaccacaaagagatggctaaaagcaaatctaaggagacaaccgctacgaagaatcgggtccccagtgccggagatgtcgagaaggcgcgcgttctgaaggaagaggggaacgagttggtgaaaaaggggaatcataaaaaggctatcgaaaaatactctgagtctcttctgtgctcaaatctggaatccgctacgtactcaaacagggccctctgctatctagttctcaaacagtataccgaagcagtgaaggattgcaccgaagcccttaaactggatgggaagaatgttaaagcattttatcgcagggcgcaggctcataaagccctgaaggactacaagagcagcttcgccgacatttcgaatctgctgcagatcgagcctagaaacggccccgcgcagaagttgcgccaggaggtgaagcaaaatctgcactag

SEQ ID NO: 168195 - DNA, 930 bp, Artificial Sequence
  derived and/or modified sequence
atggcccccaagttcccagacagcgtggaggagctgcgggctgctggaaatgaaagcttcagaaatggccagtatgcagaggccagcgccctgtatggccgggccctgcgggtgctgcaggcccagggcagcagtgaccctgaggaggagagcgtgctgtacagcaacagagctgcctgccacctgaaggatggcaactgccgggactgcatcaaggactgcaccagcgccctggccctggtgcccttcagcatcaagcccctgctgcggcgggccagcgcctatgaggccctggagaagtaccccatggcctacgtggactacaagacagtgctgcagattgatgacaacgtgaccagcgctgtggagggcatcaacaggatgacccgggccctgatggacagcctgggccctgagtggaggctgaagctgcccagcatccccctggtgcctgtgtctgcccagaagcgctggaacagcctgcccagcgagaaccacaaggagatggccaagagcaagagcaaggagaccacagccaccaagaacagagtgcccagcgctggagatgtggagaaggcccgggtgctgaaggaggagggcaatgagctggtgaagaagggcaaccacaagaaggccatcgagaagtacagcgagagcctgctgtgcagcaacctggagagcgccacctacagcaacagagccctgtgctacctggtgctgaagcagtacacagaggccgtgaaggactgcacagaggccctgaagctggatggcaagaatgtgaaggccttctaccgccgggcccaggcccacaaggccctgaaggactacaagagcagctttgctgacatcagcaacctgctgcagatcgagcccagaaatggacctgcccagaagctgcggcaggaggtgaagcagaacctgcactag

SEQ ID NO: 168196 - DNA, 930 bp, Artificial Sequence
  derived and/or modified sequence
atggcccccaagttccccgacagcgtggaggagctgcgggccgccggcaatgaaagcttccgcaatggacaatatgctgaggcctcggcactctacggtagggctcttcgagtcctccaggcgcaggggtctagcgatcccgaggaggagtcggtgttatacagtaatcgggcagcctgtcacctgaaggatggcaattgcagggactgcatcaaggactgcacgtctgccttggccctcgtgccattttctatcaagcccttactgaggcgggctagcgcttatgaagccctcgaaaagtatccgatggcatacgttgactataaaaccgttcttcagatagacgacaatgtgactagcgcagtggaaggaataaatagaatgacacgcgccctcatggacagcttaggaccagagtggaggctgaaattgccgagtattcctttagtccccgtctcagctcagaaacggtggaactcgctaccttccgaaaatcataaagagatggctaagtctaagtcgaaagagaccaccgctactaagaaccgagtaccgtccgccggcgatgtcgagaaagctcgggtgcttaaggaagaagggaatgagctggtgaaaaaaggcaatcacaaaaaggccattgagaaatatagcgagtccttgctttgcagcaacttagaatccgccacctattctaatcgagccttgtgctacttagtcttgaagcagtacacagaagcagtgaaggactgtaccgaagccctgaagctggatggaaaaaatgtcaaggctttctatcgccgggcccaagcacacaaggctctgaaagactacaaaagtagcttcgctgacatatccaatttgctgcagatagaacctcggaacgggcccgcacaaaaactccggcaagaagtcaaacagaacttgcactag

SEQ ID NO: 168197 - DNA, 930 bp, Artificial Sequence
  derived and/or modified sequence
atggccccaaaattccccgatagcgttgaggaactgagagctgcgggtaatgagagtttccggaacggccagtatgctgaggccagtgctttatacggtagggccctcagagtgctgcaagcgcaaggctcttctgatcctgaagaggaatctgtgctgtactcaaaccgcgcagcttgccatctgaaggacggtaattgccgcgattgcattaaggattgcacttctgctctcgctctggtgcctttctccatcaaaccactgttgaggcgcgcaagtgcgtatgaagctctggaaaagtacccaatggcatatgttgattacaagaccgtactgcagatcgacgacaacgtcaccagcgccgttgaggggattaatagaatgactcgggctttaatggactccctcggtcctgaatggcggctgaaattgccttcaatacccctcgtgcccgtatctgcgcaaaagagatggaattccctgccctccgaaaaccacaaggaaatggccaagtccaagtccaaggagacgacggcgacaaaaaacagggtgccctctgccggagatgtcgaaaaggctcgcgtactcaaggaggaaggcaacgagcttgtaaagaaaggcaatcacaaaaaggcaatcgagaagtattcagagtcccttctctgttcaaacttagaatccgccacttattccaatagagccttgtgttacctcgtgttaaagcagtacactgaggccgtgaaggactgcacggaggcactgaaactagacggaaagaacgtgaaagctttttataggagagcccaggcccataaagctttgaaagactacaaatcatcttttgcggacataagcaatctgttgcagattgaaccacgtaatgggccagctcaaaagctgcggcaggaggtcaagcagaatctgcactag

SEQ ID NO: 168198 - DNA, 2062 bp, Artificial Sequence
  derived and/or modified sequence
gctccgggcctccaggtctcgcaggccccgccccctcgccgcgggttcgctgttgggcggagatattcgccgccggcgcttgcgcccggaaggtgtgccgcaccacacgggggaggaaggaaggagctcccaactcgccggcctggccacgggatggcccccaaattcccagactctgtggaggagctccgcgccgccggcaatgagagtttccgcaacggccagtacgccgaggcctccgcgctctacggccgcgcgctgcgggtgctgcaggcgcaaggttcttcagacccagaagaagaaagtgttctctactccaaccgagcagcatgtcacttgaaggatggaaactgcagagactgcatcaaagattgcacttcagcactggccttggttcccttcagcattaagcccctgctgcggcgagcatctgcttatgaggctctggagaagtaccctatggcctatgttgactataagactgtgctgcagattgatgataatgtgacgtcagccgtagaaggcatcaacagaatgaccagagctctcatggactcgcttgggcctgagtggcgcctgaagctgccctcaatccccttggtgcctgtttcagctcagaagaggtggaattccttgccttcggagaaccacaaagagatggctaaaagcaaatccaaagaaaccacagctacaaagaacagagtgccttctgctggggatgtggagaaagccagagttctgaaggaagaaggcaatgagcttgtaaagaagggaaaccataagaaagctattgagaagtacagtgaaagcctcttgtgtagtaacctggaatctgccacgtacagcaacagagcactctgctatttggtcctgaagcagtacacagaagcagtgaaggactgcacagaagccctcaagctggatggaaagaacgtgaaggcattctacagacgggctcaagcccacaaagcactcaaggactataaatccagctttgcagacatcagcaacctcctacagattgagcctaggaatggtcctgcacagaagttgcggcaggaagtgaagcagaacctacactaaaaacccaacagggcaactggaacccctgcctgaccttacccagagaagccatgggccacctgctctgtgcccgctcctgaaacccagcatgccccaagtgagctctgaagccccctcctcaatcccttgatggcctcccaccctgtaagaggctttgcttgttcaaattaaactcagtgtagtcaaacacagacatggttgttgcaccagaaaggtccccactagagctaagcgtgaagctgaagctctgtccctattcccccagcccagctagctgatcacaccaacagatcctcatcagcaaagcatttggctttgtcctgcccaagtgggctgcagactgagtgctgcccttgtagcttccccagaccccaactcactgcagttcatctgaacaacctgagctcctgggccggggtggaaggagggggataaacctaaggccctgatccaaagcagcctgttgagctggttctccagggctgcagtctctccaggtgtacagctgctgtccctgccctgtcctgtccttgcacagtctcctatgtctgagccccagtgccttctgttcgggccctcctttggtgggaaggcagagccctgacccttgaatggttgtccttgactctgtgctgctgccttctgcagagaggcacctaagctgtttaaagagcccagtgattgtggctgctcctcctagaggtgggagggggcaagaggcctccttggtcagtgtccatgctttctgggcagggacttggttttttgttccaacagtggccttctccgggcttcatagttctttgtaatatgttgaagttaatttgaattgactgattttgttgaactgtgtgtttaagctgttgcattaaaaagctttcttctacatcaatatctgctgtgctttcatttatgccttttcagctttgcacctggaactctgtagtaataataaaagttattgcttattgggcattca

SEQ ID NO: 168199 - protein, 519 aa, Artificial Sequence
  derived and/or modified sequence
MARAGPAWLLLAIWVVLPSWLSSAKVSSLIERISDPKDLKKLLRTRNNVLVLYSKSEVAAENHLRLLSTVAQAVKGQGTICWVDCGDAESRKLCKKMKVDLSPKDKKVELFHYQDGAFHTEYNRAVTFKSIVAFLKDPKGPPLWEEDPGAKDVVHLDSEKDFRRLLKKEEKPLLIMFYAPWCSMCKRMMPHFQKAATQLRGHAVLAGMNVYSSEFENIKEEYSVRGFPTICYFEKGRFLFQYDNYGSTAEDIVEWLKNPQPPQPQVPETPWADEGGSVYHLTDEDFDQFVKEHSSVLVMFHAPWCGHCKKMKPEFEKAAEALHGEADSSGVLAAVDATVNKALAERFHISEFPTLKYFKNGEKYAVPVLRTKKKFLEWMQNPEAPPPPEPTWEEQQTSVLHLVGDNFRETLKKKKHTLVMFYAPWCPHCKKVIPHFTATADAFKDDRKIACAAVDCVKDKNQDLCQQEAVKGYPTFHYYHYGKFAEKYDSDRTELGFTNYIRALREGDHERLGKKKEEL

SEQ ID NO: 168200 - DNA, 1560 bp, Artificial Sequence
  derived and/or modified sequence
atggccagagccggccccgcctggctgctgctggccatctgggtggtgctgcccagctggctgagcagcgccaaggtgagcagcctgatcgagagaatcagcgaccccaaggacctgaagaagctgctgagaaccagaaacaacgtgctggtgctgtacagcaagagcgaggtggccgccgagaaccacctgagactgctgagcaccgtggcccaggccgtgaagggccagggcaccatctgctgggtggactgcggcgacgccgagagcagaaagctgtgcaagaagatgaaggtggacctgagccccaaggacaagaaggtggagctgttccactaccaggacggcgccttccacaccgagtacaacagagccgtgaccttcaagagcatcgtggccttcctgaaggaccccaagggcccccccctgtgggaggaggaccccggcgccaaggacgtggtgcacctggacagcgagaaggacttcagaagactgctgaagaaggaggagaagcccctgctgatcatgttctacgccccctggtgcagcatgtgcaagagaatgatgccccacttccagaaggccgccacccagctgagaggccacgccgtgctggccggcatgaacgtgtacagcagcgagttcgagaacatcaaggaggagtacagcgtgagaggcttccccaccatctgctacttcgagaagggcagattcctgttccagtacgacaactacggcagcaccgccgaggacatcgtggagtggctgaagaacccccagcccccccagccccaggtgcccgagaccccctgggccgacgagggcggcagcgtgtaccacctgaccgacgaggacttcgaccagttcgtgaaggagcacagcagcgtgctggtgatgttccacgccccctggtgcggccactgcaagaagatgaagcccgagttcgagaaggccgccgaggccctgcacggcgaggccgacagcagcggcgtgctggccgccgtggacgccaccgtgaacaaggccctggccgagagattccacatcagcgagttccccaccctgaagtacttcaagaacggcgagaagtacgccgtgcccgtgctgagaaccaagaagaagttcctggagtggatgcagaaccccgaggccccccccccccccgagcccacctgggaggagcagcagaccagcgtgctgcacctggtgggcgacaacttcagagagaccctgaagaagaagaagcacaccctggtgatgttctacgccccctggtgcccccactgcaagaaggtgatcccccacttcaccgccaccgccgacgccttcaaggacgacagaaagatcgcctgcgccgccgtggactgcgtgaaggacaagaaccaggacctgtgccagcaggaggccgtgaagggctaccccaccttccactactaccactacggcaagttcgccgagaagtacgacagcgacagaaccgagctgggcttcaccaactacatcagagccctgagagagggcgaccacgagagactgggcaagaagaaggaggagctgtag

SEQ ID NO: 168201 - DNA, 1560 bp, Artificial Sequence
  derived and/or modified sequence
atggcccgcgcgggtcccgcctggctgcttttggctatttgggtggtgttgcccagctggctctctagcgccaaagttagcagcctgatcgagcggattagtgatcccaaagatttgaagaagcttttacggactcggaacaacgttctagtcctgtatagtaaatctgaggtagcagccgagaatcaccttagactgctcagcaccgtggcacaggccgtaaaaggacagggcactatctgttgggtggactgtggtgacgctgagtcgcgcaagctgtgcaagaagatgaaggtggatctgagccctaaagataaaaaggtggaacttttccattatcaggatggagcattccatacagagtataaccgggcagttacatttaaaagtatcgtggcctttctaaaggaccctaaaggccccccactgtgggaggaggatccaggtgcgaaggacgtggtgcacctggactccgaaaaggactttaggaggctacttaagaaagaggagaaaccactgctgataatgttctatgcaccctggtgcagcatgtgtaagcgcatgatgccccactttcagaaggccgcaacacaattgaggggacatgctgtcttggctggcatgaatgtttacagctccgagttcgaaaatatcaaggaagagtacagtgtgcgggggttccccaccatatgttacttcgagaagggaaggttcttgttccaatatgacaattacgggagcacggccgaagatatcgtcgagtggcttaagaaccctcagccccctcaaccacaggtgccggagaccccatgggccgacgaaggcgggtcagtctaccatttgacagacgaggacttcgaccagtttgtgaaggaacatagtagtgtgttagtgatgttccacgccccctggtgcggccactgcaaaaaaatgaaacctgaattcgagaaagccgcagaggccttacatggcgaggccgactccagcggagtgctcgctgcagtagatgctacagtaaacaaggcgctcgccgagcggtttcacatctccgagttcccgacattgaagtacttcaaaaacggcgagaaatacgcagtgcctgtgttgcgcacaaagaagaaatttttggagtggatgcaaaaccccgaagcccctccgccacctgagcccacgtgggaagaacagcaaacatcagtgctgcacctggtgggagataattttagggaaacattgaaaaagaagaaacacacactcgtaatgttttatgcgccatggtgtccccactgtaagaaggtgatcccccactttacggcaacagctgacgctttcaaggatgatcgtaagattgcatgtgctgccgttgactgcgtcaaggacaaaaatcaagatctctgccagcaggaggcggtcaagggatatccaacgtttcattactaccattatggcaagttcgccgaaaaatacgattctgacagaacagagctgggttttactaattacatcagagcccttcgggagggtgaccatgagcgcctgggaaagaaaaaagaggagctgtag

SEQ ID NO: 168202 - DNA, 1560 bp, Artificial Sequence
  derived and/or modified sequence
atggcccgggccggccctgcctggctgctgctggccatctgggtggtgctgcccagctggctgagcagcgccaaggtgagcagcctcatcgagcgcatcagtgaccccaaggacctgaagaagctgctgcggaccaggaacaacgtgctggtgctgtacagcaagtctgaggtggccgctgagaaccacctgcggctgctgagcacagtggcccaggccgtgaagggccagggcaccatctgctgggtggactgtggagatgctgagagcaggaagctgtgcaagaagatgaaggtggacctgagccccaaggacaagaaggtggagctgttccactaccaggatggagccttccacacagagtacaacagagctgtgaccttcaagagcatcgtggccttcctgaaggaccccaagggcccccccctgtgggaggaggaccccggggccaaggatgtggtgcacctggacagcgagaaggacttccggcggctgctgaagaaggaggagaagcccctgctgatcatgttctacgccccctggtgcagcatgtgcaagaggatgatgccccacttccagaaggccgccacccagctgcggggccatgctgtgctggccggcatgaatgtgtacagcagcgagtttgagaacatcaaggaggagtacagcgtgcggggcttccccaccatctgctactttgagaagggccgcttcctgttccagtatgacaactacggcagcacagctgaggacatcgtggagtggctgaagaacccccagcccccccagccccaggtgcctgagaccccctgggcagatgaaggaggctctgtgtaccacctgacagatgaggactttgaccagtttgtgaaggagcacagctctgtgctggtgatgtttcatgccccctggtgtggccactgcaagaagatgaagccagagtttgagaaggctgctgaggccctgcatggagaggccgacagcagtggagtgctggccgctgtggatgccaccgtgaacaaggccctggccgagcgcttccacatcagcgagttccccaccctgaagtacttcaagaatggagagaagtatgctgtgcctgtgctgcggaccaagaagaagttcctggagtggatgcagaaccctgaggcccctcctcctcctgagcccacctgggaggagcagcagacctctgtgctgcacctggtgggggacaacttccgggagaccctgaagaagaagaagcacaccctggtgatgttctacgccccctggtgcccccactgcaagaaggtgatcccccacttcaccgccacagcagatgccttcaaggatgacaggaagatcgcctgtgccgctgtggactgtgtgaaggacaagaaccaggacctgtgccagcaggaggccgtgaagggctaccccaccttccactactaccactacggcaagtttgctgagaagtatgacagcgacagaacagagctgggcttcaccaactacatccgggccctgcgggagggggaccacgagcggctgggcaagaagaaggaggagctgtag

SEQ ID NO: 168203 - DNA, 1560 bp, Artificial Sequence
  derived and/or modified sequence
atggcccgggccggccccgcctggctgctgctggccatctgggtggtgctcccctcttggttaagcagtgcgaaggtgtcgagccttatcgaaaggatcagtgacccgaaggaccttaagaagctgcttagaacacgaaacaacgtgctggtcctgtactccaaatccgaagtggctgcagagaatcacttgcgcctcctctcaaccgtcgcccaggccgtgaaggggcaagggacaatctgctgggtcgactgcggcgatgccgagtcccgcaagttgtgtaagaagatgaaagttgatttatctccgaaagataaaaaggtagagctctttcactaccaggacggagctttccataccgagtacaacagagctgtgacattcaaaagcatagtggcattcttaaaggacccaaaagggccaccactgtgggaagaggatcctggggccaaggatgtggttcacctggacagcgagaaggatttccgacgactgcttaagaaggaggaaaagcccctattaattatgttctacgcaccctggtgttcaatgtgcaaacgtatgatgcctcatttccagaaggcagccacccagctgcgggggcacgccgtgctggccggaatgaatgtgtacagcagcgaattcgaaaacataaaagaagagtattccgtgcgagggtttccgaccatctgttattttgaaaaaggacgatttctttttcagtatgacaattacggctcgacagcggaagacatagtggaatggctgaaaaatccccagccaccccagcctcaggtccctgaaacaccctgggctgatgaggggggcagcgtgtatcacctcaccgatgaggatttcgaccagtttgtgaaggagcacagcagtgtgctggtgatgttccacgccccttggtgcggccattgcaagaagatgaaaccagagttcgagaaagcggctgaggctctgcacggggaagccgattctagtggcgtcctggcagccgtggacgctacggtgaataaagccctggccgagcgatttcacataagcgaattccccacactgaaatattttaagaacggagaaaagtatgcagtgccagtgctgcgaaccaaaaagaaattcttagaatggatgcagaacccagaggcaccccccccacctgaaccaacttgggaggaacagcaaacctcagtgcttcacctggtgggtgacaacttccgcgagaccctgaaaaagaagaagcacactctcgtgatgttttatgcaccctggtgcccccactgtaaaaaagtgattccacacttcacggcaaccgccgatgcgttcaaggacgatcggaaaatcgcctgtgctgcggttgattgtgttaaagataagaatcaggatttgtgccagcaggaggccgtcaaggggtatcccacgttccattattaccactacgggaaattcgctgaaaaatacgattcggacagaacagagctcggcttcacgaactacatcagagctctgcgagaaggtgatcatgagaggttggggaaaaaaaaggaggagctttag

SEQ ID NO: 168204 - DNA, 1799 bp, Artificial Sequence
  derived and/or modified sequence
gccgtggtggttggccgcggtggagctagcaggcgggcgggcgggagcgggcgccggagtggagaaaggagccagcggtgggcagcgctgctgggatggcgcgggccgggccggcgtggctgctgctggcaatctgggtggtcctgccatcatggctgtcctctgcaaaggtctcctcgctcattgagagaatctctgaccccaaggacttgaaaaaactgctcagaacccggaataatgtactggtgctttactccaaatctgaggtggcagctgaaaatcatctcaggttactgtccacagtggcccaggcggtgaaaggacaagggaccatctgctgggtggactgtggtgatgcagagagtagaaaattgtgcaagaagatgaaagttgacctgagcccgaaggacaaaaaggttgaattattccattaccaggatggtgcatttcatactgaatataaccgagctgtgacatttaagtccatagtggcctttttgaaggatccaaaagggcccccactgtgggaggaagatcctggagccaaagatgttgtccaccttgacagtgaaaaggacttcagacggctcctgaagaaggaagagaagccgctcctgatcatgttttatgccccctggtgcagcatgtgcaagaggatgatgccgcatttccagaaggctgcgactcagctgcgaggccacgccgtgctggccgggatgaatgtctactcctctgaatttgaaaacatcaaggaggagtacagcgtgcgcggcttccccaccatctgctattttgagaaaggacggttcttgttccagtatgacaactatgggtccacagctgaggacattgtggagtggctgaagaatccgcagccgccacagccccaggtccctgagactccctgggcagatgagggcggctccgtttatcacctgaccgatgaagactttgaccagtttgtgaaggaacactcctctgtcctcgtcatgttccacgccccatggtgtggccactgtaagaaaatgaagccggagtttgagaaggcagcagaagccctccatggagaagcggatagctctggtgtccttgcagctgtcgatgccactgtcaacaaggccctggcagaaagattccacatctcagagtttcctacgttgaagtattttaagaatggagagaaatacgcagtgcctgtgctcaggacaaagaagaagtttctcgagtggatgcaaaaccctgaggcccccccgcccccagagcccacgtgggaagagcagcagacaagcgtgttgcacctggtgggggacaacttccgggagaccctgaagaagaagaaacacaccttggtcatgttctacgccccttggtgcccacactgtaagaaggtcattccgcactttactgctactgctgatgccttcaaagatgaccgaaagattgcctgtgccgctgttgactgtgtcaaagacaagaaccaagacctgtgccagcaggaggcggtcaagggctaccccactttccactactaccactatgggaagttcgcagaaaagtatgacagcgaccgcacagaattgggatttaccaattatattcgagccctccgggagggagaccatgaaagactagggaaaaagaaggaagagttataattcctgcctcagaaaaagcttttccattacactgtgaatgatacctgttttgttgtttctgaatttccacatgttctgaagacaaattttttatagccgcttatggccattttgtacaattttgaaataaaattaaaccattta

SEQ ID NO: 168205 - DNA, 1560 bp, Artificial Sequence
  derived and/or modified sequence
atggcccgagcagggcctgcctggctcttactcgctatttgggtcgtcctgccctcctggcttagcagcgccaaggttagctcgctcatcgagaggatttctgaccctaaggatctgaagaagcttctgcggacgcgtaacaatgtgttagtcttgtactctaaaagcgaagtcgcagccgagaatcatttacggcttctgtcaacagttgcgcaggccgtgaaaggccaggggaccatttgttgggtggactgcggcgatgcggagtcgagaaaactctgtaagaagatgaaggttgatctgtcccccaaagacaagaaagtagagctcttccactaccaggacggtgcgttccatacagaatacaatcgagcagtaacttttaaatccatcgtagcttttcttaaggatcccaaaggacctcccctctgggaggaagacccaggtgctaaggacgtggttcacctggattccgagaaggacttccggcgattattaaagaaagaggaaaagcctctcctaatcatgttctatgcaccttggtgctctatgtgcaagaggatgatgccccacttccagaaagctgctacccagcttcgcggacacgcagtgctagcagggatgaacgtctactcttccgagttcgagaacatcaaagaggaatattccgtgaggggttttcctaccatttgttatttcgagaaggggagattccttttccagtatgataactatggaagcacagccgaggatatagttgagtggctcaaaaaccctcagccgccacaaccacaagtgcccgaaacaccgtgggccgatgaaggtggcagtgtttaccatttgactgatgaagactttgatcagttcgttaaggaacacagttccgtcctggtgatgtttcatgccccatggtgtggccactgtaagaagatgaaacctgagttcgagaaggctgccgaggctctccacggggaagcagattcgagcggagtgctggcggctgttgatgcaaccgtcaataaggcattagccgagcggtttcatatcagcgagttcccgacacttaagtatttcaaaaatggcgagaagtacgccgttccggttttacgcacaaagaagaaatttctggagtggatgcagaaccccgaggcaccgccaccaccagagccaacctgggaggagcagcagactagcgtgctacacctggttggggacaactttagggagaccctcaagaaaaaaaaacataccctggtcatgttttacgccccatggtgcccgcattgcaagaaagttattcctcacttcaccgctaccgccgatgcattcaaagacgatcggaaaatagcctgcgcagccgtggactgcgtgaaggataagaatcaggatttatgtcagcaggaggccgtcaaggggtatcctacctttcactactaccattacggtaagtttgcagagaaatacgactcagatagaacagagctgggttttacaaactatattcgagccctacgcgaaggagaccacgagcggttagggaagaaaaaggaagagctctag

SEQ ID NO: 168206 - protein, 473 aa, Artificial Sequence
  derived and/or modified sequence
MGAVLGVFSLASWVPCLCSGASCLLCSCCPNSKNSTVTRLIYAFILLLSTVVSYIMQRKEMETYLKKIPGFCEGGFKIHEADINADKDCDVLVGYKAVYRISFAMAIFFFVFSLLMFKVKTSKDLRAAVHNGFWFFKIAALIGIMVGSFYIPGGYFSSVWFVVGMIGAALFILIQLVLLVDFAHSWNESWVNRMEEGNPRLWYAALLSFTSAFYILSIICVGLLYTYYTKPDGCTENKFFISINLILCVVASIISIHPKIQEHQPRSGLLQSSLITLYTMYLTWSAMSNEPDRSCNPNLMSFITRITAPTLAPGNSTAVVPTPTPPSKSGSLLDSDNFIGLFVFVLCLLYSSIRTSTNSQVDKLTLSGSDSVILGDTTTSGASDEEDGQPRRAVDNEKEGVQYSYSLFHLMLCLASLYIMMTLTSWYSPDAKFQSMTSKWPAVWVKISSSWVCLLLYVWTLVAPLVLTSRDFS

SEQ ID NO: 168207 - protein, 212 aa, Artificial Sequence
  derived and/or modified sequence
EHQPRSGLLQSSLITLYTMYLTWSAMSNEPDRSCNPNLMSFITRITAPTLAPGNSTAVVPTPTPPSKSGSLLDSDNFIGLFVFVLCLLYSSIRTSTNSQVDKLTLSGSDSVILGDTTTSGASDEEDGQPRRAVDNEKEGVQYSYSLFHLMLCLASLYIMMTLTSWYSPDAKFQSMTSKWPAVWVKISSSWVCLLLYVWTLVAPLVLTSRDFS

SEQ ID NO: 168208 - protein, 440 aa, Artificial Sequence
  derived and/or modified sequence
MPLQRCLIYAFILLLSTVVSYIMQRKEMETYLKKIPGFCEGGFKIHEADINADKDCDVLVGYKAVYRISFAMAIFFFVFSLLMFKVKTSKDLRAAVHNGFWFFKIAALIGIMVGSFYIPGGYFSSVWFVVGMIGAALFILIQLVLLVDFAHSWNESWVNRMEEGNPRLWYAALLSFTSAFYILSIICVGLLYTYYTKPDGCTENKFFISINLILCVVASIISIHPKIQEHQPRSGLLQSSLITLYTMYLTWSAMSNEPDRSCNPNLMSFITRITAPTLAPGNSTAVVPTPTPPSKSGSLLDSDNFIGLFVFVLCLLYSSIRTSTNSQVDKLTLSGSDSVILGDTTTSGASDEEDGQPRRAVDNEKEGVQYSYSLFHLMLCLASLYIMMTLTSWYSPDAKFQSMTSKWPAVWVKISSSWVCLLLYVWTLVAPLVLTSRDFS

SEQ ID NO: 168209 - protein, 418 aa, Artificial Sequence
  derived and/or modified sequence
MQRKEMETYLKKIPGFCEGGFKIHEADINADKDCDVLVGYKAVYRISFAMAIFFFVFSLLMFKVKTSKDLRAAVHNGFWFFKIAALIGIMVGSFYIPGGYFSSVWFVVGMIGAALFILIQLVLLVDFAHSWNESWVNRMEEGNPRLWYAALLSFTSAFYILSIICVGLLYTYYTKPDGCTENKFFISINLILCVVASIISIHPKIQEHQPRSGLLQSSLITLYTMYLTWSAMSNEPDRSCNPNLMSFITRITAPTLAPGNSTAVVPTPTPPSKSGSLLDSDNFIGLFVFVLCLLYSSIRTSTNSQVDKLTLSGSDSVILGDTTTSGASDEEDGQPRRAVDNEKEGVQYSYSLFHLMLCLASLYIMMTLTSWYSPDAKFQSMTSKWPAVWVKISSSWVCLLLYVWTLVAPLVLTSRDFS

SEQ ID NO: 168210 - DNA, 1422 bp, Artificial Sequence
  derived and/or modified sequence
atgggggcggttctcggtgtattttccctggcaagttgggtcccttgtttgtgctcgggggccagttgcctgctgtgcagctgctgccccaatagcaagaattccaccgtgacacgactcatctatgctttcattctgctccttagcacagtggttagctacatcatgcagcggaaggaaatggagacctacttaaagaaaatcccagggttctgcgagggcgggttcaaaatccacgaggctgatatcaatgcagacaaagactgcgacgtcttggtaggttacaaagcagtctataggatttcctttgccatggcaatattcttcttcgtgttctctctcctcatgttcaaggtaaagactagtaaagatctcagggcggcggtccacaatggcttttggttctttaaaatcgctgcactcatcgggatcatggtaggttccttttacatccctgggggttactttagcagcgtatggtttgtcgtgggtatgattggggctgccctattcatcctcatccagctcgtgctgctggttgattttgcacattcatggaatgaaagctgggttaaccgaatggaagaagggaacccccgtctatggtacgccgctcttttaagcttcacctcagctttctacattctgtctattatttgtgttggtcttctgtatacatactataccaagccggacgggtgcactgagaacaagttctttatcagtattaacttaatactgtgcgtggtcgcctcaattatcagcatccaccccaaaatccaggagcaccaacctcgctcaggtttgctccagagctctctaatcacactatacacaatgtatctaacatggagcgccatgtctaatgagccggaccgctcttgcaatcccaatttgatgtctttcatcaccaggatcaccgctccaacactggccccaggaaactccaccgctgtcgttcccacccccacaccacccagtaaaagcggtagcctgcttgactccgacaacttcattggactgttcgtgttcgtcctttgtctcttgtactcatcaattcgtacctccaccaacagccaagttgacaagcttactctcagtggctccgattccgtgatactcggcgatacaacaacctcaggggcctcagatgaagaagacggccagccccgcagggccgtggacaacgaaaaggagggcgtgcaatatagttacagtctattccatctaatgctttgcctggcctccttgtatataatgatgacattgacgtcctggtattcccccgacgctaagtttcaatccatgaccagtaaatggcccgctgtgtgggtcaaaatcagcagctcctgggtatgcttgcttctatacgtctggaccctggtggcaccattggtcctgacctctcgggactttagttag

SEQ ID NO: 168211 - DNA, 1422 bp, Artificial Sequence
  derived and/or modified sequence
atgggggcagtcctgggggtgttttcgctcgcctcatgggtaccctgtctgtgttcaggggcaagctgtctgctatgcagctgctgtccaaactctaaaaattccacagttacaaggttaatctacgctttcattctcctcctgagtaccgtggtgtcctacataatgcagagaaaggagatggaaacctatctcaagaaaatccccggattttgcgagggcggattcaagatccacgaagcggacatcaatgctgataaagactgtgatgtgctagtgggttacaaggccgtctaccgcatctctttcgccatggccatcttcttctttgtctttagtctgttgatgttcaaggtcaagacttctaaggatctgagagctgccgtgcataatgggttttggttctttaagattgccgccttaataggaatcatggttggttccttttacataccaggaggctacttttcttctgtctggtttgtggttggcatgatcggggctgcgctttttatccttatacagctcgtcctgctcgtagattttgctcatagctggaacgaaagttgggtgaacagaatggaggagggtaatcccagactgtggtacgccgctctgctgtcatttacttccgctttttatatcctaagtataatctgtgtgggattactgtatacatattacaccaagcccgatgggtgcactgagaataagtttttcattagcattaacctaatcctgtgcgtggtcgcaagtatcatatcaatccaccctaagatccaggaacaccaacccaggtcaggcctgttgcaatcaagcttgatcactctttacacaatgtatctcacatggtccgcgatgagtaatgagccagacaggtcctgcaaccccaatctgatgtccttcatcacacggatcacagccccgaccctggctcctgggaactctaccgcagtcgtgccaacgcccacgccaccatccaagagcggatctctgctcgactccgataactttatcggcctgtttgtgttcgtgctttgccttctgtacagtagtatcaggacttctactaacagccaagttgataaactgactcttagcgggtctgattccgtgatactgggcgacacaacaacaagcggagccagcgacgaagaggacggtcagcctagaagggccgttgacaacgaaaaggagggggtccagtactcttatagcttgtttcacctcatgctctgcctggcaagtttgtatatcatgatgactcttacttcatggtattcccctgacgctaaatttcagagcatgacttcaaagtggcccgccgtctgggtaaaaatctcttcttcctgggtgtgcctactgttgtatgtgtggactcttgtcgctccactggtcctgactagtcgagacttcagctag

SEQ ID NO: 168212 - DNA, 639 bp, Artificial Sequence
  derived and/or modified sequence
gagcaccagccccgatctgggctgcttcaatcttctctcataacgctctatacaatgtatttgacgtggtccgccatgtccaacgaacccgatcgctcctgtaaccccaacctgatgagttttattaccagaataaccgcccctactctggcccctggtaattctacagccgtggtgcctacccctactcctccctccaagagtgggtctctgctggacagcgacaattttatcggtctttttgtattcgtgctttgtcttctttactcatccatacgtacatccaccaactcccaggtagacaagttgaccctgagtgggtcagatagcgttattctgggcgatacaacaacctctggagccagcgacgaagaggatggacagccaaggcgggctgtagataatgagaaggagggggttcagtattcttactcacttttccacctgatgctctgtttggcatctctgtacatcatgatgactttaacctcatggtacagtccagatgccaagtttcagtcgatgactagtaaatggcccgcggtatgggtcaaaatctcatcaagctgggtgtgtctcctgctatatgtgtggacactcgtcgcaccactagtgctgacatctagggactttagctag

SEQ ID NO: 168213 - DNA, 1323 bp, Artificial Sequence
  derived and/or modified sequence
atgccccttcaacgctgtctcatttacgcctttattctgctcctatcaacagtagtcagttacataatgcagcgcaaggagatggaaacctacctgaaaaaaataccgggattctgtgagggaggatttaagattcacgaggcggatattaatgccgataaggattgtgacgtgttagtaggctataaggctgtgtatcggatttcattcgcaatggccatcttcttttttgtattcagccttctcatgttcaaggtgaagacctccaaggatctgcgcgccgcagtgcacaatgggttctggtttttcaagatcgcggccctgatcgggatcatggtaggctcgttctacattccaggaggctatttttcttctgtctggtttgttgtcgggatgataggggccgcacttttcatcctcattcagctggtactgttagttgattttgcccattcttggaatgaaagttgggtcaataggatggaggaaggcaaccctaggctctggtatgccgccctcctgagttttacatctgccttctatatactgagcataatttgcgtggggctcctttatacctattacacgaagcccgacgggtgcaccgaaaataaattcttcatcagtatcaaccttatcctttgtgtcgtggcgtccatcatttctatacacccaaaaattcaggagcaccaaccccgctcaggactcctgcaatcgagcctgatcacgctgtacaccatgtaccttacgtggtccgcaatgtcgaacgagcccgatagaagctgcaaccccaatctgatgagtttcatcacaagaatcaccgcccctactttagctcccggcaatagtacagctgtggtgccaactcctacacccccaagcaagagcggctccctgcttgattccgataattttatagggctcttcgtctttgtgctgtgcctgttgtactcctcaatacggaccagtactaatagtcaagtagacaagttaaccctgtccggttccgattcggtcatcctgggagacaccaccacgagtggagcgagtgatgaggaagacggtcaaccacggcgggccgtggataacgaaaaggaaggcgtgcagtacagctatagtctgttccatctcatgttgtgcctggcctcgttgtatattatgatgacccttacttcctggtactcccccgacgccaagtttcagagcatgacctcaaagtggccagccgtatgggtcaaaattagctcctcctgggtttgtctgctgttatacgtatggactctagtagccccgttggtcctcacgtctcgagatttttcgtag

SEQ ID NO: 168214 - DNA, 1257 bp, Artificial Sequence
  derived and/or modified sequence
atgcaaaggaaggagatggagacttacctcaaaaaaattcccggattctgcgaaggtggattcaagatacatgaagctgacataaacgcggataaagattgtgatgtcctggtaggctataaagctgtctataggatctcctttgccatggcgatcttctttttcgtcttctccctcctgatgtttaaagtgaagacatcgaaagacctcagagccgccgttcacaatggattttggtttttcaaaatcgccgcattaatcgggataatggtagggtcattttatatccccggcggttacttctccagcgtgtggttcgtcgtggggatgattggcgcggccctgtttattctcatccagttagtgctcctcgtcgactttgcccactcctggaatgaatcctgggtgaatagaatggaagaaggaaatcctcgcctgtggtacgcagctttgctctcattcacttccgctttttatatcctcagcattatctgcgtaggtctgctctatacctactataccaaaccggatggatgtaccgagaacaagtttttcatatctattaacctcattttatgtgtggtcgcatctattatcagcattcaccctaagatacaggagcatcagccaagaagcggcttactgcagtcttctctaattaccctttacacgatgtaccttacctggtcagccatgtctaatgagccagatcgatcttgcaatcccaacctgatgagcttcatcacacgaataaccgctcccacccttgccccagggaatagcactgcagtagtaccgactcccacgccaccttctaaaagtgggtctctgctggattcagacaactttatcgggctgtttgtgttcgtgctttgcctcctgtacagtagcattcggacatctacgaactcccaagtggataaacttacgctgagcggctccgactccgttattctgggtgataccacaacatctggagccagcgacgaagaggacggtcagccaaggagggcagtagataacgaaaaggaaggagttcaatatagttactctctcttccacttgatgctgtgtctcgcgagtctctatatcatgatgaccctgaccagctggtactcccccgacgcaaagttccagagcatgacctcgaagtggcccgccgtgtgggtaaaaatttcttcatcatgggtctgcctgctgttgtatgtgtggacgctggtggcgcctctggtgctgacatcacgtgactttagctag

SEQ ID NO: 168215 - DNA, 1422 bp, Artificial Sequence
  derived and/or modified sequence
atgggcgctgtgctgggcgtcttcagcctggcctcctgggtgccctgcctgtgcagcggggccagctgcctgctgtgcagctgctgccccaacagcaagaacagcacagtgaccaggctcatctatgccttcatcctgctgctgagcacagtggtgtcctacatcatgcagaggaaggagatggagacctacctgaagaagatccctggcttctgtgagggcggcttcaagatccatgaagctgacatcaatgctgacaaggactgtgatgtgctggtgggctacaaggctgtgtaccgcatcagctttgccatggccatcttcttctttgtgttcagcctgctgatgttcaaggtgaagaccagcaaggacctgcgggctgctgtgcacaacggcttctggttcttcaagattgctgccctgattggcatcatggtgggcagcttctacatccctgggggctacttcagctctgtgtggtttgtggtgggcatgattggagctgccctcttcatcctgatccagctggtgctgctggtggactttgcccacagctggaatgaatcctgggtgaacaggatggaggagggcaacccccggctgtggtacgccgccctgctgtccttcaccagcgccttctacatcctgagcatcatctgtgtgggcctgctgtacacctactacaccaagccagatggctgcacagagaacaagttcttcatcagcatcaacctgatcctgtgtgtggtggccagcatcatcagcatccaccccaagatccaggagcaccagcccaggagcggcctgctgcagagcagcctcatcaccctgtacaccatgtacctgacctggagcgccatgagcaatgaaccagacaggagctgcaaccccaacctgatgtccttcatcacccgcatcacagcccccaccctggcccctggcaacagcacagctgtggtgcccacccccaccccacccagcaagagcggcagcctgctggacagcgacaacttcatcggcctgtttgtgtttgtgctgtgcctgctgtacagcagcatccgcaccagcaccaacagccaggtggacaagctgaccctgagcggcagtgacagcgtcatcctgggggacaccaccaccagcggggccagtgatgaggaggatggccagcccaggagagctgtggacaatgagaaggagggcgtgcagtacagctacagcctcttccacctgatgctgtgcctggccagcctgtacatcatgatgaccctgacctcctggtacagcccagatgccaagttccagagcatgaccagcaagtggccagctgtgtgggtgaagatcagcagctcctgggtgtgcctgctgctgtatgtgtggaccctggtggcccccctggtgctgaccagccgggacttctcctag

SEQ ID NO: 168216 - DNA, 639 bp, Artificial Sequence
  derived and/or modified sequence
gagcaccagcccaggagcggcctgctgcagagcagcctcatcaccctgtacaccatgtacctgacctggagcgccatgagcaatgaaccagacaggagctgcaaccccaacctgatgtccttcatcacccgcatcacagcccccaccctggcccctggcaacagcacagctgtggtgcccacccccaccccacccagcaagagcggcagcctgctggacagcgacaacttcatcggcctgtttgtgtttgtgctgtgcctgctgtacagcagcatccgcaccagcaccaacagccaggtggacaagctgaccctgagcggcagtgacagcgtcatcctgggggacaccaccaccagcggggccagtgatgaagaagatggccagccccggcgggctgtggacaatgagaaggagggcgtgcagtacagctacagcctcttccacctgatgctgtgcctggccagcctgtacatcatgatgaccctgacctcctggtacagcccagatgccaagttccagagcatgaccagcaagtggccagctgtgtgggtgaagatcagcagctcctgggtgtgcctgctgctgtatgtgtggaccctggtggcccccctggtgctgaccagccgggacttctcctag

SEQ ID NO: 168217 - DNA, 1323 bp, Artificial Sequence
  derived and/or modified sequence
atgcccctgcagcgctgcctgatctatgccttcatcctgctgctgagcacagtggtgtcctacatcatgcagaggaaggagatggagacctacctgaagaagatccctggcttctgtgagggcggcttcaagatccacgaggccgacatcaatgctgacaaggactgtgatgtgctggtgggctacaaggctgtgtaccgcatcagctttgccatggccatcttcttctttgtgttcagcctgctgatgttcaaggtgaagaccagcaaggacctgcgggctgctgtgcacaacggcttctggttcttcaagattgctgccctgattggcatcatggtgggcagcttctacatccctgggggctacttcagctctgtgtggtttgtggtgggcatgattggagctgccctcttcatcctgatccagctggtgctgctggtggactttgcccacagctggaatgaatcctgggtgaacaggatggaggagggcaacccccggctgtggtatgctgccctgctgtccttcaccagcgccttctacatcctgagcatcatctgtgtgggcctgctgtacacctactacaccaagccagatggctgcacagagaacaagttcttcatcagcatcaacctgatcctgtgtgtggtggccagcatcatcagcatccaccccaagatccaggagcaccagcccaggagcggcctgctgcagagcagcctcatcaccctgtacaccatgtacctgacctggagcgccatgagcaatgaaccagacaggagctgcaaccccaacctgatgtccttcatcacccgcatcacagcccccaccctggcccctggcaacagcacagctgtggtgcccacccccaccccacccagcaagagcggcagcctgctggacagcgacaacttcatcggcctgtttgtgtttgtgctgtgcctgctgtacagcagcatccgcaccagcaccaacagccaggtggacaagctgaccctgagcggcagtgacagcgtcatcctgggggacaccaccaccagcggggccagtgatgaagaagatggccagccccggcgggctgtggacaatgagaaggagggcgtgcagtacagctacagcctcttccacctgatgctgtgcctggccagcctgtacatcatgatgaccctgacctcctggtacagcccagatgccaagttccagagcatgaccagcaagtggccagctgtgtgggtgaagatcagcagctcctgggtgtgcctgctgctgtatgtgtggaccctggtggcccccctggtgctgaccagccgggacttctcctag

SEQ ID NO: 168218 - DNA, 1257 bp, Artificial Sequence
  derived and/or modified sequence
atgcagaggaaggagatggagacctacctgaagaagatccctggcttctgtgagggcggcttcaagatccacgaggccgacatcaatgctgacaaggactgtgatgtgctggtgggctacaaggctgtgtaccgcatcagctttgccatggccatcttcttctttgtgttcagcctgctgatgttcaaggtgaagaccagcaaggacctgcgggctgctgtgcacaacggcttctggttcttcaagattgctgccctgattggcatcatggtgggcagcttctacatccctgggggctacttcagctctgtgtggtttgtggtgggcatgattggagctgccctcttcatcctgatccagctggtgctgctggtggactttgcccacagctggaatgaatcctgggtgaacaggatggaggagggcaacccccggctgtggtatgctgccctgctgtccttcaccagcgccttctacatcctgagcatcatctgtgtgggcctgctgtacacctactacaccaagccagatggctgcacagagaacaagttcttcatcagcatcaacctgatcctgtgtgtggtggccagcatcatcagcatccaccccaagatccaggagcaccagcccaggagcggcctgctgcagagcagcctcatcaccctgtacaccatgtacctgacctggagcgccatgagcaatgaaccagacaggagctgcaaccccaacctgatgtccttcatcacccgcatcacagcccccaccctggcccctggcaacagcacagctgtggtgcccacccccaccccacccagcaagagcggcagcctgctggacagcgacaacttcatcggcctgtttgtgtttgtgctgtgcctgctgtacagcagcatccgcaccagcaccaacagccaggtggacaagctgaccctgagcggcagtgacagcgtcatcctgggggacaccaccaccagcggggccagtgatgaagaagatggccagccccggcgggctgtggacaatgagaaggagggcgtgcagtacagctacagcctcttccacctgatgctgtgcctggccagcctgtacatcatgatgaccctgacctcctggtacagcccagatgccaagttccagagcatgaccagcaagtggccagctgtgtgggtgaagatcagcagctcctgggtgtgcctgctgctgtatgtgtggaccctggtggcccccctggtgctgaccagccgggacttctcctag

SEQ ID NO: 168219 - DNA, 1422 bp, Artificial Sequence
  derived and/or modified sequence
atgggcgccgtgctgggcgtgttcagcctggccagctgggtgccctgcctgtgctcaggagcctcgtgtcttctctgctcttgttgtccaaactcaaaaaattccacagtcacaaggttgatttacgctttcatccttcttctgagtacagtggtgtcctacatcatgcaacggaaggagatggaaacataccttaagaagattcccggattctgtgagggcggatttaagatccatgaggccgatatcaacgccgacaaggattgtgacgtgctcgtcggctacaaagcggtctatagaatcagcttcgccatggccatttttttttttgtcttcagcctgctcatgttcaaagtcaaaacaagcaaggatctgcgcgccgccgtgcataatgggttctggtttttcaaaattgcagccctcatcggaatcatggtcggttccttttatatcccaggaggctattttagttctgtctggtttgtcgttggtatgatcggggcagctctgtttattctgatccagctagtgctgttagtggactttgctcatagctggaatgaatcatgggttaaccgtatggaagaaggaaacccccgcttatggtacgcagcactgctcagtttcacatctgccttctacattctgagtatcatttgtgtggggctactatacacctattacacaaagcctgacggttgtacggaaaataaattctttatttcaattaacctcatcttatgcgtggtcgcatctataattagtatccacccgaaaatccaggagcatcagccccgctccggcttattacagtcttctctaatcaccctgtacacaatgtatctaacatggtcggccatgagcaacgaacccgaccgcagttgcaatccaaatctaatgtcttttataacccgcataaccgccccaacccttgccccagggaatagcactgcagtagtgcctacccccacacccccctcaaaatctggctcactcctcgacagtgataattttatcggtctgttcgtgtttgtcttgtgcctgctgtacagttccattaggacctccacaaactctcaggtggacaagctcactctgagcggatccgattctgtgatattgggtgacaccaccacctcgggcgcatccgatgaagaagatggacaaccaaggagggcagtggataatgagaaggagggggttcagtactcctacagcctctttcatcttatgctctgcctagcctcactctacatcatgatgacgttgacctcctggtacagtcccgacgccaaattccagtcaatgacctctaaatggccagctgtctgggtgaagatatccagctcctgggtgtgccttcttctgtacgtatggaccttggtggcgcctttggtgctgacctctcgagacttttcatag

SEQ ID NO: 168220 - DNA, 1422 bp, Artificial Sequence
  derived and/or modified sequence
atgggcgccgtgctgggcgtgttcagcctggccagctgggtgccctgcctctgctccggagcatcctgtctcctctgttcctgttgcccgaacagtaaaaatagcacagtgacgcgactcatctatgcgttcattttgctcttgagtacagtggtgagctatattatgcagcggaaggaaatggaaacctacctgaagaaaatcccagggttttgtgagggcgggttcaaaatccacgaagcagatatcaatgccgataaggactgtgacgtcctcgtaggttacaaagcagtgtaccgaatatctttcgctatggccatttttttttttgtgtttagcttgctcatgtttaaggtgaaaacatccaaggacctccgcgctgctgtgcacaacggtttttggtttttcaagatcgctgctcttatcggaatcatggttggatcattctacatccccggtggatattttagttctgtttggtttgtcgttgggatgataggggcagctctgttcatcctcattcagcttgtgcttctcgtcgattttgcacatagctggaacgaaagctgggtgaatcgcatggaagagggcaacccccggctatggtacgccgcactgctgtcattcactagcgccttttatattctgtccataatatgcgtggggctgctttatacatactataccaagcctgatggctgcactgagaacaagttcttcatttcaatcaacctcatcctgtgtgtggtcgcttccataatctccatccaccccaaaatccaggaacatcaaccgagatccgggttgctgcagtcaagtctgatcactctctacacaatgtatctgacatggagcgccatgtcgaacgaacccgaccgctcttgcaaccccaacttaatgtcatttatcacccgcatcacagctcctaccctagcgcccggcaattcaactgccgttgttcccactcccacacccccaagcaaatccggatcgctgctggatagcgataatttcattgggctttttgtgttcgtcctctgtctgctgtattcctctattcgaacctcaacaaatagccaggtagataagctcacgctgtcggggagcgactccgtaatactgggggacacaactacatccggcgctagcgacgaggaggatggacagccacgccgagccgtcgacaacgagaaggaaggggtccagtattcatactcattatttcacctgatgttgtgtttggcctccctatatataatgatgacattgacaagctggtacagccccgatgctaagttccagagcatgactagcaagtggccagccgtgtgggtcaagatttcttcctcatgggtatgcctgctcctgtatgtgtggaccctcgtggcgcccttggtgttgaccagcagagacttttcttag

SEQ ID NO: 168221 - DNA, 639 bp, Artificial Sequence
  derived and/or modified sequence
gagcaccagccccggagcggcctgctgcagagcagcctgatcaccctctataccatgtatcttacatggagtgctatgtcgaacgaacctgaccggtcttgtaacccgaacctgatgagctttataacacggatcaccgctcctactttagcaccaggcaacagtactgcagtagtgcctacccctacccccccaagtaaatcaggcagcctcctggatagtgataatttcatcgggctgtttgtatttgtcctatgtctgttgtatagtagcatccggacctccaccaattcccaggtagacaagctcacccttagcggatccgactccgtgatcctgggtgatacgacgacctccggagccagcgacgaggaggatggccagccacggcgtgcagtggataacgaaaaggaaggggtccaatatagctattccctcttccacctgatgttgtgtctggcttccctttacataatgatgaccctgacctcatggtattcacccgacgcaaagttccagtctatgacctccaaatggcccgcagtatgggtgaagatcagctcttcttgggtctgcctgctgctgtatgtgtggacactagtcgctcctctggtattgacttcgcgtgactttagctag

SEQ ID NO: 168222 - DNA, 1323 bp, Artificial Sequence
  derived and/or modified sequence
atgcccctgcagcggtgcctgatctacgccttcatcctgctgctgtctaccgtcgtgtcctatataatgcagcgaaaggaaatggagacataccttaagaaaatacctggtttctgtgagggcggatttaaaattcacgaagctgacatcaacgcagacaaggactgcgatgtgctggttggttacaaagccgtgtaccgtatctctttcgcaatggccatcttcttttttgtctttagcctgcttatgtttaaagtgaagacttccaaagacctccgggctgcggtccataacggtttttggttttttaagatagccgcactgattggaataatggtgggctccttctatatccccggcgggtatttcagtagtgtgtggtttgtcgtgggtatgattggcgccgcattattcattttaattcagctggttctgcttgtggattttgcccatagctggaatgagtcatgggtgaatcggatggaagagggaaaccctcgcctctggtacgcggcgcttttatcatttacttccgccttctacatcctgtctataatctgcgtgggcttgctatacacctactataccaaacccgacggatgtactgagaataagtttttcatcagcatcaaccttattctgtgtgtcgttgcttccataatctccattcaccctaagatccaggagcaccagcctcggagcgggctcctgcagagtagcctcattaccctctataccatgtatttgacttggtccgctatgtctaacgaaccagatcgaagttgcaacccaaatctcatgagtttcataactcgcatcactgctcccactctcgcccccggcaactcaaccgctgtagtcccaactccaacccctccatcaaagtcagggagtttgcttgactccgacaatttcatcggcctgtttgtgttcgtgctctgtctgttgtactcctccatcaggacgtccaccaactcccaagtggataaactaactttatcgggtagcgactcagtaattttgggagacactactacatccggcgcgtcagacgaggaagacgggcagccacgcagagctgtcgacaacgagaaggagggagtgcagtattcttacagcttgttccacctaatgctatgtctggcttcactgtacattatgatgactctgacctcgtggtacagccccgatgccaagttccagagtatgacctcaaagtggccagcggtgtgggtcaagatttcatcctcctgggtctgtctgttattgtacgtttggaccctggtggcccctctggtgctcaccagccgcgacttctcctag

SEQ ID NO: 168223 - DNA, 1257 bp, Artificial Sequence
  derived and/or modified sequence
atgcagcggaaggagatggagacctacctgaagaagatccccggcttctgtgagggcggctttaaaatccacgaagcagatatcaacgccgacaaggactgcgacgtcctggttgggtacaaagccgtctacagaatatccttcgcaatggctatattctttttcgtgttctcattgctcatgttcaaggtgaagacctcaaaggatcttagagccgcggtgcataacggattctggttctttaaaatcgctgcccttattggcatcatggtgggtagcttttacataccgggcggatattttagcagcgtgtggttcgtcgttggaatgattggcgctgctttatttattctcattcagctggtgttactggtcgacttcgcccactcatggaacgagagttgggttaaccgtatggaggagggtaatcccaggctgtggtacgccgccctcctgtcatttacttcggcattttatatcctatcaataatttgtgtgggcctgctctatacttattatactaaacccgatggctgtaccgaaaacaagttttttatctcgataaatctcatcctgtgtgtcgtggccagcattatatcaattcatcccaaaatacaggagcatcagccccggtctgggctgctccagtcatcactaatcacactgtatacaatgtacctgacgtggtccgccatgtccaacgagccggatcgatcatgcaatcccaacttaatgtcattcattactcgtatcacagcaccaacactggctccgggcaattctactgccgtagttcccaccccaacccctccctctaagagtggttccctcctggactccgataacttcattggactgttcgtgttcgtactctgtcttctgtactcttcaattcggacgtctacaaattcccaggttgacaaactgacactgtcagggtccgattcagtgattctgggtgacactacaaccagcggagcaagcgacgaagaggatgggcagcctcggcgagccgtggataatgaaaaagaaggagttcaatatagttactctttatttcacctgatgctgtgcctcgccagcctgtatattatgatgacattaaccagctggtattccccagatgcgaaattccagtccatgactagtaagtggcccgcggtttgggtgaagattagtagttcctgggtgtgcctactgctctatgtctggaccctggtcgcaccactggtcctgacaagtcgagacttctcatag

SEQ ID NO: 168224 - DNA, 1422 bp, Artificial Sequence
  derived and/or modified sequence
atgggagccgttctgggggtgttcagtctcgcctcatgggtaccctgtctttgttcgggggcatcatgtctgctgtgctcttgctgccctaactcaaaaaacagcaccgtcacaaggctaatctacgcttttatactgttgttatcgaccgtggtctcttacattatgcagcgcaaagaaatggaaacctatcttaagaagattcctggattctgcgagggcggattcaagattcacgaggccgacattaacgcagataaagactgtgatgtgctggtggggtacaaagcagtgtatcgcatcagcttcgctatggcaatctttttttttgtgttctcactgcttatgttcaaagtgaagacaagtaaggacctccgcgctgccgtgcataacggtttctggtttttcaagatcgctgccctgattggaatcatggttggctcgttttacattccaggcggatatttttcctcagtctggtttgtagttgggatgattggtgccgcactgttcatcctgatccagctcgtgttactggtggatttcgcacatagctggaacgaaagctgggttaacaggatggaagagggcaatcctagattgtggtatgcagccctcctgagcttcacatccgctttttatatcctttcgatcatatgcgtaggtctcctgtacacgtattataccaaaccggatgggtgcactgagaacaaattcttcatcagcatcaacctgatcctttgtgtggttgctagtatcatcagcatccacccgaagattcaggagcaccagccacggtcgggtctcctccaatcctccctgatcacactgtacactatgtacctgacgtggtcagccatgtcgaacgaaccagacagatcctgcaatcctaaccttatgtcctttatcacacgaattaccgctcccaccctggcgcctgggaattccacagcagtggtgccaacaccaacccccccatctaaaagtggttccttacttgattctgacaacttcatcggcctttttgtttttgtcctgtgcctactttactcctccattcgcacgtcaaccaactcccaggtggataaactgactctcagtggcagtgacagcgttatcctgggggataccactacatcaggggctagtgacgaggaggatggccaacctaggcgggctgttgacaacgagaaggaaggcgttcaatattcgtattctctgtttcatctgatgctttgtctcgcctccctctacatcatgatgaccttgactagttggtacagcccggatgccaaattccagtcgatgactagcaagtggcctgccgtatgggtaaaaatatcctcttcctgggtctgtttactgttgtatgtttggactcttgttgcacctctggtgctgacatccagagacttttcatag

SEQ ID NO: 168225 - DNA, 1422 bp, Artificial Sequence
  derived and/or modified sequence
atgggcgcagtcctcggtgtgtttagccttgcttcatgggtgccctgtctctgtagcggggcttcgtgtcttctttgtagttgttgtccaaattctaaaaatagcactgtgacgaggctaatctacgcctttatactgctgctctctactgttgtgtcctacatcatgcagcggaaagagatggaaacatacttaaagaagattcctggtttttgcgagggcggattcaaaattcacgaggccgacataaatgcagataaggactgcgacgtactggtcggttacaaggccgtttaccgtatcagttttgcgatggcaatcttcttcttcgtattttcactgctcatgtttaaggtaaaaaccagcaaggacttgcgggcagctgtgcacaacggtttttggttcttcaagattgccgcattaatcggtataatggtggggagcttttatatcccagggggttacttttccagcgtctggtttgtagtgggcatgataggcgctgctctctttattctgatacaactggtgcttttggtggattttgcacattcttggaacgaatcatgggttaaccgtatggaagagggaaaccctagactgtggtatgcggcactcctgtcattcacaagtgcattctatatcctctcgataatttgtgtcgggctgctatacacttattacactaagccggacggctgcactgagaataagttctttattagcattaatctgattctgtgtgtcgtcgcgtccatcatcagcattcatcctaaaatccaggaacaccagccaaggtccggacttctacagtctagtttgataaccttgtacacaatgtatctgacctggagcgctatgagtaatgagcctgatagatcttgcaaccctaatctgatgtcattcattacaaggatcaccgctcctacactggctcccggtaatagcaccgccgtcgtgccgactcccactcccccatccaaatctggtagcctgttggactcagataactttattggtctgttcgttttcgtgctatgcctcctctattcttcaatacgaacatcaactaacagccaggtggataagttgaccttatcagggtccgattcggttattctcggcgacacaacgacgtctggcgcatccgatgaggaggacggacaacctcgtcgggctgtcgataacgaaaaagagggcgtgcaatacagctacagcctgtttcacctgatgctctgccttgcgtcactgtatattatgatgacgctgacctcatggtattcccccgatgctaaattccaatccatgacatcaaaatggccagccgtgtgggttaagatctcatcttcttgggtctgtctgctactctacgtgtggacccttgttgcgccactagtgctcacaagcagagacttctcctag

SEQ ID NO: 168226 - DNA, 639 bp, Artificial Sequence
  derived and/or modified sequence
gaacaccaacctaggagtggcctgctgcagagtagtcttattaccctttacacaatgtatctcacatggagcgccatgtccaatgagcctgatcgcagctgcaaccccaacctaatgagcttcattacccgcatcaccgcaccaacgttggcccctgggaactcgaccgccgtggtccctactcccacgccaccctcaaaatccggcagcctactggatagcgataattttataggactcttcgtgttcgtcctgtgtctgttatatagctctatccggaccagcaccaatagtcaggtcgataaacttacactctcagggtctgatagcgtgatacttggtgatactacaacatcaggtgcgagtgacgaggaagacggtcaaccgcgaagagctgtagacaacgaaaaagagggcgttcaatacagctactctcttttccacctcatgctgtgcttggcgtcactgtacatcatgatgacccttacttcctggtatagtcccgacgccaagtttcagagcatgaccagcaagtggcctgctgtttgggttaagatctccagttcttgggtatgcctccttctgtatgtttggacgctggtggctccccttgtgttaacttccagggacttttcatag

SEQ ID NO: 168227 - DNA, 1323 bp, Artificial Sequence
  derived and/or modified sequence
atgccacttcaacgctgcctgatatacgccttcatccttttgttgtctacagttgtatcatacattatgcaacggaaggaaatggagacatacctaaagaaaatacccggtttctgcgagggtggctttaagatccacgaggcagacatcaacgcagacaaggactgtgacgtgcttgtgggctataaggcagtgtatagaatctctttcgctatggccatttttttttttgtcttttcgctccttatgttcaaagtaaagacctccaaggatctgcgtgccgctgttcacaacggattttggtttttcaaaattgccgcactaataggcatcatggttgggagcttctatatccctggtggttatttcagttctgtgtggttcgtagttggcatgattggagcggctctgttcattctgatccagctcgtcttgctggtcgacttcgcgcattcctggaacgagtcttgggtgaacaggatggaagaaggtaacccccgactctggtatgcagcactgcttagctttacgtctgccttttacattctatccatcatctgtgtgggactactgtacacttattacacgaagcctgatggctgcacagaaaacaagttttttataagtattaatctgattttatgtgtggtggccagcatcatcagcatacaccccaaaattcaagaacatcaaccacgctccggacttcttcagagttctctcatcacactatacaccatgtacttgacctggtcagccatgagcaatgagccagatagatcctgcaatcccaatctcatgtctttcatcactcggatcaccgcgcctaccctggcccctggaaattctacagctgttgttcctacaccaactcccccaagcaagtccggatccctgctcgactccgacaatttcatcggcctcttcgtgtttgtgctatgtttgttgtacagttctattcgcaccagcacaaattcacaggtggataagcttaccctctccggatccgactcagtgatcctgggggacactacaactagtggcgcatccgatgaagaagatgggcaacccagaagggctgtggacaatgaaaaagaaggtgtgcagtactcctacagtctttttcatctcatgctgtgtctcgcatcactatacattatgatgacgcttacatcctggtattcacctgacgcaaaattccaatctatgacttccaaatggcccgctgtgtgggtcaagatttccagctcttgggtgtgtctgttactgtatgtgtggaccctggtagcccctctggtcctaacctcgcgtgacttctcatag

SEQ ID NO: 168228 - DNA, 1257 bp, Artificial Sequence
  derived and/or modified sequence
atgcaaagaaaggagatggaaacgtacttgaagaaaataccgggattctgcgagggaggcttcaaaattcatgaggcagatattaatgcggacaaagattgcgatgtgctggtgggctataaggccgtgtatcgtattagcttcgctatggctattttctttttcgtgttttccttgctcatgtttaaagtcaagactagtaaggacctacgcgcagctgtgcataatgggttttggttcttcaagatcgccgctctaatcggtattatggtcggtagcttctatatccccggagggtatttcagctcagtttggttcgtggtcggtatgataggcgcagcactgtttattttaattcagctggtactactggttgattttgcgcactcttggaatgaatcttgggtgaaccgaatggaggagggcaacccacggctgtggtatgccgctctccttagtttcacttccgccttttacatcctgtctattatttgcgtgggattgctgtatacttactacacaaaacccgacgggtgcacagagaacaaatttttcatctccatcaacttgatcttgtgcgtcgtggcctcaattatctctatccaccctaaaattcaggagcatcaacctcgatcaggcctgctgcagagctctctcattaccttatacacaatgtacttgacctggtctgcaatgagtaacgaacccgatcggagttgcaatccgaatctgatgtccttcattacacggattacggcccctactctggccccaggcaattccaccgcagtggtccctactcctacgcccccatctaaatccggcagtctgctcgatagcgataatttcatcggattgttcgtgtttgttctgtgcctgctttactcttcaattcgaacaagcactaactcgcaagtcgacaagttgactctttccggttctgactctgtgattctcggagacaccaccacaagcggagcatcggatgaggaggacgggcagcctaggagggccgtggacaacgaaaaagaaggcgtccagtactcatattccttgttccacctcatgctgtgcctggcttcactgtatataatgatgaccctgacatcttggtattcccccgacgcgaagttccagtcgatgacttccaaatggcccgctgtatgggtaaaaatttcatccagctgggtctgtctcctgctgtacgtgtggacactagtcgcaccactcgtgctgacaagccgcgacttttcatag

SEQ ID NO: 168229 - DNA, 1726 bp, Artificial Sequence
  derived and/or modified sequence
catccgtgcgtctgtggaaggctgcgtttccggcctgagaaaccgtcatgtttctggggagtcacctcagctggcagttaccaccgtgttagaaagcagcctcaggaccggccacctccatcactggcgtcaccatgggggctgtgctgggtgtcttctccctcgccagctgggttccatgcctctgcagcggtgcctcatgtttgctgtgtagttgctgtcctaacagtaagaattccacggtgactcgcctcatttatgctttcattctcctcctgagcactgtcgtatcctatatcatgcagagaaaagagatggaaacttacttgaagaagattcctggattttgtgaagggggatttaaaatccatgaggctgatataaatgcagataaagattgtgatgtgctggttggttataaagctgtgtatcggatcagctttgccatggccatctttttctttgtcttttctctgctcatgttcaaagtaaaaacaagtaaagatctccgagcggcagtacacaatgggttttggttcttcaaaattgctgcccttattggaatcatggttggctctttctacatccctgggggctatttcagctcagtctggtttgttgttggcatgataggggccgccctcttcatcctcattcagctggtgctgctggtagattttgctcattcttggaatgaatcatgggtaaatcgaatggaagaaggaaacccaaggttgtggtatgctgctttactgtctttcacaagcgccttttatatcctgtcaatcatctgtgtcgggctgctctatacatattacaccaaaccagatggctgcacagaaaacaagttcttcatcagtattaacctgatcctttgcgttgtggcttctattatatcgatccacccaaaaattcaggaacaccagcctcgctccggcctcttgcagtcctccctcatcaccctctacactatgtacctcacctggtcagccatgtccaatgaacctgatcgttcctgcaatcccaacctgatgagctttattacacgcataactgcaccaaccctggctcctggaaattcaactgctgtggtccctacccctactccaccatcaaagagtgggtctttactggattcagataattttattggactgtttgtctttgttctctgcctcttgtattctagcatccgcacttccactaatagccaagtagacaagctgaccctgtcagggagtgacagcgtcatccttggtgatacaactaccagtggtgccagtgatgaagaagatggacagcctcggcgggctgtggacaacgagaaagagggagtgcagtatagctactccttattccacctcatgctctgcttggcttccttgtacatcatgatgaccctgaccagctggtacagccctgatgcaaagtttcagagcatgaccagcaagtggccagctgtgtgggtcaagatcagctccagctgggtctgcctcctgctttacgtctggacccttgtggctccacttgtcctcaccagtcgggacttcagctgaacctctgagtgccaaggacaccactggaactcacaaaggcacccaactcagtgatgtcctaattactgctggatgactcaagccacaccatgcctatgttctcaggtgaagaagaataatagaaaccacatagatgggtaggtgtaccaagcattaaacagacagtatcc

SEQ ID NO: 168230 - DNA, 4445 bp, Artificial Sequence
  derived and/or modified sequence
ggtgggcggggccacgccgtgacgcatccgtgcgtctgtggaaggctgcgtttccggcctgagaaaccgtcatgtttctggggagtcacctcagctggcagttaccaccgtgttagaaagcagcctcaggaccggccacctccatcactggcgtcaccatgggggctgtgctgggtgtcttctccctcgccagctgggttccatgcctctgcagcggtgcctcatgtttgctgtgtagttgctgtcctaacagtaagaattccacggtgactcgcctcatttatgctttcattctcctcctgagcactgtcgtatcctatatcatgcagagaaaagagatggaaacttacttgaagaagattcctggattttgtgaagggggatttaaaatccatgaggctgatataaatgcagataaagattgtgatgtgctggttggttataaagctgtgtatcggatcagctttgccatggccatctttttctttgtcttttctctgctcatgttcaaagtaaaaacaagtaaagatctccgagcggcagtacacaatgggttttggttcttcaaaattgctgcccttattggaatcatggttggctctttctacatccctgggggctatttcagctcagtctggtttgttgttggcatgataggggccgccctcttcatcctcattcagctggtgctgctggtagattttgctcattcttggaatgaatcatgggtaaatcgaatggaagaaggaaacccaaggttgtggtatgctgctttactgtctttcacaagcgccttttatatcctgtcaatcatctgtgtcgggctgctctatacatattacaccaaaccagatggctgcacagaaaacaagttcttcatcagtattaacctgatcctttgcgttgtggcttctattatatcgatccacccaaaaattcaggaacaccagcctcgctccggcctcttgcagtcctccctcatcaccctctacactatgtacctcacctggtcagccatgtccaatgaacctgatcgttcctgcaatcccaacctgatgagctttattacacgcataactgcaccaaccctggctcctggaaattcaactgctgtggtccctacccctactccaccatcaaagagtgggtctttactggattcagataattttattggactgtttgtctttgttctctgcctcttgtattctagcatccgcacttccactaatagccaagtagacaagctgaccctgtcagggagtgacagcgtcatccttggtgatacaactaccagtggtgccagtgatgaagaagatggacagcctcggcgggctgtggacaacgagaaagagggagtgcagtatagctactccttattccacctcatgctctgcttggcttccttgtacatcatgatgaccctgaccagctggtacagccctgatgcaaagtttcagagcatgaccagcaagtggccagctgtgtgggtcaagatcagctccagctgggtctgcctcctgctttacgtctggacccttgtggctccacttgtcctcaccagtcgggacttcagctgaacctctgagtgccaaggacaccactggaactcacaaaggtctccttcaccgaaaacccatataccttttaagtttgtttcaactaaaatattaagtgaatgctttgcaagtttgactgtatgcaggtttatatcagaaggtgagattgaataatgcttgatgcagaatcgaaacttctcatttatctgtatattatgtttacttctaaggatatagcacaaagggaacattttttgtttaaagtgaactacagctgtgctgtgaagagagttctttataaagcctgtaggttcttttaactttggtttaaaatgtaagataggaaaatgttggatatttgaggccatgcttaatatatttatattgcagtatcctttaaaagcaaaaaaaaaaaaatgcatttatattacagttttcctctatgaaagtccttacttatatgatacaagcactgtgttttgtgcttaaactcttcagcggggtagcatcaaagttcttggggaaggatcgtatatgtgggtcccttccctagaagaatggttgctgatatggctactgcttctacatcttgagttttttaatttactttttttacactgtagcattgagactgcttgattcaagtctggtgctttgccagatgtattaatttccataaatgctttgtgagtttggttaaaatgaagattcacttgggaaaacactgcagctttagtctgtgttactatcttgttatgagtatgtaaaagtaaaatgcatgtgaatttatcatatttgcactatgaaggtatttggttaaaatacaaagacttttaagattttaaggccctttcttccaacagcttttatagttagcagccattctttattttctggatagccaggttttatcacgcttctagtcaggatgctcctattccttctaaaaattacggtctgactagtgagcaaagtcttgaatttattcaaaagtcctaaataccttctctaggtaagacacttggtagatgagagacggaaggcattgtcaagaaccattttcatgagaggtggtgtgcaaaaaggtagaataaaagagttctttcaacaaagatttactgtctattctgtactagaccctgtaggttttggggtacagtgttaaacatgatagaggctctgccgtcttggactttaatagcttagagaagagagcaaatgagctgacaggtggttataatgtgaattagtgctgtggtttaggaattggagagaactcaaaggagaggtatttggtgtaatggtaggctttctggagaaaatgatatttaagccaagaactcttagaagttagctaagagagagatgggaaaatgagacgacattgctggagtagataaaactgcatgttaaaggcaggaagatggggaaaaaaagttcagtaaagctggaatggggaaatgtagtcagggactgaattttaaagggctttatcaacctcagtaaagagtttggaccttatgttgagggtggctgaaaacatattcatagtgtcatgaacaaattttatcttcagtcacttgggctgatatatagagaatggatttagagagatgagaccaggtgcagtccatatgagatgtgaaatagagaagtggaatcgtagggacggggagaaattgacaggtgagggctacttagcaattagaatttttttttttcaattttaatttttttttttgagacggagtcttgctctgtcgcccaggctggagtgcaatggtgcgatctccgctcactgcaggctccgcctcccgggttcacgccattctcccgcctcagcctccctagtagctgggactacaggcacccaccaccacgcctggctaattttttttgtatttttagtagagacagggtttcaccatgttagccaggatggtctcgatctcctgacctcgtgatccacctgccgcggcctcccaaagttctaggattactggcatgagccaccgtgcctggccagcaattagaattttaacactggcagttatgaataatatgaaggagaggtagatttctgagtgattctggtttaaccagctgggtggatggtggttccacgtattcaggtggcaaacaggaaaaacatgtgttcgaagaagaatggaggtaggtggtctcttaagaatggttaagaggcttgggagtcagactgcttgggtttgcatcccagctttgccgttttctggctatcaaacttgtcagctattatttgttgagtacgtactatttgatttatgaccacaggcagctgagcctcagtgttggtgcctagtgtacaagattgttaaagaataaagttattttgcaaagtgtaacccatttttagcactgacatagcactgacagtagctgctgatctcattatgggctaaaataagacaatattcaaaggtcagagatatctagccagaatctgatggaggctggatttcagattttgttacagaattagacagaggaacacagaggggacaggctcagttagggtggaggtgtggggtagggaagcaggacttgatataaattattggaatcattgtcttttaaaccagtggtttatgtcagggtatagcgtttcaagggatttgagggtcagatggggaaatgtagccccttattttgccagtgtgaagcagataccctgcttttctttacagtagcggagtcagcttaagagctttaaaggtcctaaacttcaaaaacattacagtgccccatcctccgccttaatgtaattcaaaatacaaacaatactaaactgtaaaataaatgtaacaaagtccaataaagtttttatttttttctcatgatgataactga

SEQ ID NO: 168231 - DNA, 812 bp, Artificial Sequence
  derived and/or modified sequence
gaacaccagcctcgctccggcctcttgcagtcctccctcatcaccctctacactatgtacctcacctggtcagccatgtccaatgaacctgatcgttcctgcaatcccaacctgatgagctttattacacgcataactgcaccaaccctggctcctggaaattcaactgctgtggtccctacccctactccaccatcaaagagtgggtctttactggattcagataattttattggactgtttgtctttgttctctgcctcttgtattctagcatccgcacttccactaatagccaagtagacaagctgaccctgtcagggagtgacagcgtcatccttggtgatacaactaccagtggtgccagtgatgaagaagatggacagcctcggcgggctgtggacaacgagaaagagggagtgcagtatagctactccttattccacctcatgctctgcttggcttccttgtacatcatgatgaccctgaccagctggtacagccctgatgcaaagtttcagagcatgaccagcaagtggccagctgtgtgggtcaagatcagctccagctgggtctgcctcctgctttacgtctggacccttgtggctccacttgtcctcaccagtcgggacttcagctgaacctctgagtgccaaggacaccactggaactcacaaaggcacccaactcagtgatgtcctaattactgctggatgactcaagccacaccatgcctatgttctcaggtgaagaagaataatagaaaccacatagatgggtaggtgtaccaagcattaaacagacagtatccaca

SEQ ID NO: 168232 - DNA, 1791 bp, Artificial Sequence
  derived and/or modified sequence
aaaccgtcatgtttctggggagtcacctcagctggcagttaccaccgtgttagaaagcagcctcaggaccggccacctccatcactggcgtcaccatgggggctgtgctgggtgtcttctccctcgccagctgggttccatgcctctgcagcggtgcctcatttatgctttcattctcctcctgagcactgtcgtatcctatatcatgcagagaaaagagatggaaacttacttgaagaagattcctggattttgtgaagggggatttaaaatccatgaggctgatataaatgcagataaagattgtgatgtgctggttggttataaagctgtgtatcggatcagctttgccatggccatctttttctttgtcttttctctgctcatgttcaaagtaaaaacaagtaaagatctccgagcggcagtacacaatgggttttggttcttcaaaattgctgcccttattggaatcatggttggctctttctacatccctgggggctatttcagctcagtctggtttgttgttggcatgataggggccgccctcttcatcctcattcagctggtgctgctggtagattttgctcattcttggaatgaatcatgggtaaatcgaatggaagaaggaaacccaaggttgtggtatgctgctttactgtctttcacaagcgccttttatatcctgtcaatcatctgtgtcgggctgctctatacatattacaccaaaccagatggctgcacagaaaacaagttcttcatcagtattaacctgatcctttgcgttgtggcttctattatatcgatccacccaaaaattcaggaacaccagcctcgctccggcctcttgcagtcctccctcatcaccctctacactatgtacctcacctggtcagccatgtccaatgaacctgatcgttcctgcaatcccaacctgatgagctttattacacgcataactgcaccaaccctggctcctggaaattcaactgctgtggtccctacccctactccaccatcaaagagtgggtctttactggattcagataattttattggactgtttgtctttgttctctgcctcttgtattctagcatccgcacttccactaatagccaagtagacaagctgaccctgtcagggagtgacagcgtcatccttggtgatacaactaccagtggtgccagtgatgaagaagatggacagcctcggcgggctgtggacaacgagaaagagggagtgcagtatagctactccttattccacctcatgctctgcttggcttccttgtacatcatgatgaccctgaccagctggtacagccctgatgcaaagtttcagagcatgaccagcaagtggccagctgtgtgggtcaagatcagctccagctgggtctgcctcctgctttacgtctggacccttgtggctccacttgtcctcaccagtcgggacttcagctgaacctctgagtgccaaggacaccactggaactcacaaaggtctccttcaccgaaaacccatataccttttaagtttgtttcaactaaaatattaagtgaatgctttgcaagtttgactgtatgcaggtttatatcagaaggtgagattgaataatgcttgatgcagaatcgaaacttctcatttatctgtatattatgtttacttctaaggatatagcacaaagggaacattttttgtttaaagtgaactacagctgtgctgtgaagagagttctttataaagcctgtaggttcttttaactttggtttaaaatgtaagataggaaaatg

SEQ ID NO: 168233 - DNA, 1708 bp, Artificial Sequence
  derived and/or modified sequence
agttaccaccgtgttagaaagcagcctcaggaccggccacctccatcactggcgtcaccatgggggctgtgctgggtgtcttctccctcgccagctggaaaatcctggtgagttgaaggccaggcatggtggctcacgccaggatggtctcaatctcctgacctcgtgatccgccggcctcccagagtgcttggattacaggttccatgcctctgcagcggtgcctcatgtttgctgtgtagttgctgtcctaacagtaagaattccacggtgactcgcctcatttatgctttcattctcctcctgagcactgtcgtatcctatatcatgcagagaaaagagatggaaacttacttgaagaagattcctggattttgtgaagggggatttaaaatccatgaggctgatataaatgcagataaagattgtgatgtgctggttggttataaagctgtgtatcggatcagctttgccatggccatctttttctttgtcttttctctgctcatgttcaaagtaaaaacaagtaaagatctccgagcggcagtacacaatgggttttggttcttcaaaattgctgcccttattggaatcatggttggctctttctacatccctgggggctatttcagctcagtctggtttgttgttggcatgataggggccgccctcttcatcctcattcagctggtgctgctggtagattttgctcattcttggaatgaatcatgggtaaatcgaatggaagaaggaaacccaaggttgtggtatgctgctttactgtctttcacaagcgccttttatatcctgtcaatcatctgtgtcgggctgctctatacatattacaccaaaccagatggctgcacagaaaacaagttcttcatcagtattaacctgatcctttgcgttgtggcttctattatatcgatccacccaaaaattcaggaacaccagcctcgctccggcctcttgcagtcctccctcatcaccctctacactatgtacctcacctggtcagccatgtccaatgaacctgatcgttcctgcaatcccaacctgatgagctttattacacgcataactgcaccaaccctggctcctggaaattcaactgctgtggtccctacccctactccaccatcaaagagtgggtctttactggattcagataattttattggactgtttgtctttgttctctgcctcttgtattctagcatccgcacttccactaatagccaagtagacaagctgaccctgtcagggagtgacagcgtcatccttggtgatacaactaccagtggtgccagtgatgaagaagatggacagcctcggcgggctgtggacaacgagaaagagggagtgcagtatagctactccttattccacctcatgctctgcttggcttccttgtacatcatgatgaccctgaccagctggtacagccctgatgcaaagtttcagagcatgaccagcaagtggccagctgtgtgggtcaagatcagctccagctgggtctgcctcctgctttacgtctggacccttgtggctccacttgtcctcaccagtcgggacttcagctgaacctctgagtgccaaggacaccactggaactcacaaaggtctccttcaccgaaaacccatataccttttaagtttgtttcaactaaaatattaagtgaatgctttgcaagtttgactgtatgca

SEQ ID NO: 168234 - DNA, 1422 bp, Artificial Sequence
  derived and/or modified sequence
atgggcgccgtgctgggcgtgttcagcctggccagctgggtgccctgcctgtgcagcggcgccagctgcctgctgtgcagctgctgccccaacagcaagaacagcaccgtgaccagactgatctacgccttcatcctgctgctgagcaccgtggtgagctacatcatgcagagaaaggagatggagacctacctgaagaagatccccggcttctgcgagggcggcttcaagatccacgaggccgacatcaacgccgacaaggactgcgacgtgctggtgggctacaaggccgtgtacagaatcagcttcgccatggccatcttcttcttcgtgttcagcctgctgatgttcaaggtgaagaccagcaaggacctgagagccgccgtgcacaacggcttctggttcttcaagatcgccgccctgatcggcatcatggtgggcagcttctacatccccggcggctacttcagcagcgtgtggttcgtggtgggcatgatcggcgccgccctgttcatcctgatccagctggtgctgctggtggacttcgcccacagctggaacgagagctgggtgaacagaatggaggagggcaaccccagactgtggtacgccgccctgctgagcttcaccagcgccttctacatcctgagcatcatctgcgtgggcctgctgtacacctactacaccaagcccgacggctgcaccgagaacaagttcttcatcagcatcaacctgatcctgtgcgtggtggccagcatcatcagcatccaccccaagatccaggagcaccagcccagaagcggcctgctgcagagcagcctgatcaccctgtacaccatgtacctgacctggagcgccatgagcaacgagcccgacagaagctgcaaccccaacctgatgagcttcatcaccagaatcaccgcccccaccctggcccccggcaacagcaccgccgtggtgcccacccccaccccccccagcaagagcggcagcctgctggacagcgacaacttcatcggcctgttcgtgttcgtgctgtgcctgctgtacagcagcatcagaaccagcaccaacagccaggtggacaagctgaccctgagcggcagcgacagcgtgatcctgggcgacaccaccaccagcggcgccagcgacgaggaggacggccagcccagaagagccgtggacaacgagaaggagggcgtgcagtacagctacagcctgttccacctgatgctgtgcctggccagcctgtacatcatgatgaccctgaccagctggtacagccccgacgccaagttccagagcatgaccagcaagtggcccgccgtgtgggtgaagatcagcagcagctgggtgtgcctgctgctgtacgtgtggaccctggtggcccccctggtgctgaccagcagagacttcagctag

SEQ ID NO: 168235 - DNA, 639 bp, Artificial Sequence
  derived and/or modified sequence
gagcaccagcccagaagcggcctgctgcagagcagcctgatcaccctgtacaccatgtacctgacctggagcgccatgagcaacgagcccgacagaagctgcaaccccaacctgatgagcttcatcaccagaatcaccgcccccaccctggcccccggcaacagcaccgccgtggtgcccacccccaccccccccagcaagagcggcagcctgctggacagcgacaacttcatcggcctgttcgtgttcgtgctgtgcctgctgtacagcagcatcagaaccagcaccaacagccaggtggacaagctgaccctgagcggcagcgacagcgtgatcctgggcgacaccaccaccagcggcgccagcgacgaggaggacggccagcccagaagagccgtggacaacgagaaggagggcgtgcagtacagctacagcctgttccacctgatgctgtgcctggccagcctgtacatcatgatgaccctgaccagctggtacagccccgacgccaagttccagagcatgaccagcaagtggcccgccgtgtgggtgaagatcagcagcagctgggtgtgcctgctgctgtacgtgtggaccctggtggcccccctggtgctgaccagcagagacttcagctag

SEQ ID NO: 168236 - DNA, 1323 bp, Artificial Sequence
  derived and/or modified sequence
atgcccctgcagagatgcctgatctacgccttcatcctgctgctgagcaccgtggtgagctacatcatgcagagaaaggagatggagacctacctgaagaagatccccggcttctgcgagggcggcttcaagatccacgaggccgacatcaacgccgacaaggactgcgacgtgctggtgggctacaaggccgtgtacagaatcagcttcgccatggccatcttcttcttcgtgttcagcctgctgatgttcaaggtgaagaccagcaaggacctgagagccgccgtgcacaacggcttctggttcttcaagatcgccgccctgatcggcatcatggtgggcagcttctacatccccggcggctacttcagcagcgtgtggttcgtggtgggcatgatcggcgccgccctgttcatcctgatccagctggtgctgctggtggacttcgcccacagctggaacgagagctgggtgaacagaatggaggagggcaaccccagactgtggtacgccgccctgctgagcttcaccagcgccttctacatcctgagcatcatctgcgtgggcctgctgtacacctactacaccaagcccgacggctgcaccgagaacaagttcttcatcagcatcaacctgatcctgtgcgtggtggccagcatcatcagcatccaccccaagatccaggagcaccagcccagaagcggcctgctgcagagcagcctgatcaccctgtacaccatgtacctgacctggagcgccatgagcaacgagcccgacagaagctgcaaccccaacctgatgagcttcatcaccagaatcaccgcccccaccctggcccccggcaacagcaccgccgtggtgcccacccccaccccccccagcaagagcggcagcctgctggacagcgacaacttcatcggcctgttcgtgttcgtgctgtgcctgctgtacagcagcatcagaaccagcaccaacagccaggtggacaagctgaccctgagcggcagcgacagcgtgatcctgggcgacaccaccaccagcggcgccagcgacgaggaggacggccagcccagaagagccgtggacaacgagaaggagggcgtgcagtacagctacagcctgttccacctgatgctgtgcctggccagcctgtacatcatgatgaccctgaccagctggtacagccccgacgccaagttccagagcatgaccagcaagtggcccgccgtgtgggtgaagatcagcagcagctgggtgtgcctgctgctgtacgtgtggaccctggtggcccccctggtgctgaccagcagagacttcagctag

SEQ ID NO: 168237 - DNA, 1257 bp, Artificial Sequence
  derived and/or modified sequence
atgcagagaaaggagatggagacctacctgaagaagatccccggcttctgcgagggcggcttcaagatccacgaggccgacatcaacgccgacaaggactgcgacgtgctggtgggctacaaggccgtgtacagaatcagcttcgccatggccatcttcttcttcgtgttcagcctgctgatgttcaaggtgaagaccagcaaggacctgagagccgccgtgcacaacggcttctggttcttcaagatcgccgccctgatcggcatcatggtgggcagcttctacatccccggcggctacttcagcagcgtgtggttcgtggtgggcatgatcggcgccgccctgttcatcctgatccagctggtgctgctggtggacttcgcccacagctggaacgagagctgggtgaacagaatggaggagggcaaccccagactgtggtacgccgccctgctgagcttcaccagcgccttctacatcctgagcatcatctgcgtgggcctgctgtacacctactacaccaagcccgacggctgcaccgagaacaagttcttcatcagcatcaacctgatcctgtgcgtggtggccagcatcatcagcatccaccccaagatccaggagcaccagcccagaagcggcctgctgcagagcagcctgatcaccctgtacaccatgtacctgacctggagcgccatgagcaacgagcccgacagaagctgcaaccccaacctgatgagcttcatcaccagaatcaccgcccccaccctggcccccggcaacagcaccgccgtggtgcccacccccaccccccccagcaagagcggcagcctgctggacagcgacaacttcatcggcctgttcgtgttcgtgctgtgcctgctgtacagcagcatcagaaccagcaccaacagccaggtggacaagctgaccctgagcggcagcgacagcgtgatcctgggcgacaccaccaccagcggcgccagcgacgaggaggacggccagcccagaagagccgtggacaacgagaaggagggcgtgcagtacagctacagcctgttccacctgatgctgtgcctggccagcctgtacatcatgatgaccctgaccagctggtacagccccgacgccaagttccagagcatgaccagcaagtggcccgccgtgtgggtgaagatcagcagcagctgggtgtgcctgctgctgtacgtgtggaccctggtggcccccctggtgctgaccagcagagacttcagctag

SEQ ID NO: 168238 - protein, 667 aa, Artificial Sequence
  derived and/or modified sequence
MAAETLLSSLLGLLLLGLLLPASLTGGVGSLNLEELSEMRYGIEILPLPVMGGQSQSSDVVIVSSKYKQRYECRLPAGAIHFQREREEETPAYQGPGIPELLSPMRDAPCLLKTKDWWTYEFCYGRHIQQYHMEDSEIKGEVLYLGYYQSAFDWDDETAKASKQHRLKRYHSQTYGNGSKCDLNGRPREAEVRFLCDEGAGISGDYIDRVDEPLSCSYVLTIRTPRLCPHPLLRPPPSAAPQAILCHPSLQPEEYMAYVQRQADSKQYGDKIIEELQDLGPQVWSETKSGVAPQKMAGASPTKDDSKDSDFWKMLNEPEDQAPGGEEVPAEEQDPSPEAADSASGAPNDFQNNVQVKVIRSPADLIRFIEELKGGTKKGKPNIGQEQPVDDAAEVPQREPEKERGDPERQREMEEEEDEDEDEDEDEDERQLLGEFEKELEGILLPSDRDRLRSEVKAGMERELENIIQETEKELDPDGLKKESERDRAMLALTSTLNKLIKRLEEKQSPELVKKHKKKRVVPKKPPPSPQPTEEDPEHRVRVRVTKLRLGGPNQDLTVLEMKRENPQLKQIEGLVKELLEREGLTAAGKIEIKIVRPWAEGTEEGARWLTDEDTRNLKEIFFNILVPGAEEAQKERQRQKELESNYRRVWGSPGGEGTGDLDEFDF

SEQ ID NO: 168239 - DNA, 2004 bp, Artificial Sequence
  derived and/or modified sequence
atggccgcagagaccctgctgagtagcttgttgggattgttactcctgggcctgttactgcccgcatctctgacgggcggagtcggatcccttaacctggaagagttgtctgaaatgaggtatggcattgagattttaccactgcccgtcatgggaggacagtcacagtcctccgacgtggtaatcgtaagtagcaagtataaacagcgatacgaatgccgccttccagcgggtgcaatccattttcagcgagaaagggaagaagaaacgccagcgtaccagggcccaggtatcccagagctcctttcccccatgagagacgccccttgtctactgaaaacaaaggattggtggacctatgaattttgttatgggagacacatacagcaataccatatggaggactcagaaattaagggcgaggtgctctatctgggctactaccagtctgcgttcgactgggatgacgaaaccgctaaggccagcaagcaacaccgactgaagcggtaccactcccagacctatggaaatgggtctaaatgtgacttgaacggtcggcctcgggaggctgaagtgcgctttctgtgcgacgaaggcgccgggatcagcggcgactatattgaccgggtggacgagccactgtcctgtagttacgtattaacaatcagaaccccacgactgtgcccccatcctctcttacgtccccctccgagtgctgccccacaagccatcctttgtcacccaagcctgcagcccgaggaatacatggcctatgtacaaaggcaagccgattctaaacagtacggtgataaaataatcgaagaattgcaggacctggggcctcaagtctggagtgagactaaatccggagtggcccctcagaaaatggcaggcgcctcgcccacaaaagacgactccaaggactccgacttctggaaaatgcttaatgaacctgaggaccaggccccaggcggcgaggaagtaccagccgaagaacaggatccgtcgcccgaggccgctgacagcgcatcaggggcacctaacgacttccagaataatgtgcaagtgaaagtcatccggtcccctgccgatctcatccggtttattgaggagctgaaaggtggcacaaagaagggcaagccaaatatcggccaagagcagccagtggatgacgctgcagaggtgccccagagagagcctgaaaaggagcgtggagatccagagcgtcagagagagatggaggaggaagaggacgaggacgaggatgaagatgaagatgaagacgaacgacaactgctgggtgagttcgagaaagaactggagggcattctcctgccatcagatcgcgaccgtttaaggtccgaggtgaaggccggtatggagagagaattggaaaatatcatccaggagaccgagaaggagcttgatcctgatggcctcaaaaaagaaagtgaaagggatcgcgctatgttggccttaacttccacactgaacaagctgataaagcggctggaggaaaaacaaagtcccgaactcgttaaaaagcacaaaaagaaaagagtggtcccaaagaagccacccccctctccgcagcccacagaggaggacccagagcatcgggtacgcgtgcgagttacaaaattaaggttgggtggaccaaatcaggacttgacagtgttggaaatgaagcgggagaacccacaactgaagcagattgaaggactggtgaaggagctcctggaacgggaggggttaacggctgctggcaaaatcgaaattaagattgtgagaccctgggccgaaggcactgaagagggcgcaaggtggctgaccgacgaggatacccgaaatttaaaagagattttcttcaatattttggtgcctggcgctgaagaagcccagaaagaaaggcagcgccaaaaagaactcgaatctaactatcgccgggtgtggggctcccccgggggggaggggacgggcgacctggacgagttcgatttttag

SEQ ID NO: 168240 - DNA, 2004 bp, Artificial Sequence
  derived and/or modified sequence
atggctgctgagaccctgctgagcagcctgctgggcctgctgctgctgggcctgctgctgcctgccagcctgactggaggagtgggcagcctgaacctggaggagctgtctgagatgagatatggaattgagatcctgcccctgcctgtgatgggcggccagagccagagcagtgatgtggtgattgtgagcagcaagtacaagcagagatatgagtgccgcctgcctgctggggccatccacttccagcgggagcgggaggaggagaccccagcctaccagggccctggcatccctgagctgctgagccccatgagagatgccccctgcctgctgaagaccaaggactggtggacctatgagttctgctacggccgccacatccagcagtaccacatggaggacagcgagatcaagggggaggtgctgtacctgggctactaccagagcgcctttgactgggatgatgaaacagccaaggccagcaagcagcaccggctgaagcgctaccacagccagacctatggaaatggcagcaaatgtgacctgaatggccggccccgggaggccgaggtgcgcttcctgtgtgatgaaggagctggcatcagcggggactacatcgacagagtggatgagcccctgagctgcagctatgtgctgaccatccgcaccccccggctgtgcccccaccccctgctgcggcccccacccagcgctgccccccaggccatcctgtgccaccccagcctgcagcctgaggagtacatggcctacgtgcagaggcaggccgacagcaagcagtacggggacaagatcatcgaggagctgcaggacctgggcccccaggtgtggagcgagaccaagtctggagtggccccccagaagatggccggggccagccccaccaaggatgacagcaaggacagcgacttctggaagatgctgaatgaacctgaggaccaggcccctggaggagaggaggtgcctgctgaggagcaggaccccagccctgaggccgctgacagcgccagcggggccccaaatgacttccagaacaacgtgcaggtgaaggtgatccgcagccctgctgacctgatccgcttcatcgaggagctgaagggcggcaccaagaagggcaagcccaacatcggccaggagcagcctgtggatgatgctgctgaggtgccccagcgggagcctgagaaggagcggggggaccctgagcggcagcgggagatggaggaggaggaggatgaagatgaagatgaagatgaagatgaagatgagcggcagctgctgggggagtttgagaaggagctggagggcatcctgctgcccagcgaccgggaccggctgcggtctgaggtgaaggccggcatggagcgggagctggagaacatcatccaggagacagagaaggagctggaccctgatggcctgaagaaggagagcgagcgggaccgggccatgctggccctgaccagcaccctgaacaagctgatcaagaggctggaggagaagcagagccctgagctggtgaagaagcacaagaagaagagggtggtgcccaagaagcccccacccagcccccagcccacagaagaagatcctgagcaccgggtgcgggtgcgggtgaccaagctgcggctgggcggccccaaccaggacctgactgtgctggagatgaagcgggagaacccccagctgaagcagatcgagggcctggtgaaggagctgctggagcgggagggcctgacagctgctgggaagattgagatcaagatcgtgcggccctgggccgagggcacagaggagggcgcccgctggctgacagatgaggacaccaggaacctgaaggagatcttcttcaacatcctggtgcctggagctgaggaggcccagaaggagcggcagaggcagaaggagctggagagcaactaccgccgggtgtggggcagccctggaggagagggcactggagacctggatgaatttgacttctag

SEQ ID NO: 168241 - DNA, 2004 bp, Artificial Sequence
  derived and/or modified sequence
atggccgccgagaccctgctgagcagcctgctgggcctgctgctgctgggcctactgttgcctgcctcactgaccggaggagtcgggtctctgaacctggaggaactctccgagatgcggtacggcatagagatactgcctctgcctgtcatgggaggtcagtctcagtcctctgacgtagtcatcgtgtcaagcaagtataaacagcgctatgaatgtagactgccagcgggcgcaatccacttccagcgcgaacgcgaagaagagacaccagcttaccaaggtccaggcattccggagctgcttagtcccatgcgcgatgctccttgtctgctcaagacgaaagactggtggacctacgagttttgttatgggaggcatatccagcagtaccatatggaagattctgaaatcaaaggagaggtgttatatttaggatattatcagagcgccttcgattgggatgacgaaaccgccaaggcttctaaacagcacaggttaaagcgctatcattctcagacgtatgggaacggaagtaagtgtgacctgaacggccggccaagagaagcagaggtgcggttcctttgcgacgagggcgcgggaataagcggggattatatcgatcgggtagatgagcctttgtcttgctcctacgtactgactattcggacaccgcgcctctgtccccatccgttattacgacccccgccaagtgccgccccacaggctattttatgccatccctccttacaaccagaagaatacatggcgtacgtccagcgccaggctgattctaaacagtatggcgacaagatcattgaggaacttcaggacctggggcctcaagtgtggagcgaaacgaaaagcggagtcgctccgcagaaaatggccggggccagtcctactaaggatgactcaaaagattctgacttctggaaaatgttgaacgaaccggaagatcaagcccctggaggggaggaagtacctgctgaagaacaggatcccagccctgaggcagccgactctgcgtctggcgcacctaacgatttccagaataatgtgcaggtaaaggtgatcagaagccccgcagatctgattagattcatagaagaactcaaagggggtacgaagaagggaaaacccaatattgggcaggagcagcccgtcgacgatgccgctgaggtgccccagcgtgaacccgagaaggagagaggcgatcctgagagacagagggagatggaggaggaggaggatgaggacgaggatgaagacgaagatgaggacgagcgacaactgctgggggaatttgagaaagagttggaaggaattttactcccctctgacagggatcgattgcgcagcgaagtgaaggctggcatggagcgtgagctggaaaacatcatccaggagaccgaaaaagagctagatcccgatggcttaaagaaagaatcagaaagagatagggccatgctggcacttacttccaccctgaacaagttgatcaaacgactggaagagaagcagtcccccgaactagtgaagaagcataagaagaaacgggtagtcccaaagaagcccccgccttcaccgcagcctaccgaggaagatcccgagcatcgggtccgggtgagggtcacgaagctgcgactgggtggaccaaaccaggatctgacggtgttggagatgaaacgggagaatccccagctcaaacagatagagggccttgtaaaggaacttcttgaaagagaagggctgacggccgccggtaagattgagatcaagatcgtgaggccttgggccgagggcactgaggagggcgcacgctggcttaccgacgaggacacacgcaatctgaaagagatcttcttcaatatattggttccaggggctgaggaagctcagaaggagaggcagcggcagaaggagttagagtctaattaccgcagagtttggggaagtcccggcggcgaagggacgggcgacctggatgaattcgatttctag

SEQ ID NO: 168242 - DNA, 2691 bp, Artificial Sequence
  derived and/or modified sequence
agggcggaaacagattctctgcataagaaggggaacgaaagatggcggcggaaacgctgctgtccagtttgttaggactgctgcttctgggactcctgttacccgcaagtctgaccggcggtgtcgggagcctgaacctggaggagctgagtgagatgcgttatgggatcgagatcctgccgttgcctgtcatgggagggcagagccaatcttcggacgtggtgattgtctcctctaagtacaaacagcgctatgagtgtcgcctgccagctggagctattcacttccagcgtgaaagggaggaggaaacacctgcttaccaagggcctgggatccctgagttgttgagcccaatgagagatgctccctgcttgctgaagacaaaggactggtggacatatgaattctgttatggacgccacatccagcaataccacatggaagattcagagatcaaaggtgaagtcctctatctcggctactaccaatcagccttcgactgggatgatgaaacagccaaggcctccaagcagcatcgtcttaaacgctaccacagccagacctatggcaatgggtccaagtgcgaccttaatgggaggccccgggaggccgaggttcggttcctctgtgacgagggtgcaggtatctctggggactacatcgatcgcgtggacgagcccttgtcctgctcttatgtgctgaccattcgcactcctcggctctgcccccaccctctcctccggcccccacccagtgctgcaccgcaggccatcctctgtcacccttccctacagcctgaggagtacatggcctacgttcagaggcaagccgactcaaagcagtatggagataaaatcatagaggagctgcaagatctaggcccccaagtgtggagtgagaccaagtctggggtggcaccccaaaagatggcaggtgcgagcccgaccaaggatgacagtaaggactcagatttctggaagatgcttaatgagccagaggaccaggccccaggaggggaggaggtgccggctgaggagcaggacccaagccctgaggcagcagattcagcttctggtgctcccaatgattttcagaacaacgtgcaggtcaaagtcattcgaagccctgcggatttgattcgattcatagaggagctgaaaggtggaacaaaaaaggggaagccaaatataggccaagagcagcctgtggatgatgctgcagaagtccctcagagggaaccagagaaggaaaggggtgatccagaacggcagagagagatggaagaagaggaggatgaggatgaggatgaggatgaagatgaggatgaacggcagttactgggagaatttgagaaggaactggaagggatcctgcttccgtcagaccgagaccggctccgttcggaggtgaaggctggcatggagcgggaactggaaaacatcatccaggagacagagaaagagctggacccagatgggctgaagaaggagtcagagcgggatcgggcaatgctggctctcacatccactctcaacaaactcatcaaaagactggaggaaaaacagagtccagagctggtgaagaagcacaagaaaaagagggttgtccccaaaaagcctcccccatcaccccaacctacagaggaggatcctgagcacagagtccgggtccgggtcaccaagctccgtctcggaggccctaatcaggatctgactgtcctcgagatgaaacgggaaaacccacagctgaaacaaatcgaggggctggtgaaggagctgctggagagggagggactcacagctgcagggaaaattgagatcaaaattgtccgcccatgggctgaagggactgaagagggtgcacgttggctgactgatgaggacacgagaaacctcaaggagatcttcttcaatatcttggtgccgggagctgaagaggcccagaaggaacgccagcggcagaaagagctggagagcaattaccgccgggtgtggggctctccaggtggggagggcacaggggacctggacgaatttgacttctgagaccaacactacacttgacccttcacggaatccagactcttcctggactggcttgcctcctccccacctccccaccctggaacccctgagggccaaacagcagagtggagctgagctgtggacctctcgggcaactctgtgggtgtgggggccctgggtgaatgctgctgcccctgctggcagccaccttgagacctcaccgggcctgtgatatttgctctcctgaactctcactcaatcctcttcctctcctctgtggcttttcctgttattgtcccctaatgataggatattccctgctgcctacctggagattcagtaggatcttttgagtggaggtgggtagagagagcaaggagggcaggacacttagcaggcactgagcaagcaggcccccacctgcccttagtgatgtttggagtcgttttaccctcttctattgaattgccttgggatttccttctccctttccctgcccaccctgtcccctacaatttgtgcttctgagttgaggagccttcacctctgttgctgaggaaatggtagaatgctgcctatcacctccagcacaatcccagtgaaaaaggtgtgaagcacccaccatgttcttgaacaatcaggtttctaaataaacaactggaccatc

SEQ ID NO: 168243 - DNA, 2004 bp, Artificial Sequence
  derived and/or modified sequence
atggcagccgagactctgctttcaagtctcttaggtctattactgttaggcctgctgctgcctgcatccctgaccgggggagtggggagcctgaaccttgaagagctctccgagatgaggtacggaatcgaaattttgccgctgcctgtcatgggcggacagtctcagagttcagacgtagtgatcgtgagcagcaagtacaagcaacgttatgaatgtaggctccccgctggggcaatccactttcagagagagcgagaggaggaaacacctgcttaccagggccctggcattccagagctgctgtcgccgatgcgggatgcgccatgtttgctcaagacgaaagactggtggacctacgagttctgctatgggaggcacattcagcagtatcacatggaggatagcgaaatcaaaggagaggtactttatctcggttactaccagtcagcgttcgattgggacgacgagacggccaaagcatctaaacagcacagacttaaacgttaccattctcaaacatacggcaatggttctaaatgtgacctcaatggcagaccgagagaagctgaagtgcgctttctctgcgacgagggtgcgggtatctcaggggattatattgacagagtggatgagccattaagttgttcctacgttctgactatccggacccccaggctttgtccacatccgttacttcggcctcctccaagcgccgcaccccaagctattttgtgccacccaagcctccagccagaagagtatatggcttatgttcagcgccaggcagattcaaagcagtacggtgacaaaattatcgaggagttgcaggatctgggcccacaagtgtggtctgagactaaatcaggcgttgcaccacagaagatggccggagcgtctcctaccaaagacgactccaaagatagcgacttttggaagatgctgaacgaaccagaggaccaggcacccggtggtgaagaggtgcccgctgaagagcaggacccttccccggaagcggcagatagcgcctccggcgcaccgaacgattttcaaaataacgttcaggttaaggttatcaggtcgcctgccgacctcatccggtttatcgaagaattgaagggcggaaccaagaagggcaagccaaacatcgggcaggaacaacctgttgacgacgcagccgaagtgccacaacgcgagcctgagaaggagcggggtgaccctgaacggcagcgggaaatggaggaagaagaggatgaggatgaggacgaagatgaggacgaagacgagcgccagctgttaggcgagttcgaaaaggagctggagggcattttgctgcccagtgatagggatcgtctccgttccgaagtgaaagccggtatggaaagggagctggagaacatcattcaagaaacagagaaggaacttgatccggatggactgaagaaggagtccgagcgcgaccgggctatgctcgcactcacgtccactctcaacaaactgatcaaaagacttgaggagaaacagtctccggaactggtaaaaaagcataagaagaagcgggtggttccaaagaagcctcccccaagtccgcaaccgaccgaagaggatcctgagcatagagtgcgggtgcgagtgacaaagctgcggctgggtgggcctaatcaggatctgaccgttctggagatgaagcgtgagaacccccaactgaaacaaattgaaggcctggttaaagaattgctggagagggaaggcctcaccgccgctggaaaaattgaaattaaaatcgtacggccatgggccgagggaactgaggaaggcgcacggtggctcacagatgaggatactcgcaatctgaaagagatatttttcaacattcttgtccccggtgcagaagaggcccaaaaagagcggcaaagacaaaaggaactcgaaagcaactaccgccgagtttggggcagtccaggaggagagggcactggagacctagacgagttcgacttttag

SEQ ID NO: 168244 - DNA, 2004 bp, Artificial Sequence
  derived and/or modified sequence
atggccgccgagaccctgctgagcagcctgctgggcctgctgctgctgggcctgctgctgcccgccagcctgaccggcggcgtgggcagcctgaacctggaggagctgagcgagatgagatacggcatcgagatcctgcccctgcccgtgatgggcggccagagccagagcagcgacgtggtgatcgtgagcagcaagtacaagcagagatacgagtgcagactgcccgccggcgccatccacttccagagagagagagaggaggagacccccgcctaccagggccccggcatccccgagctgctgagccccatgagagacgccccctgcctgctgaagaccaaggactggtggacctacgagttctgctacggcagacacatccagcagtaccacatggaggacagcgagatcaagggcgaggtgctgtacctgggctactaccagagcgccttcgactgggacgacgagaccgccaaggccagcaagcagcacagactgaagagataccacagccagacctacggcaacggcagcaagtgcgacctgaacggcagacccagagaggccgaggtgagattcctgtgcgacgagggcgccggcatcagcggcgactacatcgacagagtggacgagcccctgagctgcagctacgtgctgaccatcagaacccccagactgtgcccccaccccctgctgagacccccccccagcgccgccccccaggccatcctgtgccaccccagcctgcagcccgaggagtacatggcctacgtgcagagacaggccgacagcaagcagtacggcgacaagatcatcgaggagctgcaggacctgggcccccaggtgtggagcgagaccaagagcggcgtggccccccagaagatggccggcgccagccccaccaaggacgacagcaaggacagcgacttctggaagatgctgaacgagcccgaggaccaggcccccggcggcgaggaggtgcccgccgaggagcaggaccccagccccgaggccgccgacagcgccagcggcgcccccaacgacttccagaacaacgtgcaggtgaaggtgatcagaagccccgccgacctgatcagattcatcgaggagctgaagggcggcaccaagaagggcaagcccaacatcggccaggagcagcccgtggacgacgccgccgaggtgccccagagagagcccgagaaggagagaggcgaccccgagagacagagagagatggaggaggaggaggacgaggacgaggacgaggacgaggacgaggacgagagacagctgctgggcgagttcgagaaggagctggagggcatcctgctgcccagcgacagagacagactgagaagcgaggtgaaggccggcatggagagagagctggagaacatcatccaggagaccgagaaggagctggaccccgacggcctgaagaaggagagcgagagagacagagccatgctggccctgaccagcaccctgaacaagctgatcaagagactggaggagaagcagagccccgagctggtgaagaagcacaagaagaagagagtggtgcccaagaagcccccccccagcccccagcccaccgaggaggaccccgagcacagagtgagagtgagagtgaccaagctgagactgggcggccccaaccaggacctgaccgtgctggagatgaagagagagaacccccagctgaagcagatcgagggcctggtgaaggagctgctggagagagagggcctgaccgccgccggcaagatcgagatcaagatcgtgagaccctgggccgagggcaccgaggagggcgccagatggctgaccgacgaggacaccagaaacctgaaggagatcttcttcaacatcctggtgcccggcgccgaggaggcccagaaggagagacagagacagaaggagctggagagcaactacagaagagtgtggggcagccccggcggcgagggcaccggcgacctggacgagttcgacttctag

SEQ ID NO: 168245 - protein, 327 aa, Artificial Sequence
  derived and/or modified sequence
MTVVSVPQREPLVLGGRLAPLGFSSRGYFGALPMVTTAPPPLPRIPDPRALPPTLFLPHFLGGDGPCLTPQPRAPAALPNRSLAVAGGTPRAAPKKRRKKKVRASPAGQLPSRFHQYQQHRPSLEGGRSPATGPSGAQEVPGPAAALAPSPAAAAGTEGASPDLAPLRPAAPGQTPLRKEVLKSKMGKSEKIALPHGQLVHGIHLYEQPKINRQKSKYNLPLTKITSAKRNENNFWQDSVSSDRIQKQEKKPFKNTENIKNSHLKKSAFLTEVSQKENYAGAKFSDPPSPSVLPKPPSHWMGSTVENSNQNRELMAVHLKTLLKVQT

SEQ ID NO: 168246 - protein, 142 aa, Artificial Sequence
  derived and/or modified sequence
MGKSEKIALPHGQLVHGIHLYEQPKINRQKSKYNLPLTKITSAKRNENNFWQDSVSSDRIQKQEKKPFKNTENIKNSHLKKSAFLTEVSQKENYAGAKFSDPPSPSVLPKPPSHWMGSTVENSNQNRELMAVHLKTLLKVQT

SEQ ID NO: 168247 - DNA, 984 bp, Artificial Sequence
  derived and/or modified sequence
atgaccgtggtttcggtgcctcagcgcgagcctctggtgctgggggggcggctggcgcccctcggattttccagtaggggatattttggcgccctgcctatggttacaacggcacctccaccgctgcctaggattcccgacccacgggctctgccaccgaccctgtttttaccgcactttctgggcggcgatggaccctgtctgactcctcaaccacgggctccagcggctctgccaaacagatctctggcagtggccggcggtactccgagagctgctcccaaaaagcgccggaaaaaaaaggtcagggcctcccctgctggacagctgccctcccggtttcaccaataccagcagcatagaccttccttggagggtggaaggtctcccgcgaccgggccctcaggcgctcaggaggtgccaggaccagcggctgcattggctccctcccctgctgctgccgctggaactgagggggcctctcccgatctggccccgctacggcctgcggccccaggtcagacccccctcaggaaggaagtgctaaagagcaagatgggcaagagcgagaagatagcgctccctcacggtcagctcgtccacggtatccacctgtatgaacagccgaagataaaccggcagaagagcaaatacaaccttccactcactaagataaccagcgctaagagaaacgaaaacaacttttggcaagattccgtttccagcgaccgaattcaaaagcaggaaaaaaaaccctttaaaaatacggagaacataaagaatagccacctgaagaagtcagcattcctaacggaagtcagccagaaagaaaattatgccggagccaagttttccgacccaccaagccccagcgttctgcctaagcccccgtcccattggatgggtagtacagtggaaaactccaatcagaatagggagctgatggctgtgcacttgaaaaccctacttaaggtgcagacctag

SEQ ID NO: 168248 - DNA, 429 bp, Artificial Sequence
  derived and/or modified sequence
atgggcaagtccgaaaaaatcgccctgccacacgggcagctggtacacggtattcacttgtacgaacagcctaagattaatcgccagaagagcaagtacaatctgcccttaaccaagatcacaagcgccaagcgcaacgagaataatttttggcaggatagtgtgagttctgatagaattcagaaacaggagaaaaagccctttaagaacaccgagaatatcaaaaacagccacctcaagaagagcgcatttttgaccgaggtctcccagaaagagaactacgctggtgcaaagttttccgatcctccttctccatccgtcctccccaagccaccgagtcattggatgggttctactgtggagaacagtaaccaaaatcgcgagctgatggcggtgcacctcaaaaccctgcttaaggtccagacatag

SEQ ID NO: 168249 - DNA, 429 bp, Artificial Sequence
  derived and/or modified sequence
atgggtaagtctgagaaaatcgccctccctcatggacaattggttcatgggattcacctttatgagcaaccgaaaatcaataggcagaagtcgaagtacaatttgcccctgaccaagattacatcagcaaagcgcaacgaaaataacttctggcaagattccgtgtcttctgatcggatccagaagcaagaaaaaaagccctttaaaaataccgagaatatcaagaattcacatttgaagaagtcggcattccttaccgaggtctcccagaaggagaactacgccggagctaagttctccgatccacccagcccatctgttcttcctaagcctcctagtcactggatggggagcaccgtggaaaattcaaatcagaatcgggagctcatggcggtgcacttgaagacactcctcaaggttcagacctag

SEQ ID NO: 168250 - DNA, 984 bp, Artificial Sequence
  derived and/or modified sequence
atgacagtggtgtctgtgccccagcgggagcccctggtgctgggcggccgcctggcccccctgggcttcagcagccggggctactttggagccctgcccatggtgaccacagcccccccacccctgccccgcatcccagacccccgggccctgccccccaccctcttcctgccccacttcctgggcggagatggcccctgcctgaccccccagccccgggccccagctgccctgcccaacagaagcctggccgtggccggcggcaccccccgggccgcccccaagaagaggaggaagaagaaggtgcgggccagccctgctggccagctgcccagccgcttccaccagtaccagcagcaccggcccagcctggagggcggccgcagccctgccaccggccccagcggggcccaggaggtgcccggccctgctgctgccctggcccccagccctgctgctgctgctggaacagaaggagccagcccagacctggcccccctgcggcctgctgcccctggccagacccccctgaggaaggaggtgctgaagagcaagatgggcaagtctgagaagatcgccctgccccacggccagctggtgcacggcatccacctgtatgagcagcccaagatcaaccggcagaagagcaagtacaacctgcccctgaccaagatcaccagcgccaagagaaatgaaaacaacttctggcaggacagcgtgtccagtgaccgcatccagaagcaggagaagaagcccttcaagaacacagagaacatcaagaacagccacctgaagaagagcgccttcctgacagaggtgtcccagaaggaaaattatgctggggccaagttcagtgacccccccagccccagcgtgctgcccaagccacccagccactggatgggcagcacagtggagaacagcaaccagaaccgggagctgatggctgtgcacctgaagaccctgctgaaggtgcagacctag

SEQ ID NO: 168251 - DNA, 429 bp, Artificial Sequence
  derived and/or modified sequence
atgggcaagtctgagaagatcgccctgccccacggccagctggtgcacggcatccacctgtatgagcagcccaagatcaaccggcagaagagcaagtacaacctgcccctgaccaagatcaccagcgccaagagaaatgaaaacaacttctggcaggacagcgtgtccagtgaccgcatccagaagcaggagaagaagcccttcaagaacacagagaacatcaagaacagccacctgaagaagagcgccttcctgacagaggtgtcccagaaggagaactatgctggggccaagttcagtgacccccccagccccagcgtgctgcccaagccacccagccactggatgggcagcacagtggagaacagcaaccagaaccgggagctgatggctgtgcacctgaagaccctgctgaaggtgcagacctag

SEQ ID NO: 168252 - DNA, 984 bp, Artificial Sequence
  derived and/or modified sequence
atgaccgtggtgagcgtgccccagcgggagcccctggtgctgggcggccgcctcgcaccgctcggtttcagctctagaggttactttggtgcgctgcctatggtgacaacagcgccacccccattgccgaggatccctgaccccagggcacttccacccactttattccttccgcacttcttagggggcgacggcccgtgcctgaccccccagccacgtgcgcccgctgcccttcctaacagatccctcgccgttgcaggtggcacccctcgcgccgcgccgaaaaaacggagaaaaaaaaaagttagagcctcccctgccgggcaacttccttctcgatttcatcaataccagcagcaccgcccttccctggaagggggtcggagtcctgctacaggcccgagcggagcccaggaggtgccaggcccagccgccgcgttagcaccatcccctgccgccgccgccggcactgagggggcatcacctgacctagcacctcttaggccggccgccccaggacagactcctcttcgaaaggaagtattgaaaagcaagatggggaaatccgaaaagatcgccttgcctcacggccagctcgtgcacgggatccacctttatgagcagcccaaaattaacagacaaaaatctaaatacaacctccccttgacgaagatcacctcagctaaaagaaacgagaacaacttttggcaagacagcgtctcaagcgaccggatacagaaacaggagaagaagccctttaagaacactgagaacatcaaaaactcacatcttaagaaatccgcattcctcaccgaagtcagtcaaaaagagaattatgctggcgcaaagttcagcgatccccctagtccaagcgtcctgccaaagccaccctcccactggatgggcagcaccgtggaaaatagcaatcaaaatagagaactgatggctgttcacctcaagacattgttgaaggtgcagacctag

SEQ ID NO: 168253 - DNA, 429 bp, Artificial Sequence
  derived and/or modified sequence
atgggcaagagcgagaagatcgccctgccccacggccagctggtgcatgggatccatctttacgaacagcccaaaattaaccgacagaaaagcaagtataacctcccactaacgaaaatcacaagcgcaaaacggaacgagaacaacttctggcaggatagtgtgtctagcgaccggatccagaagcaggagaaaaagccattcaagaataccgagaacattaagaatagccacctgaaaaagtcggctttcctgactgaggtcagccaaaaggagaattacgccggcgccaagttcagcgacccgccatcccctagcgtgctcccaaaaccaccatcccattggatgggctcgacagttgagaactctaaccagaatagagagttgatggccgtgcatttaaagaccttgttgaaggtccagacctag

SEQ ID NO: 168254 - DNA, 429 bp, Artificial Sequence
  derived and/or modified sequence
atgggcaagagcgagaagatcgccctgccccacggccagctggtgcatgggatccatctgtacgagcaacctaagattaaccgtcaaaaatcaaaatacaacctccccctcactaaaattacctcagccaagagaaatgagaataacttttggcaggattcagtgtcttccgacaggatacaaaaacaggaaaagaagcccttcaagaataccgagaacataaagaactcccacctcaagaaaagtgctttcctgaccgaagtgtcacagaaggagaactacgcgggcgcaaagttctccgatccaccatcaccgtcggttctgcctaaacctccctcccactggatggggagcactgtcgaaaactctaaccagaatcgcgagctgatggccgtccacttgaagacccttctaaaggttcaaacctag

SEQ ID NO: 168255 - DNA, 984 bp, Artificial Sequence
  derived and/or modified sequence
atgaccgtcgtttccgtgccacagcgtgagcccttagtcctgggagggagactcgcgccactgggtttttccagcaggggatacttcggggcactgcctatggtcactacagcacctccaccattgccacgcatccccgatcctcgagcactaccccctactttatttttgccacacttccttggcggagacgggccatgtttgactccccaaccgagagcacctgctgccttgccaaacagatcactggctgtcgcagggggtacccccagggccgctcccaaaaaaagacgaaaaaaaaaagtgcgcgcttcgccagccggacaactcccttctcggttccatcagtatcaacagcacagaccatcactcgaaggcggacgttccccagctacaggcccatccggtgctcaggaagtccccggtcccgcagctgctctggcacctagtcctgctgcggcagccggaactgaaggagcctccccagaccttgcacctctgaggcctgctgcccctgggcagacccctctcagaaaggaagtgctgaaaagtaagatggggaagtcagaaaagatagctttaccccatggacagctagtgcatggaatccacctttatgagcagcctaaaattaacagacagaagagcaagtataatctgcctttgacgaagatcactagtgccaaacgtaacgaaaacaatttttggcaggacagtgttagcagcgaccgaattcagaagcaagagaaaaagcccttcaagaacactgaaaacattaaaaattctcatctcaaaaaatcagcattcctgactgaagttagtcaaaaggagaactacgccggtgctaagttctccgatccaccatccccgagcgttctgcctaaaccaccttctcactggatggggtcaaccgtggaaaattctaatcagaatcgcgagttaatggctgtccacttaaaaactctgctcaaggtacagacttag

SEQ ID NO: 168256 - DNA, 429 bp, Artificial Sequence
  derived and/or modified sequence
atgggtaaaagtgaaaagatcgcactgccacacggacagcttgtccatggcattcatctctatgagcagcctaagatcaacaggcagaaaagtaagtataatctccctctaactaagataaccagtgctaagagaaatgagaataacttttggcaggatagcgtgtcatccgacagaattcagaaacaggaaaaaaagccctttaaaaataccgagaacataaagaactctcatcttaaaaagagcgcttttttgaccgaggtcagtcaaaaggaaaactatgccggagccaagttctccgatcctccaagccccagcgtgcttccaaaacctccgtctcattggatgggctccactgtcgagaattcaaatcagaaccgcgaattgatggccgttcatttgaagacactcctcaaggtgcagacttag

SEQ ID NO: 168257 - DNA, 429 bp, Artificial Sequence
  derived and/or modified sequence
atgggcaagtccgagaagatcgccctcccgcacggccagctggttcacggaatccacctttacgaacagcccaagataaatagacagaagtctaaatataacctgccacttactaagattacttcggccaagcgaaatgagaacaacttctggcaggactctgtctcgtccgaccgaatacagaagcaggagaaaaagccctttaagaatacagagaatattaagaatagtcatcttaaaaagtcagcgttcctgacagaggtgagccagaaggaaaattatgctggcgcaaagtttagtgaccctccttcaccctctgtcctgccgaagccgccatctcactggatgggatctacggtggaaaacagcaatcagaaccgggagcttatggcagtgcacctaaagacactgttgaaggtgcagacatag

SEQ ID NO: 168258 - DNA, 2065 bp, Artificial Sequence
  derived and/or modified sequence
tgttccgcgatcttctcaggctctcctagcagcatccatcgccgccaccctatcttcactggcttcattcaccttctccttctctcttcgttgctgagcgacaagcttcctagcgctatgactgtcgtctccgtcccgcagcgggagccgctcgtcctgggtggccgccttgcgccgcttggcttttcctcccgaggttactttggggccctcccgatggtgaccacggctccgcctcctttaccccggatcccggacccccgggcactgcccccgaccctcttcctccctcatttcctagggggagatggcccgtgtctgaccccccagcctcgcgctccagcagctctgcccaaccgcagcctcgccgtggcgggaggcactcctcgggcagcgccgaagaagcggcgaaagaagaaggtgcgggccagccccgcagggcagctgcccagccgcttccaccagtaccagcagcaccggccgagtctggagggcggccggagccccgcgaccggcccgagcggagcgcaggaggtcccgggcccggccgccgccttggccccgagtcctgcagccgcagccggcacggagggagccagccccgaccttgccccgctgcggcccgcggctcccggccaaacccccctcaggaaagaggttttaaaatcaaagatgggaaaatcggagaaaattgcccttccccatggccagcttgttcatggtatacacttgtatgagcaaccaaagataaacagacagaaaagcaaatataacttgccactaaccaagatcacctctgcaaaaagaaatgaaaacaacttttggcaggattctgtttcatctgacagaattcagaagcaggaaaaaaagccttttaaaaataccgagaacattaaaaattcgcatttgaagaaatcagcatttctaactgaagtgagccaaaaggaaaattatgctggggcaaagtttagtgatccaccttctcctagtgttcttccaaagcctcctagtcactggatgggaagcactgttgaaaattccaaccaaaacagggagctgatggcagtacacttaaaaacgctcctcaaagttcaaacttagatttcagatttcagtatgtgtgtaaaacataatttttcccatatccctggactcttgagaaaattggtacagaaatggaaatttgccttgttgcaacatacaattgcaaaagatgagtttaaaaaattacatacaaacagcttgtattatattttatattttgtaaatactgtataccatgtattatgtgtatattgttcatacttgagaggtatattatagttttgttatgaaagtatgtattttgccctgcccacattgcaggtgttttgtatatatacaatggataaattttaagtgtgtgctaaggcacatggaagaccgattttatttgcacaaggtactgagatttttttcaagaaacagctgtcaaatctcaaggtgaagatctaaatgtgaacagtttactaatgcactactgaagtttaaatctgtggcacaatcaatgtaagcatggggtttgtttctctaaattgatttgtaatctgaaattactgaacaactcctattcccatttttgctaaactcaatttctggttttggtatatatccattccagcttaatgcctctaattttaatgccaacaaaattggttgtaatcaaattttaaaataataataatttggcccccccttttaaaatagtcttgactctttgtgtgtgactgtttctcatgtttgaatgtgtgactaggagatgattttgtgtggttggatttttttgacttctactttactggctgagtgtgagccgccatgcctggccataatctacattttcttaccaggagcagcattgaggtttttgagcatagtacttgactactctagaggctgagacgggagcatctcttgagcctgagaagtggagattgcaattgagctaggatcaggccactgcactccagcctgggtaacagacgctgtctcaaaaaaaaggccaagagaaagtaagggagacaga

SEQ ID NO: 168259 - DNA, 599 bp, Artificial Sequence
  derived and/or modified sequence
tattgacgtggaaagttgtggtcctctttcgtgtcgtgtcttgcttactaccgcgttacaagtgttggtagtgcagtgatctagtggattaccttacgcttttccatcctttcaagacttcctataaggcccacttaagttgggaaagattaaggttttaaaatcaaagatgggaaaatcggagaaaattgcccttccccatggccagcttgttcatggtatacacttgtatgagcaaccaaagataaacagacagaaaagcaaatataacttgccactaaccaagatcacctctgcaaaaagaaatgaaaacaacttttggcaggattctgtttcatctgacagaattcagaagcaggaaaaaaagccttttaaaaataccgagaacattaaaaattcgcatttgaagaaatcagcatttctaactgaagtgagccaaaaggaaaattatgctggggcaaagtttagtgatccaccttctcctagtgttcttccaaagcctcctagtcactggatgggaagcactgttgaaaattccaaccaaaacagggagctgatggcagtacacttaaaaacgctcctcaaagttcaaacttaga

SEQ ID NO: 168260 - DNA, 816 bp, Artificial Sequence
  derived and/or modified sequence
gttgctgcgccgccaccgcccgagtcatgttccgcgatcttctcaggctctcctagcagcatccatcgccgccaccctatcttcactggcttcattcaccttctccttctctcttcgttgctgagcgacaagcttcctagcgctatgactgtcgtctccgtcccgcagcgggagccgctcgtcctgggtggccgccttgcgccgcttggcttttcctcccgaggttttaaaatcaaagatgggaaaatcggagaaaattgcccttccccatggccagcttgttcatggtatacacttgtatgagcaaccaaagataaacagacagaaaagcaaatataacttgccactaaccaagatcacctctgcaaaaagaaatgaaaacaacttttggcaggattctgtttcatctgacagaattcagaagcaggaaaaaaagccttttaaaaataccgagaacattaaaaattcgcatttgaagaaatcagcatttctaactgaagtgagccaaaaggaaaattatgctggggcaaagtttagtgatccaccttctcctagtgttcttccaaagcctcctagtcactggatgggaagcactgttgaaaattccaaccaaaacagggagctgatggcagtacacttaaaaacgctcctcaaagttcaaacttagatttcagatttcagtatgtgtgtaaaacataatttttcccatatccctggactcttgagaaaattggtacagaaatggaaatttgccttgttgcaacatacaattgcaaaagatgagtttaaaaaattacatacaaacagcttgtatta

SEQ ID NO: 168261 - DNA, 984 bp, Artificial Sequence
  derived and/or modified sequence
atgaccgtggtgagcgtgccccagagagagcccctggtgctgggcggcagactggcccccctgggcttcagcagcagaggctacttcggcgccctgcccatggtgaccaccgcccccccccccctgcccagaatccccgaccccagagccctgccccccaccctgttcctgccccacttcctgggcggcgacggcccctgcctgaccccccagcccagagcccccgccgccctgcccaacagaagcctggccgtggccggcggcacccccagagccgcccccaagaagagaagaaagaagaaggtgagagccagccccgccggccagctgcccagcagattccaccagtaccagcagcacagacccagcctggagggcggcagaagccccgccaccggccccagcggcgcccaggaggtgcccggccccgccgccgccctggcccccagccccgccgccgccgccggcaccgagggcgccagccccgacctggcccccctgagacccgccgcccccggccagacccccctgagaaaggaggtgctgaagagcaagatgggcaagagcgagaagatcgccctgccccacggccagctggtgcacggcatccacctgtacgagcagcccaagatcaacagacagaagagcaagtacaacctgcccctgaccaagatcaccagcgccaagagaaacgagaacaacttctggcaggacagcgtgagcagcgacagaatccagaagcaggagaagaagcccttcaagaacaccgagaacatcaagaacagccacctgaagaagagcgccttcctgaccgaggtgagccagaaggagaactacgccggcgccaagttcagcgacccccccagccccagcgtgctgcccaagccccccagccactggatgggcagcaccgtggagaacagcaaccagaacagagagctgatggccgtgcacctgaagaccctgctgaaggtgcagacctag

SEQ ID NO: 168262 - DNA, 429 bp, Artificial Sequence
  derived and/or modified sequence
atgggcaagagcgagaagatcgccctgccccacggccagctggtgcacggcatccacctgtacgagcagcccaagatcaacagacagaagagcaagtacaacctgcccctgaccaagatcaccagcgccaagagaaacgagaacaacttctggcaggacagcgtgagcagcgacagaatccagaagcaggagaagaagcccttcaagaacaccgagaacatcaagaacagccacctgaagaagagcgccttcctgaccgaggtgagccagaaggagaactacgccggcgccaagttcagcgacccccccagccccagcgtgctgcccaagccccccagccactggatgggcagcaccgtggagaacagcaaccagaacagagagctgatggccgtgcacctgaagaccctgctgaaggtgcagacctag

SEQ ID NO: 168263 - protein, 201 aa, Artificial Sequence
  derived and/or modified sequence
MVTLAELLVLLAALLATVSGYFVSIDAHAEECFFERVTSGTKMGLIFEVAEGGFLDIDVEITGPDNKGIYKGDRESSGKYTFAAHMDGTYKFCFSNRMSTMTPKIVMFTIDIGEAPKGQDMETEAHQNKLEEMINELAVAMTAVKHEQEYMEVRERIHRAINDNTNSRVVLWSFFEALVLVAMTLGQIYYLKRFFEVRRVV

SEQ ID NO: 168264 - protein, 169 aa, Artificial Sequence
  derived and/or modified sequence
MVTLAELLVLLAALLATVSGYFVSIDVEITGPDNKGIYKGDRESSGKYTFAAHMDGTYKFCFSNRMSTMTPKIVMFTIDIGEAPKGQDMETEAHQNKLEEMINELAVAMTAVKHEQEYMEVRERIHRAINDNTNSRVVLWSFFEALVLVAMTLGQIYYLKRFFEVRRVV

SEQ ID NO: 168265 - protein, 151 aa, Artificial Sequence
  derived and/or modified sequence
MVTLAELLVLLAALLATVSGYFVSIDAHAEECFFERVTSGTKMGLIFEVAEGGFLDIDVEITGPDNKGQDMETEAHQNKLEEMINELAVAMTAVKHEQEYMEVRERIHRAINDNTNSRVVLWSFFEALVLVAMTLGQIYYLKRFFEVRRVV

SEQ ID NO: 168266 - DNA, 606 bp, Artificial Sequence
  derived and/or modified sequence
atggtgaccctggccgagctgctggtgctgctggccgccctgctggccaccgtgagcggctacttcgtgagcatcgacgcccacgccgaggagtgcttcttcgagagagtgaccagcggcaccaagatgggcctgatcttcgaggtggccgagggcggcttcctggacatcgacgtggagatcaccggccccgacaacaagggcatctacaagggcgacagagagagcagcggcaagtacaccttcgccgcccacatggacggcacctacaagttctgcttcagcaacagaatgagcaccatgacccccaagatcgtgatgttcaccatcgacatcggcgaggcccccaagggccaggacatggagaccgaggcccaccagaacaagctggaggagatgatcaacgagctggccgtggccatgaccgccgtgaagcacgagcaggagtacatggaggtgagagagagaatccacagagccatcaacgacaacaccaacagcagagtggtgctgtggagcttcttcgaggccctggtgctggtggccatgaccctgggccagatctactacctgaagagattcttcgaggtgagaagagtggtgtag

SEQ ID NO: 168267 - DNA, 510 bp, Artificial Sequence
  derived and/or modified sequence
atggtgaccctggccgagctgctggtgctgctggccgccctgctggccaccgtgagcggctacttcgtgagcatcgacgtggagatcaccggccccgacaacaagggcatctacaagggcgacagagagagcagcggcaagtacaccttcgccgcccacatggacggcacctacaagttctgcttcagcaacagaatgagcaccatgacccccaagatcgtgatgttcaccatcgacatcggcgaggcccccaagggccaggacatggagaccgaggcccaccagaacaagctggaggagatgatcaacgagctggccgtggccatgaccgccgtgaagcacgagcaggagtacatggaggtgagagagagaatccacagagccatcaacgacaacaccaacagcagagtggtgctgtggagcttcttcgaggccctggtgctggtggccatgaccctgggccagatctactacctgaagagattcttcgaggtgagaagagtggtgtag

SEQ ID NO: 168268 - DNA, 456 bp, Artificial Sequence
  derived and/or modified sequence
atggtgaccctggccgagctgctggtgctgctggccgccctgctggccaccgtgagcggctacttcgtgagcatcgacgcccacgccgaggagtgcttcttcgagagagtgaccagcggcaccaagatgggcctgatcttcgaggtggccgagggcggcttcctggacatcgacgtggagatcaccggccccgacaacaagggccaggacatggagaccgaggcccaccagaacaagctggaggagatgatcaacgagctggccgtggccatgaccgccgtgaagcacgagcaggagtacatggaggtgagagagagaatccacagagccatcaacgacaacaccaacagcagagtggtgctgtggagcttcttcgaggccctggtgctggtggccatgaccctgggccagatctactacctgaagagattcttcgaggtgagaagagtggtgtag

SEQ ID NO: 168269 - DNA, 606 bp, Artificial Sequence
  derived and/or modified sequence
atggtaaccctcgctgaactgttagtcctgctggcggcacttcttgctacagtgagcgggtacttcgtgtccattgatgctcacgccgaagagtgcttttttgaacgggtgacatccggcacaaagatgggacttatttttgaagtggccgaagggggatttctggatatcgatgtggagattactggtcccgacaacaagggcatatacaagggtgaccgcgaaagcagcggtaagtacacgtttgctgcacatatggacggtacctacaaattctgtttctcaaaccggatgagtactatgactcctaaaatcgtgatgtttactattgatattggcgaagccccaaaaggccaggacatggaaaccgaagctcatcaaaacaagctggaggaaatgattaacgagctggccgtggctatgacggccgtgaagcacgaacaagaatacatggaggtgcgggaaagaatacatcgggcgatcaacgacaacactaacagccgcgtggtcctttggagcttctttgaagcacttgtgctagtcgccatgacacttgggcaaatatactacctgaaacgattttttgaggtgaggcgtgtggtctag

SEQ ID NO: 168270 - DNA, 510 bp, Artificial Sequence
  derived and/or modified sequence
atggttacactggccgagcttctggtgttgcttgccgcccttttagccaccgtatccgggtactttgtgagcattgacgtggaaattaccgggccagacaacaaaggcatctacaaaggggatagagagagttccgggaagtacacatttgcagcgcacatggacggcacttacaagttttgcttctctaatcggatgtctacaatgacccctaaaatcgttatgttcaccattgatatcggagaggcccctaaggggcaggatatggagaccgaagcccaccagaataaactggaggagatgataaatgagttagccgtcgcaatgactgcagtcaagcacgagcaagaatacatggaggtcagggaaagaatacaccgtgccattaacgacaatacgaattccagagtggtgctgtggagctttttcgaagccctggtgctggtggcgatgactcttggacagatctactacctgaaacgcttcttcgaagtgcgccgagtggtgtag

SEQ ID NO: 168271 - DNA, 456 bp, Artificial Sequence
  derived and/or modified sequence
atggtgaccctagcagaattgttggtcctccttgcggcattgttggccaccgtgagtggctatttcgtgtccattgacgcacacgccgaagaatgtttcttcgagagggttacatccgggaccaaaatgggcctaatcttcgaagttgccgaaggtgggtttttagacattgacgttgagattacaggccctgacaataagggtcaggatatggaaacagaagctcaccaaaacaagctcgaggaaatgataaatgaactcgccgttgccatgacggccgtgaagcatgagcaggaatacatggaggtccgagaacgtatccaccgcgccattaacgataacacaaatagtagggtcgtgttgtggtctttcttcgaggcccttgtgctcgttgctatgacactagggcaaatctactacttgaagcggttctttgaagtgaggcgagtcgtctag

SEQ ID NO: 168272 - DNA, 606 bp, Artificial Sequence
  derived and/or modified sequence
atggtgaccctggccgagctgctggtgctgctggccgccctgctggccaccgtgtctggctactttgtgtccattgatgcccatgctgaggagtgcttctttgagcgggtgaccagcggcaccaagatgggcctcatctttgaggtggccgagggcggcttcctggacattgatgtggagatcaccggccctgacaacaagggcatctacaagggggaccgggagagcagcggcaagtacacctttgctgcccacatggatggcacctacaagttctgcttcagcaacaggatgagcaccatgacccccaagatcgtgatgttcaccatcgacatcggggaggcccccaagggccaggacatggagacagaggcccaccagaacaagctggaggagatgatcaatgagctggccgtggccatgacagctgtgaagcatgagcaggagtacatggaggtgcgggagcgcatccaccgggccatcaatgacaacaccaacagccgggtggtgctgtggagcttctttgaggccctggtgctggtggccatgaccctgggccagatctactacctgaagcgcttctttgaggtgcggcgggtggtgtag

SEQ ID NO: 168273 - DNA, 510 bp, Artificial Sequence
  derived and/or modified sequence
atggtgaccctggccgagctgctggtgctgctggccgccctgctggccaccgtgtctggctactttgtgtccattgatgtggagatcaccggccctgacaacaagggcatctacaagggggaccgggagagcagcggcaagtacacctttgctgcccacatggatggcacctacaagttctgcttcagcaacaggatgagcaccatgacccccaagatcgtgatgttcaccatcgacatcggggaggcccccaagggccaggacatggagacagaggcccaccagaacaagctggaggagatgatcaatgagctggccgtggccatgacagctgtgaagcatgagcaggagtacatggaggtgcgggagcgcatccaccgggccatcaatgacaacaccaacagccgggtggtgctgtggagcttctttgaggccctggtgctggtggccatgaccctgggccagatctactacctgaagcgcttctttgaggtgcggcgggtggtgtag

SEQ ID NO: 168274 - DNA, 456 bp, Artificial Sequence
  derived and/or modified sequence
atggtgaccctggccgagctgctggtgctgctggccgccctgctggccaccgtgtctggctactttgtgtccattgatgcccatgctgaggagtgcttctttgagcgggtgaccagcggcaccaagatgggcctcatctttgaggtggccgagggcggcttcctggacattgatgtggagatcaccggccctgacaacaagggccaggacatggagacagaggcccaccagaacaagctggaggagatgatcaatgagctggccgtggccatgacagctgtgaagcatgagcaggagtacatggaggtgcgggagcgcatccaccgggccatcaatgacaacaccaacagccgggtggtgctgtggagcttctttgaggccctggtgctggtggccatgaccctgggccagatctactacctgaagcgcttctttgaggtgcggcgggtggtgtag

SEQ ID NO: 168275 - DNA, 606 bp, Artificial Sequence
  derived and/or modified sequence
atggtgaccctggccgagctgctggtgctgctggccgccctgctggccaccgtcagcggctactttgtcagcattgacgcccacgcagaggagtgcttctttgagagggtcacttctggcactaagatgggactgatatttgaagtggcggaaggtggtttcttggacattgacgtcgagattacggggccggacaataagggcatctacaagggcgatagggagagcagcggaaaatatactttcgctgcccacatggacggaacttacaagttttgtttttctaatcggatgtccacaatgacgcctaagatagtgatgttcactatagacatcggggaggcgccgaagggccaggacatggagactgaggctcatcagaacaaactcgaagaaatgattaatgagcttgcggtggccatgaccgccgttaaacacgagcaggagtacatggaagtaagagagagaatccaccgggctattaacgacaacacaaattcacgagtggtgctctggagctttttcgaagccctggtcctggtcgccatgactctggggcaaatctattacctgaagaggttttttgaagtgagacgggttgtgtag

SEQ ID NO: 168276 - DNA, 510 bp, Artificial Sequence
  derived and/or modified sequence
atggtgaccctggccgagctgctggtgctgctggccgccctgctggctaccgttagtggttattttgtttccattgatgttgagataacaggacccgataataaggggatctataaaggtgatagagagagtagtggtaaatacacctttgccgcccatatggatggaacttacaagttttgcttcagcaaccggatgagcactatgacgcccaagatagtgatgtttactattgatatcggtgaggcacctaaggggcaggatatggaaacggaggcacatcaaaataagctcgaggaaatgattaacgagctagctgtggcgatgaccgctgttaaacatgagcaggagtacatggaggtgagggaacggatccaccgcgccattaatgataataccaacagcagggtcgtcctgtggagtttttttgaagccttagtgttagtcgcaatgactctggggcagatctactaccttaaacgattcttcgaagttaggagggtcgtgtag

SEQ ID NO: 168277 - DNA, 456 bp, Artificial Sequence
  derived and/or modified sequence
atggtgaccctggccgagctgctggtgctgctggccgccctgctggccactgtgtccggatatttcgtttccattgacgcccacgcagaagagtgtttctttgaacgggttacctctggaactaagatggggctgattttcgaggtagccgaggggggttttctcgatattgacgtggaaatcaccgggcccgataataagggtcaagatatggagaccgaggcccaccagaacaaactggaggaaatgattaatgaactcgcagtggctatgacggccgttaagcacgagcaagagtacatggaggtgagggagagaatccaccgagccatcaatgataacacaaacagcagagtggtgttatggtctttcttcgaagcccttgtgctcgtggccatgactttgggtcagatctattacctgaagcggtttttcgaagtgagaagagtcgtgtag

SEQ ID NO: 168278 - DNA, 606 bp, Artificial Sequence
  derived and/or modified sequence
atggttacattggctgagctgctggtcctgcttgccgcactgttggctaccgtctctgggtacttcgtctctatagacgcacacgctgaagagtgttttttcgagcgtgttacatctgggacaaaaatgggactcatctttgaggtggcggagggcggattcctggatatcgacgttgaaatcaccggacccgataataagggaatatataagggagatcgcgagtcttctggtaaatacacctttgcagctcatatggatggaacctacaagttctgtttcagcaaccgcatgtcaaccatgactcctaagatcgtgatgttcacaatcgacattggggaagctccaaaaggccaagatatggaaactgaggcccaccagaacaagctcgaggagatgatcaatgagttggccgtagccatgactgcagtgaagcacgagcaggagtatatggaggtgagagaaaggatacaccgagccatcaacgacaataccaattctcgtgtggtattgtggagcttcttcgaagccctggtgctggtagctatgactctgggccagatctactacctcaaacgcttttttgaagttagacgggttgtgtag

SEQ ID NO: 168279 - DNA, 510 bp, Artificial Sequence
  derived and/or modified sequence
atggttacgttagcggagctcttagtgctgctagcagcattactcgccacagtctccgggtactttgtctcaatagacgtggagattactggacctgataataagggcatatataagggcgatcgggaatcaagcgggaaatacaccttcgccgcacacatggatggaacatataaattctgtttctccaatagaatgagcaccatgacgccaaaaatcgtgatgtttacgattgacattggggaggcgcctaagggacaggacatggagaccgaagcccaccagaacaagctcgaggagatgattaacgaacttgctgtggccatgactgctgttaagcatgaacaggagtatatggaagttagggagcgtatccaccgtgccatcaacgacaatacaaattcgcgggtcgtcctgtggtcatttttcgaggccttggtgcttgtagcaatgactctggggcagatctattacttgaagcgtttcttcgaggtgagaagggtggtgtag

SEQ ID NO: 168280 - DNA, 456 bp, Artificial Sequence
  derived and/or modified sequence
atggtgactctcgcggaattactcgtgcttctcgccgcacttctagccactgtatccggctattttgtttcgatcgacgctcatgcagaggagtgcttctttgaacgtgttacatctggcactaaaatgggcctgattttcgaagttgccgagggaggctttctggacatcgacgtagagataaccggtcccgataataagggacaagacatggaaactgaagcgcatcagaataagctggaagagatgatcaacgaactcgctgttgctatgacagcggtgaagcacgagcaggaatatatggaggtgcgcgaaagaatccaccgggctatcaacgataatactaacagtcgcgtcgtgctttggagctttttcgaggcgctggtgcttgtcgcaatgaccttgggccagatctattacctgaaacgtttcttcgaagtccggagagttgtgtag

SEQ ID NO: 168281 - DNA, 2552 bp, Artificial Sequence
  derived and/or modified sequence
ggagcttaggcggcggtggctgagaaggcagcggggcggcggcggcggcggcggcggcggctgtggaggccgcagtccgggtcctggcttcggcctcagccccaccatggtgacgcttgctgaactgctggtgcttctggccgctctcctggccacggtctcgggctatttcgttagcatcgacgcccatgctgaagagtgcttctttgagcgggtcacctcgggcaccaagatgggcctcatcttcgaggtggcggagggcggcttcctggacatcgacgtggagattacaggaccagataacaaaggaatttacaaaggagacagagaatccagtgggaaatacacatttgctgctcacatggatggaacatacaaattttgttttagtaaccggatgtccaccatgactccaaaaatagtgatgttcaccattgatattggggaggctccaaaaggacaagatatggaaacagaagctcaccagaacaagctagaagaaatgatcaatgagctagcagtggcgatgacagctgtaaagcacgaacaggaatacatggaagtccgggagagaatacacagagccatcaacgacaacacaaacagcagagtggtcctttggtccttctttgaagctcttgttctagttgccatgacattgggacagatctactacctgaagagattttttgaagtccggagagttgtttaaaaagcctcttcctgatgatcccaactcagaattcactgtttaccaaacaccttggtcataataatgtcattagtttctccatttttattttctgaactgtacattcacaacttatgtttctttgagattaatagatattgggggaaaaacgcctttttaggaaaattatagtgaaaatttgacagttgattggcataatttcttgtttgaatgctgcctccattatataggtccttccaggaactcaaacactgtaagtgaaatatgggagtatagtttttattatttcttcttttccttttgttttcataatataatgcagtttgttcaggaaatcagcacaaagcctgatagtactttactaaaatgactgcattctttggattccttcagtctatggttcaagtcactaaagattcatttttgttgagtccttatgagaaacagcagtatgaatcttgacggtttctgcccgtcctaatggcagagctctctgacttgggtgtatgctgccaggctgggtactttcatactttgttttcttgttttgctttaaaactacgactcagcatacattttcccacatacatttttacattgtaccttaggactcagtcatctccacttaaattgatgacacaagcagctaataaccatttctgggtttctgcctaaccccctaattgtctgttaaagccaattctctgggtgtcccagtgagtggtggctttttttctttccacattggcacattcacttctcccactcttggcatgtaagaaataagcatttacataattggaaaaatctggatttctgatgccaaagggttaaagcttcttggatttcatttcattgatatacagccactattttatttttgatcagtggcctttgggccactgttcagggtactgaccatcagtgtcagcattagggttttggtttttgtttcttttgggtctttcttttttggcacatgtgaatcttgttttgtgtaaaatgaaattactttctcttgttctctgatgatgggtttaaaattaaaagagcatccggttttggtatggggatgatccaggattatgttgtgactgatacatattagttacttgtgcttttttttttttttttggatctttgcaagggcaaaactacaagtaacgagttttatataattaatttaaatttgttacaggttttcatgttcaggataaaccatacttccaccttgggtgagaacacttgcaacagtttattaatgaggtgactttcaccttaggacaactgttgcatgccaagttttttgtgtgtgtgaaacacttcaaaactgatttaaaagatgtaaatttaaaattggttgtatctaatatgccccaggttcggtaaataaacaattctttttaaaaacagtattctgtgttttatatattgacagctaatccacattttttacacaccaactttctgttcttatttgacatgagacatgttcatgttttctgagtatttatacctattacgtctgttactttttaattctataaacttgaggatagtgaatggtaccaagttttagtttctgcgtaggttttccagtgtggcttctctgatggatcagtgctaaaatcttaagtatttttctatttgggaaaaaagggttgaattattttcacttgcccacgtagtttatgaatgtgggaaatagcttcaaagacagattaaatgatttgcccaaggccacagaaaagagtgaaaggtggaaccggagactagatcaccacctgtagaaactgttcttcctctgtgaaactaacggcctgctggtaataaaagtagc

SEQ ID NO: 168282 - DNA, 1087 bp, Artificial Sequence
  derived and/or modified sequence
ttaggcggcggtggctgagaaggcagcggggcggcggcggcggcggcggcggcggctgtggaggccgcagtccgggtcctggcttcggcctcagccccaccatggtgacgcttgctgaactgctggtgcttctggccgctctcctggccacggtctcgggctatttcgttagcatcgacgtggagattacaggaccagataacaaaggaatttacaaaggagacagagaatccagtgggaaatacacatttgctgctcacatggatggaacatacaaattttgttttagtaaccggatgtccaccatgactccaaaaatagtgatgttcaccattgatattggggaggctccaaaaggacaagatatggaaacagaagctcaccagaacaagctagaagaaatgatcaatgagctagcagtggcgatgacagctgtaaagcacgaacaggaatacatggaagtccgggagagaatacacagagccatcaacgacaacacaaacagcagagtggtcctttggtccttctttgaagctcttgttctagttgccatgacattgggacagatctactacctgaagagattttttgaagtccggagagttgtttaaaaagcctcttcctgatgatcccaactcagaattcactgtttaccaaacaccttggtcataataatgtcattagtttctccatttttattttctgaactgtacattcacaacttatgtttctttgagattaatagatattgggggaaaaacgcctttttaggaaaattatagtgaaaatttgacagttgattggcataatttcttgtttgaatgctgcctccattatataggtccttccaggaactcaaacactgtaagtgaaatatgggagtatagtttttattatttcttcttttccttttgttttcataatataatgcagtttgttcaggaaatcagcacaaagcctgatagtactttactaaaatgactgcattctttggattccttcagtctatggttcaagtcactaaagattcatttttgttgagtccttatgagaaacagcagtatgaatcttgacggtttctgcccgt

SEQ ID NO: 168283 - DNA, 983 bp, Artificial Sequence
  derived and/or modified sequence
gagaaggcagcggggcggcggcggcggcggcggcggcggctgtggaggccgcagtccgggtcctggcttcggcctcagccccaccatggtgacgcttgctgaactgctggtgcttctggccgctctcctggccacggtctcgggctatttcgttagcatcgacgcccatgctgaagagtgcttctttgagcgggtcacctcgggcaccaagatgggcctcatcttcgaggtggcggagggcggcttcctggacatcgacgtggagattacaggaccagataacaaaggacaagatatggaaacagaagctcaccagaacaagctagaagaaatgatcaatgagctagcagtggcgatgacagctgtaaagcacgaacaggaatacatggaagtccgggagagaatacacagagccatcaacgacaacacaaacagcagagtggtcctttggtccttctttgaagctcttgttctagttgccatgacattgggacagatctactacctgaagagattttttgaagtccggagagttgtttaaaaagcctcttcctgatgatcccaactcagaattcactgtttaccaaacaccttggtcataataatgtcattagtttctccatttttattttctgaactgtacattcacaacttatgtttctttgagattaatagatattgggggaaaaacgcctttttaggaaaattatagtgaaaatttgacagttgattggcataatttcttgtttgaatgctgcctccattatataggtccttccaggaactcaaacactgtaagtgaaatatgggagtatagtttttattatttcttcttttccttttgttttcataatataatgcagtttgttcaggaaatcagcacaaagcctgatagtactttactaaaatgactgcattctttggattccttcagtctatggttcaagtcactaaagattcatttttgttgagtccttatgaga

SEQ ID NO: 168284 - protein, 261 aa, Artificial Sequence
  derived and/or modified sequence
MAAAVPRAAFLSPLLPLLLGFLLLSAPHGGSGLHTKGALPLDTVTFYKVIPKSKFVLVKFDTQYPYGEKQDEFKRLAENSASSDDLLVAEVGISDYGDKLNMELSEKYKLDKESYPVFYLFRDGDFENPVPYTGAVKVGAIQRWLKGQGVYLGMPGCLPVYDALAGEFIRASGVEARQALLKQGQDNLSSVKETQKKWAEQYLKIMGKILDQGEDFPASEMTRIARLIEKNKMSDGKKEELQKSLNILTAFQKKGAEKEEL

SEQ ID NO: 168285 - DNA, 786 bp, Artificial Sequence
  derived and/or modified sequence
atggcagcagccgtgcccagagctgcttttttatcccctttgttacctctcctattgggatttctactgttgtctgcgccacatgggggaagtggactacatacgaaaggagccttgccacttgatacagtaaccttctacaaggtcattcctaagagcaagtttgtcctggtcaagtttgatacacagtatccttatggcgagaaacaggatgaatttaagagattggccgagaactctgcctctagcgatgatttgcttgtagcagaagtgggcatctccgattacggtgacaaacttaacatggagttatctgaaaagtacaagcttgacaaggagtcataccccgtcttctacctcttcagggatggtgatttcgagaatccggtgccatataccggggcggtaaaagttggagccatccaacgttggctgaaaggccagggagtgtatcttggaatgccaggctgtctgccagtctacgatgctctcgccggtgaatttattcgcgcgtccggcgtggaagcccggcaggccttgctcaagcagggtcaggacaatctgagttctgtcaaagaaacccagaaaaagtgggcagagcaatatctgaagataatggggaaaattctcgatcaaggcgaagatttcccagctagcgagatgacacggattgcaagactaatcgaaaagaacaaaatgagcgacggaaaaaaagaggagttgcagaaatccctgaatattctgaccgcctttcaaaagaagggcgccgaaaaagaagaactctag

SEQ ID NO: 168286 - DNA, 786 bp, Artificial Sequence
  derived and/or modified sequence
atggctgctgctgtgccccgggccgccttcctgagccccctgctgcccctgctgctgggcttcctgctgctgagcgccccccacggcggcagcggcctgcacaccaagggggccctgcccctggacacagtgaccttctacaaggtgatccccaagagcaagtttgtgctggtgaagtttgacacccagtacccctacggggagaagcaggatgagttcaagaggctggccgagaacagcgccagcagtgatgacctgctggtggccgaggtgggcatcagtgactatggagacaagctgaacatggagctgtctgagaagtacaagctggacaaggagagctaccctgtgttctacctgttcagagatggagactttgaaaatcctgtgccctacacaggagctgtgaaggtgggcgccatccagcgctggctgaagggccagggcgtgtacctgggcatgcctggctgcctgcctgtgtatgatgccctggccggggagttcatccgggccagcggcgtggaggcccggcaggccctgctgaagcagggccaggacaacctgagctctgtgaaggagacccagaagaagtgggccgagcagtacctgaagatcatgggcaagatcctggaccagggcgaggacttccctgccagcgagatgacccgcatcgcccggctcatcgagaagaacaagatgtctgatggcaagaaggaggagctgcagaagagcctgaacatcctgacagccttccagaagaagggagctgagaaggaggagctgtag

SEQ ID NO: 168287 - DNA, 786 bp, Artificial Sequence
  derived and/or modified sequence
atggccgccgccgtgccccgggccgccttcctgagccccctgctgcccttactgttaggctttctgctgctttcagcccctcacggtggctctgggctccacaccaagggtgccttgcctttggatactgtaacattttacaaggttattccgaagtctaagtttgtacttgtgaaatttgacacccaatatccttacggggagaagcaggacgaatttaaacgcctggccgagaattctgcttctagtgatgatctactagtcgccgaggtaggcatctccgactatggtgacaagctcaacatggaactatcagagaaatataagctggataaggagagctatccggtgttctacctgttcagagacggtgacttcgagaatcctgtgccctacacaggggcagtgaaggttggcgctattcagcgctggctgaaaggccagggggtctacctgggcatgcctggatgccttccggtgtacgatgccttagctggagagtttattagagcctccggggtggaggctagacaggctctgctgaagcaaggccaggataacctctcctccgtgaaggaaactcagaagaaatgggccgaacagtacttaaagataatgggcaaaattctggaccagggagaagacttccctgcatccgagatgacacggatcgccaggctgattgagaaaaacaaaatgagcgacggtaagaaagaggagttgcagaaaagcctcaatattcttacggccttccagaaaaagggcgccgaaaaggaagaactgtag

SEQ ID NO: 168288 - DNA, 786 bp, Artificial Sequence
  derived and/or modified sequence
atggctgcggcagtacccagagcagcctttctgtctcccctccttccattactgctcggcttcctgcttttatctgctcctcacggaggcagcggtctgcataccaaaggagctcttccactggatactgttacattctacaaggtgattcccaaatccaagtttgtgctggttaagttcgatacccaatatccttacggcgagaagcaggatgaatttaaaaggcttgccgagaactccgcctcgagcgatgacctgctggttgctgaggtaggaatatcggactatggagataaattgaatatggagctgtccgaaaaatacaagcttgacaaggaatcctatcctgtgttttacttgtttcgtgatggcgacttcgaaaacccagtgccatacacaggagccgttaaggtgggggctatacagcgatggctgaaagggcaaggggtgtatcttggaatgcccggttgtctgcctgtctatgatgctttagccggagaatttattcgggctagcggagtcgaagccagacaggctttactcaaacaaggacaagacaacttgagctcagttaaagagactcagaagaaatgggctgaacagtacttaaaaataatgggaaagatactggatcagggggaggacttccctgccagcgaaatgacccggattgctaggttgatagaaaagaataagatgtccgatgggaagaaagaagagttacagaaaagtttgaacatcctcaccgcctttcagaaaaagggagcagagaaagaggaactgtag

SEQ ID NO: 168289 - DNA, 786 bp, Artificial Sequence
  derived and/or modified sequence
atggccgccgccgtgcccagagccgccttcctgagccccctgctgcccctgctgctgggcttcctgctgctgagcgccccccacggcggcagcggcctgcacaccaagggcgccctgcccctggacaccgtgaccttctacaaggtgatccccaagagcaagttcgtgctggtgaagttcgacacccagtacccctacggcgagaagcaggacgagttcaagagactggccgagaacagcgccagcagcgacgacctgctggtggccgaggtgggcatcagcgactacggcgacaagctgaacatggagctgagcgagaagtacaagctggacaaggagagctaccccgtgttctacctgttcagagacggcgacttcgagaaccccgtgccctacaccggcgccgtgaaggtgggcgccatccagagatggctgaagggccagggcgtgtacctgggcatgcccggctgcctgcccgtgtacgacgccctggccggcgagttcatcagagccagcggcgtggaggccagacaggccctgctgaagcagggccaggacaacctgagcagcgtgaaggagacccagaagaagtgggccgagcagtacctgaagatcatgggcaagatcctggaccagggcgaggacttccccgccagcgagatgaccagaatcgccagactgatcgagaagaacaagatgagcgacggcaagaaggaggagctgcagaagagcctgaacatcctgaccgccttccagaagaagggcgccgagaaggaggagctgtag

SEQ ID NO: 168290 - DNA, 1735 bp, Artificial Sequence
  derived and/or modified sequence
cgtggccccaccctctcaccctagacagatgggagcctcctggggtgtccacgtgagcgcgcgtgagtccgcccccccagtcacgtgaccgctgactcggggcgttctccactatcgcttacctacctccctctgcaggaacccggcgatatggctgccgctgtgccccgcgccgcatttctctccccgctgcttccccttctcctgggcttcctgctcctctccgctccgcatggcggcagcggcctgcacaccaagggcgcccttcccctggatacggtcactttctacaaggtcattcccaaaagcaagttcgtcttggtgaagttcgacacccagtacccctacggtgagaagcaggatgagttcaagcgtcttgctgaaaactcggcttccagcgatgatctcttggtggcagaggtggggatctcagattatggtgacaagctgaacatggagctgagtgagaaatacaagctggacaaagagagctacccagtcttctacctcttccgggatggggactttgagaacccagtcccatacactggggcagttaaggttggagccatccagcgctggctgaaggggcaaggggtctacctaggtatgcctggttgcctgcctgtatacgacgccctggccggggagttcatcagggcctctggtgtggaggcccgccaggccctcttgaagcaggggcaagataacctctcaagtgtgaaggagactcagaagaagtgggccgagcaatacctgaagatcatggggaagatcttagaccaaggggaggacttcccagcatcagagatgacacggatcgccaggctgattgagaagaacaagatgagtgacgggaagaaggaggagctccagaagagcttaaacatcctgactgccttccagaagaagggggccgagaaagaggagctgtaaaaaggctgtctgtgattttccagggtttggtgggggtagggaggggagagttaacctgctggctgtgagtcccttgtggaatataagggggtagtgggaaaagtggtactaacccacgattctgagccctgagtatgcctggacattgatgctaacatgaccatgcttgggatgtctctagctggtctggggatagctggagcacttactcaggtggctggtgaaatgacacctcagaaggaatgagtgctatagagaggagagaggagtgtactgcccaggtctttgacagatgtaattctcattcaattaaagtttcagtgttttggttaagtggacctgaagccattcttttttcttttcaaattatactttcgtctatgacctgctttcctctttgaatctaagctggtatagactccactttcccagggtaacaaactatcctcataacactgtggaaactggcatacctttgttattttccagtgatattcagactgacatggattgactgtcaatggtaaagtttgtctattttccagtccttaaaactcaatagcagtattgatgaatatattgaaccaacattgatggaccatggtgtaattattttccatgctttgtgaggtacacatagcaaattcttagttttactgatatattctgtgacttggatttacacagctaaatgatatagtccgatttcaaaattaaaaaatattttccatctaaatcactatcactaaataaatactaacttctagaaagcagaataaagagcacttgtgccaacatt

SEQ ID NO: 168291 - DNA, 1333 bp, Artificial Sequence
  derived and/or modified sequence
gagcctcctggggtgtccacgtgagcgcgcgtgagtccgcccccccagtcacgtgaccgctgactcggggcgttctccactatcgcttacctacctccctctgcaggaacccggcgatatggctgccgctgtgccccgcgccgcatttctctccccgctgcttccccttctcctgggcttcctgctcctctccgctccgcatggcggcagcggcctgcacaccaagggcgcccttcccctggatacggtcactttctacaagattatggtgacaagctgaacatggagctgagtgagaaatacaagctggacaaagagagctacccagtcttctacctcttccgggatggggactttgagaacccagtcccatacactggggcagttaaggttggagccatccagcgctggctgaaggggcaaggggtctacctaggtatgcctggttgcctgcctgtatacgacgccctggccggggagttcatcagggcctctggtgtggaggcccgccaggccctcttgaagcaggggcaagataacctctcaagtgtgaaggagactcagaagaagtgggccgagcaatacctgaagatcatggggaagatcttagaccaaggggaggacttcccagcatcagagatgacacggatcgccaggctgattgagaagaacaagatgagtgacgggaagaaggaggagctccagaagagcttaaacatcctgactgccttccagaagaagggggccgagaaagaggagctgtaaaaaggctgtctgtgattttccagggtttggtgggggtagggaggggagagttaacctgctggctgtgagtcccttgtggaatataagggggtagtgggaaaagtggtactaacccacgattctgagccctgagtatgcctggacattgatgctaacatgaccatgcttgggatgtctctagctggtctggggatagctggagcacttactcaggtggctggtgaaatgacacctcagaaggaatgagtgctatagagaggagagaggagtgtactgcccaggtctttgacagatgtaattctcattcaattaaagtttcagtgttttggttaagtggacctgaagccattcttttttcttttcaaattatactttcgtctatgacctgctttcctctttgaatctaagctggtatagactccactttcccagggtaacaaactatcctcataacactgtggaaactggcatacctttgttattttccagtgatattcagactgacatggattgactgtcaatggtaaagtttgtctattttccagtccttaaaactcaatagcagtat

SEQ ID NO: 168292 - protein, 543 aa, Artificial Sequence
  derived and/or modified sequence
MEQVNELKEKGNKALSVGNIDDALQCYSEAIKLDPHNHVLYSNRSAAYAKKGDYQKAYEDGCKTVDLKPDWGKGYSRKAAALEFLNRFEEAKRTYEEGLKHEANNPQLKEGLQNMEARLAERKFMNPFNMPNLYQKLESDPRTRTLLSDPTYRELIEQLRNKPSDLGTKLQDPRIMTTLSVLLGVDLGSMDEEEEIATPPPPPPPKKETKPEPMEEDLPENKKQALKEKELGNDAYKKKDFDTALKHYDKAKELDPTNMTYITNQAAVYFEKGDYNKCRELCEKAIEVGRENREDYRQIAKAYARIGNSYFKEEKYKDAIHFYNKSLAEHRTPDVLKKCQQAEKILKEQERLAYINPDLALEEKNKGNECFQKGDYPQAMKHYTEAIKRNPKDAKLYSNRAACYTKLLEFQLALKDCEECIQLEPTFIKGYTRKAAALEAMKDYTKAMDVYQKALDLDSSCKEAADGYQRCMMAQYNRHDSPEDVKRRAMADPEVQQIMSDPAMRLILEQMQKDPQALSEHLKNPVIAQKIQKLMDVGLIAIR

SEQ ID NO: 168293 - DNA, 1632 bp, Artificial Sequence
  derived and/or modified sequence
atggagcaggtgaacgagctgaaggagaagggcaacaaggccctgagcgtgggcaacatcgacgacgccctgcagtgctacagcgaggccatcaagctggacccccacaaccacgtgctgtacagcaacagaagcgccgcctacgccaagaagggcgactaccagaaggcctacgaggacggctgcaagaccgtggacctgaagcccgactggggcaagggctacagcagaaaggccgccgccctggagttcctgaacagattcgaggaggccaagagaacctacgaggagggcctgaagcacgaggccaacaacccccagctgaaggagggcctgcagaacatggaggccagactggccgagagaaagttcatgaaccccttcaacatgcccaacctgtaccagaagctggagagcgaccccagaaccagaaccctgctgagcgaccccacctacagagagctgatcgagcagctgagaaacaagcccagcgacctgggcaccaagctgcaggaccccagaatcatgaccaccctgagcgtgctgctgggcgtggacctgggcagcatggacgaggaggaggagatcgccacccccccccccccccccccccccaagaaggagaccaagcccgagcccatggaggaggacctgcccgagaacaagaagcaggccctgaaggagaaggagctgggcaacgacgcctacaagaagaaggacttcgacaccgccctgaagcactacgacaaggccaaggagctggaccccaccaacatgacctacatcaccaaccaggccgccgtgtacttcgagaagggcgactacaacaagtgcagagagctgtgcgagaaggccatcgaggtgggcagagagaacagagaggactacagacagatcgccaaggcctacgccagaatcggcaacagctacttcaaggaggagaagtacaaggacgccatccacttctacaacaagagcctggccgagcacagaacccccgacgtgctgaagaagtgccagcaggccgagaagatcctgaaggagcaggagagactggcctacatcaaccccgacctggccctggaggagaagaacaagggcaacgagtgcttccagaagggcgactacccccaggccatgaagcactacaccgaggccatcaagagaaaccccaaggacgccaagctgtacagcaacagagccgcctgctacaccaagctgctggagttccagctggccctgaaggactgcgaggagtgcatccagctggagcccaccttcatcaagggctacaccagaaaggccgccgccctggaggccatgaaggactacaccaaggccatggacgtgtaccagaaggccctggacctggacagcagctgcaaggaggccgccgacggctaccagagatgcatgatggcccagtacaacagacacgacagccccgaggacgtgaagagaagagccatggccgaccccgaggtgcagcagatcatgagcgaccccgccatgagactgatcctggagcagatgcagaaggacccccaggccctgagcgagcacctgaagaaccccgtgatcgcccagaagatccagaagctgatggacgtgggcctgatcgccatcagatag

SEQ ID NO: 168294 - DNA, 1632 bp, Artificial Sequence
  derived and/or modified sequence
atggagcaggtcaacgaactcaaagaaaagggtaacaaggctttgtcggtggggaatattgacgacgcactgcagtgctatagcgaggccatcaagctggaccctcacaatcacgttctctactccaaccggagcgctgcctatgccaaaaaaggggactaccagaaggcctatgaggatgggtgtaagaccgtggacctgaaaccagactggggaaaggggtacagccgtaaggcggccgcgctggaatttctgaatcggtttgaggaggccaagaggacgtatgaggagggattgaagcacgaagctaacaacccacagctgaaggaaggtctccagaacatggaggctcgattggcagaacggaagttcatgaacccgttcaatatgcctaacctgtatcagaagttagaatcagacccgagaacaagaacgctcctgagcgaccctacatatcgtgaactaattgagcaactccgtaataagccctctgatctgggaacgaagctgcaggatccgaggattatgaccaccttgtccgtcctcttaggcgtggacctgggcagtatggatgaggaggaagaaatagccacacctcccccccctccaccacctaaaaaggagaccaaacctgagccaatggaggaggatttgccagagaataaaaaacaggcccttaaggaaaaagaattgggtaacgatgcctataaaaagaaggattttgacactgcgctgaagcattacgacaaagccaaagagcttgaccccactaatatgacatacattaccaaccaagcagctgtgtatttcgagaagggggactacaataaatgccgggagctgtgtgagaaggccatcgaggtgggcagggaaaacagagaagattacaggcagattgctaaagcatatgcacgtattgggaacagctactttaaagaggagaaatacaaggacgccatccacttctacaacaagtctctagctgaacataggactcccgacgttctgaagaagtgccagcaagccgaaaagattctgaaggaacaggagcgcctagcttatatcaatccggacctagcattggaagaaaagaataaaggaaatgagtgtttccaaaaaggggattaccctcaggcaatgaaacattatacagaagctattaaaagaaaccccaaagacgccaagttgtattccaaccgggcagcttgttacactaaactgttggagtttcagctggcccttaaggactgcgaagagtgtatccagctggagcctacattcataaaaggttatactcgcaaagcagccgcactggaggctatgaaggattacactaaagcaatggatgtatatcagaaggccctcgatcttgactcaagctgcaaggaagctgcagatggatatcagcgctgcatgatggctcagtacaacagacacgactcgcccgaggatgtaaagagaagagccatggccgaccccgaagtgcagcagatcatgagtgatcctgccatgcggctgatccttgaacaaatgcaaaaggaccctcaggccctctctgagcacctgaagaacccggtcattgctcagaagatacagaagcttatggacgtgggattgatcgccattcgatag

SEQ ID NO: 168295 - DNA, 1632 bp, Artificial Sequence
  derived and/or modified sequence
atggagcaggtgaatgagctgaaggagaagggcaacaaggccctgtctgtgggcaacattgatgatgccctgcagtgctacagcgaggccatcaagctggacccccacaaccacgtgctgtacagcaacagatctgctgcctatgccaagaagggggactaccagaaggcctatgaagatggctgcaagacagtggacctgaagccagactggggcaagggctacagcaggaaggccgccgccctggagttcctgaacagatttgaggaggccaagaggacctatgaggagggcctgaagcatgaggccaacaacccccagctgaaggagggcctgcagaacatggaggcccggctggccgagaggaagttcatgaaccccttcaacatgcccaacctgtaccagaagctggagagtgaccccaggaccaggaccctgctgagtgaccccacctaccgggagctgattgagcagctgaggaacaagcccagcgacctgggcaccaagctgcaggacccccgcatcatgaccaccctgtctgtgctgctgggcgtggacctgggctccatggatgaggaggaggagatcgccaccccacctcctcctcctccacccaagaaggagaccaagccagagcccatggaggaggacctgcctgagaacaagaagcaggccctgaaggagaaggagctgggcaatgatgcctacaagaagaaggactttgacacagccctgaagcactatgacaaggccaaggagctggaccccaccaacatgacctacatcaccaaccaggccgctgtgtactttgagaagggggactacaacaagtgccgggagctgtgtgagaaggccatcgaggtgggcagagaaaatcgggaggactaccggcagatcgccaaggcctatgcccgcatcggcaacagctacttcaaggaggagaagtacaaggatgccatccacttctacaacaagagcctggccgagcacaggaccccagatgtgctgaagaagtgccagcaggccgagaagatcctgaaggagcaggagcggctggcctacatcaacccagacctggccctggaggagaagaacaagggaaatgaatgcttccagaagggggactacccccaggccatgaagcactacacagaggccatcaagaggaaccccaaggatgccaagctgtacagcaacagagctgcctgctacaccaagctgctggagttccagctggccctgaaggactgtgaggagtgcatccagctggagcccaccttcatcaagggctacaccaggaaggccgccgccctggaggccatgaaggactacaccaaggccatggatgtgtaccagaaggccctggacctggacagcagctgcaaggaggccgcagatggctaccagcgctgcatgatggcccagtacaacagacatgacagcccagaagatgtgaagagaagagccatggctgaccctgaggtgcagcagatcatgtctgaccctgccatgaggctcatcctggagcagatgcagaaggacccccaggccctgtctgagcacctgaagaaccctgtgattgcccagaagatccagaagctgatggatgtgggcctcatcgccatcagatag

SEQ ID NO: 168296 - DNA, 1632 bp, Artificial Sequence
  derived and/or modified sequence
atggagcaggtgaacgagctgaaggagaagggcaacaaggccctgagtgtggggaacatcgacgatgccctgcaatgttattctgaagccatcaagctcgatcctcacaaccacgtgctttatagcaatcggagcgcagcctacgctaaaaagggggattatcagaaggcctacgaggatggttgtaagacagttgatctgaagcctgactggggcaaaggatactcaagaaaagcagccgctctggagtttttgaaccgcttcgaagaagccaaaagaacctatgaagaggggttaaaacacgaagccaacaatccccagctgaaagaggggctgcagaacatggaggctagactggccgagaggaaattcatgaacccattcaacatgcctaacctgtaccagaagctcgagagcgaccccagaaccaggacacttctgtctgacccaacttatcgggagttgattgagcagctccgcaacaagccttcggatctgggtacaaaattgcaggacccccgcataatgaccaccctgtctgttctgctcggagtcgaccttggttcaatggatgaagaagaagaaattgccacgccacctccccctccccctccaaagaaagagaccaagcctgagccaatggaggaggacctcccagaaaacaagaagcaagccctaaaggagaaggagctagggaacgatgcatataaaaagaaagattttgacacggctttgaaacactatgataaggctaaagagttggatcctactaatatgacatacatcaccaatcaggcggccgtgtatttcgagaagggggactataacaagtgcagggaattgtgtgagaaggccattgaagtgggacgtgaaaacagggaggattatcgacagattgcaaaggcatatgccagaattggtaactcttacttcaaggaagagaagtataaggacgccatccatttctacaataagtctttggccgagcatagaacacctgacgtgctgaaaaaatgtcagcaagctgaaaagatactaaaggagcaggaacgcttagcatacatcaaccccgatcttgcattggaagagaagaacaagggcaacgaatgtttccagaaaggcgactacccccaagctatgaagcactatacggaagccatcaagcgcaatcccaaggacgcaaagctatactcaaaccgggctgcttgttacacaaaattactggagttccagctggcgttgaaggactgcgaggagtgcattcagctcgagccgaccttcatcaaaggctacaccagaaaagctgcagcgctggaggctatgaaggactatacaaaggccatggacgtttaccagaaggctttggacctggatagctcctgtaaggaagctgctgatggttatcagcggtgcatgatggcacaatacaatagacatgattccccagaagatgtgaaaagaagggcgatggccgatcccgaggtacaacagatcatgtcagatccggcgatgagactaattctggaacagatgcagaaggatccgcaggcgttaagcgaacaccttaagaacccagtgatcgcccaaaaaatccaaaaactgatggacgtcgggttgatcgccatacggtag

SEQ ID NO: 168297 - DNA, 1632 bp, Artificial Sequence
  derived and/or modified sequence
atggagcaggtgaatgagctgaaggagaagggtaataaagctctgtccgtggggaacatcgacgatgcgctccagtgctacagtgaagccattaaattggatccacacaaccatgtcttgtactctaataggagtgctgcatacgcgaagaaaggcgattatcaaaaggcttacgaggatgggtgcaaaaccgtggatctgaagcctgattggggtaagggctattctaggaaagcagccgcattggagtttctcaatcggttcgaagaggctaaacgcacatacgaggaaggccttaagcacgaggccaacaatccccaacttaaggagggactgcagaacatggaagccagattagccgaacgtaaattcatgaatccatttaacatgccaaatctttaccaaaaactagagagcgatccccgtacccgcacgttactgtcagaccctacttaccgtgagttaatagagcagctgcggaataaaccgtcagacttaggcactaagctgcaggatcctcggatcatgactacgctcagtgtacttctgggagtggacctcggatccatggacgaggaagaggagatcgctactccccctccccctcctccgcctaagaaggaaacgaaacctgaacccatggaagaagatctgcctgagaacaaaaaacaggcgctgaaagagaaagaactgggtaacgatgcctacaagaagaaggactttgacactgctctcaagcactatgataaggctaaggagctggaccccactaatatgacctacatcactaaccaagcagccgtgtatttcgagaaaggtgactacaataagtgcagggagctctgcgaaaaagcaattgaagtgggtagggagaacagggaggattatcgccagattgccaaagcctacgctcgcataggtaacagctacttcaaggaggagaagtataaggatgccatccatttctacaataaatcactggccgaacatcgaactcccgatgtcctcaaaaagtgccagcaggccgaaaaaatcctgaaggaacaggaacggctagcttacatcaaccccgacctggcacttgaggaaaaaaacaagggcaacgaatgctttcagaaaggcgactacccacaggccatgaagcactacaccgaggctatcaaaagaaatccgaaggatgccaaactttattctaatagggcagcttgttacactaagcttctggagtttcaattggccctgaaagattgcgaagaatgcatccagcttgagccaacatttatcaagggttataccaggaaggccgcagcccttgaggctatgaaggactacaccaaagccatggacgtgtaccagaaggctctcgatctcgacagctcttgtaaagaggcggcagatggataccagcgctgtatgatggcgcagtacaatcggcatgacagcccagaagatgttaaacggcgagcgatggccgatccggaagtgcagcagattatgtccgaccccgctatgagattgatcctggagcagatgcagaaagatcctcaggcactgtcagagcacctgaaaaacccggtgatcgcccagaagatccaaaagctgatggacgtcggcctaatagctattcgttag

SEQ ID NO: 168298 - DNA, 2196 bp, Artificial Sequence
  derived and/or modified sequence
ctagaagaactcgaccagtgagcaggcgaggaaggggcgggagccggggtcccggtagcttctagtaggttccagaaggcggcgcgtgcggttgggaacgcggagcggacggattcgattcaacggggttccggaccgcgctgcgctatggagcaggtcaatgagctgaaggagaaaggcaacaaggccctgagcgtgggtaacatcgatgatgccttacagtgctactccgaagctattaagctggatccccacaaccacgtgctgtacagcaaccgttctgctgcctatgccaagaaaggagactaccagaaggcttatgaggatggctgcaagactgtcgacctaaagcctgactggggcaagggctattcacgaaaagcagcagctctagagttcttaaaccgctttgaagaagccaagcgaacctatgaggagggcttaaaacacgaggcaaataaccctcaactgaaagagggtttacagaatatggaggccaggttggcagagagaaaattcatgaaccctttcaacatgcctaatctgtatcagaagttggagagtgatcccaggacaaggacactactcagtgatcctacctaccgggagctgatagagcagctacgaaacaagccttctgacctgggcacgaaactacaagatccccggatcatgaccactctcagcgtcctccttggggtcgatctgggcagtatggatgaggaggaagagattgcaacacctccaccaccaccccctcccaaaaaggagaccaagccagagccaatggaagaagatcttccagagaataagaagcaggcactgaaagaaaaagagctggggaacgatgcctacaagaagaaagactttgacacagccttgaagcattacgacaaagccaaggagctggaccccactaacatgacttacattaccaatcaagcagcggtatactttgaaaagggcgactacaataagtgccgggagctttgtgagaaggccattgaagtggggagagaaaaccgagaagactatcgacagattgccaaagcatatgctcgaattggcaactcctacttcaaagaagaaaagtacaaggatgccatccatttctataacaagtctctggcagagcaccgaaccccagatgtgctcaagaaatgccagcaggcagagaaaatcctgaaggagcaagagcggctggcctacataaaccccgacctggctttggaggagaagaacaaaggcaacgagtgttttcagaaaggggactatccccaggccatgaagcattatacagaagccatcaaaaggaacccgaaagatgccaaattatacagcaatcgagctgcctgctacaccaaactcctggagttccagctggcactcaaggactgtgaggaatgtatccagctggagccgaccttcatcaagggttatacacggaaagccgctgcgctggaagcgatgaaggactacaccaaagccatggatgtgtaccagaaggcgctagacctggactccagctgtaaggaggcggcagacggctaccagcgctgtatgatggcgcagtacaaccggcacgacagccccgaagatgtgaagcgacgagccatggccgaccctgaggtgcagcagatcatgagtgacccagccatgcgccttatcctggaacagatgcagaaggacccccaggcactcagcgaacacttaaagaatcctgtaatagcacagaagatccagaagctgatggatgtgggtctgattgcaattcggtgatgacttgttcatccccccttcccttcgccctcatgtggaaagaggagctgggaccgcggcgagcagcacggagcggaagggagagcaggggagagaaggcctcatctctctatatttatacataaccccggggaagacacagagactcgtacctgcgctgtttgtgccgccgctgcctctgggccctcccagcacacgcatggtctcttcaccgctgccctcgagttccatgtctctttcccctgcccctagttgctgtctcggctgctctcccatagttggttttttttttatttggggcagtgggcatgttatggggaggggagggggttcttccagcctcaggtcccagctgtctcacgttgtttattctgcgtccccttctccaataaaacaagccagttgggcgtggttata

SEQ ID NO: 168299 - protein, 483 aa, Artificial Sequence
  derived and/or modified sequence
MSNKLLSPHPHSVVLRSEFKMASSPAVLRASRLYQWSLKSSAQFLGSPQLRQVGQIIRVPARMAATLILEPAGRCCWDEPVRIAVRGLAPEQPVTLRASLRDEKGALFQAHARYRADTLGELDLERAPALGGSFAGLEPMGLLWALEPEKPLVRLVKRDVRTPLAVELEVLDGHDPDPGRLLCQTRHERYFLPPGVRREPVRVGRVRGTLFLPPEPGPFPGIVDMFGTGGGLLEYRASLLAGKGFAVMALAYYNYEDLPKTMETLHLEYFEEAMNYLLSHPEVKGPGVGLLGISKGGELCLSMASFLKGITAAVVINGSVANVGGTLHYKGETLPPVGVNRNRIKVTKDGYADIVDVLNSPLEGPDQKSFIPVERAESTFLFLVGQDDHNWKSEFYANEACKRLQAHGRRKPQIICYPETGHYIEPPYFPLCRASLHALVGSPIIWGGEPRAHAMAQVDAWKQLQTFFHKHLGGHEGTIPSKV

SEQ ID NO: 168300 - DNA, 1452 bp, Artificial Sequence
  derived and/or modified sequence
atgtccaacaagttactctcaccccatccacattcagtggtgcttagaagtgagttcaagatggcttcctcaccggcggtgctgcgtgcttctcggctctatcaatggtctttgaaaagttccgcccagtttctcggcagcccacaactgcgccaagtgggacaaattatcagggttcccgctagaatggctgccacacttatccttgagcctgccggccgatgctgctgggatgagcctgtgagaatcgctgtgaggggactagcccctgagcagcctgttacactaagagcgagcctcagggatgagaaaggcgctttattccaggcccacgcccgataccgggccgacactctgggagagctcgacctggaacgagctcccgcactgggcggcagcttcgctggcctggaacctatgggacttttgtgggcactcgaaccagagaaaccccttgtcagattggtgaagcgcgatgttcgcacaccattagctgtggaactggaagtgctcgacggacacgatccagacccaggcagactattgtgtcagacgcgccatgagcgttacttcttgcctccaggggtgagaagggaaccagtgcgagtggggagagttaggggcactttatttctgcctcccgagcctggcccattccctggaatagtggatatgttcggaactggaggaggcctcctggagtaccgcgcaagtctcttggccgggaaaggcttcgctgtcatggctctggcctactacaattacgaggatttgcccaagaccatggaaaccctacacctggagtatttcgaggaggccatgaactatttgctgagccaccccgaggtgaagggcccaggagtggggctcctcggcatctccaagggtggtgagctatgtctgagcatggccagcttcttaaaggggattacggcggcagtagtcattaatggctcggtggccaacgtgggggggaccctccactataagggcgagactctgccccccgtgggagtgaataggaaccgcatcaaagtcactaaggacggatacgcggatatcgtggatgtgctcaattcccccctggaagggcctgaccaaaaatctttcattccagtagaacgggcagaaagtacgttcctgtttcttgtcggacaggatgatcataactggaaatcggaattttatgccaacgaagcgtgcaagcgtctgcaggcccatgggcgacgcaagccccagataatctgttatcctgaaactggacactacatagaacccccttactttcccctctgtcgcgcgtcattgcatgcgttggtgggatctcctattatttggggtggcgaaccccgagcccacgcaatggcccaagtcgatgcatggaagcaacttcaaactttcttccacaagcatctgggaggacacgagggaacaatacctagcaaggtgtag

SEQ ID NO: 168301 - DNA, 1452 bp, Artificial Sequence
  derived and/or modified sequence
atgagcaacaagctgctgagcccccacccccacagcgtggtgctgcggtctgagttcaagatggccagcagccctgctgtgctgcgggccagccggctgtaccagtggagcctgaagagcagcgcccagttcctgggcagcccccagctgcggcaggtgggccagatcatccgggtgcctgccaggatggccgccaccctcatcctggagcccgccggccgctgctgctgggatgagcctgtgagaattgctgtgcggggcctggcccctgagcagcctgtgaccctgcgggccagcctgagagatgagaagggggccctcttccaggcccacgcccgctacagagctgacaccctgggggagctggacctggagcgggccccagccctgggcggcagctttgctggcctggagcccatgggcctgctgtgggccctggagcctgagaagcccctggtgcggctggtgaagagagatgtgaggacccccctggccgtggagctggaggtgctggatggccatgaccctgaccccggccgcctgctgtgccagaccaggcatgagcgctacttcctgcccccaggagtgagaagagagcctgtgcgggtgggccgggtgcggggcaccctcttcctgcccccagagcccggccccttccctggcatcgtggacatgtttggcaccggcggcggcctgctggagtaccgggccagcctgctggccgggaaaggatttgctgtgatggccctggcctactacaactatgaggacctgcccaagaccatggagaccctgcacctggagtactttgaggaggccatgaactacctgctgagccaccctgaggtgaagggccctggggtgggcctgctgggcatcagcaaaggaggagagctgtgcctgtccatggccagcttcctgaagggcatcacagctgctgtggtgatcaatggatctgtggccaacgtgggcggcaccctgcactacaagggggagaccctgccccctgtgggcgtgaacagaaaccgcatcaaggtgaccaaggatggctacgccgacatcgtggatgtgctgaacagccccctggagggccctgaccagaagagcttcatccctgtggagcgggcagagagcaccttcctgttcctggtgggccaggatgaccacaactggaagtctgagttctacgccaatgaggcctgcaagaggctgcaggcccatggaagaaggaagccccagatcatctgctacccagagaccggccactacatcgagcccccctacttccccctgtgccgggccagcctgcacgccctggtgggcagccccatcatctggggcggggagccccgggcccacgccatggcccaggtggatgcctggaagcagctgcagaccttcttccacaagcacctgggcggccacgagggcaccatccccagcaaggtgtag

SEQ ID NO: 168302 - DNA, 1452 bp, Artificial Sequence
  derived and/or modified sequence
atgagcaacaagctgctgagcccccacccccacagcgtggtgctgcggagcgaattcaagatggcctcttctcctgctgtgctccgagctagcagactttatcagtggtctctgaaatcatccgctcagtttttgggctctcctcagctccggcaggtgggacagatcatcagagttccagcacgaatggctgccaccttgattcttgagcctgctgggcggtgttgctgggacgaacctgtgcggatcgccgtccgcggcctggcccctgagcaaccagttacactgcgcgccagcctccgggatgagaaaggggctctgtttcaagcccacgccagatatcgtgccgacacactgggcgagctagatttagagcgggcaccagccctgggaggaagctttgccggacttgagccgatgggactgctgtgggcacttgaaccagagaaacctctggtgcggctcgttaagcgcgacgttcggactcctttagccgttgagttggaggtcctagatggtcacgacccggacccgggtcgactattatgccagactcgtcacgagcggtacttcttgccacccggagtaaggcgggaaccggtgagagtcggccgcgtccggggcaccttatttcttccacccgagccaggcccatttcctggcattgtagatatgtttggcactggaggtggtctactggaatacagagcatctctgctcgccggaaaaggcttcgcggtgatggcgcttgcctactacaactacgaagacctcccgaaaactatggagacgctgcatctggaatactttgaagaagcaatgaattatctgctgtctcacccggaggttaagggacctggagtgggtctactggggatatcaaagggaggcgagctgtgtttatccatggccagctttttaaagggtatcactgctgcagttgtgatcaacggatctgtggccaacgttggtggtacactgcattataaaggagagacgctgccaccagtaggagttaatcgaaaccggataaaagtgaccaaagacggatacgcggacatagttgatgtgttgaatagtcctctggaaggccctgaccaaaaaagttttattccagtggagagggcggaatcaacattcttgttccttgtgggtcaagacgatcacaactggaaatctgagttttatgccaatgaggcctgcaagagactgcaggcccatggaagaagaaagccccagatcatttgttaccctgagacaggacactacattgaacccccatacttccccctatgcagggcttctcttcatgctctagtggggtcacccataatctgggggggtgaacctcgtgcacatgccatggcgcaggtggacgcctggaagcagctgcagacattctttcataaacatctggggggtcacgaaggaactataccttccaaggtttag

SEQ ID NO: 168303 - DNA, 1452 bp, Artificial Sequence
  derived and/or modified sequence
atgtccaataaactcctcagccctcacccacactcagtggtcctgagaagcgagtttaaaatggcatccagcccggcagtgctgcgagcctcccggctctatcagtggtccctaaaaagctcagcccaattcttggggtctccccagctcagacaggtgggtcagattattagggtgcccgcacggatggcagccacgctgattctggagccggctgggagatgttgctgggacgagccagtacgcatcgcggtccgtggactcgctcccgaacagcccgtcacgctgcgggcttccctccgggatgaaaaaggagccctcttccaggcacatgccaggtaccgggcagataccctgggcgaactagacctggaacgtgctcctgcccttgggggaagtttcgcaggcctggagccaatggggcttctttgggcgctagaacccgagaagcctctggtgaggctggttaagagagacgtgcggacaccactggctgttgaactggaagtgcttgatggccacgatccagaccccggacgcttattgtgccagacaagacacgagcggtacttcctgcctcccggagtgcgacgagagcctgtccgcgtgggcagggttcgcggaacactcttcttgccacccgagccaggtccctttccaggcatagtggatatgttcggaacggggggaggactcctcgagtatcgtgcctctctgctggccggaaaaggtttcgcagttatggccttggcctattataactatgaggatctgcccaagacgatggaaaccttgcacttagagtactttgaagaagccatgaactatctgctgtcacacccggaggtgaaaggcccaggcgtgggcctgctgggcatcagcaaaggcggtgagctctgtctttccatggcatcttttttaaaggggattactgctgccgtggtgattaacggcagcgttgcaaacgtgggcggtaccctgcactacaagggggaaacgctaccacctgtcggggtaaatcggaaccggattaaagtgacgaaggacggctacgcggatattgtcgacgtgcttaactccccactggaaggcccagaccagaaatctttcattccggtcgagcgagccgaaagcaccttcctttttctcgtgggacaggatgatcataattggaagagcgagttttatgcaaatgaggcttgtaaaagactccaggcgcacggcaggcgaaagccacagatcatttgttatcctgaaacggggcattacatcgaaccaccatatttccccctctgccgagcctccctccatgcactagtcggcagccccatcatctggggcggagagccgagagcacatgccatggcccaagtggacgcgtggaaacagttacaaaccttttttcacaagcatctcggtggccatgaggggacgattcctagcaaggtgtag

SEQ ID NO: 168304 - DNA, 1452 bp, Artificial Sequence
  derived and/or modified sequence
atgagcaacaagctgctgagcccccacccccacagcgtggtgctgagaagcgagttcaagatggccagcagccccgccgtgctgagagccagcagactgtaccagtggagcctgaagagcagcgcccagttcctgggcagcccccagctgagacaggtgggccagatcatcagagtgcccgccagaatggccgccaccctgatcctggagcccgccggcagatgctgctgggacgagcccgtgagaatcgccgtgagaggcctggcccccgagcagcccgtgaccctgagagccagcctgagagacgagaagggcgccctgttccaggcccacgccagatacagagccgacaccctgggcgagctggacctggagagagcccccgccctgggcggcagcttcgccggcctggagcccatgggcctgctgtgggccctggagcccgagaagcccctggtgagactggtgaagagagacgtgagaacccccctggccgtggagctggaggtgctggacggccacgaccccgaccccggcagactgctgtgccagaccagacacgagagatacttcctgccccccggcgtgagaagagagcccgtgagagtgggcagagtgagaggcaccctgttcctgccccccgagcccggccccttccccggcatcgtggacatgttcggcaccggcggcggcctgctggagtacagagccagcctgctggccggcaagggcttcgccgtgatggccctggcctactacaactacgaggacctgcccaagaccatggagaccctgcacctggagtacttcgaggaggccatgaactacctgctgagccaccccgaggtgaagggccccggcgtgggcctgctgggcatcagcaagggcggcgagctgtgcctgagcatggccagcttcctgaagggcatcaccgccgccgtggtgatcaacggcagcgtggccaacgtgggcggcaccctgcactacaagggcgagaccctgccccccgtgggcgtgaacagaaacagaatcaaggtgaccaaggacggctacgccgacatcgtggacgtgctgaacagccccctggagggccccgaccagaagagcttcatccccgtggagagagccgagagcaccttcctgttcctggtgggccaggacgaccacaactggaagagcgagttctacgccaacgaggcctgcaagagactgcaggcccacggcagaagaaagccccagatcatctgctaccccgagaccggccactacatcgagcccccctacttccccctgtgcagagccagcctgcacgccctggtgggcagccccatcatctggggcggcgagcccagagcccacgccatggcccaggtggacgcctggaagcagctgcagaccttcttccacaagcacctgggcggccacgagggcaccatccccagcaaggtgtag

SEQ ID NO: 168305 - DNA, 1713 bp, Artificial Sequence
  derived and/or modified sequence
gccgggacgaaccagtcctggcccagcccattccgcgagccagcaagcttctgaaaagcaaacctaggaagttgctttccaacataaagtggaggtttcaacacaggagactttaagcaagttccagtgtgtctatatttggtctggctgatcggctggactctggccttccccgctcacattagcagacagctctgccctagtgggcgtttagcctgcgacggcagcccgagaggaagagttgggcagagttgcaggggtctccacagctgaggcagtttggccggattatttgggttcctgctcggatggcggcgacgctgatcctggagcccgcgggccgctgctgctgggacgaaccggtgcgaatcgccgtgcgcggcctagccccggagcagccggtcacgctgcgcgcgtccctgcgcgacgagaagggcgcgcttttccaggcccacgcgcgctaccgcgccgacacccttggcgagctggacctggagcgcgcgcccgcgctgggcggcagcttcgcggggcttgagcccatggggctgctctgggccttggagcccgagaaacccttggtgcggctggtgaagcgcgacgtgcgaacgcccttggccgtggagctggaggtgctggatggccacgaccccgaccccgggcggctgctgtgccgggtgcggcacgagcgctacttcctcccgcccggggtgcggcgcgagccggtgcgcgcgggccgggtgcgaggcacgctcttcctgccgccagaacctgggccctttcctggcattgtggacatgttcggaactggaggtggcctgctggagtatcgggctagtctgctggctgggaagggttttgctgtgatggctctggcttactataactatgaagacctccccaagaccatggagacgctccatctggagtactttgaagaagctgtgaactacttgctcagtcatcctgaggtaaaaggtccaggagttgggctgcttggaatttccaaagggggtgagctctgcctttccatggcctctttcctgaagggcatcacggctgctgtcgtcatcaacggctctgtggccaatgttgggggaaccttacgctacaagggcgagaccctgccccctgtgggcgtcaacagaaatcgcatcaaggtgaccaaagatggctatgcagacattgtggatgtcctgaacagccctttggaaggacctgaccagaagagcttcattcctgtggaaagggcagagagcaccttcctgttcctggtaggtcaggatgaccacaactggaagagtgagttctatgctaatgaggcctgtaaacgcttgcaggcccatgggaggagaaagccccagatcatctgttacccagagacagggcactatattgagcctccttacttccccctgtgtcgggcttccctgcatgccttggtgggcagtcctattatctggggaggggagcccagggctcatgccatggctcaggtggatgcttggaaacaactccagactttcttccacaaacacttgggtggccacgaggggacaatcccatcaaaagtgtaaattttatttgatcatgtggcctctctgttgctaatctctcctggaaacatctgccacatttagtgtgtgtatgtgtattcattctttctcataacttcttaaagtttcttcccctcattattaaaatgaatttaccagt

SEQ ID NO: 168306 - DNA, 1774 bp, Artificial Sequence
  derived and/or modified sequence
aaagcaaacctaggaagtagctttccaacataaagtggaggtttcaacacaggagactttaagcaagttccagtgtgtctatatttggtctggctgatcggctggactctggccttccccgctcacgttagcagacagctctgccctagtgggcgcttagcctgcgacggcagcccgagaggatgtctaacaagcttctttctccccacccccattcagttgttctcaggtctgaattcaaaatggcctcatctcctgctgtccttcgagcgtcccggctgtaccaatggagcctgaagagttcggcgcagttcctggggtctccacagctgaggcaggttggtcagatcattagggttcctgctcggatggcggcgacgctgatcctggagcctgcgggccgctgctgctgggacgaaccggtgcgaatcgccgtgcgcggcctagccccggagcagccggtcacgctgcgcgcgtccctgcgcgacgagaagggcgcgcttttccaggcccacgcgcgctaccgcgccgacactcttggcgagctggacctggagcgcgcgcccgcgctgggcggcagcttcgcggggcttgagcccatggggctgctctgggccttggagcccgagaaacctttggtgcggctggtgaagcgcgacgtgcgaacgcccttggccgtggagctggaggtgctggatggccacgaccccgaccccgggcggctgctgtgccagacgcggcacgagcgctacttcctcccgcccggggtgcggcgcgagccggtgcgcgtgggccgggtgcgaggcacgctcttcctgccgccagaacctgggccctttcctgggattgtggacatgttcggaactggaggtggcctgctggagtatcgggctagtctgctggctgggaagggttttgctgtgatggctctggcttattataactatgaagacctccccaagaccatggagacgctccatctggagtactttgaagaagccatgaactacttgctcagtcatcccgaggtaaaaggtccaggagttgggctgcttggaatttccaaagggggtgagctctgcctttccatggcctctttcctgaagggcatcacggctgctgtcgtcatcaacggctctgtggccaatgttgggggaaccttacactacaagggcgagaccctgccccctgtgggcgtcaacagaaatcgcatcaaggtgaccaaagatggctatgcagacattgtggatgtcctgaacagccctttggaaggacctgaccagaagagcttcattcctgtggaaagggcagagagcaccttcctgttcctggtaggtcaggatgaccacaactggaagagtgagttctatgctaatgaggcctgtaaacgcttgcaggcccatgggaggagaaagccccagatcatctgttacccagagacagggcactatattgagcctccttacttccccctgtgtcgggcttccctgcatgccttggtgggcagtcctattatctggggaggggagcccagggctcatgccatggctcaggtggatgcttggaaacaactccagactttcttccacaaacacttgggtggccacgaggggacaatcccatcaaaagtgtaaattttatttgatcatgtggcctctctgttgctaatctctcctggaaacatctgccacatttagtgtgtgtatgtgtattcattcttttgtttttaataactaaagttttttcccctcattattaaaatgaatttaccagt

SEQ ID NO: 168307 - protein, 278 aa, Artificial Sequence
  derived and/or modified sequence
MSALGSPVRAYDFLLKFLLVGDSDVGKGEILASLQDGAAESPYGHPAGIDYKTTTILLDGRRVKLQLWDTSGQGRFCTIFRSYSRGAQGVILVYDIANRWSFDGIDRWIKEIDEHAPGVPKILVGNRLHLAFKRQVPTEQAQAYAERLGVTFFEVSPLCNFNITESFTELARIVLLRHGMDRLWRPSKVLSLQDLCCRAVVSCTPVHLVDKLPLPIALRSHLKSFSMANGLNARMMHGGSYSLTTSSTHKRSSLRKVKLVRPPQSPPKNCTRNSCKIS

SEQ ID NO: 168308 - protein, 379 aa, Artificial Sequence
  derived and/or modified sequence
EQGLGARAAPLGAGPPPLRSAPQAGHGWGRRAVTMSALGSPVRAYDFLLKFLLVGDSDVGKGEILASLQDGAAESPYGHPAGIDYKTTTILLDGRRVKLQLWDTSGQGRFCTIFRSYSRGAQGVILVYDIANRWSFDGIDRWIKEIDEHAPGVPKILVGNRLHLAFKRQVPTEQAQAYAERLGVTFFEVSPLCNFNITESFTELARIVLLRHGMDRLWRPSKVLSLQDLCCRAVVSCTPVHLVDKLPLPIALRSHLKSFSMANGLNARMMHGGSYSLTTSSTHKRSSLRKVKLVRPPQPPQKLHQKQLQNFLRKALKETRRNLSRRSSALPPAAGGCISDPGSSRRMLLANVCDAFRVMETHYPVGLRISTWMCMKLLF

SEQ ID NO: 168309 - DNA, 837 bp, Artificial Sequence
  derived and/or modified sequence
atgagcgccctgggcagccccgtgagagcctacgacttcctgctgaagttcctgctggtgggcgacagcgacgtgggcaagggcgagatcctggccagcctgcaggacggcgccgccgagagcccctacggccaccccgccggcatcgactacaagaccaccaccatcctgctggacggcagaagagtgaagctgcagctgtgggacaccagcggccagggcagattctgcaccatcttcagaagctacagcagaggcgcccagggcgtgatcctggtgtacgacatcgccaacagatggagcttcgacggcatcgacagatggatcaaggagatcgacgagcacgcccccggcgtgcccaagatcctggtgggcaacagactgcacctggccttcaagagacaggtgcccaccgagcaggcccaggcctacgccgagagactgggcgtgaccttcttcgaggtgagccccctgtgcaacttcaacatcaccgagagcttcaccgagctggccagaatcgtgctgctgagacacggcatggacagactgtggagacccagcaaggtgctgagcctgcaggacctgtgctgcagagccgtggtgagctgcacccccgtgcacctggtggacaagctgcccctgcccatcgccctgagaagccacctgaagagcttcagcatggccaacggcctgaacgccagaatgatgcacggcggcagctacagcctgaccaccagcagcacccacaagagaagcagcctgagaaaggtgaagctggtgagacccccccagagcccccccaagaactgcaccagaaacagctgcaagatcagctag

SEQ ID NO: 168310 - DNA, 1140 bp, Artificial Sequence
  derived and/or modified sequence
gagcagggcctgggcgccagagccgcccccctgggcgccggccccccccccctgagaagcgccccccaggccggccacggctggggcagaagagccgtgaccatgagcgccctgggcagccccgtgagagcctacgacttcctgctgaagttcctgctggtgggcgacagcgacgtgggcaagggcgagatcctggccagcctgcaggacggcgccgccgagagcccctacggccaccccgccggcatcgactacaagaccaccaccatcctgctggacggcagaagagtgaagctgcagctgtgggacaccagcggccagggcagattctgcaccatcttcagaagctacagcagaggcgcccagggcgtgatcctggtgtacgacatcgccaacagatggagcttcgacggcatcgacagatggatcaaggagatcgacgagcacgcccccggcgtgcccaagatcctggtgggcaacagactgcacctggccttcaagagacaggtgcccaccgagcaggcccaggcctacgccgagagactgggcgtgaccttcttcgaggtgagccccctgtgcaacttcaacatcaccgagagcttcaccgagctggccagaatcgtgctgctgagacacggcatggacagactgtggagacccagcaaggtgctgagcctgcaggacctgtgctgcagagccgtggtgagctgcacccccgtgcacctggtggacaagctgcccctgcccatcgccctgagaagccacctgaagagcttcagcatggccaacggcctgaacgccagaatgatgcacggcggcagctacagcctgaccaccagcagcacccacaagagaagcagcctgagaaaggtgaagctggtgagacccccccagcccccccagaagctgcaccagaagcagctgcagaacttcctgagaaaggccctgaaggagaccagaagaaacctgagcagaagaagcagcgccctgccccccgccgccggcggctgcatcagcgaccccggcagcagcagaagaatgctgctggccaacgtgtgcgacgccttcagagtgatggagacccactaccccgtgggcctgagaatcagcacctggatgtgcatgaagctgctgttctag

SEQ ID NO: 168311 - DNA, 837 bp, Artificial Sequence
  derived and/or modified sequence
atgtccgccttaggttctcctgttcgagcctatgatttcctactgaagtttctcttagttggcgacagcgatgtggggaaaggagagatcctcgcatccctgcaagatggagctgcagagtctccatacggtcacccagccggcattgattacaaaactacaacaatactgctcgacggacgaagggtgaagctgcagctatgggatacgtctgggcaaggccggttctgcactatcttccgctcctattcacggggcgcacagggagtgattcttgtgtacgacattgctaatcgctggagctttgatggcattgaccgatggatcaaggaaattgatgagcatgcacccggagttccaaagattcttgtcgggaacagactgcacctggccttcaaacgacaagtgcccacagagcaggcccaggcttacgctgagaggcttggggtcacattcttcgaggtctcaccgctgtgcaatttcaacatcacggaaagctttacagaacttgcccgcatagtcttgctgcgccatggcatggaccggttgtggcgaccatccaaggttctgtctctacaggacctgtgttgccgggccgtggtgtcgtgcaccccagtgcatctagtggacaaactaccactgcccattgctctacgctcccaccttaagtctttctccatggctaatggactcaacgccaggatgatgcacgggggcagctattctctgaccaccagctctacgcacaagaggtcgagcctacgtaaggttaaactcgtccgaccgccacagtcaccccctaagaattgcacaagaaattcttgtaagatctcctag

SEQ ID NO: 168312 - DNA, 837 bp, Artificial Sequence
  derived and/or modified sequence
atgagcgccctggggtccccagtacgggcctacgactttctgcttaagttcctgctggttggggacagcgatgtcggaaaaggcgagattctcgcctcgcttcaggatggtgcagctgagtcaccctatgggcaccctgctgggatcgactataagaccaccacaatccttctggatgggagacgcgtgaagctgcagctgtgggacacatccgggcagggccgcttttgcactatattccggagctactcgcgcggcgctcaaggcgtgattctcgtgtacgatattgcgaacaggtggtcctttgatggaatcgaccgctggattaaggagatagatgagcatgctcctggtgtgcccaaaatcctggttggcaatcgcctgcatcttgcatttaaacggcaggtcccaacggagcaggctcaagcatacgctgaaagacttggagtaacattctttgaagtctctccactttgtaactttaacatcacagaatcattcaccgaactcgcaagaatcgtgcttcttagacacggtatggataggctgtggcggccatcaaaggtcttaagcctccaggacttatgctgcagagcagtggtatcctgtacaccagttcatcttgtagataaactgccgctccccatcgcgttacgctcccatttgaaaagtttctccatggctaatggactgaacgctcggatgatgcacggtgggagctacagcctgaccacttcttcaacacataaacgcagcagcctgcggaaagttaagttggtacgccccccgcagtcccctcccaagaactgtacgagaaattcgtgtaagatttcctag

SEQ ID NO: 168313 - DNA, 1140 bp, Artificial Sequence
  derived and/or modified sequence
gaacagggactgggcgctcgtgcagctccactgggagctgggcccccacccctccgctctgcccctcaggccggccacggatggggtaggcgcgcagttactatgtctgctctcgggagccccgtgagggcctatgatttcttgttgaagttcttgcttgtcggtgatagcgacgtcgggaaaggggaaatcctggctagccttcaggatggagctgcagagtcaccatacggccatccagctgggatcgactacaagacaactacaatactgctagatggtaggcgtgtcaagttacaactctgggataccagtggtcaaggtagattctgcactatttttagatcgtatagcagaggagctcaaggagtgatccttgtgtacgatattgcaaatagatggagtttcgatggaatcgaccgatggataaaggagattgacgagcatgctccaggggtcccgaagatactggtggggaatcgcctgcatctggccttcaagcggcaagttcccaccgagcaagcacaggcctacgccgagagacttggcgtgacattctttgaagtgagccccctgtgcaatttcaatattacagaaagcttcaccgaactggctcggatcgtgctgctcagacacggcatggataggctgtggcgaccttccaaggtcctttctctacaggatctctgttgcagagcggtcgtgtcatgtacgcccgttcatctcgtagataaattacctctccctatcgctttgaggagccacctcaagagcttcagcatggcaaacggcctcaatgctcgcatgatgcacggaggatcttatagtcttaccaccagttccacgcataagcgcagttctttgaggaaagtgaagcttgtcagacccccacagcctccacaaaagttgcaccagaagcaacttcaaaactttcttcgaaaggcgctcaaagagactcgccgcaatctgtcccgcagatcttcggcgctaccccccgccgccggcgggtgcatctctgatcctgggagctcgagaaggatgctactggctaacgtttgcgatgcgttccgggttatggagacccactatcccgtcggcctccggatctctacatggatgtgcatgaagttgctgttttag

SEQ ID NO: 168314 - DNA, 837 bp, Artificial Sequence
  derived and/or modified sequence
atgtctgccctgggcagccctgtgcgggcctatgacttcctgctgaagttcctgctggtgggggacagtgatgtgggcaaaggagagatcctggccagcctgcaggatggagctgctgagagcccctacggccaccctgctggcatcgactacaagaccaccaccatcctgctggatggaagaagagtgaagctgcagctgtgggacaccagcggccagggccgcttctgcaccatcttccgcagctacagcagaggagcccagggcgtcatcctggtgtatgacatcgccaaccgctggagctttgatggcatcgaccgctggatcaaggagattgatgaacatgcccctggggtgcccaagatcctggtgggcaaccggctgcacctggccttcaagaggcaggtgcccacagagcaggcccaggcctatgcagagcggctgggcgtgaccttctttgaggtgagccccctgtgcaacttcaacatcacagagagcttcacagagctggccagaattgtgctgctgcggcacggcatggaccggctgtggaggcccagcaaggtgctgagcctgcaggacctgtgctgcagagctgtggtgtcctgcacccctgtgcacctggtggacaagctgcccctgcccatcgccctgcggagccacctgaagagcttctccatggccaacggcctgaatgccaggatgatgcatggaggcagctacagcctgaccaccagcagcacccacaagaggagcagcctgaggaaggtgaagctggtgcggcccccccagagcccccccaagaactgcaccaggaacagctgcaagatctcctag

SEQ ID NO: 168315 - DNA, 1140 bp, Artificial Sequence
  derived and/or modified sequence
gagcagggcctgggcgcccgggccgcccccctgggcgccggccccccacccctgcggagcgccccccaggccggccacggctggggccggcgggctgtgaccatgtctgccctgggcagccctgtgcgggcctatgacttcctgctgaagttcctgctggtgggggacagtgatgtgggcaaaggagagatcctggccagcctgcaggatggagctgctgagagcccctacggccaccctgctggcatcgactacaagaccaccaccatcctgctggatggaagaagagtgaagctgcagctgtgggacaccagcggccagggccgcttctgcaccatcttccgcagctacagcagaggagcccagggcgtcatcctggtgtatgacatcgccaaccgctggagctttgatggcatcgaccgctggatcaaggagattgatgaacatgcccctggggtgcccaagatcctggtgggcaaccggctgcacctggccttcaagaggcaggtgcccacagagcaggcccaggcctatgcagagcggctgggcgtgaccttctttgaggtgagccccctgtgcaacttcaacatcacagagagcttcacagagctggccagaattgtgctgctgcggcacggcatggaccggctgtggaggcccagcaaggtgctgagcctgcaggacctgtgctgcagagctgtggtgtcctgcacccctgtgcacctggtggacaagctgcccctgcccatcgccctgcggagccacctgaagagcttctccatggccaacggcctgaatgccaggatgatgcatggaggcagctacagcctgaccaccagcagcacccacaagaggagcagcctgaggaaggtgaagctggtgcggcccccccagcccccccagaagctgcaccagaagcagctgcagaacttcctgaggaaggccctgaaggagaccaggaggaacctgagcagaagaagcagcgccctgcccccagctgctgggggctgcatcagtgaccccggcagcagcaggaggatgctgctggccaacgtgtgtgatgccttccgggtgatggagacccactaccctgtgggcctgcgcatcagcacctggatgtgcatgaagctgctcttctag

SEQ ID NO: 168316 - DNA, 837 bp, Artificial Sequence
  derived and/or modified sequence
atgagcgccctgggcagccccgtgcgggcctacgacttcctgctgaagttcctcttggtcggcgattccgatgtgggcaagggggagatcctggcttccctgcaggacggagcagccgagagtccttatggccatcctgctgggatcgattataagaccactaccatcctactggatggtcgccgggtgaagctgcagctgtgggataccagtgggcagggacgcttctgcaccatctttagaagttattcacggggcgcccagggagtgatcctggtatatgacattgcgaaccggtggtcatttgacggaatcgatagatggattaaagaaatagatgaacacgctcccggcgtgccgaaaattcttgtgggaaacaggctccacctggcattcaagcggcaggttccaacggaacaggcccaggcctacgcagaaaggctgggtgtgacattctttgaggtgtcacccttgtgcaattttaatattacagaatcatttacagagctggcacgaattgtgctgctgaggcacggcatggatcgactttggcggccctcaaaggtactgtccctacaggacttgtgttgcagagctgttgtgagttgcacacctgtccatcttgtggacaagctgcccctcccaatagcactcagaagccacctcaagtccttctcaatggcaaatggactgaacgctagaatgatgcacggcggttcttactccctcaccacatcctccacacacaagcgctcaagtcttagaaaagtaaagctggtgcgccctccccaaagcccacctaaaaactgcacaaggaattcatgcaagatcagttag

SEQ ID NO: 168317 - DNA, 837 bp, Artificial Sequence
  derived and/or modified sequence
atgagcgccctgggcagccccgtgcgggcctacgacttcctgctgaagtttctcctggttggggatagcgacgttggcaaaggcgagattttggcaagtcttcaggacggcgccgccgagagcccctacggtcatcccgccggtatcgattataagaccacaacaatactccttgatggcaggcgtgtcaaacttcagttgtgggatacatcagggcagggtcgtttctgtactatttttcggagctacagccgaggagcgcagggggtgattttggtgtacgatattgccaaccggtggtcttttgatggcattgatagatggattaaggagatagatgagcatgctcccggcgtcccaaagattctagtaggaaatcgtctgcatcttgccttcaagagacaggtacctacagagcaggctcaagcctacgccgagaggctcggtgtcacgttttttgaagtgagtccactgtgtaattttaatattacagaatcatttaccgagctcgccagaatcgtgttgctgcgccacgggatggacagactgtggaggcctagcaaggtgctctcactccaagacctgtgctgtagggccgtcgtatcttgcaccccagtgcacctggtggacaaactcccacttccgatcgccttgcgttcccacctgaaatccttcagcatggcaaacgggttgaatgctcgcatgatgcacggtggcagctacagcttaacgacctcaagtactcataaaagaagctctctccgcaaggtgaaattagtgcgcccgccacagtctcctcctaaaaactgcacacgcaattcctgcaagatcagctag

SEQ ID NO: 168318 - DNA, 1140 bp, Artificial Sequence
  derived and/or modified sequence
gagcagggcctgggcgcccgggccgcccccctgggcgccggcccccctccactgagatccgcaccacaggccggtcacggctggggaaggcgggccgtgaccatgtccgctctgggttcccctgtgcgggcttacgattttttgctcaagtttctactggtgggggacagcgatgttggaaaaggcgagatccttgcttctctccaggatggcgcagcagagagtccatacgggcatcccgccgggatcgattacaagaccactacgatcctattggacggccggagggtgaagctgcagctgtgggacacctcagggcaggggaggttctgtaccatttttcggtcatactctagaggggcccagggcgttatcctggtgtatgatatcgctaacagatggagtttcgatggtatcgaccgttggatcaaggagatcgatgaacacgcccctggggttccaaagatactggtaggaaataggctgcacctggcctttaagcgacaggtccccaccgaacaagcccaggcttatgcagagcgattgggggttaccttctttgaggtttcgcccctttgcaattttaacattacagaatcattcacagagttagcgcggattgtcctattacgccacggtatggatcgactgtggcgtccatccaaggtgctgtccctccaggatctctgttgtagagcagttgtgtcatgtacgccagtacacttggtggacaaacttccattgccaatcgccttgagatcccaccttaaatccttctccatggcgaacggcttgaatgctcggatgatgcatggaggatcctactcattaacaacgtcatcgactcacaagagaagctcactgcgaaaggtgaagttagtgcgaccgccgcagccaccacagaagctgcaccagaagcaactgcagaacttcttacgaaaagccctgaaggaaacccgtagaaacctctctaggagaagcagcgccctgccccccgccgcaggaggctgtatcagtgatcccgggtcttcgcgtcgtatgttattggcaaacgtctgcgacgcattccgcgtaatggaaacgcattacccggtgggactccgcataagcacatggatgtgcatgaagctgctcttctag

SEQ ID NO: 168319 - DNA, 837 bp, Artificial Sequence
  derived and/or modified sequence
atgtccgccttgggatcacctgtgagggcctatgatttcctgcttaagtttttgctggttggcgactcggatgtgggcaagggcgagatcctggcctctctacaggatggagctgccgaaagcccctatggacaccctgccggaatcgactacaagacaacgacaatcttgctggatggaaggagggtgaaactgcaactgtgggatacaagtggccagggtcgcttttgcaccatcttcagatcatatagtagaggggcacagggagtgattttagtgtatgacattgccaaccgatggtccttcgatggcattgaccggtggattaaagagattgacgagcacgccccaggtgtccccaagatactggttggtaatcgtttacacctggccttcaaacgccaagttcccactgaacaggcacaggcctatgcggaacggctgggcgtgacatttttcgaggtcagcccgctctgcaacttcaacataactgagtcatttacagaactggcccgaattgtcctgctgcgtcacggaatggaccggttgtggaggccttcgaaggtattgtctctccaggacctgtgttgccgggctgtggtctcctgtacgcccgtgcatcttgtggacaagttgccgttacccatagcgctccgctctcaccttaaaagcttcagcatggcgaacgggttgaatgctcgcatgatgcacggagggtcctactcgctcacaacttcctctacacacaaacgctcttcactgcgtaaagtgaaattggtgagaccgccacagtcacctccaaagaactgcaccaggaatagctgcaagatctcctag

SEQ ID NO: 168320 - DNA, 837 bp, Artificial Sequence
  derived and/or modified sequence
atgagcgcgctcgggtcacccgtaagggcctacgattttctgctcaaattcctgctggtcggcgacagcgacgtggggaaaggagagatcctcgccagcctgcaggacggggcagcagaaagcccgtatgggcaccctgctggcatcgactacaaaacgaccaccatcctcttagacggtagaagagtaaagctccaattatgggacacgtctgggcaggggaggttttgcacaattttccggtcttacagtcgtggagcccagggggtgattttggtgtacgacatagctaaccgttggtccttcgatggaatcgacaggtggattaaagaaattgacgaacacgcgcctggcgtccctaagatcttggtcggaaacaggttgcatcttgcatttaaaaggcaagtccctaccgagcaggcacaggcctatgccgaaaggctgggggtgactttcttcgaggtcagtccactctgtaacttcaatatcaccgagtcatttacagagctggcaagaatcgtgctccttcgccacggaatggatcggctttggaggccaagcaaagtactaagcctacaggacttatgctgccgggctgtcgtgagctgcactcccgtgcacctagtcgataagcttccactcccgattgctctaaggtcccatcttaagtccttctcaatggctaacggtctgaacgcaaggatgatgcatgggggatcgtatagcctgacaaccagctccactcacaagcggtcatctctgcgtaaggttaaactcgtaaggccaccacagagcccacctaagaattgcacgaggaacagttgcaagatttcatag

SEQ ID NO: 168321 - DNA, 1140 bp, Artificial Sequence
  derived and/or modified sequence
gaacaaggcctgggggcacgagcggcacctctgggagcagggccacctccactccgcagcgctcctcaagcaggacatggatgggggcgtcgagcggtgacaatgtctgcccttggatccccagtgcgggcttacgacttcctcttaaaatttctgttagtaggcgactccgatgtgggaaagggagagatcctggcctccttacaggacggagccgcagagagtccctacggtcaccctgcaggtattgattataaaactaccacaattttactcgacggtcgcagagtgaaactccagttgtgggacacctccgggcagggtagattctgtactattttccggtcctactcaagaggtgctcaaggtgtgatccttgtctatgatatcgcaaaccgctggtcttttgatggtatcgaccgctggataaaagaaatcgatgaacacgcccctggagtgccgaaaatcctcgtgggcaacagactgcatttggcttttaaaagacaggtgccaacagaacaggctcaggcgtatgccgaacgcctaggcgtaacattcttcgaagtgagtcctctttgcaattttaatatcactgaaagtttcaccgagctggcgagaatcgtgctcttacggcacggcatggaccgactgtggcggcctagcaaagtgttgagcctacaggacctttgctgtagagccgtagtatcatgcacacctgtgcatctggtcgacaagctccccctgccaatcgccctgcgcagccaccttaagtccttcagcatggcaaacggactgaatgccagaatgatgcatggaggaagctacagcctcactacctcaagcactcataaacggtcatcactcaggaaggtgaagctggtccgtccccctcagccccctcaaaagctgcaccagaaacagctgcagaatttcttgcggaaagctcttaaagagacccgaagaaatttgtccagaaggtcatccgcccttccaccagccgcaggaggctgcatctcagacccaggaagcagcagaagaatgttgctggcaaacgtgtgcgacgcatttcgagtcatggaaacgcattacccagtcggccttcgcattagcacttggatgtgtatgaagctgctcttttag

SEQ ID NO: 168322 - DNA, 3859 bp, Artificial Sequence
  derived and/or modified sequence
agcgctgggcggcggggcggggccggaggcgagcaaggactcggggcccgcgcggcgcctctcggggccgggccgccgcctctgcgctcagccccgcaggccgggcatgggtgggggcgccgggccgtcacgatgagcgccctgggcagcccggtccgggcctacgactttctgctcaagttcctgctggtgggcgacagcgacgtgggcaagggcgagatcctggcgagcctgcaggatggcgcggccgagtccccgtacggccacccggcgggcatcgactacaagacgaccaccatcctgctggacgggcggcgggtgaagctgcagctctgggatacttcaggccagggaagattttgtaccatattccgctcctactcccggggcgcacagggtgtgatcctggtctatgacattgcgaaccgctggtcttttgacggcattgatcgatggattaaggagatcgatgagcatgcccccggagtccccaagatcctggtggggaaccgcctgcacctggcgttcaagcggcaggtgcccacggagcaggcccaggcctacgccgagcgcctgggcgtgaccttctttgaggtcagccctctgtgcaatttcaacatcacagagtcgttcacggagctggccaggatcgtgctgctgcggcatgggatggaccggctctggcggccgagcaaggtgctgagcttgcaagacctctgctgccgggcggtcgtgtcctgcacgccggtgcacctggtggacaagctcccgctccccattgccttaagaagccacctcaagtccttctcgatggccaacggcctgaatgccaggatgatgcacggcggttcctactccctcaccaccagctccacccacaaaaggagcagcctccgcaaagtgaagctcgtccgccccccccagagcccccccaaaaactgcaccagaaacagctgcaaaatttcttaaggaaggcactgaaagaaacacggcggaatctctccaggagaagctcggcgttacccccggcagctggtggatgcatctcagatcccggttcctctcggcgaatgctgcttgcgaatgtgtgcgacgccttccgtgtgatggaaacacactaccccgtcggacttcgaatttctacgtggatgtgcatgaagctcttgttttcgatgtgtgtttgtaaagggaaaattagtactctgctcgactcttggtaacatgaaattctgaatgttactttatcatgattgcactgcaactttttccttaaaataactgcttttgtaagaacggtgatattggagtgattagtataaattcaatggaatttgagaagcaatggcagcgggataatttagagtcactgatattacgagaggggtctttttgtaaacctccttttcaatgtcaaagcgccaatttataaaacgctgcagatgtagaggttatgtgcaactgatctgtccagtttgtgtatgaaatggatttgataaagtttttgctagttatttactacattttgggattaataagtgatttatatgcatatttttctgtaaatctacagttttttgtacaagatattctacaagttatgaagctaagggaagaaaatgccaaagatacctctagttatgttgaacacagccagcacagtttcgacatgtcaaggaagagctgtttcagtaaagaatgaagtgaaaacacttatttaggaaaatgtttctcaacaataaaatgtatagttgtttctctcttggtagagttggcgaccggttctttcgaattttgtatttatttatttatttatttttgagacagagtttcgctcttgttgcccagggtggagtacaatggcacgatctgggctcaccacaacctccgcctcccgggttcaagcgattctcctgcctcagcctcccgagtagctgggattacagaggtgcaccaccacgcccggctaatttttgtatttttagtagagatggggtttcaccatgttggtcaggctggtgttgaactcctaacctcaggtgatccacccaccttggcctcccaaagtgctgggattacaggcgtgagccactgcgcccggccagattttgtgtatttcttatagccctttacttcactgcgccactgcctggtgtagacatcacatatcggagctaatacacgacactggcaacaaggctgaatccttgaactgttgtcgcctgttgagaaaggattccttttccggaacagaagtgcagaggaggagagagcggagagttaaaagctggcacccaggcatgtgcctgtctgagaaatcagagccgtgctcctgagcctcggtgaggagctccgaggggctgtcaggaattccgcatgaagatgtagcccctgaccccgactgcctcagagcagggctgaccgcaaagacctccagggccgctctcttccctggtcacactgttgaacgtttctctgtggctgggggtcgcaaatgagggactaaaccaaaaaaacgaagcgagaaaatacccagatgttcctagttcctgctgatgatctgtagattcttagaaacttaagggacccagctgggtgtgatggctcacacctgtaatcccagcacttcaggaggccgaggcagccggatcagaggtcaggagttcaagaccagtctggccaacgtgatgaaaccccgtctctaataaaattacaaaaattggcttggcatggcagcgcacacctgtaatcccagctactcaggaggctgaagcaggagaatcacttgaacctgggaggcaggggttgcagtgagccgagatcgtaccactgcaccccagcctgggcgacaagtgaaactccatctaaaaaaaaaaaaaaaaaagaaatttaagggaccctagaatcaggggcaaagcctgtattcagagatggtggaaccgaggcccagacaggagagaggagcactggtccctgcgggtggacccaggcttgggggtgtctggccacctgggcacggcagccacggggacaaagtccacggggaggcaggggtgtggtctgtgggcagaaggtgaaccctgaggggacagtgtctggagagggtggccagcctcgtgcaggcacgctgcaaagacctgtgcacccttctctctgctgtgccacaggtggggtgagaacgacagggccgacctcccagctgcaaacacaaggacactgagatgcacagaaaggagagtccacgttgaagaaacccacgttgaggggcctcttctccctccgttcccagctcgctgatggtgaagggtaaggaaatggatcctcccattgcaacattaaaccaggccaaacctgtatttttctcttccttcctttttcttgttttgtaattgatgtctcctcgggactactgataatgtcctagaaagaataaaataaagtttcccaaggctttgtgactcagagctctttggaggtgttcaccgaatgcacgggccgcccggaggccttggccctccagggaaacaccaccagaagtccccagaagcggaacatgtagcaaggaggctccccgagatctcccagagggagcacagccctgccaagttattggttttggacttccggcttccagagctacgagaaaataaatatttgttatttaagtcaccaggtttgtggcgattgttacggcagcctcaggaaactcctacaaggaagtgagttacgctcacggcagaaagtgctacagcaaaccaaggcagaacaaaaacagacgaaacctaatacagaccggactaagtagaagactgtgtgtttgggtggtgaatatacaaaaaacataaatataaattaaacctta

SEQ ID NO: 168323 - DNA, 1758 bp, Artificial Sequence
  derived and/or modified sequence
gggcggcggggcggggccggaggcgagcaaggactcggggcccgcgcggcgcctctcggggccgggccgccgcctctgcgctcagccccgcaggccgggcatgggtgggggcgccgggccgtcacgatgagcgccctgggcagcccggtccgggcctacgactttctgctcaagttcctgctggtgggcgacagcgacgtgggcaagggcgagatcctggcgagcctgcaggatggcgcggccgagtccccgtacggccacccggcgggcatcgactacaagacgaccaccatcctgctggacgggcggcgggtgaagctgcagctctgggatacttcaggccagggaagattttgtaccatattccgctcctactcccggggcgcacagggtgtgatcctggtctatgacattgcgaaccgctggtcttttgacggcattgatcgatggattaaggagatcgatgagcatgcccccggagtccccaagatcctggtggggaaccgcctgcacctggcgttcaagcggcaggtgcccacggagcaggcccaggcctacgccgagcgcctgggcgtgaccttctttgaggtcagccctctgtgcaatttcaacatcacagagtcgttcacggagctggccaggatcgtgctgctgcggcatgggatggaccggctctggcggccgagcaaggtgctgagcttgcaagacctctgctgccgggcggtcgtgtcctgcacgccggtgcacctggtggacaagctcccgctccccattgccttaagaagccacctcaagtccttctcgatggccaacggcctgaatgccaggatgatgcacggcggttcctactccctcaccaccagctccacccacaaaaggagcagcctccgcaaagtgaagctcgtccgccccccccagagcccccccaaaaactgcaccagaaacagctgcaaaatttcttaaggaaggcactgaaagaaacacggcggaatctctccaggagaagctcggcgttacccccggcagctggtggatgcatctcagatcccggttcctctcggcgaatgctgcttgcgaatgtgtgcgacgccttccgtgtgatggaaacacactaccccgtcggacttcgaatttctacgtggatgtgcatgaagctcttgttttcgatgtgtgtttgtaaagggaaaattagtactctgctcgactcttggtaacatgaaattctgaatgttactttatcatgattgcactgcaactttttccttaaaataactgcttttgtaagaacggtgatattggagtgattagtataaattcaatggaatttgagaagcaatggcagcgggataatttagagtcactgatattacgagaggggtctttttgtaaacctccttttcaatgtcaaagcgccaatttataaaacgctgcagatgtagaggttatgtgcaactgatctgtccagtttgtgtatgaaatggatttgataaagtttttgctagttatttactacattttgggattaataagtgatttatatgcatatttttctgtaaatctacagttttttgtacaagatattctacaagttatgaagctaagggaagaaaatgccaaagatacctctagttatgttgaacacagccagcacagtttcgacatgtcaaggaagagctgtttcagtaaagaatgaagtgaaaacacttatttaggaaaatgtttctcaacaataaaatgtatagttgtttctctcttggt

SEQ ID NO: 168324 - DNA, 1161 bp, Artificial Sequence
  derived and/or modified sequence
gggcggcggggcggggccggaggcgagcaaggactcggggcccgcgcggcgcctctcggggccgggccgccgcctctgcgctcagccccgcaggccgggcatgggtgggggcgccgggccgtcacgatgagcgccctgggcagcccggtccgggcctacgactttctgctcaagttcctgctggtgggcgacagcgacgtgggcaagggcgagatcctggcgagcctgcaggatggcgcggccgagtccccgtacggccacccggcgggcatcgactacaagacgaccaccatcctgctggacgggcggcgggtgaagctgcagctctgggatacttcaggccagggaagattttgtaccatattccgctcctactcccggggcgcacagggtgtgatcctggtctatgacattgcgaaccgctggtcttttgacggcattgatcgatggattaaggagatcgatgagcatgcccccggagtccccaagatcctggtggggaaccgcctgcacctggcgttcaagcggcaggtgcccacggagcaggcccaggcctacgccgagcgcctgggcgtgaccttctttgaggtcagccctctgtgcaatttcaacatcacagagtcgttcacggagctggccaggatcgtgctgctgcggcatgggatggaccggctctggcggccgagcaaggtgctgagcttgcaagacctctgctgccgggcggtcgtgtcctgcacgccggtgcacctggtggacaagctcccgctccccattgccttaagaagccacctcaagtccttctcgatggccaacggcctgaatgccaggatgatgcacggcggttcctactccctcaccaccagctccacccacaaaaggagcagcctccgcaaagtgaagctcgtccgccccccccagcccccccaaaaactgcaccagaaacagctgcaaaatttcttaaggaaggcactgaaagaaacacggcggaatctctccaggagaagctcggcgttacccccggcagctggtggatgcatctcagatcccggttcctctcggcgaatgctgcttgcgaatgtgtgcgacgccttccgtgtgatggaaacacactaccccgtcggacttcgaatttctacgtggatgtgcatgaagctcttgttt

SEQ ID NO: 168325 - protein, 76 aa, Artificial Sequence
  derived and/or modified sequence
MTDVETTYADFIASGRTGRRNAIHDILVSSASGNSNELALKLAGLDINKTEGEEDAQRSSTEQSGEAQGEAAKSES

SEQ ID NO: 168326 - DNA, 231 bp, Artificial Sequence
  derived and/or modified sequence
atgaccgatgtggagacaacatatgccgacttcatcgctagcggccggaccggaaggaggaatgccatccacgacatcttggtgagcagcgcctcagggaactcgaacgaactggcccttaagttagctggtctggatatcaacaaaacagagggtgaggaggatgcccagcgctcttccaccgaacaaagtggcgaagcacagggagaggccgctaagtcggagagctag

SEQ ID NO: 168327 - DNA, 231 bp, Artificial Sequence
  derived and/or modified sequence
atgactgatgtggaaactacatacgccgatttcatcgcgtcggggaggacggggcgccgcaatgcaatccacgacattttggtgagcagtgcctctggaaactccaacgagctcgctctgaagctggccggacttgatataaacaaaaccgaaggggaggaagacgcccagagatcttcaacggaacagtctggcgaggctcaaggagaggcagccaagtccgagtcatag

SEQ ID NO: 168328 - DNA, 231 bp, Artificial Sequence
  derived and/or modified sequence
atgacggatgttgaaacaacctacgcagacttcattgcctctggaagaactgggagacggaacgctatccatgacatactggtatcttctgctagcggaaacagcaatgagctggctctgaagctggcgggactcgacattaataagacagagggggaagaagacgctcagcgaagttctaccgagcagtccggagaggctcagggagaagccgctaagagcgaatcctag

SEQ ID NO: 168329 - DNA, 231 bp, Artificial Sequence
  derived and/or modified sequence
atgacagatgtggagaccacctatgctgacttcatcgccagcggccgcactggaagaagaaatgccatccatgacatcctggtgagcagcgccagcggcaacagcaatgagctggccctgaagctggccggcctggacatcaacaagacagaaggagaggaggatgcccagaggagcagcacagagcagagcggggaggcccagggcgaggccgccaagtctgagagctag

SEQ ID NO: 168330 - DNA, 231 bp, Artificial Sequence
  derived and/or modified sequence
atgaccgacgtggagaccacctacgccgacttcatcgccagcggccgcacgggccgtagaaatgcaatccacgacatcctggtgagcagcgcgtcaggtaattcgaacgagctagccttgaagctggccggcttagacatcaacaaaactgagggagaggaagatgcacagcgatcatccaccgaacagtctggtgaagctcaaggagaagccgccaaaagcgagtcatag

SEQ ID NO: 168331 - DNA, 231 bp, Artificial Sequence
  derived and/or modified sequence
atgaccgacgtggagaccacctacgccgacttcatcgccagcggccgcactgggcggaggaacgccatacacgacatcctggtgtctagcgcttccggcaattctaacgagctggctttgaaactggccggcctggacattaataagaccgagggagaagaagatgctcagagatcgagcacagaacagtcaggggaagctcagggtgaagcagcaaaatcggaaagctag

SEQ ID NO: 168332 - DNA, 231 bp, Artificial Sequence
  derived and/or modified sequence
atgaccgacgtggagaccacctacgccgacttcatcgccagcggccgaactggccggcggaacgccatccatgacatcctggtctcaagcgctagtgggaacagcaacgaactggccctcaagctcgctggattggatattaataagacagagggtgaagaagatgctcaaaggagttctacagagcaatctggcgaagctcagggtgaagccgccaagtcggagtcttag

SEQ ID NO: 168333 - DNA, 231 bp, Artificial Sequence
  derived and/or modified sequence
atgacggacgtggagactacctacgctgactttattgcctccgggaggaccggacggagaaatgcaattcacgatatcctggtgtccagcgcaagcgggaactcaaatgagctggccctcaaactggccggactggacatcaataaaacagagggcgaagaggatgcacagcggtccagtacggagcagagcggagaagcccagggggaagccgctaaaagcgaaagttag

SEQ ID NO: 168334 - DNA, 231 bp, Artificial Sequence
  derived and/or modified sequence
atgacggacgtagaaacaacttatgccgatttcatcgcctcaggcagaaccggcaggaggaacgccattcatgacatcctggtatcgtccgcttcaggaaatagcaatgagttggcgttgaagctcgccggactggatataaataagactgagggagaagaggacgctcaaagaagctccacagaacagtccggggaagcccagggagaagcggcaaagtcagagtcgtag

SEQ ID NO: 168335 - DNA, 231 bp, Artificial Sequence
  derived and/or modified sequence
atgaccgacgtggagaccacctacgcggacttcatcgcttccggtcgaactggcagacgaaatgccatccatgacatattggtttcctccgcctctggaaattcaaatgaactcgccctaaagctggcaggactcgacatcaataaaactgaaggcgaggaagacgcccagcgtagttccaccgagcaatccggcgaggcacagggagaggctgcaaagtctgagagctag

SEQ ID NO: 168336 - DNA, 1736 bp, Artificial Sequence
  derived and/or modified sequence
tgctggcaggtggggcgcgggccggcgcgagctgaccgagcactcggcgggcgcggcgggactgcggcccgtggcggcgtgcgcggggacctgcgctgactaggtccggggaagtccctgctatgtggatatttggtagcaatgactgatgtggaaactacatatgcagattttattgcttcaggaagaacaggtagaagaaatgcaatacatgatatcctggtttcctctgcaagtggcaacagcaatgaattagccttgaaattagcaggtcttgatatcaacaagacagaaggtgaagaagatgcacaacgaagttctacagaacaaagtggggaagcccagggagaagcagcaaaatctgaaagctaacaccccactttgaccctcgaccacacctgaaaatgtctcaaatctccaggagtatctggaatgcatttgtttccatgagtgaaaagaggaaaaagaaaatggctgtgctgcattgcaggaacctgctcattatcatgttaaaaatgagggcagaggctgtggctgcaggcagacttttccctacctctgtcattagcaatggttgaaatcatgtggcttgtgtttgggcgtcatttttgtatggatcctttcacttgatcatatgacgaaatgcttatagagagtagctccgacctagatgatgattcttcctgtagcatctggcccctcacaatgtcagaggatttaattgtgtctaattgcgaagggttgattgaaccccagagtttaaatatctctggctcaagtgttcacccagtaaaagaaagatccagaaagcactgtttttagcattacgtatctgtgtgttactgctgtgttatttacactgttttgtattgtacaatatatatgctcagcactgcccccttctctgattgcttatgaaaaacaaaatgatgtacattactgtgaatttttataccactcatttttaaaagggctgtcttttcattttagttttccatactgtggtggtgtacacaggatagaacacccttttttaaaacacagtctttccccttgctcattgtatgttgatgagttgattaagtctaacagattcatcaagactccattgctttattatagagacatttgaaaatatccattaatgtgaatatcacctgaattcagtctgtttggtgtctgcacagactggaattcaatctgtcaaatttgttttattctcaagtggagaacttctcccacataatatatatatatatatatattttaatttatgagaattttggacaattggaaaggtagaaaagaaaagccaagatcatactaaggactggaaatattttgttctatggaatcaaatttctcacaatgctgtatgatactatttaaatttggaggacaacttatcttcactaagctgaatcaggtggagaaagtaatctccttgcaatcatgtggacaccaatcacaaaagtaaagccctggtgttgtgttttcatgtcttttttcagccctctcagatccaaatgttattatgcactttttaatgtttgtaaacttttactaataattagtgtgaattgcattctgatacaataatgattatcattagaagctaacaaaattctcattaatactgtgtttgatggcctctgctgtgttttaacatcgtgcttcttatatggaaagtttttgtgagctgtgtaatccctctggtcagtattatgaaatcattt

SEQ ID NO: 168337 - DNA, 4163 bp, Artificial Sequence
  derived and/or modified sequence
atccataatccagcgatgctgcagctgtaaaagcattaatagaaaatcaatccacaacctcgcggggcagcgatcgtcgagcgccgtttccaggctgccttccctggggtcgggagcggccccgctccccccgtggctggcgcggaatgtggtgatccgtcccggggcggggatgacttcatgcagccggagctccgcggcgggagcggaggctgctgctggcaggtggggcgcgggccggcgcgagctgaccgagcactcggcgggcgcggcgggactgcggcccgtggcggcgtgcgcggggacctgcgctgactaggtccggggaagtttcctgactttctgagaagccctggtttccccaaagaagtgatttctgatagaaatctgaaggtcatctccaagaaaaaagagatctagtatagtcaatgaattaaagacaagaaggtttccaatcagtccctgctatgtggatatttggtagcaatgactgatgtggaaactacatatgcagattttattgcttcaggaagaacaggtagaagaaatgcaatacatgatatcctggtttcctctgcaagtggcaacagcaatgaattagccttgaaattagcaggtcttgatatcaacaagacagaaggtgaagaagatgcacaacgaagttctacagaacaaagtggggaagcccagggagaagcagcaaaatctgaaagctaacaccccactttgaccctcgaccacacctgaaaatgtctcaaatctccaggagtatctggaatgcatttgtttccatgagtgaaaagaggaaaaagaaaatggctgtgctgcattgcaggaacctgctcattatcatgttaaaaatgagggcagaggctgtggctgcaggcagacttttccctacctctgtcattagcaatggttgaaatcatgtggcttgtgtttgggcgtcatttttgtatggatcctttcacttgatcatatgacgaaatgcttatagagagtagctccgacctagatgatgattcttcctgtagcatctggcccctcacaatgtcagaggatttaattgtgtctaattgcgaagggttgattgaaccccagagtttaaatatctctggctcaagtgttcacccagtaaaagaaagatccagaaagcactgtttttagcattacgtatctgtgtgttactgctgtgttatttacactgttttgtattgtacaatatatatgctcagcactgcccccttctctgattgcttatgaaaaacaaaatgatgtacattactgtgaatttttataccactcatttttaaaagggctgtcttttcattttagttttccatactgtggtggtgtacacaggatagaacacccttttttaaaacacagtctttccccttgctcattgtatgttgatgagttgattaagtctaacagattcatcaagactccattgctttattatagagacatttgaaaatatccattaatgtgaatatcacctgaattcagtctgtttggtgtctgcacagactggaattcaatctgtcaaatttgttttattctcaagtggagaacttctcccacataatatatatatatatatatattttaatttatgagaattttggacaattggaaaggtagaaaagaaaagccaagatcatactaaggactggaaatattttgttctatggaatcaaatttctcacaatgctgtatgatactatttaaatttggaggacaacttatcttcactaagctgaatcaggtggagaaagtaatctccttgcaatcatgtggacaccaatcacaaaagtaaagccctggtgttgtgttttcatgtcttttttcagccctctcagatccaaatgttattatgcactttttaatgtttgtaaacttttactaataattagtgtgaattgcattctgatacaataatgattatcattagaagctaacaaaattctcattaatactgtgtttgatggcctctgctgtgttttaacatcgtgcttcttatatggaaagtttttgtgagctgtgtaatccctctggtcagtattatgaaatcatttgtcagtggtaataaataaggaaccagtaatatgccaatggttcatgaattactggacaaatagcagacaatgggagtccctttacaataacgagcccacttagctgtccttgagggcttagataccttgccacgtgaagtaggtagagcagcatttcaataggtaatttgtgtggttgtgccagaaactcagcccttctatgtaattacatacaggataaaaggtaagtctgctcacttctccttctacagggcatttcaactgactggaataagggcatggttgcatttagtactcaatcagatattactagaaaaaaaattaataatgtgagcctttccgagagcagaacgaggaaagattaaattttagaatgcttccttctgtctaatccatcaggggccaaaatgcccagtaaaattcaaacacatcacctattaatagacttacaagtgagaaaagaggttcctagggttattttaggcaatccctggtaaactgtttaaaccatcaaacccctacagtcagttttcagtatcctcatttaatattttaataggtttcttgtgaatttaaacttctcttctttcttaaggttgtgaaattccaaactgattttatgtgattttgaaaagtttagaaccagtgctgagtctatgtggagggtttatattcctatgtgatatactgttattaatgcatgtggtgccatgcttgtctttaaatatataaatagtgctaaattgcaaagtcatatggagctttggatttagtttgacttcttactactgctttgtctgctatattcaaacccaaaggcattcccaagctagggagataaaaattaattttctaaaatgtccacatcctatacattttgcttattcatggcatctttcaaattttattttagtttcctttatttgccaagaatacatatggatttgaatttttaaggagagaaggaaagggtaggaaaccagggccttgggtttagtaacaggcattggatgtctattaaccaactattcttacgctaatggctttgcagctcctattctcccatttgatcctcaaacaattctattagagtggtatttttatccaatttcacagattaaaatataagcactcaataaaatataacctttagaagcttaaaaagctagtaagtgatgaactgaggatttgaacccatgtttgtcaccaaggagctttccagggcacatgtcataaaattagagccaactgcagagctgtaagggaacttttagagatgaacttcttcagcctccatattttacagaaggaaactgaatcccagaaggagaaattgccgttctcaaggctccctggatgggtaataacacagatatgagtaggtcacataaagtatatcttttttaaaaaaaagaaattcaattatgtcttatttggggggtatatttcccagaagatatttttctggcatgtggtctgtaaacacagcatgattcatattttttatgtttcatgctactcattttgtttaattaccaacaaacatggggactttggctttttgacttatttgcaacaagcatgaaattgttaaatttaccttttatcaattgtaatcatcctatgccaacatattatcataaattcatagaaatatttttaaaaataaataacagacattgaaatccaattcttagataatactcccagaacagccaatggtaaatgccctatacttgagtcttacttagatgctgtggtaatgcaccattttagaagatgaatgatactgctatttctcttcagggaaacaataatggataaagaaatgtaactgccgggcagcaaagcttctaagtgaaacctgtagtagcagtagtagtagggagaaaatgtgtagtcatcaagtgaaaataggaaaggatctatgatttatgatgtcttaatagaccctaaattgttctttaattacaagagtggcagtctctgaagtcatttgtgagcttgtatgacttttgtatttagcaatgttgcatgctcacataattgaaaattaaaagtaacacatttttctgaaatgta

SEQ ID NO: 168338 - DNA, 588 bp, Artificial Sequence
  derived and/or modified sequence
aacttctagaatccatcgatgtggaacacttcagtttgtttaacgtaggagactccctgctatgtggatatttggtagcaatgactgatgtggaaactacatatgcagattttattgcttcaggaagaacaggtagaagaaatgcaatacatgatatcctggtttcctctgcaagtggcaacagcaatgaattagccttgaaattagcaggtcttgatatcaacaagacagaaggtgaagaagatgcacaacgaagttctacagaacaaagtggggaagcccagggagaagcagcaaaatctgaaagctaacaccccactttgaccctcgaccacacctgaaaatgtctcaaatctccaggagtatctggaatgcatttgtttccatgagtgaaaagaggaaaaagaaaatggctgtgctgcattgcaggaacctgctcattatcatgttaaaaatgagggcagaggctgtggctgcaggcagacttttccctacctctgtcattagcaatggttgaaatcatgtggcttgtgtttgggcgtcatttttgtatggatcctttcacttgatcatatgacgaaatgctta

SEQ ID NO: 168339 - DNA, 231 bp, Artificial Sequence
  derived and/or modified sequence
atgaccgacgtggagaccacctacgccgacttcatcgccagcggcagaaccggcagaagaaacgccatccacgacatcctggtgagcagcgccagcggcaacagcaacgagctggccctgaagctggccggcctggacatcaacaagaccgagggcgaggaggacgcccagagaagcagcaccgagcagagcggcgaggcccagggcgaggccgccaagagcgagagctag

SEQ ID NO: 168340 - protein, 602 aa, Artificial Sequence
  derived and/or modified sequence
MPSAKQRGSKGGHGAASPSEKGAHPSGGADDVAKKPPPAPQQPPPPPAPHPQQHPQQHPQNQAHGKGGHRGGGGGGGKSSSSSSASAAAAAAAASSSASCSRRLGRALNFLFYLALVAAAAFSGWCVHHVLEEVQQVRRSHQDFSRQREELGQGLQGVEQKVQSLQATFGTFESILRSSQHKQDLTEKAVKQGESEVSRISEVLQKLQNEILKDLSDGIHVVKDARERDFTSLENTVEERLTELTKSINDNIAIFTEVQKRSQKEINDMKAKVASLEESEGNKQDLKALKEAVKEIQTSAKSREWDMEALRSTLQTMESDIYTEVRELVSLKQEQQAFKEAADTERLALQALTEKLLRSEESVSRLPEEIRRLEEELRQLKSDSHGPKEDGGFRHSEAFEALQQKSQGLDSRLQHVEDGVLSMQVASARQTESLESLLSKSQEHEQRLAALQGRLEGLGSSEADQDGLASTVRSLGETQLVLYGDVEELKRSVGELPSTVESLQKVQEQVHTLLSQDQAQAARLPPQDFLDRLSSLDNLKASVSQVEADLKMLRTAVDSLVAYSVKIETNENNLESAKGLLDDLRNDLDRLFVKVEKIHEKV

SEQ ID NO: 168341 - DNA, 1809 bp, Artificial Sequence
  derived and/or modified sequence
atgcccagcgccaagcagagaggcagcaagggcggccacggcgccgccagccccagcgagaagggcgcccaccccagcggcggcgccgacgacgtggccaagaagcccccccccgccccccagcagcccccccccccccccgccccccacccccagcagcacccccagcagcacccccagaaccaggcccacggcaagggcggccacagaggcggcggcggcggcggcggcaagagcagcagcagcagcagcgccagcgccgccgccgccgccgccgccgccagcagcagcgccagctgcagcagaagactgggcagagccctgaacttcctgttctacctggccctggtggccgccgccgccttcagcggctggtgcgtgcaccacgtgctggaggaggtgcagcaggtgagaagaagccaccaggacttcagcagacagagagaggagctgggccagggcctgcagggcgtggagcagaaggtgcagagcctgcaggccaccttcggcaccttcgagagcatcctgagaagcagccagcacaagcaggacctgaccgagaaggccgtgaagcagggcgagagcgaggtgagcagaatcagcgaggtgctgcagaagctgcagaacgagatcctgaaggacctgagcgacggcatccacgtggtgaaggacgccagagagagagacttcaccagcctggagaacaccgtggaggagagactgaccgagctgaccaagagcatcaacgacaacatcgccatcttcaccgaggtgcagaagagaagccagaaggagatcaacgacatgaaggccaaggtggccagcctggaggagagcgagggcaacaagcaggacctgaaggccctgaaggaggccgtgaaggagatccagaccagcgccaagagcagagagtgggacatggaggccctgagaagcaccctgcagaccatggagagcgacatctacaccgaggtgagagagctggtgagcctgaagcaggagcagcaggccttcaaggaggccgccgacaccgagagactggccctgcaggccctgaccgagaagctgctgagaagcgaggagagcgtgagcagactgcccgaggagatcagaagactggaggaggagctgagacagctgaagagcgacagccacggccccaaggaggacggcggcttcagacacagcgaggccttcgaggccctgcagcagaagagccagggcctggacagcagactgcagcacgtggaggacggcgtgctgagcatgcaggtggccagcgccagacagaccgagagcctggagagcctgctgagcaagagccaggagcacgagcagagactggccgccctgcagggcagactggagggcctgggcagcagcgaggccgaccaggacggcctggccagcaccgtgagaagcctgggcgagacccagctggtgctgtacggcgacgtggaggagctgaagagaagcgtgggcgagctgcccagcaccgtggagagcctgcagaaggtgcaggagcaggtgcacaccctgctgagccaggaccaggcccaggccgccagactgcccccccaggacttcctggacagactgagcagcctggacaacctgaaggccagcgtgagccaggtggaggccgacctgaagatgctgagaaccgccgtggacagcctggtggcctacagcgtgaagatcgagaccaacgagaacaacctggagagcgccaagggcctgctggacgacctgagaaacgacctggacagactgttcgtgaaggtggagaagatccacgagaaggtgtag

SEQ ID NO: 168342 - DNA, 3093 bp, Artificial Sequence
  derived and/or modified sequence
gtcctctcgccgctccgacgccagcagcgcccgcgtgccgctcgcccagtcccgggggagcccctgcaagtttcccgggccgcgcgccgcgctcgctcgcctcccagcccgcggcccgagccgccgccgcgcccgccatgccctcggccaaacaaaggggctccaagggcggccacggcgccgcgagcccctcggagaagggtgcccacccgtcgggcggcgcggatgacgtggcgaagaagccgccgccggcgccgcagcagccgccgccgccgcccgcgccgcacccgcagcagcacccgcagcagcacccgcagaaccaggcgcacggcaagggcggccaccgcggcggcggcggcggcggcggcaagtcctcctcctcctcctccgcctccgccgccgctgccgccgccgccgcctcgtcctcggcgtcctgctcgcgcaggctcggcagggcgctcaactttctcttctacctcgccctggtggcggcggccgctttctcgggctggtgcgtccaccacgtcctggaggaggtccagcaggtccggcgcagccaccaggacttctcccggcagagggaggagctgggccagggcttgcagggcgtcgagcagaaggtgcagtctttgcaagccacatttggaacttttgagtccatcttgagaagctcccaacataaacaagacctcacagagaaagctgtgaagcaaggggagagtgaggtcagccggatcagcgaagtgctgcagaaactccagaatgagattctcaaagacctctcggatgggatccatgtggtgaaggacgcccgggagcgggacttcacgtccctggagaacacggtggaggagcggctgacggagctcaccaaatccatcaacgacaacatcgccatcttcacagaagtccagaagaggagccagaaggagatcaatgacatgaaggcaaaggttgcctccctggaagaatctgaggggaacaagcaggatttgaaagccttaaaggaagctgtgaaggagatacagacctcagccaagtccagagagtgggacatggaggccctgagaagtacccttcagactatggagtctgacatctacaccgaggtccgcgagctggtgagcctcaagcaggagcagcaggctttcaaggaggcggccgacacggagcggctcgccctgcaggccctcacggagaagcttctcaggtctgaggagtccgtctcccgcctcccggaggagatccggagactggaggaagagctccgccagctgaagtccgattcccacgggccgaaggaggacggaggcttcagacactcggaagcctttgaggcactccagcaaaagagtcagggactggactccaggctccagcacgtggaggatggggtgctctccatgcaggtggcttctgcgcgccagaccgagagcctggagtccctcctgtccaagagccaggagcacgagcagcgcctggccgccctgcaggggcgcctggaaggcctcgggtcctcagaggcagaccaggatggcctggccagcacggtgaggagcctgggcgagacccagctggtgctctacggtgacgtggaggagctgaagaggagtgtgggcgagctccccagcaccgtggaatcactccagaaggtgcaggagcaggtgcacacgctgctcagtcaggaccaagcccaggccgcccgtctgcctcctcaggacttcctggacagactttcttctctagacaacctgaaagcctcagtcagccaagtggaggcggacttgaaaatgctcaggactgctgtggacagtttggttgcatactcggtcaaaatagaaaccaacgagaacaatctggaatcagccaagggtttactagatgacctgaggaatgatctggataggttgtttgtgaaagtggagaagattcacgaaaaggtctaaatgaattgcgtgtgcagggcgcggatttaaagtccaatttctcatgaccaaaaaatgtgtggttttttcccatgtgtcccctaccccccaatttcttgtcccctcttaaagagcagttgtcaccacctgaacaccaaggcattgtattttcatgcccagttaacttatttacaatatttaagttctctgcttctgcatttggttggtttcctgaagcgcagcccctgtgaataacaggtggcttttcatggatgtctctagtcagagaaaaatgataaaggcttaaattgaggattaacagaagcagattaacctcagaaatcctgtctggctggcagatttcaagtaaaaaaaaaaaaaaggtgggttggggggacccttttctttctagttgtctttaaggaaaattaattttacttttttttttgttctggccgaaatttttatgagatatctctcacttgtcttccactttgaaccggttaaagctcatagctgtcagctctgaatgaggaggggagaagcccctgggtctttctttgaaaggaatccgctgcttgagggctgcctccctcatggtgtgcgtgtcgtttctcttcctgacgcatcttgtgatatcagaggtaactatgcaaagcatccaggcggttctgaatgtgaagcactacacccagcagagtcccggtgccctctgtccccactgccggcccatgttctctctccggaggtcaccaaggaatgcacaggtttcgactaccagaaaggggagtccttgggttctttcaaaaaattcgtgaggagagctgtctacagtggaatagggggtctccctggggaatgcaggccaagtccttttattttaacatgatgtccatgaagaggtttgccgtctgggcagccctgtcggcaaggagcgtgcatactgcgtttgtgtaattgtttgctgtatctcccttccctctgagctgtattgttctttaatggctgtcttgcccttccaaaaaaaattgaaaaaaaaaaaaaaaaaaaaacccgaaaagtaaaaaaaaaaaaaaaaagttttgtttagtttactgtgaaatgaactgtatggcttatttacagtatttttaattcttaataaacacttgagctttgttatgacttt

SEQ ID NO: 168343 - DNA, 1809 bp, Artificial Sequence
  derived and/or modified sequence
atgccaagtgctaagcagcgcggaagtaaggggggtcatggggcagcttccccttccgagaagggggctcatccatctggaggagctgacgatgtcgcaaaaaagcctccccccgcaccacagcagcctcccccaccgcctgcgcctcaccctcaacagcatccccagcagcaccctcagaaccaggcccacgggaaaggaggacatcgtggaggcggcggggggggcggcaagtcttcatcctcttcatctgcctcggcagctgccgccgccgccgccgcgtctagttccgcttcctgctcccgccggctgggccgagcactaaactttctcttttatctggcccttgtcgccgcagccgcattttctggctggtgcgtgcaccacgttcttgaagaagtgcaacaggtccgacgatctcatcaggacttcagtaggcagagagaggagctgggacagggtcttcagggggtagaacagaaagtgcagagtctccaggccacctttgggacctttgagagcatcctgcgctccagccagcacaagcaggacctcactgaaaaggccgttaagcaaggcgagagtgaagtcagcagaatcagcgaagttctgcaaaagcttcagaacgagatactcaaggacctttcagatgggatccacgtggtgaaagatgcaagagagagggactttacctctctcgagaataccgtggaagaaagactaaccgaactgactaaatccattaatgataacatagccatctttacagaagtgcagaaaaggtcccagaaggagatcaacgatatgaaggcgaaggtcgcatctttagaggaatctgagggcaacaagcaagacctcaaggccctcaaggaggcggtcaaggaaatccaaacctctgctaagtctcgggaatgggacatggaggccctccgttccactttgcaaactatggaatccgatatttataccgaagtgagagagctagtcagcctcaaacaggaacagcaggcgtttaaggaggcggccgacacagaaaggctcgcattacaagccctgactgagaaattgctgagatcagaagaatcggtcagtcgcttgccagaagaaattcggaggctggaggaagaattgcggcagttaaaaagcgactcacatggccctaaagaggacggcggatttcgacattctgaggcatttgaggcccttcaacaaaagtcacagggcctggactcgaggctgcagcacgtagaggacggcgtcctctctatgcaggtagctagcgctcgccagaccgaatctctggaatccctattgagcaaaagccaggagcatgagcagagacttgcggcgctgcaaggtaggctggaaggcctgggaagtagcgaggcggatcaggacggcttagcctcaacagtgcggtccctgggcgaaacacaactggtgttgtatggcgacgtggaagaactgaagcgctcggtcggcgagctgccatctactgtggagtccctccagaaggtgcaggagcaagtccacactctgctgagccaggatcaggcccaggcggcgcggttgcctccccaggatttcctagaccgcctcagtagtttggataatctcaaagctagcgtttcccaggtggaagctgacttgaaaatgctgagaacagccgtggatagcctcgtagcctacagtgtcaaaattgaaaccaatgagaataacctggaaagtgcgaagggattgcttgacgatctcagaaacgacctcgataggctgtttgttaaggtggagaagatccatgaaaaggtgtag

SEQ ID NO: 168344 - DNA, 1809 bp, Artificial Sequence
  derived and/or modified sequence
atgcccagcgccaagcagaggggcagcaagggcggccatggagctgccagccccagcgagaagggggcccaccccagcggcggcgcagatgatgtggccaagaagcccccaccagccccccagcagcccccacctcctccagccccccacccccagcagcacccccagcagcacccccagaaccaggcccacggcaagggcggccacagaggaggcggcggcggcggcggcaagagcagcagcagcagcagcgccagcgctgctgctgctgctgctgctgccagcagcagcgccagctgcagccggcggctgggccgggccctgaacttcctgttctacctggccctggtggccgccgccgccttcagcggctggtgtgtgcaccacgtgctggaggaggtgcagcaggtgcggcgcagccaccaggacttcagccggcagcgggaggagctgggccagggcctgcagggcgtggagcagaaggtgcagagcctgcaggccaccttcggcacctttgagagcatcctgcggagcagccagcacaagcaggacctgacagagaaggctgtgaagcagggcgagagcgaggtgagccgcatcagcgaggtgctgcagaagctgcagaatgagatcctgaaggacctgagtgatggcatccacgtggtgaaggatgcccgggagcgggacttcaccagcctggagaacacagtggaggagcggctgacagagctgaccaagagcatcaatgacaacatcgccatcttcacagaggtgcagaagaggagccagaaggagatcaatgacatgaaggccaaggtggccagcctggaggagagcgagggcaacaagcaggacctgaaggccctgaaggaggccgtgaaggagatccagaccagcgccaagagccgggagtgggacatggaggccctgcggagcaccctgcagaccatggagagtgacatctacacagaggtgcgggagctggtgtccctgaagcaggagcagcaggccttcaaggaggccgctgacacagagcggctggccctgcaggccctgacagagaagctgctgcggtctgaggagagcgtgtcccggctgcctgaggagatccggcggctggaggaggagctgcggcagctgaagagtgacagccacggccccaaggaggatggcggcttccgccacagcgaggcctttgaggccctgcagcagaagagccagggcctggacagccggctgcagcacgtggaggatggagtgctgtccatgcaggtggccagcgcccggcagacagagagcctggagagcctgctgagcaagagccaggagcacgagcagaggctggccgccctgcagggccgcctggagggcctgggcagcagcgaggccgaccaggacggcctggccagcacagtgcgcagcctgggggagacccagctggtgctgtatggagatgtggaggagctgaagaggtctgtgggggagctgcccagcacagtggagagcctgcagaaggtgcaggagcaggtgcacaccctgctgagccaggaccaggcccaggccgcccggctgcccccccaggacttcctggaccggctgagcagcctggacaacctgaaggcctctgtgtcccaggtggaggccgacctgaagatgctgaggacagctgtggacagcctggtggcctacagcgtgaagattgagaccaatgaaaacaacctggagagcgccaagggcctgctggatgacctgagaaatgacctggaccggctgtttgtgaaggtggagaagatccacgagaaggtgtag

SEQ ID NO: 168345 - DNA, 1809 bp, Artificial Sequence
  derived and/or modified sequence
atgcccagcgccaagcagcggggcagcaagggcggccacggcgccgctagcccttctgaaaaaggcgctcacccgtctggtggtgcagacgatgttgctaagaagccacccccagccccacagcagccaccacctccgcccgctccacatccacagcagcatccacaacagcatccacaaaatcaggctcacggcaaaggcgggcatcgcggaggggggggaggagggggcaagtctagctcgtctagctcagcttctgcggctgcagctgctgcagccgctagctcgagtgcaagttgttctcgaaggctcggccgggcactgaattttctcttctacctcgccttagtggccgccgctgccttctccggatggtgtgtgcaccatgtcttggaggaggtgcaacaggtgcgacggtcccatcaagatttctccagacagcgcgaggagctgggccagggccttcaaggcgttgagcagaaggttcagtctcttcaagccaccttcggcacatttgagtccattctgagaagctcccagcacaagcaggatctgacggagaaggctgtaaagcagggggagtccgaagtgtctcggatatctgaggtgttgcagaagttgcagaacgagatcctgaaggacctgtcagacgggattcatgttgtcaaggatgcccgagagcgcgacttcacttcattggaaaatactgtagaggagagactaactgagctgacaaagtctattaacgacaacattgctattttcacagaggtgcagaagaggtcacagaaagagattaacgatatgaaggccaaggtggctagcttagaagaaagcgagggtaacaagcaagatttaaaagcgcttaaggaggctgtgaaggagattcaaacatccgctaagtctagagaatgggatatggaggctctccgctcaacactgcagacaatggagtctgacatctacacagaggtgcgcgaactcgtcagtttgaaacaggaacagcaggcttttaaagaagcagccgacaccgagcggttggctctgcaggcccttactgagaaactacttcggtcggaagaaagcgtttcgcggctgccagaagaaattcgccggcttgaagaggagctgcgacaactcaagtcagatagccacggtccaaaagaggatggcggttttcggcatagcgaggccttcgaagctctgcagcaaaagagccagggactcgattctcgtctgcagcatgttgaggatggggtcctctccatgcaggtggcctcggcaaggcagactgagtctttggagtcgcttctgtccaaatcccaagaacacgagcagcgattggccgctctccagggccggttggaaggcctaggctcatcagaggcagatcaggatggtctggcctccactgtccggagtttaggcgagacccagctggtgctgtacggggatgtggaggagttaaagagaagcgtgggagaattgccaagtaccgtcgagagtctacagaaggtgcaagagcaggtgcacactttgctgagccaggatcaagcccaggcagctaggctgcctccgcaagatttcctggatcggctgagctctctggataacttgaaagccagcgtaagccaggtcgaagccgatctgaaaatgctgcggacagccgtcgacagcctcgtcgcctacagtgttaagatagaaaccaacgagaataatctggaatccgccaagggactccttgatgacctccgcaatgatctggacagattgttcgtgaaggttgagaaaatccacgagaaggtgtag

SEQ ID NO: 168346 - DNA, 1809 bp, Artificial Sequence
  derived and/or modified sequence
atgccgagtgctaagcagagaggttcgaaaggcggacatggagcggcatctccatctgagaagggggctcacccatcaggtggtgccgatgacgtggctaagaaaccaccccctgcccctcagcagcctcccccaccccctgcccctcacccgcaacagcaccctcagcagcaccctcagaatcaggctcatggaaaagggggacatcgtggaggcggtggcggagggggaaaaagctctagctcctctagtgcctccgcggctgccgctgctgctgctgcgtcttctagcgcgagttgtagcagacgacttgggcgagctcttaattttctgttttacctcgccctggtcgcagccgctgccttctctggctggtgcgtgcaccatgtgttagaggaggttcagcaagttagacgctctcaccaggatttcagccggcagcgcgaggaactcgggcaaggacttcaaggcgtggagcagaaagtccaatcactgcaggccacttttggaactttcgagagtattttgcgaagctcccagcacaagcaagatctcaccgaaaaggctgtgaaacaaggtgaatccgaagtgtctcggatttctgaagtgctccaaaagttacagaacgagatcttgaaggatctcagtgacggaatccatgtggtgaaagatgccagagagagagatttcacaagccttgaaaatacagtcgaggagcgactcacggagctcacaaagtcaattaatgataatattgcgatattcaccgaagtccaaaaaaggtcacaaaaagagatcaacgatatgaaggccaaagtcgcatccctcgaagaatcggagggcaacaaacaagatctcaaggcacttaaggaagctgtgaaagaaatccagacaagtgccaaatcccgagaatgggacatggaagcacttcggtctaccttgcaaacgatggagagtgacatctacacagaggtacgggaactggtgtcgctgaaacaggaacagcaggcattcaaggaggctgccgacacagaacggcttgccctgcaagctctcacggagaagctgctgaggagcgaagagagtgtgtcgcggcttcctgaagagattagacgcctagaggaagagctgaggcagttgaagtcagacagccacggtcctaaggaggacgggggtttcagacatagcgaagcatttgaagccctgcagcagaagtcccagggactggacagccgtttgcagcacgtggaagacggcgtcctgtctatgcaggtggcctctgctcggcagactgagtcactggagagcttactttcaaaatcacaagaacacgaacagcgactggctgctctgcagggaaggctagaaggactgggttcatcagaagcggaccaagatgggctggcctctactgtgcgcagcctgggcgaaacccagctcgttctgtatggcgacgtagaagaactgaaacgatccgtgggggaactgccatctacagtggaatcattgcagaaagtgcaggagcaggtgcataccttactgtcacaggaccaagctcaggccgctcggctccccccacaggacttcctcgatagactgtcttcactcgacaatttaaaagcaagcgtcagtcaggtggaggccgatctgaaaatgttacggaccgcagtggactcccttgttgcctattctgtgaaaatcgagacgaatgagaacaatctcgagagcgcaaaggggctcttagacgacctccggaatgatctcgatcggttgtttgtgaaagtcgagaagatccatgaaaaggtgtag

SEQ ID NO: 168347 - protein, 245 aa, Artificial Sequence
  derived and/or modified sequence
MEKTELIQKAKLAEQAERYDDMATCMKAVTEQGAELSNEERNLLSVAYKNVVGGRRSAWRVISSIEQKTDTSDKKLQLIKDYREKVESELRSICTTVLELLDKYLIANATNPESKVFYLKMKGDYFRYLAEVACGDDRKQTIDNSQGAYQEAFDISKKEMQPTHPIRLGLALNFSVFYYEILNNPELACTLAKTAFDEAIAELDTLNEDSYKDSTLIMQLLRDNLTLWTSDSAGEECDAAEGAEN

SEQ ID NO: 168348 - protein, 149 aa, Artificial Sequence
  derived and/or modified sequence
MEKTELIQKAKLAEQAERYDDMATCMKAVTEQGAELSNEERNLLSVAYKNVVGGRRSAWRVISSIEQKTDTSDKKLQLIKDYREKVESELRSICTTVLELLDKYLIANATNPESKVFYLKMKGDYFRYLAEVACGDDRKQTIDNSQGAY

SEQ ID NO: 168349 - protein, 210 aa, Artificial Sequence [sequence omitted]

SEQ ID NO: 168350 - DNA, 450 bp, Artificial Sequence
  derived and/or modified sequence
atggagaagaccgagctgatccagaaggccaagctggccgagcaggccgagagatacgacgacatggccacctgcatgaaggccgtgaccgagcagggcgccgagctgagcaacgaggagagaaacctgctgagcgtggcctacaagaacgtggtgggcggcagaagaagcgcctggagagtgatcagcagcatcgagcagaagaccgacaccagcgacaagaagctgcagctgatcaaggactacagagagaaggtggagagcgagctgagaagcatctgcaccaccgtgctggagctgctggacaagtacctgatcgccaacgccaccaaccccgagagcaaggtgttctacctgaagatgaagggcgactacttcagatacctggccgaggtggcctgcggcgacgacagaaagcagaccatcgacaacagccagggcgcctactag

SEQ ID NO: 168351 - DNA, 633 bp, Artificial Sequence
  derived and/or modified sequence
atggagaagaccgagctgatccagaaggccgtggcctacaagaacgtggtgggcggcagaagaagcgcctggagagtgatcagcagcatcgagcagaagaccgacaccagcgacaagaagctgcagctgatcaaggactacagagagaaggtggagagcgagctgagaagcatctgcaccaccgtgctggagctgctggacaagtacctgatcgccaacgccaccaaccccgagagcaaggtgttctacctgaagatgaagggcgactacttcagatacctggccgaggtggcctgcggcgacgacagaaagcagaccatcgacaacagccagggcgcctaccaggaggccttcgacatcagcaagaaggagatgcagcccacccaccccatcagactgggcctggccctgaacttcagcgtgttctactacgagatcctgaacaaccccgagctggcctgcaccctggccaagaccgccttcgacgaggccatcgccgagctggacaccctgaacgaggacagctacaaggacagcaccctgatcatgcagctgctgagagacaacctgaccctgtggaccagcgacagcgccggcgaggagtgcgacgccgccgagggcgccgagaactag

SEQ ID NO: 168352 - DNA, 738 bp, Artificial Sequence
  derived and/or modified sequence
atggagaagacagaactcatccagaaggcgaaactcgctgagcaagcggagcggtacgatgacatggccacgtgtatgaaagccgttaccgaacagggagctgaactgtctaacgaagagagaaatctgctctctgttgcctacaagaatgtggttggaggccgccgcagcgcatggcgggttatttcttcgatagagcagaagacggacacttcagataagaagctccaactgattaaagattaccgggaaaaggtggaatctgagcttcggagcatatgcaccactgtgttggaactcttggataagtacctgatcgcaaacgccacgaatcccgaatctaaggtgttctacttgaagatgaaaggagactatttccgctaccttgcggaagtggcatgcggcgacgatcgcaagcagaccatcgataactcgcagggcgcttaccaggaggcgttcgatattagcaaaaaggagatgcaacctacgcacccgattaggttagggctggcacttaatttctccgtcttttactacgagatacttaataacccagagctggcttgtacgcttgccaaaaccgccttcgatgaggctatagccgaacttgacactctgaacgaagattcctacaaagattctacactgattatgcagctccttagggacaacctgaccctttggacaagcgacagcgccggcgaggaatgtgacgccgcagaaggcgccgaaaactag

SEQ ID NO: 168353 - DNA, 738 bp, Artificial Sequence
  derived and/or modified sequence
atggagaagacagaattaatccagaaggctaagcttgccgagcaggccgagcgttacgacgacatggctacatgtatgaaagcagtgactgaacaaggcgctgagctgtcaaatgaagagcgcaatttgttgtctgttgcttataaaaatgtggtgggaggtcgccggtcagcatggagagttatttcctcgattgaacagaagaccgacaccagcgacaaaaagttgcaactgatcaaagactacagagagaaagtggaatcagaattaagatcgatttgcacaacggtgctggaactactggacaagtatcttattgccaacgccaccaacccagaaagtaaggtattctacttaaagatgaaaggcgactacttccgttacttggccgaagttgcctgtggcgacgacagaaagcagaccatcgataatagccagggcgcgtaccaggaagcgtttgatataagtaaaaaggagatgcaaccgacccaccccattagacttggtttggccttgaattttagtgtgttttattacgagatcctgaacaaccctgagctcgcgtgcaccttggctaagacggcctttgatgaggcgattgcggagctcgataccctcaacgaagacagctataaagactcaactctcatcatgcagctcctacgcgacaacctcaccttatggacatcggacagcgccggtgaggagtgtgatgcagccgaaggagccgaaaactag

SEQ ID NO: 168354 - DNA, 450 bp, Artificial Sequence
  derived and/or modified sequence
atggaaaagacggagctgatccagaaagcaaagctggctgagcaggccgagcgatacgatgatatggccacatgtatgaaggccgtcacagagcaaggtgcagagcttagtaatgaggaaagaaacctactgtcggtcgcatacaagaatgtggtgggcgggcggcgttccgcgtggagggttattagttcgatcgagcagaaaaccgacacgtctgataaaaaactccaactcattaaggattatcgggagaaagttgagtctgagctgcgtagcatatgcaccactgtgctggaactcctggataaatacctaatcgcaaatgccacaaaccccgaatccaaggtgttttatttgaagatgaaaggagactatttccggtatctggccgaagtcgcctgtggcgacgaccgtaaacagactatcgacaattctcagggagcctattag

SEQ ID NO: 168355 - DNA, 633 bp, Artificial Sequence
  derived and/or modified sequence
atggagaaaacggagctgattcagaaggcagtggcctacaaaaatgtcgtgggaggtagacggtccgcatggcgagtaatttctagcatcgagcagaaaacagatacctcagataagaagttacagttgatcaaagactacagggagaaagttgagtctgagctgcggtccatctgcaccactgtcctcgaattgctagacaagtatctcatcgcaaacgctacaaaccccgagagtaaggtattctaccttaaaatgaagggagactattttaggtaccttgccgaggtggcttgcggggatgaccgtaaacaaacaatcgataattcacagggagcttatcaggaggcattcgatatctcgaaaaaggaaatgcagccgacacaccccattcgcttgggactggccttgaactttagcgtgttctactacgagatcctgaataatcccgagctggcatgcacactggctaaaacggcctttgatgaggccatcgccgagctcgacaccctcaacgaagatagttacaaagacagcactctgatcatgcaactgctccgagataacctcacgctctggacatccgacagtgcaggggaggagtgtgacgctgcagagggcgcagagaattag

SEQ ID NO: 168356 - DNA, 738 bp, Artificial Sequence
  derived and/or modified sequence
atggagaagacagagctgatccagaaggccaagctggccgagcaggccgagagatatgatgacatggccacctgcatgaaggctgtgacagagcagggcgctgagctgagcaatgaggagaggaacctgctgtctgtggcctacaagaatgtggtgggcggcagaagaagtgcctggagggtcatcagcagcattgagcagaagacagacaccagtgacaagaagctgcagctgatcaaggactaccgggagaaggtggagagcgagctgcggagcatctgcaccaccgtgctggagctgctggacaagtacctgattgccaatgccaccaaccctgagagcaaggtgttctacctgaagatgaagggggactacttccgctacctggccgaggtggcctgtggagatgacaggaagcagaccatcgacaacagccagggcgcctaccaggaggcctttgacatcagcaagaaggagatgcagcccacccaccccatccggctgggcctggccctgaacttctctgtgttctactatgagatcctgaacaaccctgagctggcctgcaccctggccaagacagcctttgatgaggccatcgccgagctggacaccctgaatgaagacagctacaaggacagcaccctcatcatgcagctgctgcgggacaacctgaccctgtggaccagtgacagcgctggggaggagtgtgatgctgctgagggcgctgagaactag

SEQ ID NO: 168357 - DNA, 2216 bp, Artificial Sequence
  derived and/or modified sequence
aaaagcgggcggcgggccgcattgtctgacggcgctccctctctgctttttgttctcgcctcgccgccccgcccctccgcagctctcgaggctcctcccgctgcgggtcggcgctcgccctcgctctcctcgccctccgccccggccccggccccgcgcccgccatggagaagactgagctgatccagaaggccaagctggccgagcaggccgagcgctacgacgacatggccacctgcatgaaggcagtgaccgagcagggcgccgagctgtccaacgaggagcgcaacctgctctccgtggcctacaagaacgtggtcgggggccgcaggtccgcctggagggtcatctctagcatcgagcagaagaccgacacctccgacaagaagttgcagctgattaaggactatcgggagaaagtggagtccgagctgagatccatctgcaccacggtgctggaattgttggataaatatttaatagccaatgcaactaatccagagagtaaggtcttctatctgaaaatgaagggtgattacttccggtaccttgctgaagttgcgtgtggtgatgatcgaaaacaaacgatagataattcccaaggagcttaccaagaggcatttgatataagcaagaaagagatgcaacccacacacccaatccgcctggggcttgctcttaacttttctgtattttactatgagattcttaataacccagagcttgcctgcacgctggctaaaacggcttttgatgaggccattgctgaacttgatacactgaatgaagactcatacaaagacagcaccctcatcatgcagttgcttagagacaacctaacactttggacatcagacagtgcaggagaagaatgtgatgcggcagaaggggctgaaaactaaatccatacagggtgtcatccttctttccttcaagaaacctttttacacatctccattccttattccacttggatttcctatagcaaagaaacccattcatgtgtatggaatcaactgtttatagtcttttcacactgcagctttgggaaaacttcattccttgatttgtgtttgtcttggccttcctggtgtgcagtactgctgtagaaaagtattaatagcttcatttcatataaacataagtaactcccaaacacttatgtagaggactaaaaatgtatctggtatttaagtaatctgaaccagttctgcaagtgactgtgttttgtattactgtgaaaataagaaaatgtagttaattacaatttaaagagtattccacataacttcttaatttctacattccctcccttactcttcgggggtttcctttcagtaagcaacttttccatgctcttaatgtattcctttttagtaggaatccggaagtattagattgaatggaaaagcacttgccatctctgtctaggggtcacaaattgaaatggctcctgtatcacatacggaggtcttgtgtatctgtggcaacagggagtttccttattcactctttatttgctgctgtttaagttgccaacctcccctcccaataaaaattcacttacacctcctgcctttgtagttctggtattcactttactatgtgatagaagtagcatgttgctgccagaatacaagcattgcttttggcaaattaaagtgcatgtcatttcttaatacactagaaaggggaaataaattaaagtacacaagtccaagtctaaaactttagtacttttccatgcagatttgtgcacatgtgagagggtgtccagtttgtctagtgattgttatttagagagttggaccactattgtgtgttgctaatcattgactgtagtcccaaaaaagccttgtgaaaatgttatgccctatgtaacagcagagtaacataaaataaaagtacattttataaaccatttactatggctttgtaacaattgcatacccatattttaagggacaggtgaatttactactttctaaagtttattgatacttcccttttatgtaaaatgtagtagtgatacctatatttccacattgtgcattgtgacacacttgtctagggatgcctggaagtgtataaaattggactgcatttcttagagtgttttactatagatcagtctcatgggccatctcttcctcagatgtaaatgatatctggttaagtgttatatggaataaagtggacattttaaaactagcaaa

SEQ ID NO: 168358 - DNA, 450 bp, Artificial Sequence
  derived and/or modified sequence
atggagaagacagagctgatccagaaggccaagctggccgagcaggccgagagatatgatgacatggccacctgcatgaaggctgtgacagagcagggcgctgagctgagcaatgaggagaggaacctgctgtctgtggcctacaagaatgtggtgggcggcagaagaagtgcctggagggtcatcagcagcattgagcagaagacagacaccagtgacaagaagctgcagctgatcaaggactaccgggagaaggtggagagcgagctgcggagcatctgcaccaccgtgctggagctgctggacaagtacctgattgccaatgccaccaaccctgagagcaaggtgttctacctgaagatgaagggggactacttccgctacctggccgaggtggcctgtggagatgacaggaagcagaccatcgacaacagccagggcgcctactag

SEQ ID NO: 168359 - DNA, 633 bp, Artificial Sequence
  derived and/or modified sequence
atggagaagacagagctgatccagaaggctgtggcctacaagaatgtggtgggcggccgccgcagcgcctggagggtcatcagcagcattgagcagaagacagacaccagtgacaagaagctgcagctgatcaaggactaccgggagaaggtggagagcgagctgcggagcatctgcaccaccgtgctggagctgctggacaagtacctgattgccaatgccaccaaccctgagagcaaggtgttctacctgaagatgaagggggactacttccgctacctggccgaggtggcctgtggagatgacaggaagcagaccatcgacaacagccagggcgcctaccaggaggcctttgacatcagcaagaaggagatgcagcccacccaccccatccggctgggcctggccctgaacttcagcgtcttctactatgagatcctgaacaaccctgagctggcctgcaccctggccaagacagcctttgatgaggccatcgccgagctggacaccctgaatgaagattcctacaaggacagcaccctcatcatgcagctgctgcgggacaacctgaccctgtggaccagtgacagcgctggggaggagtgtgatgctgctgagggcgcagaaaattag

SEQ ID NO: 168360 - DNA, 738 bp, Artificial Sequence
  derived and/or modified sequence
atggagaagaccgagctgatccagaaggccaagctggccgagcaggccgagagatacgatgatatggccacctgtatgaaggccgtgactgagcagggagcagaactaagcaacgaagagaggaatctcctgagcgtcgcctacaagaatgtggtggggggccgccgatcagcttggcgggtgatttcttcgattgaacaaaagaccgacactagcgacaagaaactccagctgattaaggactaccgcgagaaagtggagagcgaacttcgtagtatctgcacgacggtgctggagctcctggacaagtacttgattgctaacgctaccaacccagagtccaaagtgttctatctaaagatgaaaggagactactttaggtacctcgctgaggttgcatgcggggatgatcggaaacagactattgacaactctcagggggcgtatcaggaagcgttcgatatcagcaaaaaagaaatgcagcccacccatcctattcgcctgggtctcgctctcaatttttccgtgttttactacgagatcttgaacaatcccgaattggcctgcacactggctaagaccgccttcgatgaagcgatcgcagagctggataccctcaacgaagattcctataaagactcaactctgattatgcagctgctgagggataaccttacattgtggacctcagacagcgctggggaggaatgcgatgctgctgagggtgctgagaattag

SEQ ID NO: 168361 - DNA, 738 bp, Artificial Sequence
  derived and/or modified sequence
atggagaagaccgagctgatccagaaggccaagctggccgagcaggcggagagatacgacgatatggcaacttgcatgaaagcggttacagagcagggagctgagctaagcaatgaagagagaaacctgctgtctgttgcttataagaatgtcgtgggaggtcgccgcagcgcctggcgtgtgatttctagcatcgaacaaaagaccgatacctccgacaagaaattacagctaataaaagactaccgcgagaaggtcgaatcagaactgcgctccatctgtaccaccgttctagaacttctggataagtatcttatcgccaatgcaacgaacccggaatctaaggtgttctatcttaagatgaaaggggactacttccggtatttagcagaggtggcctgcggcgatgacagaaaacagaccattgataactctcaaggcgcctaccaggaggctttcgacatcagtaagaaggagatgcaaccgacacaccccattagattgggacttgcgctcaatttctcagtgttttactatgagatcctgaacaacccggagctcgcctgcactctggccaaaaccgcttttgatgaagccattgccgagctggacacgctaaacgaagacagttataaggatagcacattaatcatgcagctgctgagggataacttgactctgtggactagcgatagtgccggggaagaatgcgatgcagcggaaggcgctgagaactag

SEQ ID NO: 168362 - DNA, 2208 bp, Artificial Sequence
  derived and/or modified sequence
cgggagggtcctcagctaaagccaaaagcagatcaaagtggtgggactcgcgtcgcggccgcggagacgtgaagctctcgaggctcctcccgctgcgggtcggcgctcgccctcgctctcctcgccctccgccccggccccggccccgcgcccgccatggagaagactgagctgatccagaaggccaagctggccgagcaggccgagcgctacgacgacatggccacctgcatgaaggcagtgaccgagcagggcgccgagctgtccaacgaggagcgcaacctgctctccgtggcctacaagaacgtggtcgggggccgcaggtccgcctggagggtcatctctagcatcgagcagaagaccgacacctccgacaagaagttgcagctgattaaggactatcgggagaaagtggagtccgagctgagatccatctgcaccacggtgctggaattgttggataaatatttaatagccaatgcaactaatccagagagtaaggtcttctatctgaaaatgaagggtgattacttccggtaccttgctgaagttgcgtgtggtgatgatcgaaaacaaacgatagataattcccaaggagcttaccaagaggcatttgatataagcaagaaagagatgcaacccacacacccaatccgcctggggcttgctcttaacttttctgtattttactatgagattcttaataacccagagcttgcctgcacgctggctaaaacggcttttgatgaggccattgctgaacttgatacactgaatgaagactcatacaaagacagcaccctcatcatgcagttgcttagagacaacctaacactttggacatcagacagtgcaggagaagaatgtgatgcggcagaaggggctgaaaactaaatccatacagggtgtcatccttctttccttcaagaaacctttttacacatctccattccttattccacttggatttcctatagcaaagaaacccattcatgtgtatggaatcaactgtttatagtcttttcacactgcagctttgggaaaacttcattccttgatttgtgtttgtcttggccttcctggtgtgcagtactgctgtagaaaagtattaatagcttcatttcatataaacataagtaactcccaaacacttatgtagaggactaaaaatgtatctggtatttaagtaatctgaaccagttctgcaagtgactgtgttttgtattactgtgaaaataagaaaatgtagttaattacaatttaaagagtattccacataacttcttaatttctacattccctcccttactcttcgggggtttcctttcagtaagcaacttttccatgctcttaatgtattcctttttagtaggaatccggaagtattagattgaatggaaaagcacttgccatctctgtctaggggtcacaaattgaaatggctcctgtatcacatacggaggtcttgtgtatctgtggcaacagggagtttccttattcactctttatttgctgctgtttaagttgccaacctcccctcccaataaaaattcacttacacctcctgcctttgtagttctggtattcactttactatgtgatagaagtagcatgttgctgccagaatacaagcattgcttttggcaaattaaagtgcatgtcatttcttaatacactagaaaggggaaataaattaaagtacacaagtccaagtctaaaactttagtacttttccatgcagatttgtgcacatgtgagagggtgtccagtttgtctagtgattgttatttagagagttggaccactattgtgtgttgctaatcattgactgtagtcccaaaaaagccttgtgaaaatgttatgccctatgtaacagcagagtaacataaaataaaagtacattttataaaccatttactatggctttgtaacaattgcatacccatattttaagggacaggtgaatttactactttctaaagtttattgatacttcccttttatgtaaaatgtagtagtgatacctatatttccacattgtgcattgtgacacacttgtctagggatgcctggaagtgtataaaattggactgcatttcttagagtgttttactatagatcagtctcatgggccatctcttcctcagatgtaaatgatatctggttaagtgttatatggaataaagtggacattttaaaactagcaaa

SEQ ID NO: 168363 - DNA, 450 bp, Artificial Sequence
  derived and/or modified sequence
atggagaagaccgagctgatccagaaggccaagctggccgagcaggctgaacgctatgatgacatggccacgtgtatgaaagccgtaaccgagcagggagcagagctgtctaatgaggagaggaacttgctgagtgtagcatacaaaaacgtagtgggtggccgacgttccgcttggcgggtaattagttccatagaacagaaaacagatacttcagacaagaagctgcagctcatcaaggattaccgcgagaaagttgagtcagagctgcggtccatttgtactacagtcctcgaactgctggataaatacctgatcgccaatgcgaccaaccccgagtccaaggtcttctatctgaagatgaagggagattacttcaggtacctggccgaggttgcctgtggggatgacagaaaacagaccattgataattctcagggcgcctactag

SEQ ID NO: 168364 - DNA, 633 bp, Artificial Sequence
  derived and/or modified sequence
atggagaagaccgagctgatccagaaggccgtggcctacaagaacgtggttggtggtagacggtctgcctggcgcgtaatatcctcgatagagcagaagactgatactagcgacaaaaagttacaacttatcaaggattatagagaaaaagttgagagcgagctgaggagtatttgcactactgtcctcgagttgctagacaaatatttaatcgctaatgccactaacccagagtcgaaagtgttctatcttaaaatgaagggagattactttcgttacctggctgaggtggcctgcggtgacgataggaagcagactatcgataattcccaaggggcttaccaggaagccttcgacatatcaaagaaggaaatgcagccaacacatccgatccgactgggcctcgccctgaacttttctgtgttctattacgaaatcttgaataatccagagctggcatgcactctggctaaaacggcctttgatgaggccattgcagaactggacactctaaatgaggatagctataaagactctaccctgatcatgcaactgctacgagataacctgacgctctggaccagtgattccgcgggcgaagagtgtgacgcggcagaaggagcggagaactag

SEQ ID NO: 168365 - DNA, 738 bp, Artificial Sequence
  derived and/or modified sequence
atggaaaaaacagagctgatccaaaaggctaaactggctgagcaggcagagcgttacgatgacatggcgacttgcatgaaagctgtgacagagcagggcgcagagctgtcgaacgaagaaaggaacctgctgtctgtcgcgtacaagaacgtggtgggcggtcgccgaagcgcatggcgtgtgatatcttctattgagcaaaagactgacaccagtgacaagaaactgcagctgatcaaggattacagggaaaaagttgagtccgaattgaggagcatttgcaccacagtactggaacttctggacaaatatctgatcgcaaatgctactaatcccgagtccaaagtgttctacctgaaaatgaagggggattatttcagatatttggcagaagtcgcctgtggagacgaccgcaaacagacgatagacaactcccagggcgcataccaagaagccttcgatatctctaagaaagagatgcagcctacacatcctatacgcctgggccttgccctgaatttctccgtgttttattatgagattttaaacaaccccgaactggcttgcactctggccaaaaccgctttcgacgaggctatagccgagctggatacactcaacgaggattcctacaaagacagcacgctgatcatgcagctgcttagagacaatctgacattgtggacttccgattctgcaggagaagaatgtgatgctgccgaaggcgctgaaaattag

SEQ ID NO: 168366 - DNA, 738 bp, Artificial Sequence
  derived and/or modified sequence
atggagaagacggagcttatccagaaggccaaactcgccgagcaggcagaaaggtacgatgatatggcaacatgtatgaaagcagttactgaacagggcgctgagctgagcaatgaagagaggaaccttctgagtgtcgcgtacaaaaatgtggtggggggacgtcggtccgcttggagggtcatttcatcaatcgaacaaaagaccgacacgtcagacaaaaaactccagctcatcaaagactatagggagaaagtcgagtctgaattgcgttccatttgcacaacagtgctggagctcctggacaagtacttgatcgctaacgccacgaatcctgaatccaaggtcttttacctcaagatgaaaggggattacttccggtacttggccgaagttgcatgtggcgacgatagaaagcaaacaatagacaatagtcagggggcttatcaggaagctttcgacataagcaaaaaagagatgcagcctacccaccccattcggctcggattggccctgaatttttctgtgttctactatgagatactcaataacccagaattagcttgcacgctggccaaaacggcctttgatgaagccatcgccgagctggacaccctaaatgaagatagctacaaagactctactcttattatgcaacttcttagggacaatttaacactctggacctctgatagcgcgggagaggagtgcgatgccgctgaaggggcagagaattag

SEQ ID NO: 168367 - DNA, 450 bp, Artificial Sequence
  derived and/or modified sequence
atggaaaagaccgagcttatccaaaaggccaagttagctgagcaggctgaaagatacgatgatatggccacatgtatgaaggccgttacagagcagggggctgaactaagcaacgaagaaaggaacctcctgtcggttgcttataaaaacgtggtgggcggtaggcgttccgcatggcgtgttatctcatccatcgagcaaaagacggacacttctgacaagaagctgcagctgatcaaagattacagagagaaggttgaatccgaactaaggtcaatctgtactacggttcttgagctgctcgataaatatctgatcgccaacgccaccaaccccgagtccaaagttttctatcttaagatgaaaggagattacttcagatatctcgccgaggtggcctgcggagatgatcgtaagcagacaatcgacaacagccagggagcttattag

SEQ ID NO: 168368 - DNA, 633 bp, Artificial Sequence
  derived and/or modified sequence
atggaaaagaccgaactgatccaaaaagccgtagcttacaagaatgtggtgggcggacggagatccgcatggagagtaatctcatcaatcgagcagaagaccgacacgtccgacaaaaaactccagcttattaaggactatcgggagaaggtcgagtctgagttgcggtctatttgcacgactgttctagagttgctcgacaagtaccttatcgcaaatgcaaccaatcccgagtccaaggttttttacctgaaaatgaagggcgattactttagatatctcgctgaagtcgcatgcggcgatgaccgtaaacagaccatcgataacagccagggagcctatcaggaagccttcgacatcagcaagaaggagatgcagccgacccaccccattaggctcggattggcactgaatttctcagtcttttattacgagattctgaataatcccgagctggcgtgtaccttggcgaagactgctttcgacgaagctattgccgaactagacacactgaatgaggactcttacaaagattctacattgatcatgcaactgctgcgcgataacttgacattatggaccagcgatagcgccggtgaggaatgcgatgccgcagaaggagccgaaaattag

SEQ ID NO: 168369 - DNA, 665 bp, Artificial Sequence
  derived and/or modified sequence
gtgaaggtgagcgcctgggtcggcccgcgggcttcctccggccgcgctcggattgagggccgggcggaggtgccgcccttgagagcagccggttgtcgatgccgctcccctcagggacggctccgggcgggaagctctcgaggctcctcccgctgcgggtcggcgctcgccctcgctctcctcgccctccgccccggccccggccccgcgcccgccatggagaagactgagctgatccagaaggccaagctggccgagcaggccgagcgctacgacgacatggccacctgcatgaaggcagtgaccgagcagggcgccgagctgtccaacgaggagcgcaacctgctctccgtggcctacaagaacgtggtcgggggccgcaggtccgcctggagggtcatctctagcatcgagcagaagaccgacacctccgacaagaagttgcagctgattaaggactatcgggagaaagtggagtccgagctgagatccatctgcaccacggtgctggaattgttggataaatatttaatagccaatgcaactaatccagagagtaaggtcttctatctgaaaatgaagggtgattacttccggtaccttgctgaagttgcgtgtggtgatgatcgaaaacaaacgatagataattcccaaggagcttacca

SEQ ID NO: 168370 - DNA, 1651 bp, Artificial Sequence
  derived and/or modified sequence
atggagaagactgagctgatccagaaggccgtggcctacaagaacgtggtcgggggccgcaggtccgcctggagggtcatctctagcatcgagcagaagaccgacacctccgacaagaagttgcagctgattaaggactatcgggagaaagtggagtccgagctgagatccatctgcaccacggtgctggaattgttggataaatatttaatagccaatgcaactaatccagagagtaaggtcttctatctgaaaatgaagggtgattacttccggtaccttgctgaagttgcgtgtggtgatgatcgaaaacaaacgatagataattcccaaggagcttaccaagaggcatttgatataagcaagaaagagatgcaacccacacacccaatccgcctggggcttgctcttaacttttctgtattttactatgagattcttaataacccagagcttgcctgcacgctggctaaaacggcttttgatgaggccattgctgaacttgatacactgaatgaagactcatacaaagacagcaccctcatcatgcagttgcttagagacaacctaacactttggacatcagacagtgcaggagaagaatgtgatgcggcagaaggggctgaaaactaaatccatacagggtgtcatccttctttccttcaagaaacctttttacacatctccattccttattccacttggatttcctatagcaaagaaacccattcatgtgtatggaatcaactgtttatagtcttttcacactgcagctttgggaaaacttcattccttgatttgtgtttgtcttggccttcctggtgtgcagtactgctgtagaaaagtattaatagcttcatttcatataaacataagtaactcccaaacacttatgtagaggactaaaaatgtatctggtatttaagtaatctgaaccagttctgcaagtgactgtgttttgtattactgtgaaaataagaaaatgtagttaattacaatttaaagagtattccacataacttcttaatttctacattccctcccttactcttcgggggtttcctttcagtaagcaacttttccatgctcttaatgtattcctttttagtaggaatccggaagtattagattgaatggaaaagcacttgccatctctgtctaggggtcacaaattgaaatggctcctgtatcacatacggaggtcttgtgtatctgtggcaacagggagtttccttattcactctttatttgctgctgtttaagttgccaacctcccctcccaataaaaattcacttacacctcctgcctttgtagttctggtattcactttactatgtgatagaagtagcatgttgctgccagaatacaagcattgcttttggcaaattaaagtgcatgtcatttcttaatacactagaaaggggaaataaattaaagtacacaagtccaagtctaaaactttagtacttttccatgcagatttgtgcacatgtgagagggtgtccagtttgtctagtgattgttatttagagagttggaccactattgtgtgttgctaatcattgactgtagtcccaaaaaagccttgtgaaaatgttatgccctatgtaacagcagagtaacataaaataaaagtacattttataaacc

SEQ ID NO: 168371 - DNA, 738 bp, Artificial Sequence
  derived and/or modified sequence
atggagaagaccgagctgatccagaaggccaagctggccgagcaggccgagagatacgacgacatggccacctgcatgaaggccgtgaccgagcagggcgccgagctgagcaacgaggagagaaacctgctgagcgtggcctacaagaacgtggtgggcggcagaagaagcgcctggagagtgatcagcagcatcgagcagaagaccgacaccagcgacaagaagctgcagctgatcaaggactacagagagaaggtggagagcgagctgagaagcatctgcaccaccgtgctggagctgctggacaagtacctgatcgccaacgccaccaaccccgagagcaaggtgttctacctgaagatgaagggcgactacttcagatacctggccgaggtggcctgcggcgacgacagaaagcagaccatcgacaacagccagggcgcctaccaggaggccttcgacatcagcaagaaggagatgcagcccacccaccccatcagactgggcctggccctgaacttcagcgtgttctactacgagatcctgaacaaccccgagctggcctgcaccctggccaagaccgccttcgacgaggccatcgccgagctggacaccctgaacgaggacagctacaaggacagcaccctgatcatgcagctgctgagagacaacctgaccctgtggaccagcgacagcgccggcgaggagtgcgacgccgccgagggcgccgagaactag

SEQ ID NO: 168372 - protein, 219 aa, Artificial Sequence
  derived and/or modified sequence
MSGLSGPPARRGPFPLALLLLFLLGPRLVLAISFHLPINSRKCLREEIHKDLLVTGAYEISDQSGGAGGLRSHLKITDSAGHILYSKEDATKGKFAFTTEDYDMFEVCFESKGTGRIPDQLVILDMKHGVEAKNYEEIAKVEKLKPLEVELRRLEDLSESIVNDFAYMKKREEEMRDTNESTNTRVLYFSIFSMFCLIGLATWQVFYLRRFFKAKKLIE

SEQ ID NO: 168373 - DNA, 660 bp, Artificial Sequence
  derived and/or modified sequence
atgagcggcctgagcggcccccccgccagaagaggccccttccccctggccctgctgctgctgttcctgctgggccccagactggtgctggccatcagcttccacctgcccatcaacagcagaaagtgcctgagagaggagatccacaaggacctgctggtgaccggcgcctacgagatcagcgaccagagcggcggcgccggcggcctgagaagccacctgaagatcaccgacagcgccggccacatcctgtacagcaaggaggacgccaccaagggcaagttcgccttcaccaccgaggactacgacatgttcgaggtgtgcttcgagagcaagggcaccggcagaatccccgaccagctggtgatcctggacatgaagcacggcgtggaggccaagaactacgaggagatcgccaaggtggagaagctgaagcccctggaggtggagctgagaagactggaggacctgagcgagagcatcgtgaacgacttcgcctacatgaagaagagagaggaggagatgagagacaccaacgagagcaccaacaccagagtgctgtacttcagcatcttcagcatgttctgcctgatcggcctggccacctggcaggtgttctacctgagaagattcttcaaggccaagaagctgatcgagtag

SEQ ID NO: 168374 - DNA, 660 bp, Artificial Sequence
  derived and/or modified sequence
atgtcaggactcagtggtccaccagccaggcgaggaccattcccactcgccctgctgctcttatttctgctgggccctcgcctcgtgctagccatatcctttcatctccccatcaactctagaaagtgcctccgcgaggaaatccataaggaccttctcgtgaccggcgcttatgagattagcgatcagagcgggggtgccggtggattacgcagtcatctgaagatcacagatagcgccggccatatcctttatagcaaagaggatgccactaagggaaagttcgccttcaccaccgaggactatgatatgtttgaggtatgttttgagtctaaagggaccggacgcattccggaccaactggtcattctggatatgaaacacggagtggaagcaaagaactacgaagagatcgccaaagttgaaaaactaaagccgctggaagttgagttaagaaggctcgaggacctgtctgagtcgatcgtgaacgatttcgcctacatgaagaagagagaagaagagatgagagacaccaatgaaagcacaaacacccgtgtgctgtacttttccatctttagtatgttctgtcttataggcctggcgacctggcaggttttctatttgcgcagatttttcaaggccaagaaactaatcgaatag

SEQ ID NO: 168375 - DNA, 660 bp, Artificial Sequence
  derived and/or modified sequence
atgagcggcctgagcggccccccagcccggcggggccccttccccctggccctgctgctgctcttcctgctgggcccccggctggtgctggccatctccttccacctgcccatcaacagcaggaagtgcctgcgggaggagatccacaaggacctgctggtgactggagcctatgagatcagtgaccagagcggcggggccggcggcctgcggagccacctgaagatcacagattctgctggccacatcctgtacagcaaggaggatgccaccaagggcaagtttgccttcaccacagaggactatgacatgtttgaggtgtgctttgagagcaagggcaccggccgcatcccagaccagctggtgatcctggacatgaagcacggcgtggaggccaagaactatgaggagatcgccaaggtggagaagctgaagcccctggaggtggagctgcggcggctggaggacctgtctgagagcatcgtgaatgactttgcctacatgaagaagcgggaggaggagatgagggacaccaatgaaagcaccaacaccagggtgctgtacttcagcatcttctccatgttctgcctgattggcctggccacctggcaggtgttctacctgcggcgcttcttcaaggccaagaagctgattgaatag

SEQ ID NO: 168376 - DNA, 660 bp, Artificial Sequence
  derived and/or modified sequence
atgagcggcctgagcggcccccccgcccggcggggccccttccccctggctttgctgctgctatttctgttgggaccaaggctggtactggcaatatcctttcacctgccaatcaactctcgcaaatgtttgcgtgaggaaatccacaaagacctattagtcacaggagcatatgagatctctgatcagtcagggggggctggaggactgagatcacatctgaaaatcactgattccgctggccacatcctttatagtaaggaggatgctactaaaggcaaatttgcgttcacaactgaagattacgatatgttcgaagtatgcttcgaatccaagggcacaggccgcatacctgatcagctggtgattctggatatgaagcatggagtggaggccaagaactacgaggaaatcgccaaggtggagaaactcaaaccccttgaagtggagctgcggcgattagaggatttgtctgaaagcattgtgaacgatttcgcttacatgaagaaaagggaggaggagatgagggatacaaatgagagtacaaatacacgtgtactatatttttcaatattttcaatgttctgccttatcggtttagctacctggcaggtgttctaccttaggcgtttttttaaggccaagaagttgatcgagtag

SEQ ID NO: 168377 - DNA, 660 bp, Artificial Sequence
  derived and/or modified sequence
atgtctggattaagtggtcctcctgctcgaaggggcccattccccctcgcactgctgttactgtttctgctcggccctcgactcgtgcttgccatttcatttcacctgccgataaacagcagaaaatgcctgcgggaagaaatccataaggatctgctggttacaggcgcttatgagatatccgaccaatcaggtggggcaggcggattgcgctcccatctgaagataacagactcagcgggacacatactatacagtaaggaggatgctacaaaaggcaagttcgctttcactaccgaagactatgacatgttcgaagtatgttttgagtctaagggcacaggcagaattccggaccagctggtgatattggatatgaagcacggtgtcgaggccaaaaactacgaagagattgcaaaagttgagaaattgaagccactggaagttgaactcagaagactcgaggatctatcagaaagcatcgtaaatgatttcgcttatatgaaaaaaagggaggaagaaatgcgggacacgaatgagtctacaaatacaagagtcctatatttcagcatcttctctatgttttgcttaattggcctcgcgacttggcaggtattttatctgcggagattcttcaaagctaaaaaactcatcgaatag

SEQ ID NO: 168378 - DNA, 4127 bp, Artificial Sequence
  derived and/or modified sequence
ccccggttccggcgcggttgaggccttcggtggtgaacgagtctccagcaccatgtctggtttgtctggcccaccagcccggcgcggcccttttccgttagcgttgctgcttttgttcctgctcggccccagattggtccttgccatctccttccatctgcccattaactctcgcaagtgcctccgtgaggagattcacaaggacctgctagtgactggcgcgtacgagatctccgaccagtctgggggcgctggcggcctgcgcagccacctcaagatcacagattctgctggccatattctctactccaaagaggatgcaaccaaggggaaatttgcctttaccactgaagattatgacatgtttgaagtgtgttttgagagcaagggaacagggcggatacctgaccaactcgtgatcctagacatgaagcatggagtggaggcgaaaaattacgaagagattgcaaaagttgagaagctcaaaccattagaggtagagctgcgacgcctagaagacctttcagaatctattgttaatgattttgcctacatgaagaagagagaagaggagatgcgtgataccaacgagtcaacaaacactcgggtcctatacttcagcatcttttcaatgttctgtctcattggactagctacctggcaggtcttctacctgcgacgcttcttcaaggccaagaaattgattgagtaatgaatgaggcatattctcctcccaccttgtacctcagccagcagaacatcgctgggacgtgcctggcctaaggcatcctaccaacagcaccatcaaggcacgttggagctttcttgccagaactgatctcttttggtgtgggaggacatggggtaccacctacacccaacaagtcaatgagggacttctttttaatttggtaggattttgactggttttgcaacaataggtctattattagagtcacctatgacaaaaaataggggttacctagataatgccaaagtcagcatttgtcctgggttcccttgtgtgatctgtttggactatgttttcttttcttctcccacttgctcagcagcttgggcttccattctagttcttttaccaagatttttgtgtgaccatgttgacttcatttggattgccctctttcaatttccttgtgaaaacacccttaactttctctttacccttagctgaaatgtttacatagcttctggtgatatcttttcatgattttatatctcttaaaatggtgatggatgtgacacctcataaaagtgagctttgaactgtagataactcttaaagaaaatgtcattttagacaattaaaatatttgtgctcaactgcttgaacttttttcgtgtatgtgtatttaattctatgcaatattatcacatgtgtagattcatgtgaccaccatcacaagagacagaacagttctgtcacatggatcccttgcactgcccttttacagccgcagccacatccctttcttataccctcaccccaacctgtggctaccactgttctgtcctccatctctgtaattttgtcatttcaagaatgttgtatgaatggaatcatacagaatgtaatcttacgaggctgatcttttttcattcagcataattcccttgaaatccatccaagttgttgcatgtatgaatagtttcttcctttttttcttttaaaaatgttttatatatttagggggtataagtacagatttcttacatgcatatattgcatcgtggtgaagtgggggcagttccttttgattgctgagtagtattccatggtatggatgtaccacagtttgcttaaccattcacccactaaaggacataagagttgttttcagttttttgccctaataaagctgctgtgaacattcatgtacaggtttttatgtgaacatacattttcattttctgggataaatgctcaaaagggcaactgttgggttgtatggtaaacacatatatttttgtaagaaactaccctactctttttccagagtggctctactttttacatacagccactcatacaattcagacagcaatgtatgattgatccagtttcttcacatcctcaccagcatttggtattactactattttttatcttaaccattcacatagatgtgtgtaatgataccacatgtggttttaatttgcatttccaatggctaatgatgttgagtatctttttgtgtgctaatttgccatctatgtatcctcttcggtgaaatgtcttcatgtcttttgtctattttctatttaggtcatttgttctttttactattgagttttgagaggttttttatatatcctagataaaattcctctgttagatatgtggttgcttgaatttttaacataacttctaccaaggaaaaataagtaaaatttccaacccttgcatggccagtcacttacttaattcctgtccttcagtgttccatctagagaattaagagatatgatgtataaaatagacatcgagggccattaagagagtaaatacttaaaaatacatgttatgaaagcaaagccaataatcactgtaggagtatgagttgcctaagggccaaaactaatgtaaataagagaaagtgtggatataaatgaccattgtttataaacagttatgaaaaatgctgtgacttgaaatctttcccacatctcccaagaaagtaggtaggagtttatcctttccgtaatctctttttaaccctgctgactattacagggcttgtttaatcacagtggcaagaattacatgtatcttacagtaaagaaacagaatactggaatcgttagagaaccctgatgtgttgacctggataaagtacaaaggtggaagagggaatgagttatgctgttaaaatctcaggctattctgttaatgttcctgctactatgaacccaaactttttttttcccccttttgactccttgtgtcttcctctcctgtggcataaaagtagttctgtcgttaacttgtacaacattgccatctgctgttgagaattggtaggtactgcttctgagaacctggctgcagatccttagcataggcagcaaatgttgagaaagtctatctgtagtattacatatactaagttacagaggatgcatccaagtagagaaaataatatgtgggttaagatacatccttaaacttttttttttttggggggggggggacggagtcttgctgcaacgcccaggctggagtgcaatggcactatctcagctcgctgcaaccttcacctcctgggttcaagcaattctcctgcctcagcctcctgagtagctgggaatataggtgcacaccaccatgcctggctaatttttgtattttcagtagaagcagagtttcaccatattggccaggttggtctcgaactcctgacctcaagtgatctgcctgcctcagcctcccaaagtgctgggattacacgcgtgagccaccacacccagcctccatctttaaacttttaaatgtgaaatttctatcatgtaccgttagcctaacaagattttctttcctatttctgactggtgcctttcccctttttaggagcaacgaaagctactctcttagttatgttcttgtgatgtgacaaaatgtcaagaagataggagaagagaatattttatttcgttgatgcttttgttcccaagtgtgaccctaaacttaagctttgtaggagttgacattctttcatgtcccttccctttactcatgccgaaactatcaactgggacattttgtgcttttggtttaaaagttaattgatattatactttggttttatctaaaaagtaaatgtatttgcctttgacaaaagactgacacaagagcaaataagctttaaaatcgggtgttatgtgctttcctccatttttgagcatattatccaaaatggtctgtataatataaatgagaatgatgcagtttaagtaagccttgttataccattgtcatggacccctgtcataaagccatttcttggtttgtttgggaaagaggcatatgggatttatacagattcacttgtaaatgttggattggggatttttgtgtaaattttctcaaataaaggctagcagaaacc

SEQ ID NO: 168379 - protein, 2202 aa, Artificial Sequence
  derived and/or modified sequence
MALPRLTGALRSFSNVTKQDNYNEEVADLKIKRSKLHEQVLDLGLTWKKIIKFLNEKLEKSKMQSINEDLKDILHAAKQIVGTDNGREAIESGAAFLFMTFHLKDSVGHKETKAIKQMFGPFPSSSATAACNATNRIISHFSQDDLTALVQMTEKEHGDRVFFGKNLAFSFDMHDLDHFDELPINGETQKTISLDYKKFLNEHLQEACTPELKPVEKTNGSFLWCEVEKYLNSTLKEMTEVPRVEDLCCTLYDMLASIKSGDELQDELFELLGPEGLELIEKLLQNRITIVDRFLNSSNDHRFQALQDNCKKILGENAKPNYGCQVTIQSEQEKQLMKQYRREEKRIARREKKAGEDLEVSEGLMCFDPKELRIQREQALLNARSVPILSRQRDADVEKIHYPHVYDSQAEAMKTSAFIAGAKMILPEGIQRENNKLYEEVRIPYSEPMPLSFEEKPVYIQDLDEIGQLAFKGMKRLNRIQSIVFETAYNTNENMLICAPTGAGKTNIAMLTVLHEIRQHFQQGVIKKNEFKIVYVAPMKALAAEMTDYFSRRLEPLGIIVKELTGDMQLSKSEILRTQMLVTTPEKWDVVTRKSVGDVALSQIVRLLILDEVHLLHEDRGPVLESIVARTLRQVESTQSMIRILGLSATLPNYLDVATFLHVNPYIGLFFFDGRFRPVPLGQTFLGIKCANKMQQLNNMDEVCYENVLKQVKAGHQVMVFVHARNATVRTAMSLIERAKNCGHIPFFFPTQGHDYVLAEKQVQRSRNKQVRELFPDGFSIHHAGMLRQDRNLVENLFSNGHIKVLVCTATLAWGVNLPAHAVIIKGTQIYAAKRGSFVDLGILDVMQIFGRAGRPQFDKFGEGIIITTHDKLSHYLTLLTQRNPIESQFLESLADNLNAEIALGTVTNVEEAVKWISYTYLYVRMRANPLAYGISHKAYQIDPTLRKHREQLVIEVGRKLDKAQMIRFEERTGYFSSTDLGRTASHYYIKYNTIETFNELFDAHKTEGDIFAIVSKAEEFDQIKVREEEIEELDTLLSNFCELSTPGGVENSYGKINILLQTYISRGEMDSFSLISDSAYVAQNAARIVRALFEIALRKRWPTMTYRLLNLSKVIDKRLWGWASPLRQFSILPPHILTRLEEKKLTVDKLKDMRKDEIGHILHHVNIGLKVKQCVHQIPSVMMEASIQPITRTVLRVTLSIYADFTWNDQVHGTVGEPWWIWVEDPTNDHIYHSEYFLALKKQVISKEAQLLVFTIPIFEPLPSQYYIRAVSDRWLGAEAVCIINFQHLILPERHPPHTELLDLQPLPITALGCKAYEALYNFSHFNPVQTQIFHTLYHTDCNVLLGAPTGSGKTVAAELAIFRVFNKYPTSKAVYIAPLKALVRERMDDWKVRIEEKLGKKVIELTGDVTPDMKSIAKADLIVTTPEKWDGVSRSWQNRNYVQQVTILIIDEIHLLGEERGPVLEVIVSRTNFISSHTEKPVRIVGLSTALANARDLADWLNIKQMGLFNFRPSVRPVPLEVHIQGFPGQHYCPRMASMNKPAFQAIRSHSPAKPVLIFVSSRRQTRLTALELIAFLATEEDPKQWLNMDEREMENIIATVRDSNLKLTLAFGIGMHHAGLHERDRKTVEELFVNCKVQVLIATSTLAWGVNFPAHLVIIKGTEYYDGKTRRYVDFPITDVLQMMGRAGRPQFDDQGKAVILVHDIKKDFYKKFLYEPFPVESSLLGVLSDHLNAEIAGGTITSKQDALDYITWTYFFRRLIMNPSYYNLGDVSHDSVNKFLSHLIEKSLIELELSYCIEIGEDNRSIEPLTYGRIASYYYLKHQTVKMFKDRLKPECSTEELLSILSDAEEYTDLPVRHNEDHMNSELAKCLPIESNPHSFDSPHTKAHLLLQAHLSRAMLPCPDYDTDTKTVLDQALRVCQAMLDVAANQGWLVTVLNITNLIQMVIQGRWLKDSSLLTLPNIENHHLHLFKKWKPIMKGPHARGRTSIESLPELIHACGGKDHVFSSMVESELHAAKTKQAWNFLSHLPVINVGISVKGSWDDLVEGHNELSVSTLTADKRDDNKWIKLHADQEYVLQVSLQRVHFGFHKGKPESCAVTPRFPKSKDEGWFLILGEVDKRELIALKRVGYIRNHHVASLSFYTPEIPGRYIYTLYFMSDCYLGLDQQYDIYLNVTQASLSAQVNTKVSDSLTDLALK

SEQ ID NO: 168380 - DNA, 6609 bp, Artificial Sequence
  derived and/or modified sequence
atggcccttcccagactgacaggagctctcaggtcctttagcaatgtcaccaagcaggacaactataacgaggaggtggccgacctgaaaatcaagcgaagtaagctccacgagcaggtgttggatctaggtctgacttggaaaaaaatcatcaagttcttaaacgagaagctggaaaagagtaagatgcagtctattaacgaggacttgaaagatatcctgcacgctgccaaacagattgtgggaactgataacggtcgtgaggcaatagaatccggagccgcttttttgtttatgactttccacctcaaagatagtgtgggtcacaaggagacaaaagctatcaaacaaatgtttggtccttttcccagcagcagcgcaactgccgcttgcaatgcgacgaataggattattagccatttctctcaagatgacttaacagccctagtgcagatgacagagaaggagcatggagatagagtattcttcgggaaaaacctcgcattcagcttcgacatgcatgatctggaccattttgatgaactaccaatcaatggcgaaacgcagaagacgatcagcttagattataagaagttcctgaacgagcatcttcaagaagcttgtacgccagaactgaaaccagtggaaaagacaaatggttcctttctgtggtgcgaagtggaaaagtacctgaactcaactttgaaggaaatgaccgaagtgccccgtgtcgaggatctctgctgtacactgtatgacatgctggcatcaattaaatctggagatgagctgcaagatgagctgtttgagctcctgggtcccgagggcctggagctgattgagaaacttctgcagaacaggatcaccatcgtcgataggttccttaacagctccaacgaccatcgctttcaggctctgcaagacaattgcaaaaaaatcctgggcgaaaacgcgaagcctaattatggatgccaagtcactatccagtccgagcaggaaaagcagttgatgaagcagtaccggcgcgaggaaaagcgaatagctaggcgcgagaaaaaagccggagaggacctggaggtcagcgagggtctgatgtgtttcgatccgaaggaactaaggatccagagggagcaggctctactgaatgcccggtcagttccaatcctctcacgccaaagagacgctgacgtggagaaaattcattatccccacgtttatgattcgcaagcagaggccatgaagacttctgcctttatcgccggcgccaaaatgattttacccgaggggattcaacgagaaaacaacaagctctatgaggaagtacggattccatacagcgaaccgatgccactgtctttcgaagagaagcctgtgtatatccaggacctcgacgagatcgggcagcttgcttttaaaggcatgaagcgcctgaaccgtattcagagcatcgtgttcgagacagcttataacaccaatgagaatatgcttatctgcgcccctaccggtgcaggcaagacgaacattgccatgctcacggtactccacgaaataaggcaacatttccagcagggggttataaagaagaatgagttcaaaattgtttatgtggccccaatgaaagctctggcggcagagatgactgattattttagccgaaggctcgaaccattgggcattatcgtcaaagagctcacaggagacatgcagttatctaaaagtgaaatattgaggacgcaaatgctagtaacgacccccgagaaatgggatgttgttacgagaaaatccgtcggagatgttgcactgagtcagattgtgcgcctactcatcctggatgaagtgcacctgcttcatgaggatagagggcccgtactcgagagtatcgttgctagaacgctgcgtcaagtggaaagtacccagagtatgatcaggatcctgggcctgtcagcaacactacccaactacctagacgtagcgacatttctacatgtaaacccgtacatcgggctgttctttttcgacgggaggttcagacccgtacctttggggcagacgtttctcggcataaagtgtgctaataagatgcagcagctcaacaatatggatgaggtgtgttacgagaacgtgctcaaacaggtgaaggcgggccaccaagtgatggtattcgtccatgcccgaaatgcaaccgtgagaactgccatgtccttgattgaaagggcaaaaaattgcggacacatacctttcttttttcccacccagggccatgactatgtcctggcggaaaagcaagtccagcgatcccgcaataagcaggtccgtgagcttttccccgacggattttctattcaccacgccggcatgttgagacaagaccgtaatctcgtggagaatctgttttctaacggccatattaaagttctggtgtgtacagctactcttgcctggggcgttaacctgcctgcacatgccgtgataatcaagggcacacaaatctacgccgcaaagagagggagcttcgtagatctgggtatattagatgtgatgcaaatatttggacgtgccggacggccacaattcgacaaattcggtgagggcatcatcataactacccatgacaaactttcccactacctaactcttcttacccagcgtaatccaattgagagtcagtttcttgaaagcctggccgacaacctgaacgccgaaatcgcccttggcacagtgactaacgttgaagaggctgtgaagtggattagctatacatacttatatgtgagaatgcgagctaatcctctagcatatgggatcagccataaggcctaccaaatcgatccaacacttagaaagcatcgtgagcagctggtaatcgaggtcgggaggaaattagacaaggcccagatgattagattcgaggagcgcactggatatttctcgtcaacagacctcgggaggaccgcctcacactactacattaagtacaacactattgagactttcaacgagctcttcgatgcccataagaccgagggggatattttcgccattgtgagtaaggccgaagaatttgaccaaatcaaggtcagggaagaggaaatcgaggaactcgatactctccttagcaatttctgtgaactgtctactccaggtggcgtcgagaattcttatggaaagatcaatattctgcttcagacttacatctcacgcggggaaatggattccttcagccttatctccgattccgcctacgtagcccagaacgctgcacgcatcgtccgcgctctgttcgaaatcgctctgagaaaaagatggcccactatgacttatagactgctgaacctgtctaaggtgattgataagcgactgtggggctgggcatctcccctcaggcagttttctattctgcctcctcacatactgaccagactggaggagaaaaagctgactgtggataagctcaaagacatgcgcaaagacgaaattggacatattctgcatcacgttaatatcggactaaaagtgaaacaatgtgtccaccaaattccgtcggtgatgatggaggcatccattcagcccattaccaggacagtgctgcgggtcacgttgtcaatctacgccgactttacatggaatgaccaggttcatggaaccgtgggggaaccctggtggatttgggtcgaggaccccaccaacgatcacatctatcatagtgaatattttctggccctcaagaagcaggtgattagtaaggaagctcagctccttgtcttcactataccaatctttgaacccctgccgtctcagtactatattagggccgtgtccgacagatggctgggcgcggaggcggtatgtataattaatttccagcatcttatactaccggagcgacacccaccccacactgaattattggatctccaaccactgcccatcactgcgctgggctgtaaagcatacgaagcactttacaatttttcgcacttcaacccagtgcagactcagattttccacaccctctaccacaccgactgtaacgtgctgcttggggcgcccacgggctcaggaaaaacggtggctgctgagcttgctatttttagggtattcaacaagtatcctactagtaaagctgtttacatcgctcccctgaaagccctagtgagggaacggatggatgactggaaggtgcgcatagaggagaaattagggaagaaagtcattgaattaacgggagacgtgacgcccgatatgaagtcaatcgcaaaagcggatctcatcgtaaccactcctgagaaatgggacggtgtgtcaaggtcttggcagaaccgaaactatgtgcagcaggtgacaattctgatcatagacgaaatacatctgcttggggaggagcgcggtccagtgctggaagtcattgtgtcccgcacgaactttatctccagccacacggaaaagccggtgcgcattgtcggcctcagcaccgccctcgccaatgcccgggatctggcagactggctaaacattaaacagatgggcctgttcaactttcgaccctctgttagaccagtaccgctggaagtgcacatccaggggttccccggtcaacactattgccccagaatggcctccatgaataagcctgccttccaagccattagatctcacagccctgccaagcccgtgctgatctttgttagttccagacggcagacaaggctgaccgctctcgaactgatagccttcctggctacggaggaggaccctaagcagtggctcaatatggatgagagagaaatggagaatatcatcgctaccgtcagggattccaatttgaagttgacattagcgtttggaattgggatgcaccacgccggtctacacgaacgtgatcgaaagaccgtcgaggaattgttcgtgaattgcaaggtccaagtcctgattgccacctctacactagcttggggtgttaactttcccgcccacctcgtaattatcaagggtaccgagtattacgacggcaaaactaggcgatacgtggacttccctattactgacgtcttgcagatgatgggccgcgcgggccggccccaattcgacgatcaaggcaaggccgtgatcttggtgcacgacataaagaaggatttttacaagaaattcctctacgagccatttcccgtcgagtcaagcctcctcggggtgttgtctgaccacctgaatgcggagatcgctggagggactatcacttccaagcaggatgctttggactacattacgtggacatattttttccggaggctgatcatgaatcccagctactacaatctcggcgatgtctcgcatgattcggtaaacaagttcctctcccacctgattgaaaaaagcctcatagagcttgagttatcatattgcatcgagattggagaagataaccggagtatcgaaccgttgacatacggccggatcgctagttactactacctgaaacaccaaacggtgaagatgtttaaagacagactgaagcctgagtgcagcacagaggaactgctgtcaattctgtcggatgctgaggagtacaccgacctcccagtgagacataacgaagaccatatgaacagcgagctggccaaatgcctgccaattgaatccaatcctcactcattcgactcgccacacactaaggcccacctgctgctccaagcccacctttcccgagcgatgctaccttgtcctgattatgacaccgatacaaagacagtgcttgaccaggctctgcgcgtgtgccaggccatgttagatgtggctgctaatcagggttggctggtcaccgttctgaatatcacaaacctgatccagatggtcatacaaggcaggtggcttaaggactcttccctcctgactctaccaaacatcgagaaccaccacctccatctcttcaagaagtggaagccgatcatgaaaggcccccacgcgcgaggcagaacttctattgagtccctgcctgagttgatccatgcctgcgggggcaaagatcacgttttctctagcatggttgaaagtgagcttcacgccgcgaaaaccaagcaagcctggaatttcctctcacatcttcctgtcattaatgtggggatctcggtaaagggctcatgggacgacctggtagaaggacataatgaactttctgtttcgactctgaccgctgacaaacgcgatgacaacaagtggatcaaactgcatgccgatcaggagtatgttctacaagtaagtctccaacgggtacactttggttttcacaagggtaagccagaatcgtgtgcagtgacacccaggtttccgaaaagcaaggacgagggctggttcctgatcttaggggaagtggataaaagggagctcatagcccttaagcgtgtcggctatattagaaatcatcacgtcgcgagtctcagtttctacactccggaaattccaggacgttatatatatacgctgtatttcatgtccgattgctatctgggcctggaccagcaatatgatatatacctgaatgtgacgcaggccagcctgagcgcccaggtgaatactaaagtgagcgactccctgacggatttggctctgaaatag

SEQ ID NO: 168381 - DNA, 6609 bp, Artificial Sequence
  derived and/or modified sequence
atggccctgccccggctgactggagccctgcggagcttcagcaatgtgaccaagcaggacaactacaatgaggaggtggccgacctgaagatcaagaggagcaagctgcacgagcaggtgctggacctgggcctgacctggaagaagatcatcaagttcctgaatgagaagctggagaagagcaagatgcagagcatcaatgaagacctgaaggacatcctgcacgccgccaagcagatcgtgggcacagacaatggccgggaggccatcgagagcggggccgccttcctgttcatgaccttccacctgaaggacagcgtgggccacaaggagaccaaggccatcaagcagatgtttggccccttccccagcagcagcgccacagctgcctgcaatgccaccaaccgcatcatcagccacttcagccaggatgacctgacagccctggtgcagatgacagagaaggagcacggggacagagtcttcttcggcaagaacctggccttctcctttgacatgcatgacctggaccactttgatgagctgcccatcaatggagagacccagaagaccatcagcctggactacaagaagttcctgaatgagcacctgcaggaggcctgcaccccagagctgaagcctgtggagaagaccaacggcagcttcctgtggtgtgaggtggagaagtacctgaacagcaccctgaaggagatgacagaggtgccccgggtggaggacctgtgctgcaccctgtatgacatgctggccagcatcaagtctggagatgagctgcaggatgagctgtttgagctgctgggccctgagggcctggagctgattgagaagctgctgcagaaccgcatcaccatcgtggaccgcttcctgaacagcagcaatgaccaccgcttccaggccctgcaggacaactgcaagaagatcctgggggagaatgccaagcccaactacggctgccaggtgaccatccagagcgagcaggagaagcagctgatgaagcagtacagaagagaggagaagagaattgcccggcgggagaagaaggccggggaggacctggaggtgtctgagggcctgatgtgctttgaccccaaggagctgcgcatccagcgggagcaggccctgctgaatgcccggtctgtgcccatcctgagccggcagagagatgctgatgtggagaagatccactacccccacgtgtatgacagccaggccgaggccatgaagaccagcgccttcatcgccggggccaagatgatcctgcctgagggcatccagcgggagaacaacaagctgtatgaggaggtgcgcatcccctacagcgagcccatgcccctgagctttgaggagaagcctgtgtacatccaggacctggatgagatcggccagctggccttcaagggcatgaagaggctgaaccgcatccagagcatcgtgtttgaaacagcctacaacaccaatgaaaacatgctgatctgtgcccccactggagctgggaagaccaacatcgccatgctgactgtgctgcacgagatccggcagcacttccagcagggcgtcatcaagaagaatgagttcaagatcgtgtatgtggcccccatgaaggccctggccgctgagatgacagactacttcagccggcggctggagcccctgggcatcatcgtgaaggagctgactggagacatgcagctgagcaagtctgagatcctgcggacccagatgctggtgaccaccccagagaagtgggatgtggtgaccaggaagtctgtgggagatgtggccctgagccagatcgtgcggctgctgatcctggatgaggtgcacctgctgcacgaggaccggggccctgtgctggagagcatcgtggcccggaccctgcggcaggtggagagcacccagagcatgatccgcatcctgggcctgagcgccaccctgcccaactacctggatgtggccaccttcctgcacgtgaacccctacatcggcctcttcttctttgatggccgcttccggcctgtgcccctgggccagaccttcctgggcatcaagtgtgccaacaagatgcagcagctgaacaacatggatgaggtgtgctatgaaaatgtgctgaagcaggtgaaggccggccaccaggtgatggtgtttgtgcacgccagaaatgccaccgtgaggacagccatgagcctcatcgagcgggccaagaactgtggccacatccccttcttcttccccacccagggccatgactatgtgctggccgagaagcaggtgcagaggagcaggaacaagcaggtgcgggagctgttcccagatggcttcagcatccaccacgccggcatgctgcggcaggacaggaacctggtggagaacctcttcagcaatggccacatcaaggtgctggtgtgcacagccaccctggcctggggcgtgaacctgcctgcccacgccgtcatcatcaagggcacccagatctatgctgccaagaggggcagctttgtggacctgggcatcctggatgtgatgcagatcttcggccgggccggccggccccagtttgacaagtttggagagggcatcatcatcaccacccatgacaagctgagccactacctgaccctgctgacccagaggaaccccatcgagagccagttcctggagagcctggccgacaacctgaatgctgagatcgccctgggcaccgtgaccaacgtggaggaggccgtgaagtggatctcctacacctacctgtatgtgaggatgagggccaaccccctggcctacggcatcagccacaaggcctaccagattgaccccaccctgaggaagcaccgggagcagctggtgattgaggtgggcaggaagctggacaaggcccagatgatccgctttgaggagaggacaggctacttcagcagcacagacctgggccgcacagccagccactactacatcaagtacaacaccatcgagaccttcaatgagctgtttgatgcccacaagacagaaggagacatctttgccatcgtgtccaaggccgaggagtttgaccagatcaaggtgcgggaggaggagattgaggagctggacaccctgctgagcaacttctgtgagctgagcaccccaggaggagtggagaacagctatggcaagatcaacatcctgctgcagacctacatcagcagaggagagatggacagcttcagcctcatcagtgacagcgcctacgtggcccagaatgctgccagaattgtgcgggccctgtttgagatcgccctgaggaagcgctggcccaccatgacctaccgcctgctgaacctgagcaaggtgattgacaagaggctgtggggctgggccagccccctgcggcagttcagcatcctgcccccccacatcctgacccggctggaggagaagaagctgactgtggacaagctgaaggacatgaggaaggatgaaattggccacatcctgcaccacgtgaacatcggcctgaaggtgaagcagtgtgtgcaccagatccccagcgtgatgatggaggccagcatccagcccatcaccaggacagtgctgcgggtgaccctgagcatctatgctgacttcacctggaatgaccaggtgcatggaacagtgggggagccctggtggatctgggtggaggaccccaccaatgaccacatctaccacagcgagtacttcctggccctgaagaagcaggtgatcagcaaggaggcccagctgctggtgttcaccatccccatctttgagcccctgcccagccagtactacatccgggctgtgtctgaccgctggctgggcgctgaggccgtgtgcatcatcaacttccagcacctgatcctgcctgagcggcaccccccccacacagagctgctggacctgcagcccctgcccatcacagccctgggctgcaaggcctatgaggccctgtacaacttcagccacttcaaccctgtgcagacccagatcttccacaccctgtaccacacagactgcaatgtgctgctgggcgcccccactggaagtggcaagacagtggccgctgagctggccatcttccgggtcttcaacaagtaccccaccagcaaggctgtgtacatcgcccccctgaaggccctggtgcgggagaggatggatgactggaaggtgcgcatcgaggagaagctgggcaagaaggtgattgagctgactggagatgtgaccccagacatgaagagcatcgccaaggctgacctgattgtgaccaccccagagaagtgggatggagtgagccgctcctggcagaacagaaattatgtgcagcaggtgaccatcctgatcattgatgagatccacctgctgggggaggagcggggccctgtgctggaggtgattgtgtccaggaccaacttcatcagcagccacacagagaagcctgtgcgcatcgtgggcctgagcacagccctggccaatgcccgggacctggccgactggctgaacatcaagcagatgggcctcttcaacttccggcccagcgtgcggcctgtgcccctggaggtgcacatccagggcttccctggccagcactactgccccaggatggcctccatgaacaagccagccttccaggccatccgcagccacagccctgccaagcctgtgctgatctttgtgagcagccggcggcagacccggctgacagccctggagctgattgccttcctggccacagaggaggaccccaagcagtggctgaacatggatgagcgggagatggagaacatcatcgccaccgtgcgggacagcaacctgaagctgaccctggccttcggcatcggcatgcaccacgccggcctgcacgagcgggacaggaagacagtggaggagctgtttgtgaactgcaaggtgcaggtgctgattgccaccagcaccctggcctggggcgtgaacttccctgcccacctggtgatcatcaagggcacagagtactatgatggcaagaccaggagatatgtggacttccccatcacagatgtgctgcagatgatgggccgggccggccggccccagtttgatgaccagggcaaggctgtgatcctggtgcatgacatcaagaaggacttctacaagaagttcctgtatgagcccttccctgtggagagcagcctgctgggcgtgctgagtgaccacctgaatgctgagattgctgggggcaccatcaccagcaagcaggatgccctggactacatcacctggacctacttcttcagaagactcatcatgaaccccagctactacaacctgggagatgtgtcccatgattctgtgaacaagttcctgagccacctgattgagaagagcctgattgagctggagctgagctactgcattgaaattggagaggacaacagaagcattgagcccctgacctacggccgcatcgccagctactactacctgaagcaccagacagtgaagatgttcaaggaccggctgaagccagaatgttccacagaggagctgctgagcatcctgagtgatgctgaggagtacacagacctgcctgtgcgccacaatgaagaccacatgaacagcgagctggccaagtgcctgcccatcgagagcaacccccacagctttgacagcccccacaccaaggcccacctgctgctgcaggcccacctgagccgggccatgctgccctgcccagactatgacacagacaccaagacagtgctggaccaggccctgcgggtgtgccaggccatgctggatgtggccgccaaccagggctggctggtgacagtgctgaacatcaccaacctgatccagatggtgatccagggccgctggctgaaggacagcagcctgctgaccctgcccaacatcgagaaccaccacctgcacctgttcaagaagtggaagcccatcatgaagggcccccacgcccggggccgcaccagcattgagagcctgcctgagctgattcatgcctgtggcggcaaggaccacgtgttcagctccatggtggagagcgagctgcacgccgccaagaccaagcaggcctggaacttcctgagccacctgcccgtcatcaacgtgggcatctctgtgaagggctcctgggatgacctggtggagggccacaatgagctgtctgtgtccaccctgacagctgacaagagagatgacaacaagtggatcaagctgcacgccgaccaggagtatgtgctgcaggtgtccctgcagagggtgcacttcggcttccacaagggcaagccagagagctgtgctgtgaccccccgcttccccaagagcaaggatgagggctggttcctgatcctgggggaggtggacaagcgggagctgattgccctgaagagggtgggctacatccggaaccaccacgtggccagcctgtccttctacaccccagagatccctggccgctacatctacaccctgtacttcatgtctgactgctacctgggcctggaccagcagtatgacatctacctgaatgtgacccaggccagcctgagcgcccaggtgaacaccaaggtgtctgacagcctgacagacctggccctgaagtag

SEQ ID NO: 168382 - DNA, 6609 bp, Artificial Sequence
  derived and/or modified sequence
atggccctgccccggctgaccggcgccctgcggagcttcagcaacgtcaccaagcaggacaactacaatgaagaagtggcagacttgaaaatcaaacgttcgaagttacacgagcaagtacttgatctgggtctgacctggaaaaagattataaagtttttgaacgagaagcttgagaaatctaaaatgcagagtatcaacgaagatcttaaagatatcctgcatgcagctaagcaaattgttgggaccgacaatggaagggaagccatagagtcaggtgccgcctttctgtttatgaccttccacttgaaagacagtgttggccacaaggagaccaaggcgattaaacagatgtttggcccatttccctcgtctagtgcaaccgcggcctgtaacgcaacaaatagaattatcagtcacttctctcaggatgacttgactgcactggtgcagatgaccgaaaaagaacacggagatcgcgttttctttggaaaaaatctcgccttctcattcgatatgcatgacctggaccactttgatgaactccccattaacggggaaacccagaagacaatatccttggactacaagaagttccttaatgaacatttgcaggaggcgtgtacccccgaactgaagccggtagagaagaccaacggatccttcctctggtgcgaagtggagaagtatctaaactccactctaaaagagatgacggaggttccaagagtagaggatctgtgctgcaccctgtatgacatgctggcttctataaagtcaggagacgagctgcaagacgagctgtttgagttgctcggtcctgagggcctcgaactgattgagaagcttctccagaatagaattaccattgtggataggttcctcaattctagcaatgatcataggttccaggcccttcaggataactgcaaaaaaattctgggagaaaacgctaagccgaattacggatgccaggtaaccattcaatccgagcaggagaaacagttgatgaaacagtaccgccgggaggaaaagagaattgcccgcagagagaaaaaggctggcgaagatcttgaggtgagcgagggacttatgtgctttgaccccaaggaattaaggatacaacgcgagcaggccttgctgaatgcacgctctgtgcctatcctgagtagacagagagacgcagacgtggagaagatccattacccgcacgtctacgattcacaggcggaggccatgaaaacctccgcattcatcgccggggctaagatgatcttgcctgagggaatccaaagggagaacaataaactttatgaagaggtccgcatcccttactccgagcctatgcccttaagctttgaggagaaacccgtttacatccaggacctggacgagattggccagctggcctttaaaggcatgaagcgcctgaaccggattcaaagcatcgtgttcgagaccgcatacaataccaacgaaaatatgctgatctgtgctcctacaggcgcgggtaagacaaatatagcaatgctgaccgtgctgcacgagatacgacagcattttcagcagggcgtcattaagaagaacgagtttaagattgtctatgtggcccctatgaaggctctcgctgcggaaatgaccgattacttctctagacgtttagagcctctcggtataatcgtcaaggaactcaccggcgatatgcaactgagtaagtcagaaatactgaggacacagatgttagtaacgactcctgagaagtgggatgttgtaacacgcaagagtgtgggggacgttgccttaagccagatcgtgcggctgctgattctggatgaagtgcatctgttacacgaggatcgcgggcccgtacttgaatcgattgtggcacgtactttaagacaggttgaaagtactcagtcaatgattaggatcctcggactttccgctaccctgcccaattacttggatgtggcaactttccttcacgttaatccatacatcggattatttttctttgacgggcgatttcgccccgtgccactgggccagacatttctcggaattaaatgtgccaataagatgcagcaacttaacaacatggacgaggtgtgctatgagaatgtgctcaagcaggtgaaagccgggcaccaggtcatggtcttcgttcatgctaggaacgcgaccgtgcgaacggcgatgtcactcatcgagagagccaaaaactgcgggcatattcccttctttttcccaactcagggtcacgactatgttctggctgaaaagcaagtgcaacgcagtcgtaataagcaggtgcgggagcttttccccgatggattctccatccaccacgccggaatgttgcgccaggatcggaatcttgtggaaaatctattctctaacggccacataaaagtgctagtgtgcaccgctaccctagcgtggggcgtgaatctgcccgctcacgccgtcatcatcaaaggcacccagatttatgccgctaaaaggggatcatttgtggaccttgggatcctagacgtgatgcagatcttcggacgggcggggcggccacagtttgacaaatttggggagggtattataatcactacccatgacaagctgtctcattacctgacattgctgactcagagaaatccaatagaaagccagttcctagagtctctggctgataatctgaatgccgagattgcactgggaactgtgactaatgtggaagaggccgtgaaatggatctcttacacttacctgtatgtgcgcatgagggcgaaccccttggcatacggcatcagccacaaggcgtatcagatcgatcctaccttgcgtaagcatcgagagcagctggtcatagaggtgggccgaaaactcgacaaagcccagatgatccgttttgaagaaagaacaggatattttagtagcacagacttagggaggacagccagccactattatattaaatacaacactatcgagactttcaatgagctgtttgacgcccacaagacagagggcgatatctttgcgatagtgtccaaagcagaagaatttgatcagatcaaagtgcgggaagaagaaattgaggaactggatacattgctctcaaatttctgcgaactgagcacgccagggggagttgaaaatagctacggcaaaataaatattctgttgcagacatatatctctagaggtgagatggacagtttctctttgattagcgatagcgcatacgtggctcaaaatgcggcacgtatcgttagggctttgttcgaaatcgctctgcgtaagcgttggcctaccatgacttacaggctgctcaatctgtcaaaagtgatagacaagaggctgtggggatgggccagccctctgcgccagttttcaatactgccaccccacattctgacacggctggaggaaaagaaactcacagtggacaaactcaaagacatgcggaaggatgaaataggtcatattctacaccacgtgaacatcgggttgaaggtgaaacagtgtgttcaccaaataccatcagtgatgatggaggcctccatacagcccataacgcggacagtgctccgagtcacgctgtccatctacgctgattttacctggaacgaccaggtgcacggcaccgtcggagagccttggtggatttgggttgaggatccaacgaacgaccacatctatcacagtgaatacttcctggccctcaagaaacaggtgatctctaaggaagcccagctgttggtcttcactatccctatcttcgagccactgccgtcacagtactacatacgcgccgtatctgataggtggctgggagccgaggctgtttgcattataaattttcagcacctaatactgccagagcgtcaccctccccataccgaactgctggatctccagcctctcccaatcaccgccctcggatgtaaggcctatgaagctctttacaacttttcacacttcaaccccgttcagacacagatctttcacacactttatcacactgattgcaacgtgctcctgggggcgcctacgggctcaggcaagactgtggcggccgagctggctattttcagggtgttcaacaagtacccaacgagcaaggcagtctacatagcaccactcaaggccctggtaagggaacgcatggacgactggaaagttcgcattgaagaaaaacttggcaaaaaagtcattgaactgaccggtgatgtcacccctgacatgaagagcattgctaaagctgacctgatcgtgactacccccgagaagtgggacggcgtgagcaggtcgtggcagaacagaaactatgtgcagcaggtgactatcttaattatcgatgaaatacatttgttgggcgaggagcgcgggccggtgctggaggtaattgtctctcgaaccaattttatttccagtcatactgaaaaacctgtccgcatcgtgggactttcaacggctcttgcgaatgcgcgggacctcgccgattggcttaacatcaaacagatgggcctgttcaattttaggccaagtgtgcggccagtaccactggaagtgcacatccagggattccctggccaacactactgcccaaggatggcttctatgaacaaacccgcctttcaggccattcgttctcactccccagccaagcccgtgttgatttttgtttccagccggaggcagactaggctgaccgcacttgaactgattgcctttctggctaccgaagaggacccgaagcagtggctgaacatggatgaacgagaaatggagaatatcatagcaactgtcagggactcgaatttgaagctcaccctggccttcggaatcggcatgcatcacgccgggctccatgagcgcgatcgtaagaccgtggaagaactgtttgttaactgtaaggtgcaggtactgatcgctacttctacgctcgcttggggcgtgaattttccagctcacctggtgattatcaaggggaccgagtactacgatggcaagactcggagatacgtggacttccccataaccgacgtgctgcagatgatgggccgcgccggacgcccacaattcgatgaccagggtaaggccgtgatcctggttcacgatattaagaaagacttttataaaaagttcctgtacgagcctttccctgtcgaatcaagcctgttaggggtgctctccgatcacctaaacgccgaaattgccggagggacaattacctcgaagcaggatgcccttgattatataacttggacctatttctttagacgtcttatcatgaacccgtcatattataacctgggcgatgtttcccatgactccgtgaacaagtttttgtctcacttaattgaaaagagtctcatagaattggagctatcctactgtattgagatcggcgaagacaacagaagtattgaaccccttacttatggccgcatcgcttcttattactacctgaagcaccagaccgtcaaaatgtttaaggatagattgaagccagagtgtagcacagaggagctactgagcatactctccgacgcagaggagtacaccgatctgccagtccggcacaacgaggaccacatgaattcagagctggcaaaatgtcttcccattgaaagtaatccacattctttcgacagcccacataccaaggctcacctcttgctgcaggcccatctgagccgtgctatgctcccctgtcccgactacgacacggatacaaaaactgtgctggaccaagctttgcgggtttgtcaggctatgctggatgtggccgccaatcagggatggttggttacggtgcttaatataactaacctgatccagatggtaatacagggcagatggctgaaagattcatcgctgttgacgctgccaaacatcgagaaccatcatctccacctcttcaagaaatggaaacctatcatgaaggggccccacgctaggggtaggacttccattgaatctctgcccgagctaatccacgcatgtggggggaaagaccatgtcttttcttcgatggttgaaagcgagcttcacgccgcaaagactaaacaggcttggaactttcttagccatctgccagttatcaatgtggggatttctgtaaaaggaagctgggatgacttggtcgaaggacacaacgaactgtcggtttcgactcttacggcggacaagagggatgataataaatggatcaaattgcacgcggatcaagagtatgtcctccaagtgagcttgcagcgcgttcacttcgggtttcacaaagggaagcccgaaagctgtgccgttacacctcgctttcccaaaagcaaggatgaggggtggttcttaatactgggtgaagtcgacaagagggagctgatcgctctaaaacgcgtgggctacatacgcaaccaccacgtggcctctctgtcattttataccccagagatcccaggaagatacatctacacgctgtacttcatgagtgattgctatttaggcctcgaccagcagtacgacatatacctcaacgttacacaggcctccctgtccgcacaggtgaataccaaagtctctgattccctaaccgatttggccctgaaatag

SEQ ID NO: 168383 - DNA, 6608 bp, Artificial Sequence
  derived and/or modified sequence
atggcactgccccgattaactggcgctcttaggtccttcagtaatgtgactaagcaggacaactacaacgaggaagttgcggatctaaagattaaaaggtccaaactgcatgaacaggtgctggatttgggcctcacttggaagaaaataatcaaattccttaacgaaaagctggaaaagtcaaagatgcaatccattaacgaagacctaaaggacattctgcacgcagccaagcagattgtcggtaccgacaacggacgagaggccatcgagagcggggcagccttcctctttatgacgttccatctcaaggattctgtgggacacaaggaaaccaaagccatcaagcagatgttcggccctttcccttcctcgtcagcgaccgctgcttgtaacgctacaaacagaatcataagtcatttttctcaagacgaccttacagctctagtccagatgactgaaaaagagcatggagatagggtcttttttggaaagaacctcgccttcagcttcgatatgcacgatctggaccattttgacgaactccccatcaacggcgagacccaaaagaccatctcgctggattacaagaaatttctgaacgagcatctgcaggaagcctgcacacccgagcttaaacctgtcgaaaaaaccaatggtagttttctctggtgcgaagtggagaaatatcttaacagtacattgaaggagatgaccgaggtacctcgagtggaggatctctgttgcacactgtacgacatgttagcctcgataaaatctggggacgagctgcaggacgagcttttcgaattactagggccagagggactggagctgatagagaaactccttcagaacagaattaccatagtcgatagatttttgaacagctcaaacgaccatcgctttcaggcattacaggataactgtaaaaaaattctgggagaaaacgctaaacctaattacgggtgccaggttacaatccaatccgagcaggagaaacagctcatgaagcagtaccgacgagaggaaaagcgcattgctcgtcgcgagaaaaaggcaggagaggatttagaggtaagcgagggtctgatgtgctttgatccaaaggagctgagaatccagagggagcaggccctgctaaacgcccgatcagtacccattttaagtcggcaacgtgacgccgacgttgagaaaatacactatccccatgtttacgactcccaagcagaagcaatgaaaaccagcgcgtttattgctggtgccaaaatgattttgcctgaaggaatacaacgcgaaaacaataagctgtacgaggaggtgcgaattccttacagtgagccaatgccgctgagtttcgaggagaagcctgtgtatatacaagatctggatgagatcggccagctggcctttaaaggcatgaagagactgaacaggatccagagcatagtgttcgaaaccgcatataacaccaacgaaaacatgttgatctgcgcccctacaggtgccggaaagaccaatatcgcaatgctaactgtgcttcatgagattaggcagcactttcagcagggcgtaattaagaaaaatgagtttaaaatcgtatacgtggcccctatgaaggctcttgccgcagagatgacggactatttctccagacggctagaaccactgggcataatagtgaaagaacttacaggagatatgcagttgagtaagagtgagattctgaggacccagatgcttgtaacaacccccgaaaaatgggacgtggtaacaagaaagtcggtaggagacgtcgccctctcccagatagtgcgcctgttgattctggatgaggtccatctgctccacgaggatagggggcctgtgttggaaagcattgttgctcggactctcagacaggtcgagagtacccaatccatgattcgaatcttaggcctgagcgcgactctgcccaattatttggatgtggctacgttcctgcatgtcaatccctatattgggcttttctttttcgacggacgctttcgaccagttcccctgggccaaacgttcctgggcattaagtgcgctaacaagatgcagcaacttaacaacatggacgaagtgtgctatgaaaacgttctgaagcaggtcaaggccggacaccaggtaatggtgttcgtgcacgcgcgaaacgccaccgtgagaactgcaatgtcactgattgaaagagcaaagaattgcggacacatccccttcttttttccgacacagggccacgactatgtgctcgcagaaaagcaggtacagcgaagtagaaataagcaagtcagggaactgttccccgatggcttttctatccaccatgcaggcatgctccggcaggatagaaatctggtcgagaacttgtttagcaacggtcatattaaagtgttggtttgtacggccacacttgcctggggggttaacctgccagcccacgctgtcatcatcaaggggacccagatctacgccgctaagaggggctcctttgtcgacctgggaatcctcgatgttatgcagatcttcggtcgagcgggtcgccctcagttcgacaaatttggcgaagggatcatcattacaacccatgataaactgtcacactatctgaccctgctcactcagcgaaaccctatcgagagccagtttctggagtccctggcagacaatctcaatgccgaaattgcacttgggactgtcaccaacgtggaggaggcggttaaatggatatcctatacttacctctacgtgcgcatgagagccaaccctttagcctatggaatctcacataaggcctaccagatcgacccgacactgcggaagcatcgggagcagcttgtaatagaagtaggacgcaaacttgataaggcgcagatgatcaggtttgaggaacggactggctatttcagttcaaccgacctcggtagaacagcttctcactactacatcaagtataacaccattgaaacttttaatgaactgtttgacgcccataaaacagagggagacatatttgcaatcgtttcaaaagcagaagagttcgatcagattaaggtgagagaagaagaaattgaggaactggataccttgctgtctaacttttgtgagctgtcaactcccggaggggtcgagaacagttatgggaagattaacattcttttacagacttacatctcccggggtgagatggactctttctccctgatcagcgactctgcttacgtggcccaaaatgccgcacgtatagtgagggccttgtttgaaatagctctcaggaagaggtggccgacgatgacataccggttactaaatctatctaaggtaattgataagcgcctctggggatgggccagcccgttaagacagttctcaatccttccacctcacattctgaccagacttgaagagaaaaaactgaccgtcgataagcttaaggatatgagaaaggacgagataggccacatactgcaccacgtgaatatcggactgaaagtgaagcagtgcgtacatcagatcccatccgtcatgatggaggcttcgatccagcccattacaagaaccgtcctccgtgtaaccctctcaatctacgcagatttcacgtggaatgaccaagttcacgggaccgtgggggagccctggtggatctgggtcgaggatccaactaatgatcacatctaccactctgagtactttcttgctctcaagaaacaggtcatctctaaagaggcccagctgcttgtattcacaataccaatctttgagcccctccccagtcaatactacatccgagccgtgtccgacagatggttaggggctgaagccgtctgtattattaactttcagcatctcatattaccagaaaggcatccccctcatacagagctgctggatttgcagcccctgccaattacagctctgggatgcaaagcctacgaggccctgtacaatttcagtcatttcaacccagtacaaacgcaaatcttccacaccctttaccatacagattgtaatgtccttttaggagctccaaccggttccgggaagactgtggctgcagagctggccatcttcagagtgttcaataaatatcccacatctaaagctgtctacatcgctcctttaaaggccttggttagggagaggatggatgactggaaggtgcggatcgaagaaaagctgggaaagaaggtgattgaactcaccggagacgttaccccggacatgaaatctatcgcaaaagctgacctcatagtgaccacccccgaaaagtgggacggggtgtcaaggtcgtggcagaaccggaactacgtccagcaggttacaattctgatcatcgacgaaatccacttactaggcgaggagcggggaccggtgttggaagtaattgttagtagaactaacttcattagctcccatacagaaaagccagttcgtatcgtggggctctccaccgcgttagccaacgctcgcgacctcgccgattggttgaacattaagcaaatgggcctgttcaacttccgcccttcggtcagacccgttcccttagaggttcatatccagggttttcctgggcaacattactgtcccagaatggctagcatgaataaaccagcctttcaggctatccgatcccattcccctgcaaagcccgttcttatttttgtgtcttccaggcgccagaccaggttgaccgccctggagttgatcgccttcctagctacagaggaagacccgaaacagtggctaaacatggacgagagggaaatggagaacattatcgctactgtccgagattcaaatcttaagcttactcttgcttttggcattggaatgcaccacgccggactacacgagagagaccgtaagacggtggaggagctatttgttaactgtaaggtacaggtgctgatcgcaactagcaccctcgcctggggcgtcaactttccggcacacttggtcataattaagggaaccgagtattacgacggtaaaactcgacgctacgtggacttcccaatcacggacgtgctgcaaatgatgggaagggctggaagaccgcagttcgacgatcagggtaaggccgtcatcttagtgcatgacattaaaaaggacttctacaagaagtttttatatgagccattccctgttgaaagcagcctgctgggcgtgctgtcagatcatttgaacgccgagattgccggaggcaccattacctccaagcaagatgcattggactacataacgtggacatatttttttcgcaggctcattatgaatcccagttactataacctgggtgatgtttcacacgattcagtgaataaattcctatcgcatctcatagaaaagtctctcatcgagctggaattgtcttactgcattgagataggggaagataacagaagcatcgaacccctgacttatggcaggatcgcttcctactactacctgaaacaccagactgtgaaaatgttcaaggatagactaaaacccgagtgcagcaccgaggagctgctgtccatactgagcgacgccgaagaatacactgatctacctgtgagacataacgaagatcatatgaacagtgaattggctaagtgcctgcctatcgaaagcaacccccactctttcgacagccctcacaccaaggcccacctgctgttgcaggcacatctcagtcgcgctatgttgccatgtcccgactacgataccgatacaaagactgtcttggaccaggcgttgcgggtttgccaggctatgctcgatgtggcagcgaatcaggggtggctcgtgacagtgctgaacataaccaatttgatccaaatggtaatccagggacgctggttaaaagactcaagtctgcttactcttccaaatatagagaatcaccacctgcacctgttcaagaagtggaagccaataatgaaaggcccacacgccagaggcaggacatccatcgaatctctgccggaactgattcacgcttgcggcggaaaagaccatgtcttcagcagcatggttgaaagtgagctccacgccgctaaaacgaaacaggcttggaatttcctctctcatctacctgtcatcaatgtgggaatttccgtgaaaggcagctgggatgacctggtcgagggtcacaatgaattgagcgtgagcaccttgaccgccgataagagagacgataacaaatggataaaactgcatgcagaccaggaatacgtcttacaggtcagcctgcagagggtccatttcgggttccataagggtaaacccgagtcatgcgcagtgacgccacgtttcccaaaaagtaaggatgaagggtggtttctcattttaggtgaagttgacaagagagagctgatcgctcttaagagggttggctacatccgcaaccatcatgtcgcaagcttgtctttctatacccccgaaatcccaggtagatatatttacaccctgtactttatgtcagattgctacctggggctcgatcagcagtacgacatctacttaaacgtaacacaggcctctttgtcagcacaggtaaatacgaaggtgtccgatagtctgactgacctcgccttgaagta

SEQ ID NO: 168384 - DNA, 8146 bp, Artificial Sequence
  derived and/or modified sequence
agcggggcggtgacgtgtaggccggcgccagctccactctgtccctcctcgccgggtctgtgcgtctttgcgtctgtctgtctgactgatggtcctcacacgcggttccctgtgactgggcgcgaccccggcaagcgcggcttggagggcggacggggcgcggcgatacagctgcccgctcgcatctttggccctgcgctcagctcctcacccggcgtgggaagttaaagtaaaaccgaaagggaagaaggcgcggtggcaggagctgacagagtgatgggaaacgcgtgagccaggccgagagtttcaggtttcttgctgtatggatcactgattgaataatagatggctttacctcgtctcacaggagccttgcgttccttttcaaatgtcaccaagcaagataattataatgaagaagtggctgacttaaagataaagcgatctaaacttcatgaacaagttttagatttgggcctgacatggaagaagataataaaatttttgaatgaaaaactggagaagagtaaaatgcaaagtataaatgaagacttaaaagatatattacatgctgcaaagcagatagttggaactgataatgggagagaagcaattgaaagtggggctgcatttctcttcatgacatttcacttgaaggactctgttggtcacaaggaaacaaaggctatcaaacagatgtttggcccctttccttcatcatctgccactgcagcttgtaatgctactaatcgaattatttctcattttagtcaagatgatcttactgctcttgtgcagatgacagaaaaagaacatggcgatagggttttttttggtaaaaatttagcattttcatttgacatgcatgatttggaccactttgacgaactgccaataaatggtgaaactcagaaaactataagcctagattataagaagtttctgaatgaacatctccaggaggcttgcaccccagaactcaagcctgtggaaaaaacaaatggctcctttttgtggtgtgaagttgaaaagtacctaaattcaactttgaaggaaatgactgaagtgccaagagtagaagatctttgctgtactttatatgatatgcttgcttctattaaaagtggtgatgaacttcaggatgagctatttgaactgctgggacctgaaggacttgaacttattgagaaactcctccagaacagaattacaattgtggatagatttcttaattcttcaaatgatcataggtttcaggctcttcaagacaattgtaaaaaaattttaggagaaaatgctaaacccaattatggttgtcaagtcactattcagtctgaacaagaaaagcagttaatgaaacaatatcgacgtgaagaaaaaagaattgccagacgagaaaaaaaggctggagaagatttagaagtttcagaaggacttatgtgctttgatcctaaggaattgcggatacaaagagaacaggcacttctgaatgctagaagtgttccaattctgagcaggcagagagatgcagacgttgaaaaaatacattatccccatgtgtatgattcccaggctgaagccatgaaaacatcagcatttattgctggtgcaaagatgattttgccagaaggaatccaaagagagaataacaagctttatgaagaagtaaggattccctacagcgaaccaatgccactcagctttgaggaaaagccagtttatatccaagacttagatgagatcggacagctggcttttaaaggaatgaagagactcaatagaatccagtcaatagtgtttgagactgcctacaacaccaatgagaacatgctgatttgtgcccctacaggagctggaaaaaccaacattgcaatgctgacagtcttgcatgaaattcgccaacattttcaacaaggtgttatcaaaaagaatgaatttaagattgtatatgttgctccaatgaaagccttggcagctgaaatgacagattacttcagcagacgtctagagccactaggcatcattgtgaaagaattgactggtgacatgcagttgtccaaaagtgaaattttacgaactcagatgcttgtgaccacaccagaaaaatgggatgtagtgacaagaaagagtgttggggatgtagctctttcccagattgtaaggctccttattcttgatgaagttcatttgctgcatgaagatagaggaccagtattagaaagcatagttgcccgtactttacggcaggtggaatccacacagagtatgataaggattctcggactgtctgcaactttacctaactacctcgatgttgccacatttttacatgttaatccatacattggacttttcttctttgatggccgttttcgaccagtacctcttggacagacatttttggggattaaatgtgcaaataagatgcagcagttgaataacatggatgaagtatgttatgaaaatgttttgaagcaagtaaaggctggacaccaggtgatggtgtttgtacatgctcgaaatgccactgtaagaacagctatgtctctaatagaaagagcaaaaaattgtggccatattcccttcttttttcctacccaaggacatgactatgtacttgcagaaaaacaggtacaaaggtcgagaaataagcaagtacgagaattattcccagatggttttagtattcatcatgcaggaatgcttcggcaggacagaaatttagttgaaaacttgttttctaatgggcatatcaaagtcctagtgtgtacagctacgttagcctggggtgtcaatcttcccgcccatgctgttattattaagggaacacaaatatatgctgcaaaaagaggctcctttgttgaccttggaattttagatgtcatgcagatatttggtcgagctggacgaccacaatttgacaaatttggggaaggaataattataacaacgcatgataaactcagccattacctcactttgctcactcaacgaaacccaattgagagtcagtttctggaaagccttgcagataacctaaatgcagagattgctctgggaacagttactaatgtggaagaagcagtgaagtggataagttacacttatctttatgtacggatgagagcaaatccattagcatatggcatcagtcacaaggcttatcagattgacccaacattaagaaagcatcgagaacagttggtcattgaagttggacgaaaactagacaaagctcagatgattcgttttgaggagcgaactggatatttttcctcaactgatttgggtagaactgccagccattactatattaaatacaacaccattgagacctttaatgaactctttgatgctcacaaaacagaaggtgatatctttgccatagtctccaaagctgaagaatttgatcaaattaaggtcagagaagaggaaatagaggagttagataccttattaagcaatttttgtgaactctccactcctggaggtgtagagaatagttatgggaaaataaacatcttacttcaaacttatatcagccgaggagaaatggacagtttctcccttatatcagattctgcatatgttgcacagaatgcagctagaattgtccgtgctctttttgaaattgctctgaggaaacgttggcctaccatgacctacaggctcctgaatcttagtaaagtcattgacaagaggctttggggttgggctagccctttgagacaattttcaatcctaccaccacacatcctaacaagattagaagaaaaaaagcttactgtggataagctgaaagacatgaggaaagatgaaataggtcacattttacatcatgtgaatattggactgaaggtcaaacaatgtgttcatcagattccttctgttatgatggaagcatccattcagcctatcacaaggactgtcctccgagtgacactcagcatctatgctgatttcacttggaatgatcaggtacatgggacagtaggagaaccttggtggatttgggtagaagatcctacaaatgatcatatttatcattcagagtattttctagctctaaaaaaacaagtcattagtaaagaagcccaactactggtatttacaatccctatttttgagcctttgccttcccaatactacatccgagcagtgtctgatagatggttgggtgctgaggcagtatgtattatcaactttcaacatctaattctaccagagagacatcctcctcatacagaattactggatcttcagcctttaccaatcacagctttgggatgtaaagcatatgaagccctgtacaacttcagccactttaaccctgtacagacacaaatatttcatacattgtatcacacggattgtaatgtcctacttggagcacctactggatcgggaaagactgttgcagctgaattagccattttcagagtcttcaacaaataccctacttcaaaggcggtatatattgcacccctaaaagccctagtacgtgaaagaatggatgattggaaagttagaatagaagaaaaacttggtaaaaaagttattgaactaacaggggatgtgactcctgatatgaaatccattgccaaggctgaccttatcgtcactacgccagagaagtgggatggagtcagcagaagctggcaaaataggaactatgttcagcaagtcactattctcatcatagatgagatccatctgcttggggaggaaagaggccctgttctagaggtcattgtatctcgaacaaattttatctcatcacacacagaaaagcctgttagaatagttggactatctactgcattagctaatgccagagaccttgctgattggctcaatattaagcagatgggcttgtttaacttccgaccatcagtacgcccagttccactggaagttcacattcaaggctttccaggtcaacattactgtcctcgtatggctagtatgaacaagcctgcatttcaggcaattagaagccattctccagccaaacctgttttgatatttgtctcatcaagacgtcaaactcgtcttactgctttggaattgatcgccttcctggctactgaagaagatccaaagcagtggttaaacatggatgaaagagagatggagaacatcattgcaacagtaagagattccaacctcaagctgacccttgctttcgggataggaatgcatcatgctggactacatgagagggaccgaaaaacagtagaggaactatttgtaaactgtaaagttcaggttcttattgctacaagcacattagcctggggtgtaaactttccagctcatttagtaattattaagggaacagaatactatgatggaaaaacaagacgttatgtggattttcccattacagatgtcctccagatgatggggcgtgctgggaggccgcagttcgatgaccaaggcaaagctgtaattctagttcatgacataaagaaagacttttataaaaaatttctttatgaacctttcccagtagaatcaagtttattaggagtgctctctgaccacttaaatgcagagattgctggtggtacaattacatctaagcaagatgcattggattatatcacctggacttactttttccgacgtcttatcatgaatcccagctattacaatttgggtgatgtgagccatgattctgtgaacaagtttctgtcccatctgattgagaagtccctgattgaattggaactttcctactgtattgaaattggagaggataatcgcagcattgaacctctaacttatggccgaattgcctcctattactatttgaagcatcaaacagttaaaatgttcaaggaccgcttgaagcctgaatgcagtactgaagaactgctttcaattctaagtgatgcagaagaatatacagatttgccagtgagacacaatgaagatcatatgaatagtgaactggcaaaatgtcttcccattgaatcaaatcctcattcatttgacagccctcacaccaaagcacatctcctgctacaggcacatctcagccgagccatgctaccctgcccagattatgacactgataccaaaacagtcttggaccaagctctcagagtatgtcaggcaatgctggacgtggctgcaaaccagggctggctggtgactgtcctgaatatcaccaacctgattcagatggtgatccagggtcggtggttaaaggactcttctcttcttacactaccaaacatagaaaaccatcatcttcaccttttcaagaaatggaagccgattatgaagggcccacatgctaggggtcggacctccatcgagtcccttcctgaactgatccatgcctgtggagggaaagaccatgtatttagctccatggtagaaagtgagctacatgctgcaaaaacgaaacaggcatggaatttcttatctcacttgccagtgataaatgttggcataagtgttaaaggctcgtgggatgacttagttgaaggacataatgaactctctgtctcaactctgactgcagacaaacgagatgacaacaaatggatcaaattgcatgctgaccaagagtatgtgcttcaagtgagcttgcagagagtccactttgggttccacaagggaaagccagagagctgtgcagttactcctcgatttcccaaatcaaaagacgaaggatggtttttgatattaggagaagtggataagagagaacttattgctttgaaaagagtaggatatattcgaaatcatcatgttgcttccctttctttttatacccctgaaatacctggaaggtatatctacacattatatttcatgagtgactgctaccttggcctggaccagcagtatgacatctatctcaacgttacacaagcgagtctttctgcacaggtcaacaccaaggtctctgattccctgactgacctggcattaaagtaacttgacctgaacaatccatttgaaaggagtggctaagaattctctctgttcagtcatctagacaaatcgaattacttgatgtttgccttgaaagaatcaacttctaacctcaaccatccaggaaattgacagtggctgcagtattgactccagtgacataaagttaaccacagtggccttttaacaaatgttgccttttataatgttatctttatgagtttcttgatatgtaagatgaaaaagcatttagaataatcttttaatttgtgtatatttgggatgatatttaggagctatcaatcaaattttacatctcacaatgtactgtttacatggatattggctgctttttttaaggaaaaccacattgagatgtgacaagtgttaggacttgtcacagatttctaactctgccgcataaactataaatctgtaaggtggtacacagcgtgtcttgttagcaaaatttatactttgatatgatcacatgtagaagtagcttcaagaatttcttgtagtcataaatgtttaataatatatgatgtaaaattatattatggagcctaatgatgataacaaagaaaacaatatactgatcttagaaaatgtagacatggttaactgggaaataaaatatagagtggcacttcaagacaagctgactcaatgttttcttctgcttcctttaaataatatccccttactcatctgttcttcttttctttcccttctacttcaaggctttatttctattatctttctgacatatttatttacagaagtagagaagtataatctaattcatgttgtagcacttacagatcatatagtacaattatttgtctttatgctctccaggaaaaatctgagacagaaaatttttcacccctatggataggttttcacctgtaataaagaaaatttctctatgtccaaacaaattccttcttgaaaaatactttttcaaactaaaaacttgttaaaattcaatgttcatataatatgcattctagtggaatgaaattctacctttgtgaaataatttcagttttcttagccctaaaatgaattattttaaaacattttccaatgtcattgttacaaatactagaatttaagtgtttctgaaattggaatgtattgcttgtatatatccttttccatgcttaaataaaaaagaagaagaaataaa

SEQ ID NO: 168385 - DNA, 6609 bp, Artificial Sequence
  derived and/or modified sequence
atggccctgcccagactgaccggcgccctgagaagcttcagcaacgtgaccaagcaggacaactacaacgaggaggtggccgacctgaagatcaagagaagcaagctgcacgagcaggtgctggacctgggcctgacctggaagaagatcatcaagttcctgaacgagaagctggagaagagcaagatgcagagcatcaacgaggacctgaaggacatcctgcacgccgccaagcagatcgtgggcaccgacaacggcagagaggccatcgagagcggcgccgccttcctgttcatgaccttccacctgaaggacagcgtgggccacaaggagaccaaggccatcaagcagatgttcggccccttccccagcagcagcgccaccgccgcctgcaacgccaccaacagaatcatcagccacttcagccaggacgacctgaccgccctggtgcagatgaccgagaaggagcacggcgacagagtgttcttcggcaagaacctggccttcagcttcgacatgcacgacctggaccacttcgacgagctgcccatcaacggcgagacccagaagaccatcagcctggactacaagaagttcctgaacgagcacctgcaggaggcctgcacccccgagctgaagcccgtggagaagaccaacggcagcttcctgtggtgcgaggtggagaagtacctgaacagcaccctgaaggagatgaccgaggtgcccagagtggaggacctgtgctgcaccctgtacgacatgctggccagcatcaagagcggcgacgagctgcaggacgagctgttcgagctgctgggccccgagggcctggagctgatcgagaagctgctgcagaacagaatcaccatcgtggacagattcctgaacagcagcaacgaccacagattccaggccctgcaggacaactgcaagaagatcctgggcgagaacgccaagcccaactacggctgccaggtgaccatccagagcgagcaggagaagcagctgatgaagcagtacagaagagaggagaagagaatcgccagaagagagaagaaggccggcgaggacctggaggtgagcgagggcctgatgtgcttcgaccccaaggagctgagaatccagagagagcaggccctgctgaacgccagaagcgtgcccatcctgagcagacagagagacgccgacgtggagaagatccactacccccacgtgtacgacagccaggccgaggccatgaagaccagcgccttcatcgccggcgccaagatgatcctgcccgagggcatccagagagagaacaacaagctgtacgaggaggtgagaatcccctacagcgagcccatgcccctgagcttcgaggagaagcccgtgtacatccaggacctggacgagatcggccagctggccttcaagggcatgaagagactgaacagaatccagagcatcgtgttcgagaccgcctacaacaccaacgagaacatgctgatctgcgcccccaccggcgccggcaagaccaacatcgccatgctgaccgtgctgcacgagatcagacagcacttccagcagggcgtgatcaagaagaacgagttcaagatcgtgtacgtggcccccatgaaggccctggccgccgagatgaccgactacttcagcagaagactggagcccctgggcatcatcgtgaaggagctgaccggcgacatgcagctgagcaagagcgagatcctgagaacccagatgctggtgaccacccccgagaagtgggacgtggtgaccagaaagagcgtgggcgacgtggccctgagccagatcgtgagactgctgatcctggacgaggtgcacctgctgcacgaggacagaggccccgtgctggagagcatcgtggccagaaccctgagacaggtggagagcacccagagcatgatcagaatcctgggcctgagcgccaccctgcccaactacctggacgtggccaccttcctgcacgtgaacccctacatcggcctgttcttcttcgacggcagattcagacccgtgcccctgggccagaccttcctgggcatcaagtgcgccaacaagatgcagcagctgaacaacatggacgaggtgtgctacgagaacgtgctgaagcaggtgaaggccggccaccaggtgatggtgttcgtgcacgccagaaacgccaccgtgagaaccgccatgagcctgatcgagagagccaagaactgcggccacatccccttcttcttccccacccagggccacgactacgtgctggccgagaagcaggtgcagagaagcagaaacaagcaggtgagagagctgttccccgacggcttcagcatccaccacgccggcatgctgagacaggacagaaacctggtggagaacctgttcagcaacggccacatcaaggtgctggtgtgcaccgccaccctggcctggggcgtgaacctgcccgcccacgccgtgatcatcaagggcacccagatctacgccgccaagagaggcagcttcgtggacctgggcatcctggacgtgatgcagatcttcggcagagccggcagaccccagttcgacaagttcggcgagggcatcatcatcaccacccacgacaagctgagccactacctgaccctgctgacccagagaaaccccatcgagagccagttcctggagagcctggccgacaacctgaacgccgagatcgccctgggcaccgtgaccaacgtggaggaggccgtgaagtggatcagctacacctacctgtacgtgagaatgagagccaaccccctggcctacggcatcagccacaaggcctaccagatcgaccccaccctgagaaagcacagagagcagctggtgatcgaggtgggcagaaagctggacaaggcccagatgatcagattcgaggagagaaccggctacttcagcagcaccgacctgggcagaaccgccagccactactacatcaagtacaacaccatcgagaccttcaacgagctgttcgacgcccacaagaccgagggcgacatcttcgccatcgtgagcaaggccgaggagttcgaccagatcaaggtgagagaggaggagatcgaggagctggacaccctgctgagcaacttctgcgagctgagcacccccggcggcgtggagaacagctacggcaagatcaacatcctgctgcagacctacatcagcagaggcgagatggacagcttcagcctgatcagcgacagcgcctacgtggcccagaacgccgccagaatcgtgagagccctgttcgagatcgccctgagaaagagatggcccaccatgacctacagactgctgaacctgagcaaggtgatcgacaagagactgtggggctgggccagccccctgagacagttcagcatcctgcccccccacatcctgaccagactggaggagaagaagctgaccgtggacaagctgaaggacatgagaaaggacgagatcggccacatcctgcaccacgtgaacatcggcctgaaggtgaagcagtgcgtgcaccagatccccagcgtgatgatggaggccagcatccagcccatcaccagaaccgtgctgagagtgaccctgagcatctacgccgacttcacctggaacgaccaggtgcacggcaccgtgggcgagccctggtggatctgggtggaggaccccaccaacgaccacatctaccacagcgagtacttcctggccctgaagaagcaggtgatcagcaaggaggcccagctgctggtgttcaccatccccatcttcgagcccctgcccagccagtactacatcagagccgtgagcgacagatggctgggcgccgaggccgtgtgcatcatcaacttccagcacctgatcctgcccgagagacaccccccccacaccgagctgctggacctgcagcccctgcccatcaccgccctgggctgcaaggcctacgaggccctgtacaacttcagccacttcaaccccgtgcagacccagatcttccacaccctgtaccacaccgactgcaacgtgctgctgggcgcccccaccggcagcggcaagaccgtggccgccgagctggccatcttcagagtgttcaacaagtaccccaccagcaaggccgtgtacatcgcccccctgaaggccctggtgagagagagaatggacgactggaaggtgagaatcgaggagaagctgggcaagaaggtgatcgagctgaccggcgacgtgacccccgacatgaagagcatcgccaaggccgacctgatcgtgaccacccccgagaagtgggacggcgtgagcagaagctggcagaacagaaactacgtgcagcaggtgaccatcctgatcatcgacgagatccacctgctgggcgaggagagaggccccgtgctggaggtgatcgtgagcagaaccaacttcatcagcagccacaccgagaagcccgtgagaatcgtgggcctgagcaccgccctggccaacgccagagacctggccgactggctgaacatcaagcagatgggcctgttcaacttcagacccagcgtgagacccgtgcccctggaggtgcacatccagggcttccccggccagcactactgccccagaatggccagcatgaacaagcccgccttccaggccatcagaagccacagccccgccaagcccgtgctgatcttcgtgagcagcagaagacagaccagactgaccgccctggagctgatcgccttcctggccaccgaggaggaccccaagcagtggctgaacatggacgagagagagatggagaacatcatcgccaccgtgagagacagcaacctgaagctgaccctggccttcggcatcggcatgcaccacgccggcctgcacgagagagacagaaagaccgtggaggagctgttcgtgaactgcaaggtgcaggtgctgatcgccaccagcaccctggcctggggcgtgaacttccccgcccacctggtgatcatcaagggcaccgagtactacgacggcaagaccagaagatacgtggacttccccatcaccgacgtgctgcagatgatgggcagagccggcagaccccagttcgacgaccagggcaaggccgtgatcctggtgcacgacatcaagaaggacttctacaagaagttcctgtacgagcccttccccgtggagagcagcctgctgggcgtgctgagcgaccacctgaacgccgagatcgccggcggcaccatcaccagcaagcaggacgccctggactacatcacctggacctacttcttcagaagactgatcatgaaccccagctactacaacctgggcgacgtgagccacgacagcgtgaacaagttcctgagccacctgatcgagaagagcctgatcgagctggagctgagctactgcatcgagatcggcgaggacaacagaagcatcgagcccctgacctacggcagaatcgccagctactactacctgaagcaccagaccgtgaagatgttcaaggacagactgaagcccgagtgcagcaccgaggagctgctgagcatcctgagcgacgccgaggagtacaccgacctgcccgtgagacacaacgaggaccacatgaacagcgagctggccaagtgcctgcccatcgagagcaacccccacagcttcgacagcccccacaccaaggcccacctgctgctgcaggcccacctgagcagagccatgctgccctgccccgactacgacaccgacaccaagaccgtgctggaccaggccctgagagtgtgccaggccatgctggacgtggccgccaaccagggctggctggtgaccgtgctgaacatcaccaacctgatccagatggtgatccagggcagatggctgaaggacagcagcctgctgaccctgcccaacatcgagaaccaccacctgcacctgttcaagaagtggaagcccatcatgaagggcccccacgccagaggcagaaccagcatcgagagcctgcccgagctgatccacgcctgcggcggcaaggaccacgtgttcagcagcatggtggagagcgagctgcacgccgccaagaccaagcaggcctggaacttcctgagccacctgcccgtgatcaacgtgggcatcagcgtgaagggcagctgggacgacctggtggagggccacaacgagctgagcgtgagcaccctgaccgccgacaagagagacgacaacaagtggatcaagctgcacgccgaccaggagtacgtgctgcaggtgagcctgcagagagtgcacttcggcttccacaagggcaagcccgagagctgcgccgtgacccccagattccccaagagcaaggacgagggctggttcctgatcctgggcgaggtggacaagagagagctgatcgccctgaagagagtgggctacatcagaaaccaccacgtggccagcctgagcttctacacccccgagatccccggcagatacatctacaccctgtacttcatgagcgactgctacctgggcctggaccagcagtacgacatctacctgaacgtgacccaggccagcctgagcgcccaggtgaacaccaaggtgagcgacagcctgaccgacctggccctgaagtag

SEQ ID NO: 168386 - protein, 55 aa, Artificial Sequence
  derived and/or modified sequence
MASKGLQDLKQQVEGTAQEAAMDQLAKTTQETIDKTANQASDTFSGIGKKFGLLK

SEQ ID NO: 168387 - protein, 76 aa, Artificial Sequence
  derived and/or modified sequence
MASKGLQDLKQQVEGTAQEAVSAAGAAAQQVVDQATEAGQKAMDQLAKTTQETIDKTANQASDTFSGIGKKFGLLK

SEQ ID NO: 168388 - protein, 38 aa, Artificial Sequence
  derived and/or modified sequence
MASKGLQDLKQQVEGTAQEAAMDQLAKTTQETIDKTAN

SEQ ID NO: 168389 - DNA, 361 bp, Artificial Sequence
  derived and/or modified sequence
cgtcgctccagctgctcttgacgactccacagataccccgaagccatggcaagcaagggcttgcaggacctgaagcaacaggtggaggggaccgcccaggaagccgccatggaccagctggccaagaccacccaggaaaccatcgacaagactgctaaccaggcctctgacaccttctctgggattgggaaaaaattcggcctcctgaaatgacagcagggagacttgggtcggcctcctgaaatgacagcagggagacttgggtgaccccccttccaggcgccatctagcacagcctggccctgatctccgggcagccaccacctcctcggtctgccccctcattaaaattcacgttccc

SEQ ID NO: 168390 - DNA, 917 bp, Artificial Sequence
  derived and/or modified sequence
aaagggagggctggggctgatgagctgggaggtggtgtgcgcccttctcctgcctccagctcctctctggacccctgtcctggcacctcttcggtccctggttcggtctgcccctttcccaccgcggcccgtcttaggccaggatgtgctccctgccctgcggactctggagcagggcccggccactccccggagcctgtatgacgggaaccgccccgcgccctctcccctacgcggggcaggccagccctggggcgccttaaaaaccggagctggcgcttggcatcgccactctgggcaggatccaacgtcgctccagctgctcttgacgactccacagataccccgaagccatggcaagcaagggcttgcaggacctgaagcaacaggtggaggggaccgcccaggaagccgtgtcagcggccggagcggcagctcagcaagtggtggaccaggccacagaggcggggcagaaagccatggaccagctggccaagaccacccaggaaaccatcgacaagactgctaaccaggcctctgacaccttctctgggattgggaaaaaattcggcctcctgaaatgacagcagggagacttgggtcggcctcctgaaatgacagcagggagacttgggtgaccccccttccaggcgccatctagcacagcctggccctgatctccgggcagccaccacctcctcggtctgccccctcattaaaattcacgttcccaccctgtgtccacttcatgattcctcgcaagctgggcccagtcctctcatcccaagagcagagccaccgtagccggagtcctagcctcccaaattcggaaatccaatccaacggtctcaggaatgttttccatcccgccacgcgcctcccgaagctcccagaccggaggctcagcccccatctcg

SEQ ID NO: 168391 - DNA, 229 bp, Artificial Sequence
  derived and/or modified sequence
aggccagccctggggcgccttaaaaaccggagctggcgcttggcatcgccactctgggcaggatccaacgtcgctccagctgctcttgacgactccacagataccccgaagccatggcaagcaagggcttgcaggacctgaagcaacaggtggaggggaccgcccaggaagccgccatggaccagctggccaagaccacccaggaaaccatcgacaagactgctaacca

SEQ ID NO: 168392 - DNA, 168 bp, Artificial Sequence
  derived and/or modified sequence
atggccagcaagggcctgcaggacctgaagcagcaggtggagggcaccgcccaggaggccgccatggaccagctggccaagaccacccaggagaccatcgacaagaccgccaaccaggccagcgacaccttcagcggcatcggcaagaagttcggcctgctgaagtag

SEQ ID NO: 168393 - DNA, 231 bp, Artificial Sequence
  derived and/or modified sequence
atggccagcaagggcctgcaggacctgaagcagcaggtggagggcaccgcccaggaggccgtgagcgccgccggcgccgccgcccagcaggtggtggaccaggccaccgaggccggccagaaggccatggaccagctggccaagaccacccaggagaccatcgacaagaccgccaaccaggccagcgacaccttcagcggcatcggcaagaagttcggcctgctgaagtag

SEQ ID NO: 168394 - DNA, 117 bp, Artificial Sequence
  derived and/or modified sequence
atggccagcaagggcctgcaggacctgaagcagcaggtggagggcaccgcccaggaggccgccatggaccagctggccaagaccacccaggagaccatcgacaagaccgccaactag

SEQ ID NO: 168395 - DNA, 168 bp, Artificial Sequence
  derived and/or modified sequence
atggcgtccaagggcttgcaggacctgaaacaacaagttgagggcaccgcacaggaagctgccatggaccagctggctaaaaccacacaagagacaattgataaaaccgcaaaccaggccagcgacactttctcagggatcggtaaaaagttcggtctcctgaaatag

SEQ ID NO: 168396 - DNA, 231 bp, Artificial Sequence
  derived and/or modified sequence
atggcctccaaaggactccaggatttgaagcaacaagtggagggcacagcccaggaggccgtctctgcggccggtgctgccgcacagcaggtggtcgaccaggccaccgaggccgggcagaaagctatggaccagttggccaagacgactcaggaaaccattgacaaaacagccaaccaagcctcagataccttcagtggtatcggcaaaaaatttggcttgctgaagtag

SEQ ID NO: 168397 - DNA, 117 bp, Artificial Sequence
  derived and/or modified sequence
atggccagcaagggactacaggatctgaaacagcaggtcgagggcaccgcccaggaggccgccatggatcagctggccaaaaccacccaggaaactattgataagacggccaactag

SEQ ID NO: 168398 - DNA, 168 bp, Artificial Sequence
  derived and/or modified sequence
atggccagcaagggcctgcaggacctgaagcagcaggtggagggcacagcccaggaggccgccatggaccagctggccaagaccacccaggagaccatcgacaagacagccaaccaggccagtgacaccttctctggaattggcaagaagtttggcctgctgaagtag

SEQ ID NO: 168399 - DNA, 231 bp, Artificial Sequence
  derived and/or modified sequence
atggccagcaagggcctgcaggacctgaagcagcaggtggagggcacagcccaggaggccgtgtctgctgctggagctgctgcccagcaggtggtggaccaggccacagaggccggccagaaggccatggaccagctggccaagaccacccaggagaccatcgacaagacagccaaccaggccagtgacaccttcagcggcatcggcaagaagtttggcctgctgaagtag

SEQ ID NO: 168400 - DNA, 117 bp, Artificial Sequence
  derived and/or modified sequence
atggccagcaagggcctgcaggacctgaagcagcaggtggagggcacagcccaggaggccgccatggaccagctggccaagaccacccaggagaccatcgacaagacagccaactag

SEQ ID NO: 168401 - DNA, 168 bp, Artificial Sequence
  derived and/or modified sequence
atggccagcaagggcctgcaggacctgaagcagcaggtggagggcaccgcacaagaagcagccatggatcagctcgctaagacaacacaagagactatcgacaaaacagccaatcaggcctcagacaccttcagcggcatcggaaaaaaatttggtctgcttaaatag

SEQ ID NO: 168402 - DNA, 231 bp, Artificial Sequence
  derived and/or modified sequence
atggccagcaagggcctgcaggacctgaagcagcaggtggagggcacggcccaggaagccgtctcggccgcaggagctgctgcccagcaggtagtggaccaggccacagaggccggacagaaggcaatggatcagctggcgaagacaactcaggaaacaatagacaagaccgctaaccaagcttctgatactttttctggcattgggaagaaattcggcttgctgaaatag

SEQ ID NO: 168403 - DNA, 117 bp, Artificial Sequence
  derived and/or modified sequence
atggccagcaagggcctgcaggacctgaagcagcaggtggagggcactgcgcaggaagccgccatggaccagctcgctaagactacccaggaaacaatcgacaagaccgctaactag

SEQ ID NO: 168404 - DNA, 168 bp, Artificial Sequence
  derived and/or modified sequence
atggcaagcaaagggttgcaggatttgaaacagcaggtcgagggtaccgctcaggaagcagccatggatcagcttgctaagacaactcaagaaaccatcgataagacagctaaccaagcaagtgatacctttagtggaatcggcaagaagtttgggctcctgaaatag

SEQ ID NO: 168405 - DNA, 231 bp, Artificial Sequence
  derived and/or modified sequence
atggcatcaaagggactgcaagatttgaaacagcaggtggaggggaccgcacaggaggcagtcagcgccgctggcgctgccgctcaacaggtggtcgaccaagctactgaagctggtcagaaggccatggaccagttggccaagactacgcaagagactattgataaaaccgcaaaccaggctagcgatacattcagcggtattgggaaaaagttcgggttattgaagtag

SEQ ID NO: 168406 - DNA, 117 bp, Artificial Sequence
  derived and/or modified sequence
atggcatccaaaggcctgcaggacctgaaacagcaagtggagggcactgctcaagaagccgctatggatcaactggcaaagaccacacaggaaaccatcgacaagactgccaattag

SEQ ID NO: 168407 - protein, 425 aa, Artificial Sequence
  derived and/or modified sequence
MGEEANDDKKPTTKFELERETELRFEVEASQSVQLELLTGMAEIFGTELTRNKKFTFDAGAKVAVFTWHGCSVQLSGRTEVAYVSKDTPMLLYLNTHTALEQMRRQAEKEEERGPRVMVVGPTDVGKSTVCRLLLNYAVRLGRRPTYVELDVGQGSVSIPGTMGALYIERPADVEEGFSIQAPLVYHFGSTTPGTNIKLYNKITSRLADVFNQRCEVNRRASVSGCVINTCGWVKGSGYQALVHAASAFEVDVVVVLDQERLYNELKRDLPHFVRTVLLPKSGGVVERSKDFRRECRDERIREYFYGFRGCFYPHAFNVKFSDVKIYKVGAPTIPDSCLPLGMSQEDNQLKLVPVTPGRDMVHHLLSVSTAEGTEENLSETSVAGFIVVTSVDLEHQVFTVLSPAPRPLPKNFLLIMDIRFMDLK

SEQ ID NO: 168408 - protein, 436 aa, Artificial Sequence
  derived and/or modified sequence
MTDLHSSYTEEMGEEANDDKKPTTKFELERETELRFEVEASQSVQLELLTGMAEIFGTELTRNKKFTFDAGAKVAVFTWHGCSVQLSGRTEVAYVSKDTPMLLYLNTHTALEQMRRQAEKEEERGPRVMVVGPTDVGKSTVCRLLLNYAVRLGRRPTYVELDVGQGSVSIPGTMGALYIERPADVEEGFSIQAPLVYHFGSTTPGTNIKLYNKITSRLADVFNQRCEVNRRASVSGCVINTCGWVKGSGYQALVHAASAFEVDVVVVLDQERLYNELKRDLPHFVRTVLLPKSGGVVERSKDFRRECRDERIREYFYGFRGCFYPHAFNVKFSDVKIYKVGAPTIPDSCLPLGMSQEDNQLKLVPVTPGRDMVHHLLSVSTAEGTEENLSETSVAGFIVVTSVDLEHQVFTVLSPAPRPLPKNFLLIMDIRFMDLK

SEQ ID NO: 168409 - protein, 92 aa, Artificial Sequence
  derived and/or modified sequence
MGEEANDDKKPTTKFELERETELRFEVEASQSVQLELLTGMAEIFGTELTRNKKFTFDAGAKVAVFTWHGCSVQLSGRTEVAYVSKDTPMLL

SEQ ID NO: 168410 - protein, 132 aa, Artificial Sequence
  derived and/or modified sequence
MGEEANDDKKPTTKFELERETELRFEVEASQSVQLELLTGMAEIFGTELTRNKKFTFDAGAKVAVFTWHGCSVQLSGRTEVAYVSKDTPMLLYLNTHTALEQMRRQAEKEEERGPRVMVVGPTDVGKSTVCR

SEQ ID NO: 168411 - DNA, 1278 bp, Artificial Sequence
  derived and/or modified sequence
atgggtgaagaagctaacgatgataaaaagcctaccaccaaattcgagctggaacgggagacagaactgcgcttcgaggtggaggcttcccagagcgtgcagctggagctgctgactggcatggcagagatcttcggaacagagctaacaaggaataaaaaattcacatttgacgccggggcaaaggtggcggtgtttacatggcatggctgtagcgtccagctgtctggcaggaccgaggtcgcctacgtgagcaaggataccccaatgctgctgtacttgaatacccacacagccctcgagcagatgcggcgccaagccgagaaggaggaagagcggggaccacgagtgatggtggtggggcccaccgatgtgggcaaaagcacagtgtgccggctgctgctcaactacgctgtgcgactgggaagaaggcctacgtacgtcgagttggatgtaggccagggaagcgtgtcaatccccgggacaatgggcgcgctgtacattgaaaggcccgcggatgtggaggagggcttcagcatccaagcacccctcgtctatcacttcgggagtacaactcctggcacaaatataaagctttacaataagatcacatcccggttggccgacgtctttaatcagcggtgtgaagtcaaccggagagccagcgtgtccggctgtgtcatcaacacttgtggttgggttaaagggagcggctatcaggccctcgttcacgctgcctctgcatttgaggtggacgtcgtcgtggttctggaccaggagcgactttacaatgaactgaaaagggatttgccacatttcgtacgaaccgtgctgcttcctaagtctggcggtgtcgttgagcgctctaaggacttccgcagggaatgccgggatgaacgaatccgggagtatttctatgggttccgggggtgcttctacccacacgcattcaatgtgaaatttagcgatgtgaagatttacaaagttggagcacccacaattcccgattcgtgtctgccactgggaatgagccaggaggacaatcagctgaaactggtaccagtcactcctggcagggatatggtgcaccatctacttagtgtttcaacagctgagggcacggaggaaaatctaagcgagacctccgtcgcaggctttattgtcgtgacctcagttgacctagagcaccaggtgtttacagttctgagcccagctcccagacctttgcctaagaatttcctgctgattatggacatcaggtttatggatctcaagtag

SEQ ID NO: 168412 - DNA, 1311 bp, Artificial Sequence
  derived and/or modified sequence
atgaccgatctgcattcctcctatactgaggaaatgggggaggaagccaatgatgacaaaaaacccactacaaagttcgaactcgaaagagaaactgagttgaggtttgaagtggaagccagccagagcgtccagctggagttactcactgggatggctgagattttcggcactgaactgaccagaaataaaaagtttacattcgatgccggcgcgaaagtagcggtgtttacctggcatggatgctctgtacagctgagcggccgcacagaagtagcttacgtttccaaggacaccccaatgctgctgtatttgaatacacacaccgcgctcgagcaaatgagaaggcaggccgagaaagaggaggagcgcggcccaagggttatggtggtggggccaaccgatgtgggaaagtccacagtctgtcggctgctactgaactatgctgttcggctaggccggcgaccaacttatgtcgagttggatgtcggccagggaagcgttagtattcccggtactatgggcgctctatatatcgaacgcccagccgatgtggaggaggggttcagcatccaggcgcccctggtttaccacttcggctccaccacaccgggaaccaacataaagctgtacaacaaaatcacttcccgcttggctgatgtgtttaaccagcgctgtgaagttaacaggagagcgagtgtgagcggatgtgttataaacacctgcggttgggtgaagggatccggctaccaagcactggttcacgcagcctccgcctttgaagtggatgtcgtcgtcgtactggaccaggaacggttgtataacgaactcaaacgggatctgccgcattttgtccgaacagtgctgctccctaaaagcggcggggtggtagagagatcgaaggacttccgtagggagtgtcgagacgagaggatccgggagtacttctatggctttcgggggtgcttttacccacatgctttcaatgtcaaattctctgatgtgaagatctacaaggtgggagctccgaccataccagattcttgtctcccgttggggatgtcgcaagaagataatcagctgaagctcgtgcctgtaactccgggcagagatatggtacaccacctgctgtcagtcagcaccgcagaggggaccgaggaaaacctgtcagagacttctgtggccggatttatagttgtcacttccgtggacctggaacaccaggtgttcacagttctcagtccagccccgcgaccactgcccaaaaattttttgctgatcatggacatccgtttcatggacctgaagtag

SEQ ID NO: 168413 - DNA, 1278 bp, Artificial Sequence
  derived and/or modified sequence
atgggcgaagaggccaatgatgacaagaaacctaccaccaaattcgagctggagagagagaccgaactccggttcgaggtcgaggcatcccagagtgtacagttagaactgctgactggaatggctgagattttcggcacagagttgactagaaataaaaagtttacattcgacgcaggggccaaagtcgctgtgttcacctggcatggttgcagcgtacagctgagtgggcggaccgaggttgcatatgtgtctaaggatacccccatgcttctgtacctgaatactcacacagccctggaacagatgcgtaggcaggccgagaaggaggaggagcgcggtccaagggtcatggtggtgggtcccacggatgtcggcaagagcaccgtatgtaggctgttgcttaactacgcagttcgcctgggccgacggccaacgtacgtggagctagacgtgggccaggggagcgtttctattcccggtacgatgggcgctctctacatagagagacctgccgacgttgaggagggcttctctatccaggcgcccctagtgtatcattttggttccaccacccccggcactaacatcaagctgtataataagattacgtcccgattggctgacgtcttcaatcaacggtgtgaagttaacagaagagccagcgtctcgggctgcgtgatcaacacatgtggatgggtgaagggatctggataccaggctttggtgcatgctgcctcagcctttgaggtagatgtagtggtggtcctagaccaggaacgactctacaatgagctgaagcgtgacttgcctcattttgttagaacggtcctgctgcccaagtcagggggcgtcgtggaacgttccaaggatttccgccgagagtgcagagacgagcgcatcagagagtacttctacggattccgcggatgtttttacccacatgctttcaatgtgaaattctctgacgtgaaaatctacaaggtgggtgcaccgacaattcccgattcttgcctaccactcggaatgagccaggaggataaccagctgaagttggtacccgtcacccccggccgggacatggtccaccacttactctcggtctcaacagcggagggcacagaagagaatctatcagagacctcagtggcgggttttatagtcgtgacatctgtagatctggaacatcaggtgtttaccgtcctaagccccgcgccaagacctctgcccaaaaactttctgctgatcatggatatacgttttatggacctcaagtag

SEQ ID NO: 168414 - DNA, 1278 bp, Artificial Sequence
  derived and/or modified sequence
atgggagaggaggccaatgatgacaagaagcccaccaccaagtttgagctggagcgggagacagagctgcgctttgaggtggaggccagccagagcgtgcagctggagctgctgaccggcatggccgagatctttggaacagagctgaccaggaacaagaagttcacctttgatgctggggccaaggtggccgtgttcacctggcacggctgcagcgtgcagctgagcggccgcacagaggtggcctacgtgtccaaggacacccccatgctgctgtacctgaacacccacacagccctggagcagatgaggcggcaggccgagaaggaggaggagcggggcccccgggtgatggtggtgggccccacagatgtgggcaagagcacagtgtgccgcctgctgctgaactatgctgtgcggctgggcagaagacccacctacgtggagctggatgtgggccagggctctgtgtccatccctggcaccatgggcgccctgtacatcgagaggcctgcagatgtggaggagggcttcagcatccaggcccccctggtgtaccacttcggcagcaccaccccaggcaccaacatcaagctgtacaacaagatcaccagccggctggctgatgtgttcaaccagagatgtgaggtgaacagaagagcctctgtgtctggctgcgtcatcaacacctgtggctgggtgaagggcagcggctaccaggccctggtgcatgctgccagcgcctttgaggtggatgtggtggtggtgctggaccaggagcggctgtacaatgagctgaagagggacctgccccactttgtgaggacagtgctgctgcccaagagcggcggcgtggtggagaggagcaaggacttcagaagagaatgtagagatgagcgcatccgggagtacttctacggcttccggggctgcttctacccccacgccttcaacgtgaagttcagtgatgtgaagatctacaaggtgggcgcccccaccatcccagacagctgcctgcccctgggcatgagccaggaggacaaccagctgaagctggtgcctgtgaccccaggccgggacatggtgcaccacctgctgtctgtgtccacagctgagggcacagaggagaacctgtctgagacctctgtggccggcttcatcgtggtgacctctgtggacctggagcaccaggtgttcaccgtgctgagccctgccccccggcccctgcccaagaacttcctgctgatcatggacatccgcttcatggacctgaagtag

SEQ ID NO: 168415 - DNA, 1311 bp, Artificial Sequence
  derived and/or modified sequence
atgacagacctgcacagcagctacacagaggagatgggagaggaggccaatgatgacaagaagcccaccaccaagtttgagctggagcgggagacagagctgcgctttgaggtggaggccagccagagcgtgcagctggagctgctgaccggcatggccgagatcttcggcacagagctgaccaggaacaagaagttcacctttgatgctggggccaaggtggccgtgttcacctggcacggctgcagcgtgcagctgagcggccgcacagaggtggcctacgtgtccaaggacacccccatgctgctgtacctgaacacccacacagccctggagcagatgaggcggcaggccgagaaggaggaggagcggggcccccgggtgatggtggtgggccccacagatgtgggcaagagcacagtgtgccgcctgctgctgaactatgctgtgcggctgggccggcggcccacctacgtggagctggatgtgggccagggctctgtgtccatccctggcaccatgggcgccctgtacatcgagaggcctgcagatgtggaggagggcttcagcatccaggcccccctggtgtaccacttcggcagcaccaccccaggcaccaacatcaagctgtacaacaagatcaccagccggctggctgatgtgttcaaccagagatgtgaggtgaacagaagagcctctgtgtctggctgtgtgatcaacacctgtggctgggtgaagggcagcggctaccaggccctggtgcacgccgccagcgcctttgaggtggatgtggtggtggtgctggaccaggagcggctgtacaatgagctgaagagggacctgccccactttgtgaggacagtgctgctgcccaagtctggaggagtggtggagaggagcaaggacttccggcgggagtgcagagatgagcgcatccgggagtacttctacggcttccggggctgcttctacccccacgccttcaacgtgaagttcagtgatgtgaagatctacaaggtgggcgcccccaccatcccagacagctgcctgcccctgggcatgagccaggaggacaaccagctgaagctggtgcctgtgaccccaggccgggacatggtgcaccacctgctgtctgtgtccacagctgagggcacagaggagaacctgtctgagacctctgtggccggcttcatcgtggtgacctctgtggacctggagcaccaggtgttcaccgtgctgagccctgccccccggcccctgcccaagaacttcctgctgatcatggacatccgcttcatggacctgaagtag

SEQ ID NO: 168416 - DNA, 1278 bp, Artificial Sequence
  derived and/or modified sequence
atgggcgaggaggccaacgacgacaagaagcccaccaccaagttcgaacttgaacgcgagacggagctccggtttgaggttgaggcttcacagagcgtgcagttagagctgttgaccggcatggccgagatctttggcaccgagctgacaaggaataagaaattcacgttcgatgccggcgctaaggtagccgtttttacatggcacggttgctcagtgcagctttctggccgaactgaagtggcatatgtctctaaggataccccgatgctcctatatctgaacacccataccgctctggaacagatgcggcgtcaggccgaaaaggaggaagagaggggaccccgcgtgatggtggtgggccccaccgatgtgggaaagtcgacggtgtgcaggctcctgttgaactacgcagtgcgcctcggaaggcgacctacttatgtggagttagatgttgggcagggctcagtgagtataccaggaacgatgggtgccctttatatcgagcgcccagccgacgtcgaggaagggttctctatccaggcgcccctggtttaccactttggtagcaccacacccggaaccaatataaaattgtataacaaaataaccagccggctcgctgatgtgttcaaccagcggtgcgaggtgaataggagagcctccgtatccggatgtgtgatcaatacatgtggatgggtgaaggggagtggataccaggcacttgtccacgcggcaagcgcatttgaggttgacgtggtcgtggtactcgatcaagagagattgtataatgagttgaagcgcgatctgccccattttgtcagaacagttttgctgcctaaatccgggggagtggttgaaaggtcaaaagactttcgccgcgagtgccgcgatgagcgcatcagggaatacttttacggctttcgcggatgcttctacccccacgcctttaatgtgaaattctctgacgtgaaaatttacaaggtcggcgccccaaccatcccagactcctgcttacctcttggcatgtcccaggaagataatcaacttaagctagtcccggttacgcctgggagggacatggtgcatcacttactgtcagtcagcaccgccgagggcaccgaggagaatctgagcgagacctctgtcgccggttttatcgtcgtaacttctgtggacctcgagcaccaggtttttacagtgctctctcctgcacctcgaccactccccaagaatttccttctgatcatggatattagatttatggatcttaaatag

SEQ ID NO: 168417 - DNA, 1311 bp, Artificial Sequence
  derived and/or modified sequence
atgaccgacctgcacagcagctacaccgaggagatgggcgaggaggctaatgacgacaagaaaccaaccacgaagttcgagctggagcgagaaactgagttacgttttgaagttgaagcctcccaatcagtacagcttgaactcctgacaggaatggctgaaatttttggaactgagttaacccgcaataaaaaattcaccttcgacgcaggagccaaggttgctgtattcacctggcacggctgctctgtgcagctgtcaggccggaccgaagtggcttatgtgagcaaagatacacctatgctgttgtatctgaacacgcataccgccctagagcagatgcgtcggcaggctgagaaagaggaggaacgtggaccaagggtgatggtggtaggcccaaccgacgtcggtaaatctacggtgtgcagactcttactgaactatgccgtcagactgggacggcgacccacttatgtggagttagatgttggccaagggtcagtgtctatcccagggacgatgggggcgttgtacatcgagcgcccagctgatgtggaagaaggcttctcgatccaggccccgctggtgtaccatttcggatctacaacaccgggaactaatatcaaactctacaacaagatcactagccgactggccgacgtgttcaatcaaagatgcgaggttaatagacgtgcctctgtctcaggctgtgtgatcaacacctgtgggtgggttaaggggtcaggttaccaggccctagtccacgccgcatctgcttttgaggttgatgtcgtggtcgtgctggatcaggaacgcctatacaacgaacttaaaagggacctgccacattttgtgagaaccgtgctcctaccgaagagcggaggagtcgtggaacgctccaaggactttagacgggagtgcagagatgaaagaatcagggagtacttctacggcttccgtgggtgcttctacccccacgcattcaatgttaagttcagtgacgtgaagatctacaaggtgggcgccccgaccatcccagacagttgtctccccctgggaatgtcacaggaggataaccaactgaagctcgtgcccgtaacaccaggcagggacatggtccaccacctgctgtccgtcagcactgcagagggtaccgaagagaacttatctgagacctctgtggccgggtttatcgtggtcacatctgtggatctcgagcaccaggtgttcaccgtgttatcccccgcccctagaccactgccaaagaatttcctcctaatcatggacatcaggtttatggacctgaaatag

SEQ ID NO: 168418 - DNA, 1278 bp, Artificial Sequence
  derived and/or modified sequence
atgggcgaggaggccaacgacgacaagaagcccaccaccaagttcgagctcgagagagaaacagaactgcgctttgaggtggaagcatctcaaagtgtgcagctggaactgctgacaggcatggcagagatcttcggcacagagctcactcggaacaagaaattcacttttgatgctggggcgaaagtcgctgtgtttacctggcatggctgttccgtgcaactctccggccgtaccgaggtcgcctacgtgtcaaaggacacaccgatgctcctgtatctcaatacacatacggcactggagcagatgaggagacaggcggagaaagaagaggagcggggaccacgggttatggttgtgggcccaacggatgtcggcaagagtactgtctgccgactcctactgaactatgcggtgcgcctgggacggcggccgacctatgttgagctggacgtggggcaggggtctgtgtccatccccgggaccatgggcgcactgtatattgagagaccagccgacgtcgaggagggattctctatccaagccccgttagtgtaccactttggctctacaactcccgggaccaatattaagctgtataacaagattacctccagattggcggatgtttttaatcagagatgtgaagtcaaccgcagggcaagcgtttccgggtgcgtgattaatacctgcggctgggtgaaaggctctggctaccaggctctcgtgcacgccgcttccgccttcgaggtggatgtggtggtagtgttggaccaagaacgattatacaacgagctcaagcgagatctgccacacttcgttaggaccgtcttgctgcccaagagcgggggggtcgtcgagcgcagcaaagattttcgtcgggagtgtcgcgacgaaagaattcgcgagtacttctacggcttccgggggtgtttttacccccatgccttcaacgttaaattttctgatgtgaaaatctacaaggtcggcgcccccactatccctgacagttgcctcccactcggaatgtcgcaagaggacaatcagctaaaactggttccagttacaccaggcagggacatggtgcaccacctgctgagtgtatctacagccgagggtaccgaggagaatctgagcgaaacatccgtggctggttttatcgttgtcacaagcgtggatctggagcatcaggtgttcacagtccttagccctgccccgagacccctgcccaaaaacttcctgctgatcatggatataaggttcatggacctgaaatag

SEQ ID NO: 168419 - DNA, 1278 bp, Artificial Sequence
  derived and/or modified sequence
atgggtgaggaggcaaatgatgacaagaagccgacgaccaaatttgagctcgagcgggagacagaactgcgcttcgaagtggaagcttctcaatccgtgcaattggagctgttgaccggcatggccgaaatctttggtaccgagctcacccggaataaaaaatttaccttcgacgcgggtgcaaaggtggctgtgtttacctggcatggttgttctgtccagcttagcggaaggactgaagtggcttatgtcagcaaggatacgccaatgctactgtatctgaacacccataccgcactagaacaaatgcgcagacaggcagaaaaagaagaggagcgagggccaagggtaatggtggttggtcccactgatgtcgggaaatccaccgtatgcagactcctcctgaattatgcggtccgactgggcaggaggcctacctatgtcgagctagatgtcgggcagggaagcgtgagtatacccggaaccatgggcgctctgtatatcgagcgacctgctgacgtggaggagggatttagtatccaggctccactggtctatcactttggttccacgacaccaggcaccaacatcaaactatataataaaatcacttcccggctggctgatgtgtttaaccagagatgcgaggtgaaccgacgagcgtccgtcagcggatgcgtgatcaatacctgtgggtgggtcaaagggtccgggtatcaggcgttggtccatgccgcatcagcattcgaagtggacgtggtggtcgttcttgaccaggagaggctttacaatgagctaaagagagacctgccgcatttcgttcgtaccgtgctcttgcctaagtccggaggggttgtcgagcgctcaaaggacttcagacgagagtgtcgcgatgagagaatccgggagtatttctacggttttcggggttgcttttatccgcacgccttcaatgtgaagttctcagacgttaagatctataaggtgggtgctcccacgatccctgatagctgtcttccccttggcatgagccaggaagacaatcaattgaagctggttccggtgacacccggacgggacatggtgcatcaccttttgtcagtttccactgccgagggcaccgaggaaaacctgagtgaaacctcagtggccggattcattgtagttacatccgtggacctggagcatcaggtgttcaccgtgcttagccccgctcctcggccacttccaaagaattttttgctaatcatggacatcagattcatggacctgaagtag

SEQ ID NO: 168420 - DNA, 1311 bp, Artificial Sequence
  derived and/or modified sequence
atgacagacctgcactcatcctacacagaggaaatgggagaggaagctaacgatgacaagaagcccaccactaagttcgagttggagcgcgagaccgaactgcggtttgaggtcgaggcttctcagtccgtccaactcgagctgctgacgggcatggcagaaattttcgggactgaactcacgaggaataaaaaattcacctttgacgccggagctaaagtggctgtgttcacttggcacggatgtagcgtccaactgtcgggcagaactgaggtggcttacgtttcaaaagatacaccaatgctattatacctgaatacacacacagcacttgagcagatgcggaggcaggccgagaaagaagaggagaggggacctagagttatggtggtcggacccaccgacgtgggtaagtccacagtctgcagacttctgctgaactacgccgtccggctgggcagaaggccaacatatgtcgaactggatgtgggacaggggtcagtgagtattccaggaacaatgggagccctgtacatagagagacccgcagatgtggaagaaggatttagtattcaggccccactggtgtaccattttggtagcactactcccggaactaacattaagctctacaataaaatcacctctcggttagccgacgtctttaatcaacgttgtgaagtgaataggagggcctccgtgagcggatgtgtaatcaacacttgtggatgggtaaagggttccggttaccaggccctggtgcacgcggcaagcgcctttgaagtcgacgtggtcgtggttctggatcaggaacgactgtacaatgaattgaaaagagacctaccccattttgtgcggaccgtgcttctcccgaagtcgggaggggtcgtcgagagatctaaggattttaggagggagtgtagggatgaacggatcagagagtatttctatggattccggggatgcttctatccacatgccttcaacgtgaaattcagtgacgtcaagatttacaaggtgggcgctcctactatcccagattcttgcttaccactgggcatgtcccaggaggacaatcagttgaagttggttccagttacgccagggagggatatggtgcatcatctgctgtccgtgtccacagctgagggcactgaagaaaatctctctgaaactagtgtcgcaggattcattgttgtgacttccgtggacctggaacaccaggtgtttactgtcctctctcctgcccctcggcctctgccaaagaacttccttctgatcatggatattcggtttatggacttgaagtag

SEQ ID NO: 168421 - DNA, 1278 bp, Artificial Sequence
  derived and/or modified sequence
atgggtgaagaggccaacgatgataagaaacctaccacaaagtttgagctggaaagagaaacagaattacggttcgaagttgaggcctcacagagtgtgcagctggagttgctgaccggcatggccgaaattttcggtaccgaattaactcgcaacaaaaagtttactttcgacgcaggcgctaaagtcgctgtattcacgtggcacgggtgctccgtccaattatcaggcagaaccgaagtagcttatgtgagcaaggatactcccatgctgttatatctgaacacccacacagcgctggaacaaatgcgacggcaggccgaaaaagaggaggagagaggccctcgcgtgatggtagtcggcccaacggacgtgggtaaatccactgtctgtaggctcctgcttaattacgccgtaaggttggggcgaaggcccacgtacgtagaactggatgtgggtcagggatctgtgtccattccaggcactatgggagccctctacattgagcgccctgcggacgtggaggaaggatttagcatacaggcccctctcgtgtaccatttcggctctactactccaggcaccaatattaagttgtacaacaagattacttccaggctcgcagatgtatttaaccaacgctgcgaggtgaatagacgggctagcgtgtctggatgcgtgatcaacacttgtggttgggtaaaaggcagcggttaccaggcactcgtgcacgctgcttccgccttcgaagtggatgttgtcgtagtcttggaccaggagcggctgtacaacgaactcaaacgagacctgccccattttgtgagaactgtgctgctacctaaatccggcggagttgtggagcgatccaaagactttcgtcgcgagtgcagagatgagagaatccgagaatacttctacgggttcaggggatgtttctacccccacgccttcaatgtaaaattctctgacgtcaagatatacaaagttggggcacctactatacctgattcctgtttgccactgggaatgtctcaggaggataaccagcttaagctggtgccagtgacacccggaagggatatggtgcatcacctcctgtccgttagcactgccgaaggaacagaagagaacctgagcgaaacatcggtggctggcttcatcgtggtcacgtctgtggatctggaacaccaggttttcacagtcctgtcgccggcaccacggcctctccctaagaactttctcttgataatggacataagatttatggatctgaagtag

SEQ ID NO: 168422 - DNA, 1392 bp, Artificial Sequence
  derived and/or modified sequence
ttgtttccggcgtgggtccgggcaagaaccgcttgtagtttggtttaaattctgcacgggaggaccttctgagtttacctgttgggctcctggctgcgcagctacacagaagagatgggagaagaggctaatgatgacaagaagccaaccactaaatttgaactagagcgagaaacagaacttcgctttgaggtggaggcatctcagtcagttcagttggagttgttgactggcatggcagagatctttggcacagagctgacccgaaacaagaaattcacctttgatgctggtgccaaggtggctgttttcacttggcatggctgttctgtgcaactgagcggccgcactgaggtggcttatgtctccaaggacactcctatgttgctttacctcaacactcacacagccttggaacagatgcggaggcaagcggaaaaggaagaagagcgaggtccccgagtgatggtagtgggccccactgatgtgggcaagtctacagtgtgtcgccttctgctcaactacgcagtgcgtttgggccgccgtcccacttatgtggagctggatgtgggccagggttctgtgtccatccctggtaccatgggggccctctacatcgagcggcctgcagatgtcgaagagggtttctctatccaggcccctctggtgtatcattttggttccaccactcctggcactaacatcaagctttataataagattacatctcgtttagcagatgtgttcaaccaaaggtgtgaggtgaaccgaagggcatctgtgagtggctgtgtcattaacacctgtggctgggtcaagggctctggttaccaggctctggtgcatgcagcctcagcttttgaggtggatgtcgttgttgttctggatcaagaacgactgtacaatgaactgaaacgggacctcccccactttgtacgcactgtgctgctccctaaatctgggggtgtggtggagcgctccaaggacttccggcgggaatgtagggatgagcgtatccgtgagtatttttatggattccgaggctgtttctatccccatgccttcaatgtcaaattttcagatgtgaaaatctacaaagttggggcacccaccatcccagactcctgtttacctttgggcatgtctcaagaggataatcagctcaagctagtacctgtcactcctgggcgagatatggtgcaccacctactgagtgttagcactgccgagggtacagaggagaacctgtccgagacaagtgtagctggcttcattgtggtgaccagtgtggacctggagcatcaggtgtttactgttctgtctccagcccctcgcccactgcctaagaacttccttctcatcatggatatccggttcatggatctgaagtag

SEQ ID NO: 168423 - DNA, 1778 bp, Artificial Sequence
  derived and/or modified sequence
aaggtagtaaaaagaggattatagacgtggtggaacctgttggctgcggggcaaatgactgacctgcacagcagctacacagaagagatgggagaagaggctaatgatgacaagaagccaaccactaaatttgaactagagcgagaaacagaacttcgctttgaggtggaggcatctcagtcagttcagttggagttgttgactggcatggcagagatctttggcacagagctgacccgaaacaagaaattcacctttgatgctggtgccaaggtggctgttttcacttggcatggctgttctgtgcaactgagcggccgcactgaggtggcttatgtctccaaggacactcctatgttgctttacctcaacactcacacagccttggaacagatgcggaggcaagcggaaaaggaagaagagcgaggtccccgagtgatggtagtgggccccactgatgtgggcaagtctacagtgtgtcgccttctgctcaactacgcagtgcgtttgggccgccgtcccacttatgtggagctggatgtgggccagggttctgtgtccatccctggtaccatgggggccctctacatcgagcggcctgcagatgtcgaagagggtttctctatccaggcccctctggtgtatcattttggttccaccactcctggcactaacatcaagctttataataagattacatctcgtttagcagatgtgttcaaccaaaggtgtgaggtgaaccgaagggcatctgtgagtggctgtgtcattaacacctgtggctgggtcaagggctctggttaccaggctctggtgcatgcagcctcagcttttgaggtggatgtcgttgttgttctggatcaagaacgactgtacaatgaactgaaacgggacctcccccactttgtacgcactgtgctgctccctaaatctgggggtgtggtggagcgctccaaggacttccggcgggaatgtagggatgagcgtatccgtgagtatttttatggattccgaggctgtttctatccccatgccttcaatgtcaaattttcagatgtgaaaatctacaaagttggggcacccaccatcccagactcctgtttacctttgggcatgtctcaagaggataatcagctcaagctagtacctgtcactcctgggcgagatatggtgcaccacctactgagtgttagcactgccgagggtacagaggagaacctgtccgagacaagtgtagctggcttcattgtggtgaccagtgtggacctggagcatcaggtgtttactgttctgtctccagcccctcgcccactgcctaagaacttccttctcatcatggatatccggttcatggatctgaagtagagatcagcaggaagccttgctgcctgggacatagagatcatctggccacccctagaggcagatgggctgagataaaagactgttggggccacctgaccagtaaactgtggactagtagaaagttcatattctacctctaaaaacaggtagtggtaacctgactcttctaatcttgaaccaaaaggaaaaccatgagactgtaattggtttcttagaccacctaagatgccactttgaattctctaagaccctggagaattgcatttctttcactgtgctactatgtggtttttaaaaaatcaatgctttatattccatatgtggttcttacccatttatctaggatgaaagtgtgaattagagggactccttccaataaagttcaaacttaaaaaaaatcattttaataaata

SEQ ID NO: 168424 - DNA, 2435 bp, Artificial Sequence
  derived and/or modified sequence
atgactgacttgtagctggaagaaatcatcggatttttattcttttattaaagaaaaaaaatttgaaatgccttccatgtgccaagcactgtgtcaggtgggagatgacagcttggtgaaacctctgtcaggctgtcttcctccgctttctctatccctgggtttccccctgcctaaaaaggattttgtgcttcgtggcttgtccaggcaagcaggccgtcgcgggacctagaccgagacagtgagtctctctttctcccgggcctcccttctgtttcctgggctgcaggggagcaggaaatctggggcgagattcccgccgcggacgcgcactgccgaagcctggtccctcgacctgtccctgcccagcgcgggggcgcaaccgccacgcctcctcacccctccctccggctgcacgaataatgacaacagccgcccctcccacctttggcgtcacgttcaaaacaatcctttgactacaactcccagaaggccgagcggcttagcgagtgcacccgctctcggctgctccggcaaactacacatcccaaagggcagcgcgcgaccgcgtgtcctttcacagcgcaagtgcggaactgcgtttgtttccggcgtgggtccgggcaagaaccgcttgtagtttggtttaaattctgcacgggaggaccttctgagtttacctgttgggctcctggctgcgcaggcacagcagctacacagaagagatgggagaagaggctaatgatgacaagaagccaaccactaaatttgaactagagcgagaaacagaacttcgctttgaggtggaggcatctcagtcagttcagttggagttgttgactggcatggcagagatctttggcacagagctgacccgaaacaagaaattcacctttgatgctggtgccaaggtggctgttttcacttggcatggctgttctgtgcaactgagcggccgcactgaggtggcttatgtctccaaggacactcctatgttgctttacctcaacactcacacagccttggaacagatgcggaggcaagcggaaaaggaagaagagcgaggtccccgagtgatggtagtgggccccactgatgtgggcaagtctacagtgtgtcgccttctgctcaactacgcagtgcgtttgggccgccgtcccacttatgtggagctggatgtgggccagggttctgtgtccatccctggtaccatgggggccctctacatcgagcggcctgcagatgtcgaagagggtttctctatccaggcccctctggtgtatcattttggttccaccactcctggcactaacatcaagctttataataagattacatctcgtttagcagatgtgttcaaccaaaggtgtgaggtgaaccgaagggcatctgtgagtggctgtgtcattaacacctgtggctgggtcaagggctctggttaccaggctctggtgcatgcagcctcagcttttgaggtggatgtcgttgttgttctggatcaagaacgactgtacaatgaactgaaacgggacctcccccactttgtacgcactgtgctgctccctaaatctgggggtgtggtggagcgctccaaggacttccggcgggaatgtagggatgagcgtatccgtgagtatttttatggattccgaggctgtttctatccccatgccttcaatgtcaaattttcagatgtgaaaatctacaaagttggggcacccaccatcccagactcctgtttacctttgggcatgtctcaagaggataatcagctcaagctagtacctgtcactcctgggcgagatatggtgcaccacctactgagtgttagcactgccgagggtacagaggagaacctgtccgagacaagtgtagctggcttcattgtggtgaccagtgtggacctggagcatcaggtgtttactgttctgtctccagcccctcgcccactgcctaagaacttccttctcatcatggatatccggttcatggatctgaagtagagatcagcaggaagccttgctgcctgggacatagagatcatctggccacccctagaggcagatgggctgagataaaagactgttggggccacctgaccagtaaactgtggactagtagaaagttcatattctacctctaaaaacaggtagtggtaacctgactcttctaatcttgaaccaaaaggaaaaccatgagactgtaattggtttcttagaccacctaagatgccactttgaattctctaagaccctggagaattgcatttctttcactgtgctactatgtggtttttaaaaaatcaatgctttatattccatatgtggttcttacccatttatctaggatgaaagtgtgaattagagggactccttccaataaagttcaaacttaaaaaaaatcattttaataaatatttttgccatatcatagaa

SEQ ID NO: 168425 - DNA, 1278 bp, Artificial Sequence
  derived and/or modified sequence
atgggcgaggaggccaacgacgacaagaagcccaccaccaagttcgagctggagagagagaccgagctgagattcgaggtggaggccagccagagcgtgcagctggagctgctgaccggcatggccgagatcttcggcaccgagctgaccagaaacaagaagttcaccttcgacgccggcgccaaggtggccgtgttcacctggcacggctgcagcgtgcagctgagcggcagaaccgaggtggcctacgtgagcaaggacacccccatgctgctgtacctgaacacccacaccgccctggagcagatgagaagacaggccgagaaggaggaggagagaggccccagagtgatggtggtgggccccaccgacgtgggcaagagcaccgtgtgcagactgctgctgaactacgccgtgagactgggcagaagacccacctacgtggagctggacgtgggccagggcagcgtgagcatccccggcaccatgggcgccctgtacatcgagagacccgccgacgtggaggagggcttcagcatccaggcccccctggtgtaccacttcggcagcaccacccccggcaccaacatcaagctgtacaacaagatcaccagcagactggccgacgtgttcaaccagagatgcgaggtgaacagaagagccagcgtgagcggctgcgtgatcaacacctgcggctgggtgaagggcagcggctaccaggccctggtgcacgccgccagcgccttcgaggtggacgtggtggtggtgctggaccaggagagactgtacaacgagctgaagagagacctgccccacttcgtgagaaccgtgctgctgcccaagagcggcggcgtggtggagagaagcaaggacttcagaagagagtgcagagacgagagaatcagagagtacttctacggcttcagaggctgcttctacccccacgccttcaacgtgaagttcagcgacgtgaagatctacaaggtgggcgcccccaccatccccgacagctgcctgcccctgggcatgagccaggaggacaaccagctgaagctggtgcccgtgacccccggcagagacatggtgcaccacctgctgagcgtgagcaccgccgagggcaccgaggagaacctgagcgagaccagcgtggccggcttcatcgtggtgaccagcgtggacctggagcaccaggtgttcaccgtgctgagccccgcccccagacccctgcccaagaacttcctgctgatcatggacatcagattcatggacctgaagtag

SEQ ID NO: 168426 - DNA, 1311 bp, Artificial Sequence
  derived and/or modified sequence
atgaccgacctgcacagcagctacaccgaggagatgggcgaggaggccaacgacgacaagaagcccaccaccaagttcgagctggagagagagaccgagctgagattcgaggtggaggccagccagagcgtgcagctggagctgctgaccggcatggccgagatcttcggcaccgagctgaccagaaacaagaagttcaccttcgacgccggcgccaaggtggccgtgttcacctggcacggctgcagcgtgcagctgagcggcagaaccgaggtggcctacgtgagcaaggacacccccatgctgctgtacctgaacacccacaccgccctggagcagatgagaagacaggccgagaaggaggaggagagaggccccagagtgatggtggtgggccccaccgacgtgggcaagagcaccgtgtgcagactgctgctgaactacgccgtgagactgggcagaagacccacctacgtggagctggacgtgggccagggcagcgtgagcatccccggcaccatgggcgccctgtacatcgagagacccgccgacgtggaggagggcttcagcatccaggcccccctggtgtaccacttcggcagcaccacccccggcaccaacatcaagctgtacaacaagatcaccagcagactggccgacgtgttcaaccagagatgcgaggtgaacagaagagccagcgtgagcggctgcgtgatcaacacctgcggctgggtgaagggcagcggctaccaggccctggtgcacgccgccagcgccttcgaggtggacgtggtggtggtgctggaccaggagagactgtacaacgagctgaagagagacctgccccacttcgtgagaaccgtgctgctgcccaagagcggcggcgtggtggagagaagcaaggacttcagaagagagtgcagagacgagagaatcagagagtacttctacggcttcagaggctgcttctacccccacgccttcaacgtgaagttcagcgacgtgaagatctacaaggtgggcgcccccaccatccccgacagctgcctgcccctgggcatgagccaggaggacaaccagctgaagctggtgcccgtgacccccggcagagacatggtgcaccacctgctgagcgtgagcaccgccgagggcaccgaggagaacctgagcgagaccagcgtggccggcttcatcgtggtgaccagcgtggacctggagcaccaggtgttcaccgtgctgagccccgcccccagacccctgcccaagaacttcctgctgatcatggacatcagattcatggacctgaagtag

SEQ ID NO: 168427 - protein, 680 aa, Artificial Sequence
  derived and/or modified sequence
MALDGIRMPDGCYADGTWELSVHVTDLNRDVTLRVTGEVHIGGVMLKLVEKLDVKKDWSDHALWWEKKRTWLLKTHWTLDKYGIQADAKLQFTPQHKLLRLQLPNMKYVKVKVNFSDRVFKAVSDICKTFNIRHPEELSLLKKPRDPTKKKKKKLDDQSEDEALELEGPLITPGSGSIYSSPGLYSKTMTPTYDAHDGSPLSPTSAWFGDSALSEGNPGILAVSQPITSPEILAKMFKPQALLDKAKINQGWLDSSRSLMEQDVKENEALLLRFKYYSFFDLNPKYDAIRINQLYEQAKWAILLEEIECTEEEMMMFAALQYHINKLSIMTSENHLNNSDKEVDEVDAALSDLEITLEGGKTSTILGDITSIPELADYIKVFKPKKLTLKGYKQYWCTFKDTSISCYKSKEESSGTPAHQMNLRGCEVTPDVNISGQKFNIKLLIPVAEGMNEIWLRCDNEKQYAHWMAACRLASKGKTMADSSYNLEVQNILSFLKMQHLNPDPQLIPEQITTDITPECLVSPRYLKKYKNKQITARILEAHQNVAQMSLIEAKMRFIQAWQSLPEFGITHFIARFQGGKKEELIGIAYNRLIRMDASTGDAIKTWRFSNMKQWNVNWEIKMVTVEFADEVRLSFICTEVDCKVVHEFIGGYIFLSTRAKDQNESLDEEMFYKLTSGWV

SEQ ID NO: 168428 - protein, 153 aa, Artificial Sequence
  derived and/or modified sequence
MALDGIRMPDGCYADGTWELSVHVTDLNRDVTLRVTGEVHIGGVMLKLVEKLDVKKDWSDHALWWEKKRTWLLKTHWTLDKYGIQADAKLQFTPQHKLLRLQLPNMKYVKVKVNFSDRVFKAVSDICKTFNIRHPEELSLLKKPRDPTKKKKK

SEQ ID NO: 168429 - DNA, 3338 bp, Artificial Sequence
  derived and/or modified sequence
gggtggagcgcggggagccaggcgaggggccgcgacgacgggactccattagccgctccggccacaggcagcgcttcgccagccgaggaaccggacgcggacaccgccgccccgcgagcctccagcccctcgcctgttgccgcgcgagtcccgggcccggagcgctaggagcgcgcggaaggagccatggctctggacgggataaggatgccagatggctgctacgcggacgggacgtgggaactgagtgtccatgtgacggacctgaaccgcgatgtcaccctgagagtgaccggcgaggtgcacattggaggcgtgatgcttaagctggtggagaaactcgatgtaaaaaaagattggtctgaccatgctctctggtgggaaaagaagagaacttggcttctgaagacacattggaccttagataagtatggtattcaggcagatgctaagcttcagttcacccctcagcacaaactgctccgcctgcagcttcccaacatgaagtatgtgaaggtgaaagtgaatttctctgatagagtcttcaaagctgtttctgacatctgtaagacttttaatatcagacaccccgaagaactttctctcttaaagaaacccagagatccaacaaagaaaaaaaagaagaagctagatgaccagtctgaagatgaggcacttgaattagaggggcctcttatcactcctggatcaggaagtatatattcaagcccaggactgtatagtaaaacaatgacccccacttatgatgctcatgatggaagccccttgtcaccaacttctgcttggtttggtgacagtgctttgtcagaaggcaatcctggtatacttgctgtcagtcaaccaatcacgtcaccagaaatcttggcaaaaatgttcaagcctcaagctcttcttgataaagcaaaaatcaaccaaggatggcttgattcctcaagatctctcatggaacaagatgtgaaggaaaatgaggccttgctgctccgattcaagtattacagcttttttgatttgaatccaaagtatgatgcaatcagaatcaatcagctttacgagcaggccaaatgggccattctcctggaagagattgaatgcacagaagaagaaatgatgatgtttgcagccctgcagtatcatatcaataagctgtcaatcatgacatcagagaatcatttgaacaacagtgacaaagaagttgatgaagttgatgctgccctttcagacctggagattactctggaagggggtaaaacgtcaacaattttgggtgacattacttccattcctgaacttgctgactacattaaagttttcaagccaaaaaagctgactctgaaaggttacaaacaatattggtgcaccttcaaagacacatccatttcttgttataagagcaaagaagaatccagtggcacaccagctcatcagatgaacctcaggggatgtgaagttaccccagatgtaaacatttcaggccaaaaatttaacattaaactcctgattccagttgcagaaggcatgaatgaaatctggcttcgttgtgacaatgaaaaacagtatgcacactggatggcagcctgcagattagcctccaaaggcaagaccatggcggacagttcttacaacttagaagttcagaatattctttcctttctgaagatgcagcatttaaacccagatcctcagttaataccagagcagatcacgactgatataactcctgaatgtttggtgtctccccgctatctaaaaaagtataagaacaagcagataacagcgagaatcttggaggcccatcagaatgtagctcagatgagtctaattgaagccaagatgagatttattcaagcttggcagtcactacctgaatttggcatcactcacttcattgcaaggttccaagggggcaaaaaagaagaacttattggaattgcatacaacagactgattcggatggatgccagcactggagatgcaattaaaacatggcgtttcagcaacatgaaacagtggaatgtcaactgggaaatcaaaatggtcaccgtagagtttgcagatgaagtacgattgtccttcatttgtactgaagtagattgcaaagtggttcatgaattcattggtggctacatatttctctcaacacgtgcaaaagaccaaaacgagagtttagatgaagagatgttctacaaacttaccagtggttgggtgtgaataggaatactgtttaatgaaactccacggccataacaatatttaactttaaaagctgtttgttatatgctgcttaataaagtaagcttgaaatttatcattttatcatgaaaacttctttgccttaccagaccagttaatatgtgcactaaacaagcacgactattaatctatcatgttatgatataataaacttgaatttgtcacacattccttagggccatgaattgaaaactgaaatagtgggcaaatcaggaacaaaccatcactgatttactgatttaagctagccaaactgtaagaaacaagccatctattttaaagctatccagggcttaacctatatgaactctatttatcatgtctaatgcatgtgatttaatgtatgtttaatttgatatcatgttttaaaatatcctacttctggtagccatttaattcctccccctacccccaaataaatcaggcatgcaggaggcctgatatttagtaatgtcattgtgtttgaccttgaaggaaaatgctattagtccgtcgtgcttgatttgtttttgtccttgaataagcatgttatgtatattgtctcgtgtttttatttttacaccatattgtattacacttttagtattcaccagcataatcactgtctgcctaaaatatgcaactctttgcattacaatatgaagtaaagttctatgaagtatgcattttgtgtaactaatgtaaaaacacaaattttataaaattgtacagttttttaaaaactactcacaactagcagatggcttaaatgtagcaatctctgcgttaattaaatgcctttaagagatataattaacgtgcagttttaatatctactaaattaagaatgacttcattatgatcatgatttgccacaatgtccttaactctaatgcctggactggccatgttctagtctgttgcgctgttacaatctgtattggtgctagtcagaaaattcctagctcacatagcccaaaagggtgcgagggagaggtggattaccagtattgttcaataatccatggttcaaagactgtataaatgcattttattttaaataaaagcaaaacttttatttaatattt

SEQ ID NO: 168430 - DNA, 3369 bp, Artificial Sequence
  derived and/or modified sequence
cacaggcagcgcttcgccagccgaggaaccggacgcggacaccgccgccccgcgagcctccagcccctcgcctgttgccgcgcgagtcccgggcccggagcgctaggagcgcgcggtgagggagcgggaccccgccgggacccgagggggcgcggcggggaggggaacggggagtcagcccgcgctgtgtctcggggccggccggcaggaaggagccatggctctggacgggataaggatgccagatggctgctacgcggacgggacgtgggaactgagtgtccatgtgacggacctgaaccgcgatgtcaccctgagagtgaccggcgaggtgcacattggaggcgtgatgcttaagctggtggagaaactcgatgtaaaaaaagattggtctgaccatgctctctggtgggaaaagaagagaacttggcttctgaagacacattggaccttagataagtatggtattcaggcagatgctaagcttcagttcacccctcagcacaaactgctccgcctgcagcttcccaacatgaagtatgtgaaggtgaaagtgaatttctctgatagagtcttcaaagctgtttctgacatctgtaagacttttaatatcagacaccccgaagaactttctctcttaaagaaacccagagatccaacaaagaaaaaaaagaagaagctagatgaccagtctgaagatgaggcacttgaattagaggggcctcttatcactcctggatcaggaagtatatattcaagcccaggactgtatagtaaaacaatgacccccacttatgatgctcatgatggaagccccttgtcaccaacttctgcttggtttggtgacagtgctttgtcagaaggcaatcctggtatacttgctgtcagtcaaccaatcacgtcaccagaaatcttggcaaaaatgttcaagcctcaagctcttcttgataaagcaaaaatcaaccaaggatggcttgattcctcaagatctctcatggaacaagatgtgaaggaaaatgaggccttgctgctccgattcaagtattacagcttttttgatttgaatccaaagtatgatgcaatcagaatcaatcagctttacgagcaggccaaatgggccattctcctggaagagattgaatgcacagaagaagaaatgatgatgtttgcagccctgcagtatcatatcaataagctgtcaatcatgacatcagagaatcatttgaacaacagtgacaaagaagttgatgaagttgatgctgccctttcagacctggagattactctggaagggggtaaaacgtcaacaattttgggtgacattacttccattcctgaacttgctgactacattaaagttttcaagccaaaaaagctgactctgaaaggttacaaacaatattggtgcaccttcaaagacacatccatttcttgttataagagcaaagaagaatccagtggcacaccagctcatcagatgaacctcaggggatgtgaagttaccccagatgtaaacatttcaggccaaaaatttaacattaaactcctgattccagttgcagaaggcatgaatgaaatctggcttcgttgtgacaatgaaaaacagtatgcacactggatggcagcctgcagattagcctccaaaggcaagaccatggcggacagttcttacaacttagaagttcagaatattctttcctttctgaagatgcagcatttaaacccagatcctcagttaataccagagcagatcacgactgatataactcctgaatgtttggtgtctccccgctatctaaaaaagtataagaacaagcagataacagcgagaatcttggaggcccatcagaatgtagctcagatgagtctaattgaagccaagatgagatttattcaagcttggcagtcactacctgaatttggcatcactcacttcattgcaaggttccaagggggcaaaaaagaagaacttattggaattgcatacaacagactgattcggatggatgccagcactggagatgcaattaaaacatggcgtttcagcaacatgaaacagtggaatgtcaactgggaaatcaaaatggtcaccgtagagtttgcagatgaagtacgattgtccttcatttgtactgaagtagattgcaaagtggttcatgaattcattggtggctacatatttctctcaacacgtgcaaaagaccaaaacgagagtttagatgaagagatgttctacaaacttaccagtggttgggtgtgaataggaatactgtttaatgaaactccacggccataacaatatttaactttaaaagctgtttgttatatgctgcttaataaagtaagcttgaaatttatcattttatcatgaaaacttctttgccttaccagaccagttaatatgtgcactaaacaagcacgactattaatctatcatgttatgatataataaacttgaatttgtcacacattccttagggccatgaattgaaaactgaaatagtgggcaaatcaggaacaaaccatcactgatttactgatttaagctagccaaactgtaagaaacaagccatctattttaaagctatccagggcttaacctatatgaactctatttatcatgtctaatgcatgtgatttaatgtatgtttaatttgatatcatgttttaaaatatcctacttctggtagccatttaattcctccccctacccccaaataaatcaggcatgcaggaggcctgatatttagtaatgtcattgtgtttgaccttgaaggaaaatgctattagtccgtcgtgcttgatttgtttttgtccttgaataagcatgttatgtatattgtctcgtgtttttatttttacaccatattgtattacacttttagtattcaccagcataatcactgtctgcctaaaatatgcaactctttgcattacaatatgaagtaaagttctatgaagtatgcattttgtgtaactaatgtaaaaacacaaattttataaaattgtacagttttttaaaaactactcacaactagcagatggcttaaatgtagcaatctctgcgttaattaaatgcctttaagagatataattaacgtgcagttttaatatctactaaattaagaatgacttcattatgatcatgatttgccacaatgtccttaactctaatgcctggactggccatgttctagtctgttgcgctgttacaatctgtattggtgctagtcagaaaattcctagctcacatagcccaaaagggtgcgagggagaggtggattaccagtattgttcaataatccatggttcaaagactgtataaatgcattttattttaaataaaagcaaaacttttatttaatattt

SEQ ID NO: 168431 - DNA, 2043 bp, Artificial Sequence
  derived and/or modified sequence
atggccctggatgggattcggatgcccgatgggtgctacgcagacggtacttgggaactatcggtacacgtgacggatctgaatagagacgtcactctgagagtcaccggcgaagtccatatcggtggcgtgatgctgaagttggttgaaaaattggacgtgaagaaagactggtctgaccacgcactttggtgggagaaaaagagaacttggctgctgaagacgcactggaccctggacaaatacggcattcaggcggacgcaaagctgcagttcacaccacagcacaaactccttagactgcagttgccaaacatgaaatacgtgaaggtgaaggtcaacttcagcgaccgggtgttcaaggcggtcagcgacatctgcaaaacctttaacattcggcacccagaggaactgagcttgctgaaaaaaccacgggatcctacaaagaaaaagaagaagaagctggacgatcagagtgaggatgaagcgcttgagctcgaggggccacttattactccaggctccggttctatctatagttccccgggcctttattctaagactatgacgcccacttatgacgctcatgatggaagccccttgtcacctacctcagcctggttcggcgactcagccctcagcgagggaaatccaggtattctggctgtgtcccagcctattacatcccccgagatcctcgccaaaatgtttaaaccccaagcactgctggataaagccaagattaatcaggggtggttggactcaagccgatctctgatggagcaggacgtgaaagagaatgaggcgcttctgctgcgctttaagtactattcttttttcgatctcaaccccaaatacgacgctatccgaattaatcagctgtacgagcaggccaaatgggctattctccttgaagaaatcgagtgtaccgaagaggaaatgatgatgttcgccgcattgcagtatcatataaacaaacttagcattatgactagtgaaaaccatctgaacaattcagacaaggaagtggacgaggtagatgccgcactttctgaccttgagataaccctggagggtgggaaaacatcgactattttgggggacatcacctccatacctgaactggcggactatatcaaggtcttcaagcccaagaagctgactctcaagggatacaaacagtattggtgcacttttaaggatacctccatcagctgttacaagagtaaagaagaatcctccggcacacctgctcaccagatgaatctcagaggctgcgaagtgactcccgatgtcaatatttcaggtcagaagttcaacatcaagctgctgattcctgtggcagagggaatgaacgaaatctggctaagatgtgataacgaaaaacagtatgcacactggatggccgcttgtaggcttgcctccaaaggcaaaaccatggctgacagctcgtacaacctggaggtccaaaatatcctcagtttccttaagatgcaacatctgaatcctgacccccagttaatcccagaacaaatcactacggacattacgcccgagtgcctggtgagcccccggtatctcaagaaatacaaaaacaaacagatcacagcaagaatcctggaagcccaccagaacgttgcacaaatgagcctgatcgaggccaagatgcgtttcattcaagcatggcagtcccttccggaatttgggatcacccatttcatcgcacgcttccagggcggcaagaaggaggagctgattggcatcgcctacaaccggctgattcggatggacgcttctaccggggacgcaattaagacctggcggttcagcaacatgaagcagtggaacgtgaactgggaaatcaagatggtaacggtggaattcgccgacgaggttcggctgagtttcatctgcaccgaagtggactgcaaggtcgtacacgaatttattggcggatatatattcctgagcacccgggcaaaagaccagaatgagtcactggacgaggaaatgttttacaagttgacttccggctgggtgtag

SEQ ID NO: 168432 - DNA, 2043 bp, Artificial Sequence
  derived and/or modified sequence
atggccctggatggcattcgtatgccggatggctgctatgccgatggaacctgggagctgtctgtgcacgtgacagatcttaacagggacgtgacactaagagttactggggaggtacatatcggcggcgtgatgcttaaattggttgagaaactggatgtgaagaaggactggtccgaccacgcactctggtgggagaagaagaggacttggctgttgaagacacactggacccttgacaaatacggcattcaggccgacgcaaagttgcaattcaccccacagcacaagctgcttaggctacaactgcccaatatgaagtacgtcaaagtcaaagtgaatttctctgatagagtgttcaaggccgtatcggacatctgtaagacctttaatatacgacatccagaggagttgagccttctgaagaagcccagggaccccacaaaaaaaaagaaaaaaaagctcgatgaccagtccgaagacgaggctctggagcttgagggccccctcataacgcctggaagcggtagcatttattcctcccctggactgtactccaagacaatgacaccgacctatgacgcccacgacggaagtcccctcagtccaacttccgcttggttcggtgatagcgcactctcagagggcaatccaggaattttagctgtcagccaacccattacctcaccagaaattctagccaagatgtttaagccacaagctcttctcgataaagctaagatcaaccagggctggctcgattcaagccgaagcctgatggaacaggatgtgaaggagaacgaggcgctcctcttgcgctttaagtattattcgttctttgacctgaacccgaagtatgacgctattcgtatcaaccaactgtatgaacaggctaagtgggctattctcctggaagagatcgaatgtaccgaagaggaaatgatgatgtttgccgcactgcagtatcacattaacaaactctcgattatgacctctgaaaaccacctgaacaactctgataaggaggtggatgaggtcgacgccgccttgtctgacctggaaattacactggagggtggcaagacctccaccattctgggggacatcacaagtattccggaattagccgactatatcaaagtctttaagccaaaaaagctgacgctgaagggatacaagcagtactggtgtactttcaaggacacatctatcagctgttacaaaagcaaggaggaatctagcgggacacccgctcatcagatgaatcttcggggctgtgaagttacccctgatgtcaacatatctggtcaaaagtttaatattaagctgttgatcccagtcgcagagggcatgaacgaaatatggttaaggtgcgataacgaaaagcagtatgcccactggatggcagcgtgtagactggccagcaagggaaagacaatggccgattctagctataacctggaggtgcagaatattctatcattcctgaaaatgcagcatcttaatcctgatccccaattgattcccgaacagattaccacagacatcacccctgaatgcctagtgtcacctagatacctaaagaagtacaagaataagcagatcactgctcgcatcttagaagcccaccaaaacgtcgcacagatgtctctaattgaggcaaaaatgaggttcattcaggcctggcagagcctgcccgagtttggcatcacacacttcattgctcgctttcagggggggaaaaaagaggagttgataggcatagcgtataatcggttaattcgtatggatgcaagtacaggggacgctatcaagacttggcgcttttccaacatgaagcagtggaacgtcaattgggagatcaaaatggtcactgttgagtttgcggacgaagtccgattgagcttcatatgtacggaagtagattgtaaggtggtgcacgagttcatcggagggtacattttcctcagcacccgcgcaaaggaccagaacgagtctcttgatgaagaaatgttttataagttgacctccggttgggtgtag

SEQ ID NO: 168433 - DNA, 2043 bp, Artificial Sequence
  derived and/or modified sequence
atggccctggatggcatccgcatgccagatggctgctacgcagatggcacctgggagctgtctgtgcacgtgacagacctgaacagagatgtgaccctgcgggtgactggagaggtgcacatcggcggcgtgatgctgaagctggtggagaagctggatgtgaagaaggactggagcgaccacgccctgtggtgggagaagaagaggacctggctgctgaagacccactggaccctggacaagtatggcatccaggctgatgccaagctgcagttcaccccccagcacaagctgctgcggctgcagctgcccaacatgaagtatgtgaaggtgaaggtgaacttcagtgacagagtcttcaaggctgtgtctgacatctgcaagaccttcaacatccgccaccctgaggagctgagcctgctgaagaagccccgggaccccaccaagaagaagaagaagaagctggatgaccagagtgaagatgaggccctggagctggagggccccctcatcaccccaggcagcggcagcatctacagcagccctggcctgtacagcaagaccatgacccccacctatgatgcccatgatggcagccccctgagccccaccagcgcctggtttggagacagcgccctgtctgagggcaaccctggcatcctggccgtgtcccagcccatcaccagccctgagatcctggccaagatgttcaagccccaggccctgctggacaaggccaagatcaaccagggctggctggacagcagccgcagcctgatggagcaggatgtgaaggaaaatgaggccctgctgctgcgcttcaagtactacagcttctttgacctgaaccccaagtatgatgccatccgcatcaaccagctgtatgagcaggccaagtgggccatcctgctggaggagattgagtgcacagaggaggagatgatgatgtttgctgccctgcagtaccacatcaacaagctgagcatcatgaccagcgagaaccacctgaacaacagcgacaaggaggtggatgaggtggatgctgccctgagtgacctggagatcaccctggagggcggcaagaccagcaccatcctgggggacatcaccagcatccctgagctggccgactacatcaaggtgttcaagcccaagaagctgaccctgaagggctacaagcagtactggtgcaccttcaaggacaccagcatcagctgctacaagagcaaggaggagagcagcggcaccccagcccaccagatgaacctgcggggctgtgaggtgaccccagatgtgaacatcagcggccagaagttcaacatcaagctgctgatccctgtggccgagggcatgaatgagatctggctgcgctgtgacaatgagaagcagtatgcccactggatggccgcctgccgcctggccagcaagggcaagaccatggctgacagcagctacaacctggaggtgcagaacatcctgtccttcctgaagatgcagcacctgaacccagacccccagctgatccctgagcagatcaccacagacatcaccccagaatgtctggtgagcccccgctacctgaagaagtacaagaacaagcagatcacagcccgcatcctggaggcccaccagaatgtggcccagatgagcctcatcgaggccaagatgaggttcatccaggcctggcagagcctgcctgagtttggcatcacccacttcatcgcccgcttccagggcggcaagaaggaggagctgattggcatcgcctacaacagactcatccgcatggatgccagcactggagatgccatcaagacctggaggttcagcaacatgaagcagtggaatgtgaactgggagatcaagatggtgacagtggagtttgctgatgaggtgcggctgtccttcatctgcacagaggtggactgcaaggtggtgcatgagttcatcggcggctacatcttcctgagcacccgggccaaggaccagaatgaaagcctggatgaggagatgttctacaagctgaccagcggctgggtgtag

SEQ ID NO: 168434 - DNA, 2043 bp, Artificial Sequence
  derived and/or modified sequence
atggccctggacggcatccggatgcccgacggctgctacgccgacggaacctgggagctgtccgtgcacgtgacagatctgaaccgcgatgtgaccctgcgggtcacaggggaagtgcatattggcggagtcatgctaaagctggttgagaaactggacgtaaagaaagattggtctgatcacgcattatggtgggagaaaaagcgaacctggttgttaaagactcattggaccctggacaaatatggtattcaggctgacgcaaaactgcagttcactcctcagcataagctgctgagactgcagttaccaaatatgaaatatgtaaaggttaaggttaacttctctgatcgggtctttaaggctgtttcggacatttgcaagaccttcaacatccgccaccctgaggagctgtcgttgcttaagaaacccagggatccgacaaaaaaaaaaaagaagaagctggatgaccagtctgaggacgaagccctggagttggaaggccctctgatcacacctgggtctggttctatttattcctctcctggtttgtactccaaaaccatgacaccgacctacgatgctcacgacggatcaccactgtcacccacctcggcctggttcggtgactctgccctatcagaagggaatcctggcattctcgcggtcagtcaacccattaccagccccgaaatcctggctaaaatgttcaaaccccaggccttgctggacaaggctaagatcaatcagggctggttggattcatccaggtcattgatggagcaagacgtaaaggagaacgaggcactgttgcttaggtttaagtattattcattcttcgatctcaatccaaaatatgatgcaatacggatcaaccagctctacgagcaggctaaatgggccatcctgctcgaggagatagaatgtactgaggaggaaatgatgatgttcgcggccctccagtaccatattaacaaactgagtatcatgacttcggagaatcacctgaataacagcgacaaggaggtagacgaggtggacgccgcacttagcgatttagagatcactctcgaaggagggaaaacttctaccatacttggggacattacaagcattccagaactggccgactatataaaggtgtttaaacccaagaagctgaccttgaagggttacaagcaatattggtgcaccttcaaagacactagcatatcctgctacaagtctaaagaagagagctccggtactcccgcccaccagatgaatctgaggggctgtgaggtcacacctgacgtcaatatcagcgggcaaaaattcaacattaaactcttaattcctgtcgccgagggtatgaatgagatatggttgcggtgtgataacgagaagcagtacgctcattggatggctgcctgcaggcttgcttcgaagggcaagactatggcagacagcagttacaatctcgaggttcagaacatcctcagctttttgaagatgcaacatctcaatcccgatccccaacttatcccggagcaaataacaactgatattaccccagaatgcttggtttccccccggtatctgaaaaagtacaaaaataagcagatcaccgctcgaatcctcgaggctcaccagaatgtagcgcagatgagcctcatagaggcaaaaatgcgcttcatacaagcctggcagtcgttgcctgaatttggcataacccacttcatcgcccggttccagggcgggaaaaaagaagaattaatcggaattgcatacaaccgtcttatccgcatggatgccagtacgggcgacgcaatcaaaacgtggaggttctccaatatgaaacagtggaatgtgaactgggagatcaaaatggtcaccgtcgaattcgcagacgaggttaggttgtctttcatttgcaccgaagtggactgtaaggtcgtgcacgagtttatcgggggatatattttcctgtctacgcgggccaaggaccagaatgaatccctggatgaggaaatgttctataaactgacctctgggtgggtctag

SEQ ID NO: 168435 - DNA, 2043 bp, Artificial Sequence
  derived and/or modified sequence
atggccctggacggcatccggatgcccgacggctgctacgccgacggcacttgggagcttagcgttcacgtgaccgacctgaaccgggatgtgacattgcgcgtgaccggagaggtgcatatcgggggggtgatgctgaagctggtcgaaaagctggacgtgaagaaagactggtccgatcacgctctatggtgggagaaaaaaaggacttggctgctcaaaacgcattggaccctggacaaatatgggattcaagccgacgcaaagctccaatttaccccccagcataagttattaagacttcaactccctaacatgaaatatgtcaaggtgaaggtcaacttcagcgaccgcgtgtttaaagctgtgagtgacatatgtaagacgtttaatatcagacaccccgaagaactaagtctcttaaagaagcctcgcgatccaacaaaaaagaagaaaaagaaactcgacgatcagagcgaggacgaggccttagagctggaaggccctctaattacgccaggctccggcagcatctactcatctccgggactgtattcaaagactatgactcccacatacgacgcccacgatggatctccattgagccccaccagcgcatggttcggagattcagccctcagtgagggaaatcccggcatactcgctgtttctcagcccataacatcccctgagatccttgcaaagatgtttaaaccacaggctctgctggacaaggcaaagatcaaccaggggtggctggactctagccggagcctgatggagcaggatgtgaaagagaacgaggccctcctgctccggttcaaatactactcgtttttcgatttgaatcccaaatacgacgcgattagaattaatcagctgtacgagcaggccaaatgggctatactgttagaagaaatcgaatgcacagaagaggagatgatgatgtttgccgcactgcaatatcatattaataaattgagtattatgacctccgaaaaccacctgaacaactcagacaaagaggtggacgaggtcgacgctgcactctccgacctggaaataacactcgaaggcggcaagacatcgactatcctgggtgatatcacgtcaatcccggagctcgccgactatatcaaggtgttcaagcccaagaagcttacacttaagggctataagcagtactggtgtacttttaaagacacatccatcagctgctataagtcgaaggaggagtcttcagggacacctgcgcatcagatgaatttgcgcggatgcgaagtcaccccggacgttaacattagcggtcaaaaatttaacattaagctcctcattcccgtcgctgaaggaatgaacgagatctggttgcgttgcgacaacgagaaacaatacgctcattggatggctgcatgtagattggcctctaagggcaaaacaatggccgactcttcctataatttagaggtacaaaatatcctgtctttcttgaaaatgcagcacttaaatcccgacccccagctgataccagaacagattaccactgatattaccccagagtgtctggtgagtccaagatatctaaagaaatataagaacaagcagataacagccaggatcttagaagcacaccagaacgtggcgcaaatgagtcttatcgaagccaagatgcggttcatccaagcatggcagagcctcccggaattcgggatcacccacttcattgctcgtttccagggtggaaagaaggaggagctgatcggcatcgcttataatcgcctgatcaggatggacgcatcgactggagacgccatcaaaacctggcggttcagtaacatgaagcagtggaatgtcaattgggaaattaaaatggttacagtggagttcgcagacgaggtccggttgagctttatttgcaccgaggttgactgcaaggtagtgcacgaatttattggaggctatatatttctgagcacaagggccaaggaccagaatgagtcccttgatgaagaaatgttttacaaattgacctcgggctgggtgtag

SEQ ID NO: 168436 - DNA, 2043 bp, Artificial Sequence
  derived and/or modified sequence
atggccctcgatggaatacgaatgcctgacgggtgttacgccgatgggacctgggagttatctgtccacgtcaccgatctcaacagagacgtaaccctacgggtcacaggagaggtgcatatcgggggtgtcatgctcaagttggtggaaaagctggacgtgaagaaagactggtccgaccatgccctgtggtgggagaaaaagcgtacctggctgctgaagacacattggactctggacaagtatggcattcaggccgatgcaaaactgcagttcacccctcaacacaaactcctgcgacttcagctacctaacatgaaatatgtcaaggttaaagtaaatttttctgacagggtgtttaaagccgtgtctgacatttgcaaaacttttaacataaggcatcctgaggagctatccttacttaaaaaacctagggatccaacgaagaagaaaaaaaaaaaactcgacgatcagagcgaggacgaagcgctggagttggagggccctttgatcactcctggaagtgggtctatttactcttcacctggtctctactctaagaccatgacaccgacctacgacgcacatgacgggtcaccactgtcccctacgagtgcctggttcggggacagcgccctaagcgaaggaaaccctggcatcctggcggtctcccaaccaataacctctcccgaaattctcgccaaaatgttcaagcctcaagctctcctcgacaaagccaagattaatcagggatggctcgactctagcaggagcttaatggagcaggatgttaaagagaacgaggctctgcttcttaggtttaagtattatagcttttttgatctaaatccgaagtatgacgccatccgcatcaatcagctgtacgaacaggcaaagtgggccatcctgcttgaagagattgagtgtacggaggaggaaatgatgatgttcgctgcccttcagtaccatattaacaagctctcaataatgacatctgaaaaccacctcaacaatagcgacaaagaagtggatgaggtggatgctgcccttagcgatcttgagatcaccctcgaaggcggaaagacttccacaattctcggcgatattacctctattccggagctcgctgactatatcaaggtgttcaaaccaaaaaagctgacactcaaaggctataaacaatattggtgtaccttcaaggatacctcaatctcatgctacaaatctaaggaggagtccagtggcacccctgcccatcagatgaatctgcgtggctgcgaagtcacccccgacgtgaacattagtggtcagaagtttaacatcaaacttctcatcccggtggctgaaggaatgaacgagatttggctgcgttgcgacaatgagaagcaatacgctcattggatggcagcctgcagactcgcttcaaaagggaagactatggctgattccagctacaacctggaggtgcagaacatcctgagttttctgaagatgcaacatctgaacccggatccccaattgatacccgagcaaataaccactgatatcacaccagagtgtctcgtcagccccagatatcttaagaagtacaagaataagcagatcacagctcgcatccttgaagcccaccagaatgtagcccagatgtctctgatcgaagcgaagatgcgatttatccaggcctggcagagcctgccggagtttggaataacgcatttcattgcgcgttttcagggaggcaagaaggaagaacttatcgggatcgcctataacaggctgatcaggatggacgcctctacaggggacgcaataaagacttggaggttcagcaacatgaagcagtggaatgtcaactgggagatcaagatggtaactgtagagttcgccgacgaagttagactgtcctttatttgcacggaagtcgattgtaaggtggtgcatgagttcataggagggtacatctttcttagtaccagggcaaaggatcagaatgagtctctggacgaggagatgttttacaagctgactagcggctgggtctag

SEQ ID NO: 168437 - DNA, 2043 bp, Artificial Sequence
  derived and/or modified sequence
atggcgttggatggtatccgaatgcccgacggctgctatgccgacggcacatgggagctgtccgtacacgtgactgatttgaaccgcgacgtcaccctgagggtgacaggtgaagtccacatcgggggagtcatgctcaaacttgtggagaaactggatgtgaaaaaggattggtccgatcacgcattgtggtgggagaaaaaacggacttggcttctgaagactcattggacactcgacaaatacggcatccaagccgatgccaagctacagttcaccccccagcacaaacttctgcgcctccagctgcctaatatgaaatacgtcaaagtaaaagtgaacttttctgaccgcgttttcaaagccgttagtgacatctgtaagacatttaacattagacatccggaggaactctctctgctcaagaagccccgtgacccaaccaaaaaaaaaaagaagaaactggatgatcagtccgaagatgaagcgctggagctggaagggcctttaatcacccctgggtccggctccatctattcttccccaggcctgtatagcaagaccatgaccccaacctatgacgcccatgatggctctcccctttcccctacaagtgcatggttcggggactctgccctgtccgaaggaaatccaggcattctggcagtctcccagcctatcacctctccggagattctagccaaaatgtttaaaccccaggctcttttagacaaggctaagatcaatcaaggctggctggattcatctagatccctcatggagcaggacgttaaggaaaatgaggcactgcttctgcggtttaagtattactccttcttcgacttaaatccaaaatacgatgccattaggatcaatcaactgtacgagcaggccaagtgggcaatactgctagaagagattgaatgtacagaagaggagatgatgatgttcgccgcactgcaatatcatataaacaaattgtcaatcatgacatcggaaaaccacctgaacaacagcgacaaagaggtggatgaggtcgatgctgccctgtcggatctggaaataactctggaaggcggtaaaaccagcaccattctgggggacatcacatcaatcccagagctggcagattacattaaagtcttcaagccaaagaaactgaccttaaagggctacaagcagtactggtgtaccttcaaggacacatctataagctgctacaagagcaaggaggagagctcaggtacgcccgcacaccagatgaacctccggggatgcgaggtaacaccggatgttaacattagtggacagaagtttaacataaagctgctcatccccgtcgcagagggcatgaacgagatatggctaaggtgcgacaacgagaagcaatacgctcactggatggcagcttgtaggctggctagtaaaggcaaaaccatggccgattcttcgtacaacctggaagttcagaacatactgagcttccttaagatgcaacatttgaatcccgacccccagctcatcccagaacagattactaccgatataacacctgaatgcctggtctcacctaggtacttgaagaagtataaaaacaagcagattaccgccaggatactggaagctcatcagaacgtagcccaaatgtctttgatcgaggccaaaatgcgtttcatccaggcatggcaaagccttccggaatttgggatcacacactttatcgctaggtttcagggtggcaagaaggaagagcttatcggcatcgcgtacaatcgcctgatcaggatggatgcttctactggggacgccatcaaaacctggagattctcaaatatgaagcagtggaatgtgaactgggaaatcaagatggtgacggtcgagttcgcagacgaggtcagactgtcatttatttgtactgaggtggattgtaaagtggtgcacgagttcattggagggtacatctttcttagcacacgggctaaagaccagaacgagtcgctcgacgaggagatgttctataaactgaccagtggctgggtgtag

SEQ ID NO: 168438 - DNA, 2043 bp, Artificial Sequence
  derived and/or modified sequence
atggccctggacggcatcagaatgcccgacggctgctacgccgacggcacctgggagctgagcgtgcacgtgaccgacctgaacagagacgtgaccctgagagtgaccggcgaggtgcacatcggcggcgtgatgctgaagctggtggagaagctggacgtgaagaaggactggagcgaccacgccctgtggtgggagaagaagagaacctggctgctgaagacccactggaccctggacaagtacggcatccaggccgacgccaagctgcagttcaccccccagcacaagctgctgagactgcagctgcccaacatgaagtacgtgaaggtgaaggtgaacttcagcgacagagtgttcaaggccgtgagcgacatctgcaagaccttcaacatcagacaccccgaggagctgagcctgctgaagaagcccagagaccccaccaagaagaagaagaagaagctggacgaccagagcgaggacgaggccctggagctggagggccccctgatcacccccggcagcggcagcatctacagcagccccggcctgtacagcaagaccatgacccccacctacgacgcccacgacggcagccccctgagccccaccagcgcctggttcggcgacagcgccctgagcgagggcaaccccggcatcctggccgtgagccagcccatcaccagccccgagatcctggccaagatgttcaagccccaggccctgctggacaaggccaagatcaaccagggctggctggacagcagcagaagcctgatggagcaggacgtgaaggagaacgaggccctgctgctgagattcaagtactacagcttcttcgacctgaaccccaagtacgacgccatcagaatcaaccagctgtacgagcaggccaagtgggccatcctgctggaggagatcgagtgcaccgaggaggagatgatgatgttcgccgccctgcagtaccacatcaacaagctgagcatcatgaccagcgagaaccacctgaacaacagcgacaaggaggtggacgaggtggacgccgccctgagcgacctggagatcaccctggagggcggcaagaccagcaccatcctgggcgacatcaccagcatccccgagctggccgactacatcaaggtgttcaagcccaagaagctgaccctgaagggctacaagcagtactggtgcaccttcaaggacaccagcatcagctgctacaagagcaaggaggagagcagcggcacccccgcccaccagatgaacctgagaggctgcgaggtgacccccgacgtgaacatcagcggccagaagttcaacatcaagctgctgatccccgtggccgagggcatgaacgagatctggctgagatgcgacaacgagaagcagtacgcccactggatggccgcctgcagactggccagcaagggcaagaccatggccgacagcagctacaacctggaggtgcagaacatcctgagcttcctgaagatgcagcacctgaaccccgacccccagctgatccccgagcagatcaccaccgacatcacccccgagtgcctggtgagccccagatacctgaagaagtacaagaacaagcagatcaccgccagaatcctggaggcccaccagaacgtggcccagatgagcctgatcgaggccaagatgagattcatccaggcctggcagagcctgcccgagttcggcatcacccacttcatcgccagattccagggcggcaagaaggaggagctgatcggcatcgcctacaacagactgatcagaatggacgccagcaccggcgacgccatcaagacctggagattcagcaacatgaagcagtggaacgtgaactgggagatcaagatggtgaccgtggagttcgccgacgaggtgagactgagcttcatctgcaccgaggtggactgcaaggtggtgcacgagttcatcggcggctacatcttcctgagcaccagagccaaggaccagaacgagagcctggacgaggagatgttctacaagctgaccagcggctgggtgtag

SEQ ID NO: 168439 - protein, 327 aa, Artificial Sequence
  derived and/or modified sequence
MAAAAAAAAATNGTGGSSGMEVDAAVVPSVMACGVTGSVSVALHPLVILNISDHWIRMRSQEGRPVQVIGALIGKQEGRNIEVMNSFELLSHTVEEKIIIDKEYYYTKEEQFKQVFKELEFLGWYTTGGPPDPSDIHVHKQVCEIIESPLFLKLNPMTKHTDLPVSVFESVIDIINGEATMLFAELTYTLATEEAERIGVDHVARMTATGSGENSTVAEHLIAQHSAIKMLHSRVKLILEYVKASEAGEVPFNHEILREAYALCHCLPVLSTDKFKTDFYDQCNDVGLMAYLGTITKTCNTMNQFVNKFNVLYDRQGIGRRMRGLFF

SEQ ID NO: 168440 - protein, 326 aa, Artificial Sequence
  derived and/or modified sequence
MAAAAAAAAATNGTGGSSGMEVDAAVPSVMACGVTGSVSVALHPLVILNISDHWIRMRSQEGRPVQVIGALIGKQEGRNIEVMNSFELLSHTVEEKIIIDKEYYYTKEEQFKQVFKELEFLGWYTTGGPPDPSDIHVHKQVCEIIESPLFLKLNPMTKHTDLPVSVFESVIDIINGEATMLFAELTYTLATEEAERIGVDHVARMTATGSGENSTVAEHLIAQHSAIKMLHSRVKLILEYVKASEAGEVPFNHEILREAYALCHCLPVLSTDKFKTDFYDQCNDVGLMAYLGTITKTCNTMNQFVNKFNVLYDRQGIGRRMRGLFF

SEQ ID NO: 168441 - DNA, 981 bp, Artificial Sequence
  derived and/or modified sequence
atggccgccgccgccgccgccgccgccgccaccaacggcaccggcggcagcagcggcatggaggtggacgccgccgtgcccagcgtgatggcctgcggcgtgaccggcagcgtgagcgtggccctgcaccccctggtgatcctgaacatcagcgaccactggatcagaatgagaagccaggagggcagacccgtgcaggtgatcggcgccctgatcggcaagcaggagggcagaaacatcgaggtgatgaacagcttcgagctgctgagccacaccgtggaggagaagatcatcatcgacaaggagtactactacaccaaggaggagcagttcaagcaggtgttcaaggagctggagttcctgggctggtacaccaccggcggcccccccgaccccagcgacatccacgtgcacaagcaggtgtgcgagatcatcgagagccccctgttcctgaagctgaaccccatgaccaagcacaccgacctgcccgtgagcgtgttcgagagcgtgatcgacatcatcaacggcgaggccaccatgctgttcgccgagctgacctacaccctggccaccgaggaggccgagagaatcggcgtggaccacgtggccagaatgaccgccaccggcagcggcgagaacagcaccgtggccgagcacctgatcgcccagcacagcgccatcaagatgctgcacagcagagtgaagctgatcctggagtacgtgaaggccagcgaggccggcgaggtgcccttcaaccacgagatcctgagagaggcctacgccctgtgccactgcctgcccgtgctgagcaccgacaagttcaagaccgacttctacgaccagtgcaacgacgtgggcctgatggcctacctgggcaccatcaccaagacctgcaacaccatgaaccagttcgtgaacaagttcaacgtgctgtacgacagacagggcatcggcagaagaatgagaggcctgttcttctag

SEQ ID NO: 168442 - DNA, 984 bp, Artificial Sequence
  derived and/or modified sequence
atggcagccgcagccgccgctgccgcagccacaaatggcacagggggatctagcggcatggaagtagacgcagcagttgtcccctcggttatggcctgtggtgtgaccggctccgtgagcgtggcattgcatccactggtaatcctgaacatcagcgaccactggatccggatgaggagccaggaaggaaggccagtccaggtgataggggcgctcatcggcaaacaagagggtcgtaatatcgaggtgatgaactctttcgagctgctctctcacacggtggaagaaaaaatcatcatcgacaaagagtactattacactaaggaagagcaattcaagcaggtcttcaaggagctagaattccttggatggtatacaaccgggggaccacctgacccgtctgatatccacgtgcataagcaggtgtgtgagatcatcgagtctcctctctttcttaaactgaaccctatgacgaaacacactgatttaccagtctctgtgtttgaatccgttatcgatattatcaatggtgaagccacaatgctctttgcagagcttacatatacgctggctactgaagaggctgagcgaattggggtggatcatgtcgcgagaatgacagcaaccggctctggtgaaaactccactgttgcagaacatttaatcgcacagcacagtgcaataaagatgcttcactcccgggtgaagctgattctggagtatgtaaaggcaagtgaggcaggggaggtgccttttaaccacgagatattacgcgaagcgtatgccctgtgccattgtttacctgtcttgtccacagacaaattcaagacagacttctacgatcagtgtaacgacgtcggcttgatggcttacttgggaaccatcactaaaacatgtaacactatgaaccagttcgtgaataaatttaacgtgctatacgaccgccaagggattgggcgcaggatgcgagggctgttcttctag

SEQ ID NO: 168443 - DNA, 981 bp, Artificial Sequence
  derived and/or modified sequence
atggctgcagctgctgccgctgccgcagccactaatggtaccggggggtcatcagggatggaggtcgacgccgcggtccccagcgtgatggcctgcggggtgactgggagcgtttcagtggcccttcacccactggtcatcttgaatatcagcgatcactggataagaatgaggtcccaggaaggccgccctgtccaggtgataggcgccctgataggtaaacaggaggggcggaacatcgaggtgatgaattcttttgaactgctctcacacactgtggaggagaaaatcattatcgataaggaatattattacacgaaggaggagcagtttaagcaggtatttaaggaattggaattcctcggatggtatacaaccgggggacctcccgatccctctgacattcacgtgcacaagcaagtgtgcgagatcatagaatccccgctgttcctcaagttgaacccaatgacaaaacataccgacctgcccgttagtgtgttcgaatcagtgattgacataattaacggcgaggcgactatgctgtttgctgaattaacttacaccttagctacggaggaggccgagaggattggagtggatcacgtggctcgaatgaccgccaccggaagcggagagaactctaccgttgccgagcacctgatagcacagcactccgctatcaagatgctacattccagagtgaaactgattctggagtatgtgaaggcttcagaagccggtgaggtcccattcaatcacgaaattctgagggaggcttatgccctttgtcactgcctccccgtactgtcgaccgacaaattcaaaacagatttttatgatcaatgcaacgatgtggggctgatggcctaccttgggacaattacaaaaacatgcaataccatgaaccagttcgtgaataaatttaatgtactttacgacagacaggggatcggacggcgcatgagaggattgttcttttag

SEQ ID NO: 168444 - DNA, 984 bp, Artificial Sequence
  derived and/or modified sequence
atggctgctgctgctgctgctgctgctgccaccaacggcaccggcggcagcagcggcatggaggtggatgctgctgtggtgcccagcgtgatggcctgtggggtgacaggctctgtgtctgtggccctgcaccccctggtgatcctgaacatcagtgaccactggatccgcatgaggagccaggagggccggcctgtgcaggtgattggagccctgattggcaagcaggagggcagaaatattgaggtgatgaacagctttgagctgctgagccacacagtggaggagaagatcatcatcgacaaggagtactactacaccaaggaggagcagttcaagcaggtgttcaaggagctggagttcctgggctggtacaccactggaggccccccagaccccagcgacatccacgtgcacaagcaggtgtgtgagatcatcgagagccccctcttcctgaagctgaaccccatgaccaagcacacagacctgcctgtgtctgtgtttgagagcgtcatcgacatcatcaacggggaggccaccatgctgtttgctgagctgacctacaccctggccacagaggaggccgagcgcatcggcgtggaccacgtggccaggatgacagccactggaagtggagagaacagcacagtggccgagcacctgattgcccagcacagcgccatcaagatgctgcacagccgggtgaagctgatcctggagtatgtgaaggccagcgaggccggggaggtgcccttcaaccacgagatcctgcgggaggcctatgccctgtgccactgcctgcctgtgctgagcacagacaagttcaagacagacttctatgaccagtgcaatgatgtgggcctgatggcctacctgggcaccatcaccaagacctgcaacaccatgaaccagtttgtgaacaagttcaacgtgctgtatgaccggcagggcatcggccgcaggatgaggggcctcttcttctag

SEQ ID NO: 168445 - DNA, 981 bp, Artificial Sequence
  derived and/or modified sequence
atggctgctgctgctgctgctgctgctgccaccaacggcaccggcggcagcagcggcatggaggtggatgctgctgtgcccagcgtgatggcctgtggggtgactggatctgtgtctgtggccctgcaccccctggtgatcctgaacatcagtgaccactggatccgcatgaggagccaggagggccggcctgtgcaggtgattggagccctgattggcaagcaggagggcaggaacatcgaggtgatgaacagctttgagctgctgagccacacagtggaggagaagatcatcatcgacaaggagtactactacaccaaggaggagcagttcaagcaggtgttcaaggagctggagttcctgggctggtacaccaccggcggccccccagaccccagcgacatccacgtgcacaagcaggtgtgtgagatcatcgagagccccctcttcctgaagctgaaccccatgaccaagcacacagacctgcctgtgtctgtgtttgaatctgtgattgacatcatcaatggagaggccaccatgctgtttgctgagctgacctacaccctggccacagaggaggccgagagaattggagtggaccacgtggccaggatgacagccaccggcagcggggagaacagcacagtggccgagcacctgattgcccagcacagcgccatcaagatgctgcacagccgggtgaagctgatcctggagtatgtgaaggccagcgaggccggggaggtgcccttcaaccacgagatcctgcgggaggcctatgccctgtgccactgcctgcctgtgctgagcacagacaagttcaagacagacttctatgaccagtgcaatgatgtgggcctgatggcctacctgggcaccatcaccaagacctgcaacaccatgaaccagtttgtgaacaagttcaacgtgctgtatgaccggcagggcattggaagaaggatgaggggcctcttcttctag

SEQ ID NO: 168446 - DNA, 984 bp, Artificial Sequence
  derived and/or modified sequence
atggccgccgccgccgccgccgccgccgccaccaacggcaccggcggatctagcggcatggaggttgacgccgctgtggttccgtctgtcatggcctgtggcgttacaggctcggtgtcagtggcactccaccccctagtcatactgaacatctccgatcactggattaggatgcgctcccaggagggacggcctgtccaggtgatcggtgccctgatcggtaaacaagaaggacggaacatagaggttatgaacagttttgagctcttaagccacactgtcgaagaaaaaataatcatcgacaaggaatactattacaccaaggaggagcagtttaagcaagtctttaaagagctggagttcctgggatggtacaccacggggggcccgcctgaccctagcgacattcacgtccacaagcaggtctgcgaaatcatcgaatcccctctctttctgaagctgaatcccatgactaagcacaccgatctaccagtgagcgtgtttgaaagcgtgatagacataattaacggtgaggcaaccatgttgttcgccgagctgacctatactctagccacagaggaagccgaaaggataggggttgaccatgtggcccgaatgaccgcaacaggttctggggagaacagcaccgtggccgaacacctcattgctcagcacagtgctatcaagatgttgcattccagggttaaactgatcctcgagtacgtcaaagcatcagaggccggcgaggtaccattcaatcatgaaattctgcgggaagcatatgctttgtgccactgtctacctgtcctgtcaacagataaatttaagaccgacttttacgaccagtgtaatgacgtaggactcatggcttatctgggtacaatcacaaagacctgtaacacaatgaaccagttcgtgaacaagttcaacgtcctgtacgatcggcaagggatcggacgacggatgaggggccttttcttttag

SEQ ID NO: 168447 - DNA, 981 bp, Artificial Sequence
  derived and/or modified sequence
atggccgccgccgccgccgccgccgccgccaccaacggcaccggcgggagctctggcatggaggtcgacgcggccgtaccttctgtgatggcttgtggcgtaactggaagcgtgtccgttgccctgcatccgttagtgatcttgaacatctctgaccattggattcggatgagatcgcaagaaggccgaccggtgcaggtgatcggtgcactgatcggaaagcaagaagggcgcaacattgaggtgatgaattcctttgagctgctgtcacacaccgtggaggagaaaattatcatagataaggagtactactacaccaaagaggaacagttcaagcaggttttcaaggaactggagtttctcgggtggtataccacaggcggccccccagacccaagcgacattcatgtacataagcaggtttgtgagataatcgagtctcctctgttcttgaagctgaaccccatgacaaaacacactgatctaccagtgtccgtgtttgagtccgtaatcgatattataaatggagaagccactatgctgtttgccgagctcacttatacgcttgccacggaagaggcggaaagaatcggtgtggaccatgtggcacgaatgaccgccactggatctggcgagaatagtaccgtggccgagcaccttatcgctcagcactccgctattaagatgcttcactctagagttaagctaatcctcgaatacgttaaagcctctgaagcaggcgaagttccgttcaaccatgagatcctgagagaggcatacgccctttgtcactgccttccagtactgtccaccgacaagtttaaaactgacttttacgatcagtgtaatgatgttggcctgatggcgtacctgggtacaattaccaagacctgcaatacaatgaaccaatttgtcaacaagttcaatgttctctatgatcggcaaggcattggccgacggatgagaggactgttcttttag

SEQ ID NO: 168448 - DNA, 984 bp, Artificial Sequence
  derived and/or modified sequence
atggccgctgctgcggctgccgctgcggcaacaaatggcaccggaggcagttcaggcatggaggtagacgccgcagtagtgccaagtgtgatggcctgcggggtgacggggtcagtaagcgtagcgctgcatccactggtgattttgaatatatctgatcactggatcaggatgagatcccaggaaggacgcccagtgcaggtgattggcgctttgattggtaaacaagagggcaggaacatcgaagtcatgaattcatttgagctgctctcacacaccgtggaggaaaagattatcatagacaaggagtactattacacaaaagaagaacagtttaagcaggtctttaaggagctggaatttttaggatggtatacaacaggaggccctcctgatccctcagacattcacgtgcataagcaagtttgtgaaatcattgaaagtcctctgttcctcaaacttaaccccatgactaaacacaccgacctgcccgtgtctgtctttgagtcagtgatcgacataatcaacggggaagccacaatgctatttgccgagctgacctacaccctggccaccgaggaagccgaaaggataggtgtggatcacgtagcccgtatgacagccaccgggtccggagaaaacagcacagtcgctgagcacctgattgcccagcattccgctataaagatgttacacagccgcgtgaaattgatcttggaatatgtgaaagcctccgaagccggtgaggtgccgtttaatcatgagattctgagagaggcatacgcgctctgtcattgcttgcccgtgttatctaccgacaagtttaagacagatttctatgaccaatgtaatgacgtgggactgatggcctatctcgggacgattacgaagacttgcaacaccatgaaccagtttgtgaataaattcaacgtcctgtacgatcgtcaggggattgggagaaggatgcggggtctttttttttag

SEQ ID NO: 168449 - DNA, 1107 bp, Artificial Sequence
  derived and/or modified sequence
cgcggggaaaatggcggcggcggcggcggcggctgcagctacgaacgggaccggaggaagcagcgggatggaggtggatgcagcagtccccagcgtgatggcctgcggagtgactgggagtgtttccgtcgctctccatccccttgtcattctcaacatctcagaccactggatccgcatgcgctcccaggaggggcggcctgtgcaggtgattggggctctgattggcaagcaggagggccgaaatatcgaggtgatgaactcctttgagctgctgtcccacaccgtggaagagaagattatcattgacaaggaatattattacaccaaggaggagcagtttaaacaggtgttcaaggagctggagtttctgggttggtataccacaggggggccacctgacccctcggacatccacgtccataagcaggtgtgtgagatcatcgagagccccctctttctgaagttgaaccctatgaccaagcacacagatcttcctgtcagcgtttttgagtctgtcattgatataatcaatggagaggccacaatgctgtttgctgagctgacctacactctggccacagaggaagcggaacgcattggtgtagaccacgtagcccgaatgacagcaacaggcagtggagagaactccactgtggctgaacacctgatagcacagcacagcgccatcaagatgctgcacagccgcgtcaagctcatcttggagtacgtcaaggcctctgaagcgggagaggtcccctttaatcatgagatcctgcgggaggcctatgctctgtgtcactgtctcccggtgctcagcacagacaagttcaagacagatttttatgatcaatgcaacgacgtggggctcatggcctacctcggcaccatcaccaaaacgtgcaacaccatgaaccagtttgtgaacaagttcaatgtcctctacgaccgacaaggcatcggcaggagaatgcgcgggctctttttctgatgagggtacttgaagggctgatggacaggggtcaggcaactatcccaaaggggagggcactacacttccttgagagaaaccgctgtcattaataaaaggggagcagcccctgagca

SEQ ID NO: 168450 - DNA, 981 bp, Artificial Sequence
  derived and/or modified sequence
atggcagccgcagcggcagccgcagctgccacgaacggaaccggagggtcttctgggatggaggtggacgccgcagttccctccgtgatggcatgcggtgtgaccggtagtgtgagtgttgcacttcacccccttgtgatactcaacatttcggaccactggattagaatgcgctctcaggaaggccgtccggttcaagtgattggtgcactgattggaaaacaggaaggcagaaacattgaagtgatgaactccttcgaactgctttctcacactgtggaagagaagatcatcatcgacaaagagtattattatactaaagaggaacagttcaaacaggtcttcaaagagctcgaatttctaggttggtacacaaccggagggccaccagaccctagcgacatccacgtgcataaacaggtctgtgagataatcgagtctcccctgttcctgaagcttaaccccatgaccaaacacaccgacctgccagtatcggttttcgagagcgtgatagacatcattaacggggaagctacaatgctgttcgccgagcttacttataccctcgctactgaggaggccgaacggattggcgttgaccacgtcgccaggatgaccgctacggggtcgggcgaaaatagcaccgttgcggaacacctgatagcccaacactccgcaatcaagatgttgcatagtcgggtgaaattgattctagagtatgtgaaggcttcagaggccggtgaggtgcccttcaatcatgagatcctgagagaggcctatgctctgtgccactgcttaccggtactgagtacagacaaatttaagaccgacttttacgatcagtgcaacgacgtcgggcttatggcgtacctgggcaccatcacaaaaacatgtaacacaatgaaccagttcgtcaataagtttaacgtgctgtacgatagacaggggattggccgtcggatgaggggactattcttctag

SEQ ID NO: 168451 - DNA, 1432 bp, Artificial Sequence
  derived and/or modified sequence
gaagggggcggggccgaggctggcgggcgcggggaaaatggcggcggcggcggcggcggctgcagctacgaacgggaccggaggaagcagcgggatggaggtggatgcagcagtagtccccagcgtgatggcctgcggagtgactgggagtgtttccgtcgctctccatccccttgtcattctcaacatctcagaccactggatccgcatgcgctcccaggaggggcggcctgtgcaggtgattggggctctgattggcaagcaggagggccgaaatatcgaggtgatgaactcctttgagctgctgtcccacaccgtggaagagaagattatcattgacaaggaatattattacaccaaggaggagcagtttaaacaggtgttcaaggagctggagtttctgggttggtataccacaggggggccacctgacccctcggacatccacgtccataagcaggtgtgtgagatcatcgagagccccctctttctgaagttgaaccctatgaccaagcacacagatcttcctgtcagcgtttttgagtctgtcattgatataatcaatggagaggccacaatgctgtttgctgagctgacctacactctggccacagaggaagcggaacgcattggtgtagaccacgtagcccgaatgacagcaacaggcagtggagagaactccactgtggctgaacacctgatagcacagcacagcgccatcaagatgctgcacagccgcgtcaagctcatcttggagtacgtcaaggcctctgaagcgggagaggtcccctttaatcatgagatcctgcgggaggcctatgctctgtgtcactgtctcccggtgctcagcacagacaagttcaagacagatttttatgatcaatgcaacgacgtggggctcatggcctacctcggcaccatcaccaaaacgtgcaacaccatgaaccagtttgtgaacaagttcaatgtcctctacgaccgacaaggcatcggcaggagaatgcgcgggctctttttctgatgagggtacttgaagggctgatggacaggggtcaggcaactatcccaaaggggagggcactacacttccttgagagaaaccgctgtcattaataaaaggggagcagcccctgagcacccctgctggtggctctgtcctctgttaggcaccacactggttggtcaacttggatgttcatcgaggctcattctggccttgctcagaagcccttctgatgctcttcagtgagggaggcactaccatttgaagtgaccccatgtcagtcacatggactggtctttagcaaagtccaaggctgcctgcttccacctaagtggtctctgttctacactttaatgtcaccctctacatcatcttacctagcccacccaaccttataaacatgataattgactactttcctgagctaaa

SEQ ID NO: 168452 - DNA, 984 bp, Artificial Sequence
  derived and/or modified sequence
atggccgccgccgccgccgccgccgccgccaccaacggcaccggcggcagcagcggcatggaggtggacgccgccgtggtgcccagcgtgatggcctgcggcgtgaccggcagcgtgagcgtggccctgcaccccctggtgatcctgaacatcagcgaccactggatcagaatgagaagccaggagggcagacccgtgcaggtgatcggcgccctgatcggcaagcaggagggcagaaacatcgaggtgatgaacagcttcgagctgctgagccacaccgtggaggagaagatcatcatcgacaaggagtactactacaccaaggaggagcagttcaagcaggtgttcaaggagctggagttcctgggctggtacaccaccggcggcccccccgaccccagcgacatccacgtgcacaagcaggtgtgcgagatcatcgagagccccctgttcctgaagctgaaccccatgaccaagcacaccgacctgcccgtgagcgtgttcgagagcgtgatcgacatcatcaacggcgaggccaccatgctgttcgccgagctgacctacaccctggccaccgaggaggccgagagaatcggcgtggaccacgtggccagaatgaccgccaccggcagcggcgagaacagcaccgtggccgagcacctgatcgcccagcacagcgccatcaagatgctgcacagcagagtgaagctgatcctggagtacgtgaaggccagcgaggccggcgaggtgcccttcaaccacgagatcctgagagaggcctacgccctgtgccactgcctgcccgtgctgagcaccgacaagttcaagaccgacttctacgaccagtgcaacgacgtgggcctgatggcctacctgggcaccatcaccaagacctgcaacaccatgaaccagttcgtgaacaagttcaacgtgctgtacgacagacagggcatcggcagaagaatgagaggcctgttcttctag

SEQ ID NO: 168453 - protein, 225 aa, Artificial Sequence
  derived and/or modified sequence
MAGGGAGDPGLGAAAAPAPETREHLFKVLVIGELGVGKTSIIKRYVHQLFSQHYRATIGVDFALKVLNWDSRTLVRLQLWDIAGQERFGNMTRVYYKEAVGAFVVFDISRSSTFEAVLKWKSDLDSKVHLPNGSPIPAVLLANKCDQNKDSSQSPSQVDQFCKEHGFAGWFETSAKDNINIEEAARFLVEKILVNHQSFPNEENDVDKIKLDQETLRAENKSQCC

SEQ ID NO: 168454 - DNA, 678 bp, Artificial Sequence
  derived and/or modified sequence
atggcaggtggcggagcaggcgatcctgggctcggcgccgctgcggcaccggcccccgagacaagagaacacctgtttaaggtgctcgttatcggcgaactcggggttgggaagacctcaattatcaaacggtacgtgcatcagctcttttctcagcattatagagctaccattggcgtcgacttcgccctgaaagttctgaactgggactcaagaaccttagttcggctccagctatgggacatcgcaggccaagagcgattcggcaacatgactagggtctattataaggaagccgtcggggcctttgtcgtctttgacatctctcggagctctacctttgaggccgtgctgaaatggaagagtgaccttgattccaaggtgcatctacctaacggctcaccaattcccgccgtactgcttgccaataaatgcgaccaaaacaaagactccagtcagtcacccagccaggtggatcagttctgcaaagaacatggcttcgcaggctggttcgaaacttccgcaaaggacaatattaatatcgaggaagcagccagattcttggttgagaagatcctcgtaaatcatcaatcattccccaatgaagagaacgacgttgataagataaagcttgaccaggaaacgttgagagccgaaaataagagtcagtgctgttag

SEQ ID NO: 168455 - DNA, 678 bp, Artificial Sequence
  derived and/or modified sequence
atggccggcggcggggccggggaccccggcctgggcgctgctgctgccccagcccctgagacccgggagcacctgttcaaggtgctggtgattggagagctgggcgtgggcaagaccagcatcatcaagagatatgtgcaccagctgttcagccagcactaccgggccaccatcggcgtggactttgccctgaaggtgctgaactgggacagcaggaccctggtgcggctgcagctgtgggacattgctggccaggagcgcttcggcaacatgaccagggtgtactacaaggaggccgtgggcgcctttgtggtgtttgacatcagccgcagcagcacctttgaggccgtgctgaagtggaagagtgacctggacagcaaggtgcacctgcccaacggcagccccatcccagctgtgctgctggccaacaagtgtgaccagaacaaggacagcagccagagccccagccaggtggaccagttctgcaaggagcacggctttgctggctggtttgagaccagcgccaaggacaacatcaacatcgaggaggccgcccgcttcctggtggagaagatcctggtgaaccaccagagcttccccaatgaagaaaatgatgtggacaagatcaagctggaccaggagaccctgcgggcagagaacaagagccagtgctgctag

SEQ ID NO: 168456 - DNA, 678 bp, Artificial Sequence
  derived and/or modified sequence
atggccggcggcggcgccggcgaccccggcctgggcgccgccgccgctcccgccccagaaacacgagagcatttgttcaaggtactggtaatcggcgaattgggcgtggggaagaccagcattataaaaaggtacgtccatcagctgttcagccagcattaccgggctactataggcgtggattttgctctgaaggtcctaaattgggacagcaggacactggtgagactccagctgtgggatattgcgggccaggagcggtttggcaatatgactagagtgtactacaaggaagcagtgggcgcttttgtggttttcgacatctcacgcagtagcacattcgaagcagtgttaaaatggaagagcgacctggactctaaagtacacctgcccaacggatcaccaatcccggccgttctgctggctaacaagtgtgatcaaaataaggattcctcacagagcccttcccaggtggaccagttttgtaaggagcatggctttgccgggtggtttgagacatcagcgaaggataacataaacatagaggaagctgcccggtttctggtggagaaaattctagtgaatcaccaatctttccccaatgaggaaaacgacgtcgataagatcaagttagaccaggaaactctcagagccgagaacaaatctcagtgctgttag

SEQ ID NO: 168457 - DNA, 678 bp, Artificial Sequence
  derived and/or modified sequence
atggctggcggaggtgccggagatcctggtctgggcgctgcggctgctccagcaccagaaacgagggaacatctgtttaaggtgctggtaattggagagctgggggtgggaaagacctctatcatcaaaaggtacgtgcatcagctctttagccagcattaccgggcaacaattggcgtggacttcgcgttgaaagtacttaactgggatagtcgcaccctcgtcaggctccaactgtgggatatcgccggacaggagcggttcgggaatatgactcgagtgtactataaagaagccgtgggtgccttcgtggtgttcgatatcagtcggtcttcgacctttgaggctgtgttgaagtggaaatccgacctcgattcaaaagtgcatttaccgaacggttctcctatccccgctgtcttactggcaaataaatgtgaccaaaacaaagatagcagccagagcccatcccaggtggaccaattctgcaaagaacacggatttgccggttggttcgaaacttctgccaaggacaacataaatatcgaagaggcagctaggttcctcgtggaaaaaatcctggtcaaccaccagtccttccccaatgaagaaaatgatgtggacaagattaagctagatcaggaaacgctaagagctgagaacaagtctcagtgttgttag

SEQ ID NO: 168458 - DNA, 1217 bp, Artificial Sequence
  derived and/or modified sequence
ggccgcgagcactggcgggttctgggtcctgtgaccggtcaggcggcgtcagcgggcgcggcggagggctggccggcctcgggggagtttccgcggccgccgggggcgcggcggcagagcgcgaggccgggcagggggccagactcggagtcgaggcgcgcccgacagccgcagcgctcatggcgggcggaggagccggggaccccggcctgggggcggccgccgccccagcgcccgagacccgcgagcacctcttcaaggtgctggtgatcggcgagcttggcgtgggcaagaccagcatcatcaagcgctacgtccaccagctcttctcccagcactaccgggccaccatcggggtggacttcgccctcaaggtcctcaactgggacagcaggactctggtgcgcctgcagctgtgggacatcgcggggcaggagcgatttggcaacatgacccgagtatactacaaggaagctgttggtgcttttgtagtctttgatatatcaagaagttccacatttgaggcagtcttaaaatggaaaagtgatctggatagtaaagttcatcttccaaatggcagccctatccctgctgtcctcttggctaacaaatgtgaccagaacaaggacagtagccagagtccttcccaggtggaccaattctgcaaagaacatggctttgccggatggtttgaaacctctgcaaaggataacataaacatagaggaagctgcccggttcctagtggagaagattcttgtaaaccaccaaagctttcctaatgaagaaaacgatgtggacaaaattaagctagatcaagagaccttgagagcagagaacaaatcccagtgttgctgatatatggcttctgcttctcttgtgtgtgcctcagctctgaagaagttcctgagaatgggttacagatgtcatgttagctgggagtcttcccacatgtggcacttcaaaaggcagcaccactgggcgcctgcacttatttgaaaatggaactttgggagaagtatccctgctagtggctctgtaacttaacagatgacaattaggcttttgtcattgttgccatcatatggaagataatgtttacatccttttaaacatttttatatgacaattcctcaggatttggtaaggcttccaagttgtagcttttagtgtaagtgctggggtggtaataaaatgttacctccagtcttatggtca

SEQ ID NO: 168459 - DNA, 678 bp, Artificial Sequence
  derived and/or modified sequence
atggccggcggcggcgccggcgaccccggcctgggcgccgccgccgcccccgcccccgagaccagagagcacctgttcaaggtgctggtgatcggcgagctgggcgtgggcaagaccagcatcatcaagagatacgtgcaccagctgttcagccagcactacagagccaccatcggcgtggacttcgccctgaaggtgctgaactgggacagcagaaccctggtgagactgcagctgtgggacatcgccggccaggagagattcggcaacatgaccagagtgtactacaaggaggccgtgggcgccttcgtggtgttcgacatcagcagaagcagcaccttcgaggccgtgctgaagtggaagagcgacctggacagcaaggtgcacctgcccaacggcagccccatccccgccgtgctgctggccaacaagtgcgaccagaacaaggacagcagccagagccccagccaggtggaccagttctgcaaggagcacggcttcgccggctggttcgagaccagcgccaaggacaacatcaacatcgaggaggccgccagattcctggtggagaagatcctggtgaaccaccagagcttccccaacgaggagaacgacgtggacaagatcaagctggaccaggagaccctgagagccgagaacaagagccagtgctgctag

SEQ ID NO: 168460 - protein, 377 aa, Artificial Sequence
  derived and/or modified sequence
MKFPGPLENQRLSFLLEKAITREAQMWKVNVRKMPSNQNVSPSQRDEVIQWLAKLKYQFNLYPETFALASSLLDRFLATVKAHPKYLSCIAISCFFLAAKTVEEDERIPVLKVLARDSFCGCSSSEILRMERIILDKLNWDLHTATPLDFLHIFHAIAVSTRPQLLFSLPKLSPSQHLAVLTKQLLHCMACNQLLQFRGSMLALAMVSLEMEKLIPDWLSLTIELLQKAQMDSSQLIHCRELVAHHLSTLQSSLPLNSVYVYRPLKHTLVTCDKGVFRLHPSSVPGPDFSKDNSKPEVPVRGTAAFYHHLPAASGCKQTSTKRKVEEMEVDDFYDGIKRLYNEDNVSENVGSVCGTDLSRQEGHASPCPPLQPVSVM

SEQ ID NO: 168461 - protein, 125 aa, Artificial Sequence
  derived and/or modified sequence
MKFPGPLENQRLSFLLEKAITREAQMWKVNVRKMPSNQNVSPSQRDEVIQWLAKLKYQFNLYPETFALASSLLDRFLATVKAHPKYLSCIAISCFFLAAKTVEEDERIPVLKVLARDSFCGCSSS

SEQ ID NO: 168462 - protein, 80 aa, Artificial Sequence
  derived and/or modified sequence
MKFPGPLENQRLSFLLEKAITREAQMWKVNVRKMPSNQNVSPSQRDEVIQWLAKLKYQFNLYPETFALASSLLDRFLATV

SEQ ID NO: 168463 - protein, 363 aa, Artificial Sequence
  derived and/or modified sequence
MTPRHHCEAYSSAGEEEEEEEEEKNVSPSQRDEVIQWLAKLKYQFNLYPETFALASSLLDRFLATVKAHPKYLSCIAISCFFLAAKTVEEDERIPVLKVLARDSFCGCSSSEILRMERIILDKLNWDLHTATPLDFLHIFHAIAVSTRPQLLFSLPKLSPSQHLAVLTKQLLHCMACNQLLQFRGSMLALAMVSLEMEKLIPDWLSLTIELLQKAQMDSSQLIHCRELVAHHLSTLQSSLPLNSVYVYRPLKHTLVTCDKGVFRLHPSSVPGPDFSKDNSKPEVPVRGTAAFYHHLPAASGCKQTSTKRKVEEMEVDDFYDGIKRLYNEDNVSENVGSVCGTDLSRQEGHASPCPPLQPVSVM

SEQ ID NO: 168464 - DNA, 1134 bp, Artificial Sequence
  derived and/or modified sequence
atgaagttccccggccccctggagaaccagagactgagcttcctgctggagaaggccatcaccagagaggcccagatgtggaaggtgaacgtgagaaagatgcccagcaaccagaacgtgagccccagccagagagacgaggtgatccagtggctggccaagctgaagtaccagttcaacctgtaccccgagaccttcgccctggccagcagcctgctggacagattcctggccaccgtgaaggcccaccccaagtacctgagctgcatcgccatcagctgcttcttcctggccgccaagaccgtggaggaggacgagagaatccccgtgctgaaggtgctggccagagacagcttctgcggctgcagcagcagcgagatcctgagaatggagagaatcatcctggacaagctgaactgggacctgcacaccgccacccccctggacttcctgcacatcttccacgccatcgccgtgagcaccagaccccagctgctgttcagcctgcccaagctgagccccagccagcacctggccgtgctgaccaagcagctgctgcactgcatggcctgcaaccagctgctgcagttcagaggcagcatgctggccctggccatggtgagcctggagatggagaagctgatccccgactggctgagcctgaccatcgagctgctgcagaaggcccagatggacagcagccagctgatccactgcagagagctggtggcccaccacctgagcaccctgcagagcagcctgcccctgaacagcgtgtacgtgtacagacccctgaagcacaccctggtgacctgcgacaagggcgtgttcagactgcaccccagcagcgtgcccggccccgacttcagcaaggacaacagcaagcccgaggtgcccgtgagaggcaccgccgccttctaccaccacctgcccgccgccagcggctgcaagcagaccagcaccaagagaaaggtggaggagatggaggtggacgacttctacgacggcatcaagagactgtacaacgaggacaacgtgagcgagaacgtgggcagcgtgtgcggcaccgacctgagcagacaggagggccacgccagcccctgcccccccctgcagcccgtgagcgtgatgtag

SEQ ID NO: 168465 - DNA, 378 bp, Artificial Sequence
  derived and/or modified sequence
atgaagttccccggccccctggagaaccagagactgagcttcctgctggagaaggccatcaccagagaggcccagatgtggaaggtgaacgtgagaaagatgcccagcaaccagaacgtgagccccagccagagagacgaggtgatccagtggctggccaagctgaagtaccagttcaacctgtaccccgagaccttcgccctggccagcagcctgctggacagattcctggccaccgtgaaggcccaccccaagtacctgagctgcatcgccatcagctgcttcttcctggccgccaagaccgtggaggaggacgagagaatccccgtgctgaaggtgctggccagagacagcttctgcggctgcagcagcagctag

SEQ ID NO: 168466 - DNA, 1092 bp, Artificial Sequence
  derived and/or modified sequence
atgacccccagacaccactgcgaggcctacagcagcgccggcgaggaggaggaggaggaggaggaggagaagaacgtgagccccagccagagagacgaggtgatccagtggctggccaagctgaagtaccagttcaacctgtaccccgagaccttcgccctggccagcagcctgctggacagattcctggccaccgtgaaggcccaccccaagtacctgagctgcatcgccatcagctgcttcttcctggccgccaagaccgtggaggaggacgagagaatccccgtgctgaaggtgctggccagagacagcttctgcggctgcagcagcagcgagatcctgagaatggagagaatcatcctggacaagctgaactgggacctgcacaccgccacccccctggacttcctgcacatcttccacgccatcgccgtgagcaccagaccccagctgctgttcagcctgcccaagctgagccccagccagcacctggccgtgctgaccaagcagctgctgcactgcatggcctgcaaccagctgctgcagttcagaggcagcatgctggccctggccatggtgagcctggagatggagaagctgatccccgactggctgagcctgaccatcgagctgctgcagaaggcccagatggacagcagccagctgatccactgcagagagctggtggcccaccacctgagcaccctgcagagcagcctgcccctgaacagcgtgtacgtgtacagacccctgaagcacaccctggtgacctgcgacaagggcgtgttcagactgcaccccagcagcgtgcccggccccgacttcagcaaggacaacagcaagcccgaggtgcccgtgagaggcaccgccgccttctaccaccacctgcccgccgccagcggctgcaagcagaccagcaccaagagaaaggtggaggagatggaggtggacgacttctacgacggcatcaagagactgtacaacgaggacaacgtgagcgagaacgtgggcagcgtgtgcggcaccgacctgagcagacaggagggccacgccagcccctgcccccccctgcagcccgtgagcgtgatgtag

SEQ ID NO: 168467 - DNA, 2772 bp, Artificial Sequence
  derived and/or modified sequence
cttcccctctcttcccctccctccccagccttccccgcgagcggacgcggcagcgcctctgtctcgctttttcttatttttcccccctttcccctttctttttttttttttcttttcttttctcccctccccccctttcaccatttcccctcggaggcgctttccccgggcaggggcagagccggtctcaccccccgcctctccccggcccccgccgccctatggcgagagggagccccctcccaacccgggctcgagcggcggcggcctcaggccgggggtcatcatggaactaattcgctgaccgacccagcggccgcagccgtgcgtcccgctcgagcgccagcgcccgcgcccgcgccccccgatccgcttcccctttctccctcctcagttggccgagtcgtcccgcgcgcaccgcctccgcgcgcctatgagaatgaggtggtaacgggcccccggatgaccccgcgtcaccactgtgaggcctacagctctgccggggaggaggaggaggaggaagaggaggagaaggtagctacagcaagctgggtagcaggcagatccaaaggatatcatgaagtttccagggcctttggaaaaccagagattgtctttcctgttggaaaaggcaatcactagggaagcacagatgtggaaagtgaatgtgcggaaaatgccttcaaatcagaatgtttctccatcccagagagatgaagtaattcaatggctggccaaactcaagtaccaattcaacctttacccagaaacatttgctctggctagcagtcttttggataggtttttagctaccgtaaaggctcatccaaaatacttgagttgtattgcaatcagctgttttttcctagctgccaagactgttgaggaagatgagagaattccagtactaaaggtattggcaagagacagtttctgtggatgttcctcatctgaaattttgagaatggagagaattattctggataagttgaattgggatcttcacacagccacaccattggattttcttcatattttccatgccattgcagtgtcaactaggcctcagttacttttcagtttgcccaaattgagcccatctcaacatttggcagtccttaccaagcaactacttcactgtatggcctgcaaccaacttctgcaattcagaggatccatgcttgctctggccatggttagtctggaaatggagaaactcattcctgattggctttctcttacaattgaactgcttcagaaagcacagatggatagctcccagttgatccattgtcgggagcttgtggcacatcacctttctactctgcagtcttccctgcctctgaattccgtttatgtctaccgtcccctcaagcacaccctggtgacctgtgacaaaggagtgttcagattacatccctcctctgtcccaggcccagacttctccaaggacaacagcaagccagaagtgccagtcagaggtacagcagccttttaccatcatctcccagctgccagtgggtgcaagcagacctctactaaacgcaaagtagaggaaatggaagtggatgacttctatgatggaatcaaacggctctataatgaagataatgtctcagaaaatgtgggttctgtgtgtggcactgatttatcaagacaagagggacatgcttccccttgtccacctttgcagcctgtttctgtcatgtagtttcaacaagtgctacctttgagtgtaaactaaggtagactactttgggaatgagaacatgcaaaatcaggaaaggctgtagaaggaaatataccttaacaggctgatttggagtgagccagaaaaaaaaaataaaactctcattatttgtgtggctaattataattcagcgttatttaagcacataaagaccaaaaaaaaaaaaaagaaatccaaaagatccaaactttttttaaacttaaaaaatctctttgtagtatgtcagttgcactttttttctgccataatgtaacgtagcttgccccgtcaaaaattcaattaaaattcatggccagcaatcctgttccccctcagcatcctgatttaattttcctgttgcttttgcttgcttctccatttaatagttactgaactttatgcatgttgatctatattgattttcactgcagttgaatgaacaaattatttcagtgtgacagccatgactcaagttccaattagtctgaaaagggtactttggaattgtcccatattaatcagagatggcaaaagaaaaagttctcatattaccaggttgattttgtgtctcatttcaaattttaatttaaaattatggttttcatttttgtttaccttaaagtgatgcttaaaagtggcatgtaattaggacacttaggtttgttgaaagcattttcgacatttgtataaaagaatttgtgataaatatatccaggtgctcaccaaagaaacatgtattaacaacttaaattagatttttctaactgatagttttcactcatttataatcagtaggagagactgtctagatgttggggcagctctatgatttaagtctgtaacatgttataactgaatttagtaccctagttttgttaagctattaggattttctaatagaacttactccccctgcctccccagccttatgtttcttttaatgacttctggatcctgagctccctttgcagtctgaaaaaggtattgcagtcagaactgtgtactgatgataaaagcctctggtagcaataaaaagttgtcct

SEQ ID NO: 168468 - DNA, 541 bp, Artificial Sequence
  derived and/or modified sequence
aaataactggaatttgaaaggaggacagaggagcctccgctggagctagggggctccgttacagatccttttggcagaagttgacaattgggtatcaaaacagtggaaggtgtttcgggaggtagctacagcaagctgggtagcaggcagatccaaaggatatcatgaagtttccagggcctttggaaaaccagagattgtctttcctgttggaaaaggcaatcactagggaagcacagatgtggaaagtgaatgtgcggaaaatgccttcaaatcagaatgtttctccatcccagagagatgaagtaattcaatggctggccaaactcaagtaccaattcaacctttacccagaaacatttgctctggctagcagtcttttggataggtttttagctaccgtaaaggctcatccaaaatacttgagttgtattgcaatcagctgttttttcctagctgccaagactgttgaggaagatgagagaattccagtactaaaggtattggcaagagacagtttctgtggatgttcctcatctga

SEQ ID NO: 168469 - DNA, 1622 bp, Artificial Sequence
  derived and/or modified sequence
ctccctccccagccttccccgcgagcggacgcggcagcgcctctgtctcgctttttcttatttttcccccctttcccctttctttttttttttttcttttcttttctcccctccccccctttcaccatttcccctcggaggcgctttccccgggcaggggcagagccggtctcaccccccgcctctccccggcccccgccgccctatggcgagagggagccccctcccaacccgggctcgagcggcggcggcctcaggccgggggtcatcatggaactaattcgctgaccgacccagcggccgcagccgtgcgtcccgctcgagcgccagcgcccgcgcccgcgccccccgatccgcttcccctttctccctcctcagttggccgagtcgtcccgcgcgcaccgcctccgcgcgcctatgagaatgaggtggtaacgggcccccggatgaccccgcgtcaccactgtgaggcctacagctctgccggggaggaggaggaggaggaagaggaggagaagaatgtttctccatcccagagagatgaagtaattcaatggctggccaaactcaagtaccaattcaacctttacccagaaacatttgctctggctagcagtcttttggataggtttttagctaccgtaaaggctcatccaaaatacttgagttgtattgcaatcagctgttttttcctagctgccaagactgttgaggaagatgagagaattccagtactaaaggtattggcaagagacagtttctgtggatgttcctcatctgaaattttgagaatggagagaattattctggataagttgaattgggatcttcacacagccacaccattggattttcttcatattttccatgccattgcagtgtcaactaggcctcagttacttttcagtttgcccaaattgagcccatctcaacatttggcagtccttaccaagcaactacttcactgtatggcctgcaaccaacttctgcaattcagaggatccatgcttgctctggccatggttagtctggaaatggagaaactcattcctgattggctttctcttacaattgaactgcttcagaaagcacagatggatagctcccagttgatccattgtcgggagcttgtggcacatcacctttctactctgcagtcttccctgcctctgaattccgtttatgtctaccgtcccctcaagcacaccctggtgacctgtgacaaaggagtgttcagattacatccctcctctgtcccaggcccagacttctccaaggacaacagcaagccagaagtgccagtcagaggtacagcagccttttaccatcatctcccagctgccagtgggtgcaagcagacctctactaaacgcaaagtagaggaaatggaagtggatgacttctatgatggaatcaaacggctctataatgaagataatgtctcagaaaatgtgggttctgtgtgtggcactgatttatcaagacaagagggacatgcttccccttgtccacctttgcagcctgtttctgtcatgtagtttcaacaagtgctacctttgagtgtaaactaaggtagactactttgggaatgagaacatgcaaaatcaggaaaggctgtagaa

SEQ ID NO: 168470 - DNA, 1134 bp, Artificial Sequence
  derived and/or modified sequence
atgaagttcccaggcccactggaaaatcagaggctgagttttctgctcgaaaaggcaatcacccgggaggcacaaatgtggaaagttaatgttagaaaaatgccttctaatcaaaacgtgtcaccatcacagcgcgatgaggtgatacagtggctggcaaaacttaagtaccaattcaacctctatcccgaaaccttcgctctggcatcctccttgctagatcgttttctggctactgtcaaggcacatccaaaatacttgtcatgtatagcaatctcatgtttcttcctcgctgctaagacagtggaagaggacgaaaggattcccgtgctgaaagtgctggctcgagactccttttgtgggtgtagtagctccgaaatcctgagaatggagaggattatcctggataaactgaattgggatttacacaccgccacccctctggactttctccatatcttccatgctattgcagtgagtacgcggccacagctgttgttctcactgccgaaacttagcccatctcaacacttggctgtgctcaccaaacagttactccactgcatggcctgcaatcagttgcttcagttccgaggaagcatgcttgccttagctatggtctcattagagatggagaaactaatcccagactggctgagcctaacaatcgagttgctgcagaaagcccagatggattcttcccaacttatccactgccgagagctggtggcccaccatctttctactctgcaaagtagcttaccgctgaatagcgtttatgtgtacaggccattgaagcacacgttggtgacatgcgacaaaggagtattcaggttgcacccttccagcgtacccggcccggacttcagcaaggataattctaaacccgaagtgcccgtccgaggcactgcagctttttatcatcatctgcctgccgctagcgggtgtaagcaaacatctacaaagagaaaggtggaagagatggaggtggatgacttctacgatggaatcaagcgtttgtacaatgaggataatgtgtctgagaacgtggggtctgtctgtggcacagaccttagcagacaggaaggacatgcttcaccctgtcctccccttcagcctgtgtctgtcatgtag

SEQ ID NO: 168471 - DNA, 378 bp, Artificial Sequence
  derived and/or modified sequence
atgaagttccccgggccattagagaaccagcggttgagttttctgttggagaaggccattacccgggaggcacagatgtggaaggttaacgtgcgcaaaatgccctctaatcagaacgtcagccctagtcagagggatgaagttatccagtggcttgctaagcttaaatatcagtttaatctctatccagaaaccttcgccctcgcctctagcctcctggaccgcttccttgctacagtcaaggctcaccccaagtatctatcctgcatagcgatttcttgtttctttctggcagccaaaaccgtggaagaagatgagagaatccctgttctgaaggtgctggcccgggatagtttctgtggatgcagtagtagttag

SEQ ID NO: 168472 - DNA, 1092 bp, Artificial Sequence
  derived and/or modified sequence
atgaccccaaggcatcactgcgaagcttatagctcggccggcgaggaagaggaagaggaagaggaggaaaagaacgtgagcccttcccagagggatgaagttatccagtggcttgccaaactcaagtatcagttcaatctctaccctgagacatttgccctggcttcatcattactcgaccggttcctcgcaaccgtcaaagcccatccaaaatacctgtcctgtattgccatctcctgcttctttctggccgctaagactgtcgaggaagatgagagaatcccggtactgaaggtcttagcacgcgactctttctgtggctgcagttcctctgagattcttagaatggagagaatcattcttgacaaactgaactgggatttacatacagcaacacccttggattttctgcacattttccatgccatcgctgtgtccactagaccccagttgctgttttctctacccaaattgtctccatcacagcatctggccgtgctcaccaaacagcttctccattgtatggcatgtaatcagcttctgcagtttaggggttctatgctggcacttgcaatggtgtcactggagatggagaaacttatcccagattggctctctctgactatcgaactgctccagaaagcgcagatggactcctcgcaactaatccactgtagagagcttgtggcccaccacctctcaactctgcagagcagcctcccgttaaattctgtttatgtatatcgaccactgaaacatacccttgtcacttgcgacaagggggttttccgtctccacccctcatctgtgccaggccctgatttcagcaaggacaacagtaagcctgaggtgccggtgagaggcactgcagctttctatcaccatcttccggcagcatccggctgtaagcagacatctacaaagcggaaggtcgaagagatggaggttgatgatttctatgacggaattaaaagactgtacaatgaggataacgtttctgaaaatgtgggcagcgtgtgcggcacagacctttccagacaagagggacacgcatccccatgtcctcccctccaaccggtgagtgtcatgtag

SEQ ID NO: 168473 - DNA, 1134 bp, Artificial Sequence
  derived and/or modified sequence
atgaagtttcctggccccctggagaaccagaggctgtccttcctgctggagaaggccatcacccgggaggcccagatgtggaaggtgaatgtgaggaagatgcccagcaaccagaatgtgagccccagccagagagatgaggtgatccagtggctggccaagctgaagtaccagttcaacctgtacccagagacctttgccctggccagcagcctgctggaccgcttcctggccaccgtgaaggcccaccccaagtacctgagctgcatcgccatcagctgcttcttcctggccgccaagacagtggaggaggatgagcgcatccctgtgctgaaggtgctggcccgggacagcttctgtggctgcagcagcagcgagatcctgaggatggagcgcatcatcctggacaagctgaactgggacctgcacacagccacccccctggacttcctgcacatcttccacgccatcgctgtgtccacccggccccagctgctcttcagcctgcccaagctgagccccagccagcacctggccgtgctgaccaagcagctgctgcactgcatggcctgcaaccagctgctgcagttccggggctccatgctggccctggccatggtgtccctggagatggagaagctgatcccagactggctgagcctgaccatcgagctgctgcagaaggcccagatggacagcagccagctgatccactgccgggagctggtggcccaccacctgagcaccctgcagagcagcctgcccctgaacagcgtgtatgtgtaccggcccctgaagcacaccctggtgacctgtgacaagggcgtcttccggctgcaccccagctctgtgcccggccctgacttcagcaaggacaacagcaagccagaggtgcctgtgcggggcacagctgccttctaccaccacctgcctgctgccagcggctgcaagcagaccagcaccaagaggaaggtggaggagatggaggtggatgacttctatgatggcatcaagaggctgtacaatgaagataatgtgtctgaaaatgtgggctctgtgtgtggcacagacctgagccggcaggagggccacgccagcccctgcccccccctgcagcctgtgtctgtgatgtag

SEQ ID NO: 168474 - DNA, 378 bp, Artificial Sequence
  derived and/or modified sequence
atgaagtttcctggccccctggagaaccagaggctgtccttcctgctggagaaggccatcacccgggaggcccagatgtggaaggtgaatgtgaggaagatgcccagcaaccagaatgtgagccccagccagagagatgaggtgatccagtggctggccaagctgaagtaccagttcaacctgtacccagagacctttgccctggccagcagcctgctggaccgcttcctggccaccgtgaaggcccaccccaagtacctgagctgcatcgccatcagctgcttcttcctggccgccaagacagtggaggaggatgagcgcatccctgtgctgaaggtgctggcccgggacagcttctgtggctgcagcagcagctag

SEQ ID NO: 168475 - DNA, 1092 bp, Artificial Sequence
  derived and/or modified sequence
atgacccccaggcaccactgtgaggcctacagcagcgctggggaggaggaggaggaggaggaggaggagaagaatgtgagccccagccagagagatgaggtgatccagtggctggccaagctgaagtaccagttcaacctgtacccagagacctttgccctggccagcagcctgctggaccgcttcctggccaccgtgaaggcccaccccaagtacctgagctgcatcgccatcagctgcttcttcctggccgccaagacagtggaggaggatgagcgcatccctgtgctgaaggtgctggcccgggacagcttctgtggctgcagcagcagcgagatcctgaggatggagcgcatcatcctggacaagctgaactgggacctgcacacagccacccccctggacttcctgcacatcttccacgccatcgctgtgtccacccggccccagctgctcttcagcctgcccaagctgagccccagccagcacctggccgtgctgaccaagcagctgctgcactgcatggcctgcaaccagctgctgcagttccggggctccatgctggccctggccatggtgtccctggagatggagaagctgatcccagactggctgagcctgaccatcgagctgctgcagaaggcccagatggacagcagccagctgatccactgccgggagctggtggcccaccacctgagcaccctgcagagcagcctgcccctgaacagcgtgtatgtgtaccggcccctgaagcacaccctggtgacctgtgacaagggcgtcttccggctgcaccccagctctgtgcccggccctgacttcagcaaggacaacagcaagccagaggtgcctgtgcggggcacagctgccttctaccaccacctgcctgctgccagcggctgcaagcagaccagcaccaagaggaaggtggaggagatggaggtggatgacttctatgatggcatcaagaggctgtacaatgaagataatgtgtctgaaaatgtgggctctgtgtgtggcacagacctgagccggcaggagggccacgccagcccctgcccccccctgcagcctgtgtctgtgatgtag

SEQ ID NO: 168476 - DNA, 1134 bp, Artificial Sequence
  derived and/or modified sequence
atgaagttccccggccccctggagaaccagcggctgagcttcctgctggagaaagccatcacgagagaagcgcagatgtggaaagtgaacgtgcgcaagatgccttcaaaccaaaatgtgagcccttcccagcgagatgaggtgatccagtggctcgccaagctgaaatatcaattcaacctttatccagaaacattcgccctcgcaagttcactcctggaccgatttcttgctacagtcaaggcccaccctaaatatttgtcttgtatagccatttcttgtttttttctggcggccaagaccgtggaggaggatgagagaattcccgtgctgaaggtgttggcccgcgacagcttttgcggctgcagcagctctgagatccttcgcatggagagaatcatactggacaagctcaactgggacctgcacaccgcaacccccctggattttctgcacattttccatgctattgcagtgagtacgaggccccagctactattcagcctgccgaaactgagcccatcccaacacttggcagtactgactaaacagctccttcactgtatggcttgcaatcagctgttgcagtttcgggggagcatgctggcgctggcgatggtctcactcgaaatggagaaactgattcccgattggctatctctcaccattgagttattgcagaaagcccagatggatagcagtcagcttattcactgccgcgagctcgtcgcccaccacctgtccacactgcagagcagtctcccactgaattccgtctatgtgtatcgtcccctcaaacataccctagtgacctgcgataaaggggtattccgccttcacccctcgagcgtgccgggccccgatttctctaaggataactcaaagcctgaggttcccgtccgaggcactgcagcattttatcatcacttgcctgcggcctccggatgcaaacagacttccaccaaacgtaaggtcgaggagatggaagtggatgacttctacgacggcataaagcgcctctataacgaggataacgtctcagagaatgtaggatcagtctgcggtaccgatctctcccgccaggaggggcatgcgagtccgtgcccaccactccagccagtatctgtgatgtag

SEQ ID NO: 168477 - DNA, 378 bp, Artificial Sequence
  derived and/or modified sequence
atgaagttccccggccccctggagaaccagcggctgagcttcctgctggaaaaagcaataactcgagaagcgcagatgtggaaggtcaatgtgcggaagatgccttccaatcagaacgtgagcccctcacagagagacgaagtcattcagtggctggctaaactaaaatatcaatttaatttgtatcctgagacgttcgctctggctagctctctgcttgaccggtttttagccacagtgaaagcccaccccaagtatctgtcctgcatcgctatcagttgtttcttcctggcggcgaaaacagtggaagaggatgaacggatcccagttctcaaggtgttagcccgcgactctttctgcggatgctcaagtagttag

SEQ ID NO: 168478 - DNA, 1092 bp, Artificial Sequence
  derived and/or modified sequence
atgaccccccggcaccactgcgaggcctacagcagcgccggcgaggaagaggaagaggaggaggaggaaaagaatgtgtcaccctctcagcgtgacgaggtaattcaatggctcgccaaactaaaatatcagttcaatttgtaccccgaaacgtttgcccttgcctccagtctgcttgacaggtttttggctaccgtgaaggcccatccaaagtacctaagctgcatcgccatttcttgtttctttctggccgccaagaccgtggaggaagacgagcgaatacctgtgctcaaggtgctggcacgggacagtttctgcggatgttcctcgagcgagatactgcgcatggaaagaataatcctggacaagctcaactgggatctgcatacagcaactcctctggacttcctgcacatcttccatgccattgcagtctccactcgaccccagctgctcttctccctcccaaaacttagtccatctcagcacctagctgttctaacaaagcagctcctgcactgcatggcttgtaaccagctcctgcagtttaggggcagtatgctggcactggccatggtttctctggagatggagaaactgatcccagattggctctcactcacaatcgaactgctccagaaggcacagatggatagctcacagctgatccactgtagagagctggtcgcgcatcatttgagtacactccagtccagcctccctcttaattcagtgtatgtctatcgaccgctcaagcatacactggtgacttgtgacaaaggcgtgtttcggctccacccctcgtcggtacctggcccagacttcagtaaggacaactctaagcccgaagtgccggtgcggggcacagctgcattctaccatcatctcccagccgcgtcaggctgcaaacaaacatcaaccaaaaggaaagtggaggagatggaggtggacgacttctatgatggtattaaaagactgtacaacgaggacaatgtctctgagaacgtagggtccgtttgtgggacagacctcagtagacaggagggtcatgcaagcccttgccccccgctccagcccgtcagcgttatgtag

SEQ ID NO: 168479 - DNA, 1134 bp, Artificial Sequence
  derived and/or modified sequence
atgaagtttcctgggccactggagaaccagcggctgtccttcctgctggagaaggctatcacccgagaggctcagatgtggaaggtgaacgtgaggaagatgccatccaatcaaaatgtgtcaccctctcagcgtgacgaggtgatacaatggttagctaagctgaagtatcagttcaacctctacccagagacattcgctctcgcctcctcactcttggatagatttttagccacagtgaaagcacaccccaagtatctgtcctgcattgccatttcctgtttcttccttgcagcaaagaccgtggaggaagatgagaggattcccgttctgaaggtcttggccagagacagcttttgcggatgtagcagctctgaaatcctgagaatggaaagaatcattctggataagctgaactgggatcttcatacagcgacaccccttgactttttacatatttttcacgcaatagccgtgagtacacgtccacagttactgtttagcctgcctaagctctccccttcccagcacctggccgttctgaccaaacaactgctacactgtatggcgtgtaaccagctgctccaatttcgcggatctatgctggctctggccatggttagtctggagatggagaagttgatccccgactggctctccctgaccattgagcttctgcagaaggcccagatggatagctctcagctgatacattgccgagaattggtggctcatcatctctccacccttcagtctagcctgccactgaattcagtttacgtctaccggcctcttaaacacacactggtgacctgcgacaagggagtgtttcgactgcatccttcttctgttcccggacccgatttcagcaaagacaattccaaaccagaggtgccagtgagaggcactgccgcattctatcaccaccttcccgctgcctctggctgtaagcagacctcgaccaagaggaaagtcgaagagatggaagtggatgacttctacgacgggatcaagcgattgtataacgaggataacgtgagcgagaatgtgggcagtgtgtgcggtaccgacttaagccggcaggagggccatgccagcccctgcccccctctgcagccagtgagcgtcatgtag

SEQ ID NO: 168480 - DNA, 378 bp, Artificial Sequence
  derived and/or modified sequence
atgaaattccctggcccactggaaaatcagcggctttctttccttctggaaaaggctattacgagagaggctcagatgtggaaggtcaacgtccgcaagatgccttccaaccaaaacgttagcccctcccagagggatgaagtgatccagtggctggctaagctcaagtaccagtttaacctgtacccagagactttcgctttagccagttcacttcttgaccgctttctggcaaccgtcaaggctcacccaaagtatcttagttgcatcgccatatcatgcttttttctcgcagccaaaaccgttgaggaggacgagagaattcctgtcttaaaggtgttggccagggacagtttctgcgggtgctcttcctcctag

SEQ ID NO: 168481 - DNA, 1092 bp, Artificial Sequence
  derived and/or modified sequence
atgacgcctcggcaccactgtgaagcatattcctccgcaggagaagaagaagaggaggaggaggaggaaaaaaatgtgtcccccagtcaaagagatgaggtaatccagtggctagccaaacttaagtatcagttcaacctgtacccagaaacttttgcattggcctctagtctgctcgaccgcttcctggccacagttaaagcgcacccaaagtatttgagttgtatcgccatctcttgtttttttctcgccgctaaaacggtggaggaggacgagcggatcccagtgcttaaagtacttgcgagagacagcttctgcggatgcagctccagcgagatcctccggatggagcgtattatcctcgacaaactcaactgggacctgcataccgccacccccctggattttcttcatatctttcacgccatcgccgtttctacgcggccacagttactgttttctcttccaaaacttagtcccagtcaacatctggctgtgttaacaaagcagctccttcattgcatggcctgcaaccagcttttacaattcaggggcagcatgctggccctagctatggttagtctggagatggagaagctcatcccagactggctgtcactaaccatcgagctgctacaaaaagcgcagatggacagcagccagcttatccactgcagagagttggtggctcaccacctgagtacactgcaatccagtctgccactgaactctgtttatgtttatcggcctcttaaacataccctggtgacttgcgataaaggtgtcttccgcctgcaccccagctctgtaccaggccctgactttagtaaggacaactcaaagccagaggttccagtaagaggcaccgcggctttctaccatcacctcccggctgcctccgggtgcaaacagacatctacgaagaggaaggtagaagagatggaggttgacgatttttacgacggtatcaagaggctgtataatgaagacaacgtcagtgaaaacgtcggctccgtctgtgggacggacctgtccaggcaagagggccatgcttctccctgcccaccactgcaacctgttagcgtgatgtag

SEQ ID NO: 168482 - protein, 2671 aa, Artificial Sequence
  derived and/or modified sequence
MAADTQVSETLKRFAGKVTTASVKERREILSELGKCVAGKDLPEGAVKGLCKLFCLTLHRYRDAASRRALQAAIQQLAEAQPEATAKNLLHSLQSSGIGSKAGVPSKSSGSAALLALTWTCLLVRIVFPSRAKRQGDIWNKLVEVQCLLLLEVLGGSHKHAVDGAVKKLTKLWKENPGLVEQYLSAILSLEPNQNYAGMLGLLVQFCTSHKEMDVVSQHKSALLDFYMKNILMSKVKPPKYLLDSCAPLLRYLSHSEFKDLILPTIQKSLLRSPENVIETISSLLASVTLDLSQYAMDIVKGLAGHLKSNSPRLMDEAVLALRNLARQCSDSSAMESLTKHLFAILGGSEGKLTVVAQKMSVLSGIGSVSHHVVSGPSSQVLNGIVAELFIPFLQQEVHEGTLVHAVSVLALWCNRFTMEVPKKLTEWFKKAFSLKTSTSAVRHAYLQCMLASYRGDTLLQALDLLPLLIQTVEKAASQSTQVPTITEGVAAALLLLKLSVADSQAEAKLSSFWQLIVDEKKQVFTSEKFLVMASEDALCTVLHLTERLFLDHPHRLTGNKVQQYHRALVAVLLSRTWHVRRQAQQTVRKLLSSLGGFKLAHGLLEELKTVLSSHKVLPLEALVTDAGEVTEAGKAYVPPRVLQEALCVISGVPGLKGDVTDTEQLAQEMLIISHHPSLVAVQSGLWPALLARMKIDPEAFITRHLDQIIPRMTTQSPLNQSSMNAMGSLSVLSPDRVLPQLISTITASVQNPALRLVTREEFAIMQTPAGELYDKSIIQSAQQDSIKKANMKRENKAYSFKEQIIELELKEEIKKKKGIKEEVQLTSKQKEMLQAQLDREAQVRRRLQELDGELEAALGLLDIILAKNPSGLTQYIPVLVDSFLPLLKSPLAAPRIKNPFLSLAACVMPSRLKALGTLVSHVTLRLLKPECVLDKSWCQEELSVAVKRAVMLLHTHTITSRVGKGEPGAAPLSAPAFSLVFPFLKMVLTEMPHHSEEEEEWMAQILQILTVQAQLRASPNTPPGRVDENGPELLPRVAMLRLLTWVIGTGSPRLQVLASDTLTTLCASSSGDDGCAFAEQEEVDVLLCALQSPCASVRETVLRGLMELHMVLPAPDTDEKNGLNLLRRLWVVKFDKEEEIRKLAERLWSMMGLDLQPDLCSLLIDDVIYHEAAVRQAGAEALSQAVARYQRQAAEVMGRLMEIYQEKLYRPPPVLDALGRVISESPPDQWEARCGLALALNKLSQYLDSSQVKPLFQFFVPDALNDRHPDVRKCMLDAALATLNTHGKENVNSLLPVFEEFLKNAPNDASYDAVRQSVVVLMGSLAKHLDKSDPKVKPIVAKLIAALSTPSQQVQESVASCLPPLVPAIKEDAGGMIQRLMQQLLESDKYAERKGAAYGLAGLVKGLGILSLKQQEMMAALTDAIQDKKNFRRREGALFAFEMLCTMLGKLFEPYVVHVLPHLLLCFGDGNQYVREAADDCAKAVMSNLSAHGVKLVLPSLLAALEEESWRTKAGSVELLGAMAYCAPKQLSSCLPNIVPKLTEVLTDSHVKVQKAGQQALRQIGSVIRNPEILAIAPVLLDALTDPSRKTQKCLQTLLDTKFVHFIDAPSLALIMPIVQRAFQDRSTDTRKMAAQIIGNMYSLTDQKDLAPYLPSVTPGLKASLLDPVPEVRTVSAKALGAMVKGMGESCFEDLLPWLMETLTYEQSSVDRSGAAQGLAEVMAGLGVEKLEKLMPEIVATASKVDIAPHVRDGYIMMFNYLPITFGDKFTPYVGPIIPCILKALADENEFVRDTALRAGQRVISMYAETAIALLLPQLEQGLFDDLWRIRFSSVQLLGDLLFHISGVTGKMTTETASEDDNFGTAQSNKAIITALGVERRNRVLAGLYMGRSDTQLVVRQASLHVWKIVVSNTPRTLREILPTLFGLLLGFLASTCADKRTIAARTLGDLVRKLGEKILPEIIPILEEGLRSQKSDERQGVCIGLSEIMKSTSRDAVLYFSESLVPTARKALCDPLEEVREAAAKTFEQLHSTIGHQALEDILPFLLKQLDDEEVSEFALDGLKQVMAIKSRVVLPYLVPKLTTPPVNTRVLAFLSSVAGDALTRHLGVILPAVMLALKEKLGTPDEQLEMANCQAVILSVEDDTGHRIIIEYLLEATRSPEVGMRQAAAIILNIYCSRSKADYTSHLRSLVSGLIRLFNDSSPVVLEESWDALNAITKKLDAGNQLALIEELHKEIRLIGNESKGEHVPGFCLPKKGVTSILPVLREGVLTGSPEQKEEAAKALGLVIRLTSADALRPSVVSITGPLIRILGDRFSWNVKAALLETLSLLLAKVGIALKPFLPQLQTTFTKALQDSNRGVRLKAADALGKLISIHIKVDPLFTELLNGIRAMEDPGVRDTMLQALRFVIQGAGAKVDAVIRKNIVSLLLSMLGHDEDNTRISSAGCLGELCAFLTEEELSAVLQQCLLADVSGIDWMVRHGRSLALSVAVNVAPGRLCAGRYSSDVQEMILSSATADRIPIAVSGVRGMGFLMRHHIETGGGQLPAKLSSLFVKCLQNPSSDIRLVAEKMIWWANKDPLPPLDPQAIKPILKALLDNTKDKNTVVRAYSDQAIVNLLKMRQGEEVFQSLSKILDVASLEVLNEVNRRSLKKLASQADSTEQVDDTILT

SEQ ID NO: 168483 - DNA, 8016 bp, Artificial Sequence
  derived and/or modified sequence
atggcagccgacactcaggtgtctgagacactcaaacggttcgctggaaaagtcaccacagcctcggtgaaggagcggcgcgagatacttagcgagctgggcaaatgtgtcgcgggcaaggacttacccgagggggcagttaaagggctgtgtaagctcttttgtctcactttgcatagatacagagatgcagcatcgcggagggccctgcaggccgcaattcaacagctggcggaggcccagcccgaggcgaccgccaaaaacttactgcacagtctccagtcctccgggattggatccaaagccggggttcctagtaaatccagcggaagtgcggcactactggctctgacatggacctgcctgcttgtgcgtatagtctttcccagtagagcgaaacgccagggtgacatttggaacaaactcgtggaagttcaatgtctccttctgctcgaggttttaggaggctcccacaagcacgctgtggacggggccgttaaaaagttgaccaaactatggaaggaaaaccctggcctggtggagcagtatctgagcgccatactttcactggagcctaaccagaactacgccgggatgctggggctcttggtccagttctgcacatcccacaaggagatggacgtcgtgtctcagcacaagagcgcactcctggatttctacatgaaaaacattctaatgtctaaggtgaagccacctaagtatctgttggacagttgcgcgcccctactgcggtacctgagccactccgaattcaaagatcttatcttgcctacaatccagaaaagtctactgcgaagtcccgaaaatgtgatcgagacaattagctcactcctggcaagcgttacccttgacctcagccaatacgccatggatatcgttaaagggctggctggccacctgaaaagcaacagcccgcgacttatggatgaagccgtgctggcgctgcggaatctggcgcgccagtgcagcgattcctcagcgatggaaagtttgacaaaacatctgttcgccatactcggcggctccgaggggaagctgaccgtggtggcccagaagatgtcagttctctccggtattgggagtgttagccaccacgtggttagtggcccctcctcccaggtgttgaacgggatcgtggcggaactcttcattccctttttacagcaggaagtgcatgaagggactctcgtgcacgccgtgtctgtactcgccctgtggtgcaaccggttcactatggaagtgcccaaaaaactgaccgaatggttcaaaaaggcattctcccttaaaaccagtactagcgctgtcaggcacgcttatttgcaatgtatgctggcaagctacaggggagatactctccttcaggccctggacctgttaccactgctcatacagaccgtggagaaagccgccagccaaagtacccaggtgccaaccataaccgagggcgtcgctgctgccctcctgctgttgaagctaagcgtggcagattcacaagctgaggccaagctgtccagcttttggcagctcattgtggacgagaaaaagcaggtcttcacatccgagaagtttcttgtgatggcctcagaggacgcgttgtgtaccgtgttgcacctcaccgagagactattcctcgatcaccctcaccgcctcacaggcaacaaagttcagcaatatcaccgtgcgctagttgcagttctgttgagtagaacctggcacgtgcgccgacaggcccagcagacagtccggaagttgttgtcctccctcggggggttcaagctggcccacggcctcctagaggagcttaaaaccgtgctgagcagtcacaaggtcctacccctggaagccctagttacggatgccggtgaggttaccgaagccgggaaggcttatgtgccccctcgtgttcttcaggaggcgctgtgcgttatttcaggagtgcctgggcttaagggagatgtaacagacactgaacagctcgcccaggagatgcttatcatctctcatcatcccagtcttgtagctgtacaatccggcttatggcccgccctccttgcaaggatgaaaatcgatcccgaggcctttatcacccgccatctggaccagattattcccagaatgactacgcaaagtcccttgaatcagagctccatgaacgctatggggagcctgtctgtcctgagccctgacagggtccttccacaactcattagcacaatcactgcgagcgtgcagaatcccgccctgaggttagtgactcgggaagagttcgctatcatgcagactcctgctggagagctgtacgacaagtccatcatccagagcgcacaacaggacagcatcaagaaagctaatatgaagcgtgaaaataaagcctactccttcaaggagcagatcattgaactagagctgaaagaagagatcaaaaagaagaagggcattaaagaggaagtccagcttacatcaaaacaaaaggaaatgcttcaagcccagcttgaccgggaggcccaggtaagacggaggctccaggaactggacggggaactagaggccgctctgggcctgctcgacattatcttagctaagaatccatctggcctgacgcagtatatccccgtgttggtggacagtttcctccctctgctcaagtctcccctcgctgctcctcgcataaagaatcccttcttaagcctagcggcttgcgtgatgcctagcaggctgaaggcactcggtaccctggttagccatgtaacattaaggctccttaagccagagtgtgtgctcgataagtcttggtgtcaggaagaattaagcgtggcagtgaaacgggccgtaatgctgttgcacacgcataccattacctcccgggtcgggaagggtgagcccggagcggcgcccttgagcgctccggcattctctctggtgttccctttcctgaaaatggtgttaactgagatgccccaccattccgaggaagaagaggagtggatggcgcagatcctgcagatactgactgtgcaggcccagcttcgtgcaagtcctaacacacccccgggacgcgtcgacgaaaatggaccagagctgctgccgagggtagctatgctgcggctcctaacttgggttattggcaccggctctccacgactgcaggttctggccagcgataccctgaccactttgtgtgcctctagcagtggggacgatggttgcgcattcgccgaacaggaggaagtggatgtcttactgtgtgctctgcagagcccatgtgcctctgttagggaaactgtgttgcgcgggctgatggagctgcatatggttcttcccgcacccgatactgatgaaaagaacgggctgaacctgcttcggagactgtgggtggttaaattcgataaggaggaagagatcaggaaacttgcagaacggctatggagcatgatgggcctggatctgcaaccagatctgtgctccttgttgattgacgacgtgatctaccatgaggccgccgtgaggcaggccggagcagaggccctgagccaggccgtcgcgcgataccaaaggcaggctgctgaggttatgggccgactaatggagatataccaggagaagctatataggcctcctccggtgctcgatgcactcggacgcgtgatttcagagagccctccagaccaatgggaggctagatgcggcctagcactcgccctaaacaaactcagccagtatctcgactcttctcaggtcaagccacttttccagttttttgtgcctgacgcgttgaatgataggcaccccgacgtcaggaaatgtatgctggacgcagctctggcaacgttgaatacacatggaaaggagaatgtgaatagtctcctgcctgtattcgaggagtttttgaaaaacgctccaaatgacgcatcttatgatgctgttcggcaaagtgttgtggtgctcatgggatcactggcaaaacacttagacaaaagtgacccgaaagtaaagcccatcgtggccaaattaatcgccgcactgtcaaccccgtcgcagcaggtgcaggagtcggttgcctcatgtctgccacctttggtgccggctataaaggaggacgctggaggcatgatccaaagattgatgcagcagttgctggagtctgacaagtacgcagagcgcaagggtgcggcttatggactggccggcctggtcaaagggctcggtattctgtcactcaagcagcaggagatgatggcagctctgacagacgcaatccaggacaaaaaaaactttaggagacgtgaaggggctctttttgcattcgagatgctctgcaccatgctcggcaaactatttgaaccatatgtggtccacgtgttgcctcatctgctcttatgttttggggacggtaaccagtatgtgagggaagccgccgatgattgcgcaaaagcagttatgtctaacctgagcgctcacggcgttaaattggtcttgccaagtctgttagccgcgcttgaagaagaatcatggaggacaaaagccgggtcagtggaactactgggcgcgatggcctactgtgctcctaagcaactgagctcttgcttaccaaatatcgtcccaaaactgaccgaggtgcttacagactcccatgtgaaagtgcaaaaggccgggcagcaggccctccgtcagatcggaagtgtgattcgcaacccggaaattttagccattgcccccgtgttactagacgcactgacggatccttctcggaagacgcagaaatgtctgcaaactttgctggatacaaagttcgtgcatttcatcgatgctcccagcctggcactgatcatgcctatcgttcagagggcttttcaggatcggtcaaccgatacgagaaagatggcggcacagattatcggaaatatgtattccctaaccgaccagaaggatttggccccctatctgccaagcgttaccccggggcttaaggctagcctgctggaccctgttcccgaagtgcggactgtcagcgccaaagcactcggtgctatggttaaaggcatgggagaaagctgcttcgaggatctcctcccttggctgatggagactcttacctatgagcagagttcagtggaccgcagtggcgccgcccaggggctggcagaggtcatggcggggcttggggtcgagaaacttgagaagcttatgcccgagatcgtggctactgccagcaaggtggacatcgctccacacgttagagacgggtacattatgatgtttaactatctccctatcaccttcggtgacaagttcaccccatacgtgggacctataatcccctgcatcctcaaggcgttggcagacgaaaacgagtttgttagagacaccgcactgcgggctgggcaaagagtaatcagcatgtacgccgagacagcaatcgccctgctgctcccacagttggagcagggactttttgacgatctgtggcggatcagattttcgtccgtccagctgctgggagaccttttgttccacatctccggtgtgaccggaaagatgaccactgagacggctagtgaagatgacaactttggcaccgcccagagcaacaaagctatcataacagccttaggtgtagagcggcgcaacagggtgcttgctggcctatatatgggccgaagtgatacacagctcgtggtgagacaggccagcttacatgtatggaaaatagttgtgagtaacaccccacgtacactcagagagatcctccctaccctgtttggcctcctgcttggcttccttgcctctacctgtgcggataagaggactatagccgctaggaccctgggcgatctggtcaggaagttgggggaaaagatactgcctgaaatcatcccgattctggaagagggtctgcgctctcaaaagtccgatgagcggcagggagtatgcatcggtcttagcgagatcatgaagtccacctcccgggatgccgtgctgtacttcagcgaatctctcgtgcctactgccagaaaggccctctgtgaccctctggaggaggtgagagaggccgccgctaaaacatttgaacagcttcatagcacaattggccaccaagcccttgaggatattctgccgttcctcttgaaacagcttgatgatgaggaggtttccgaatttgctctcgacggtttgaaacaagtgatggctatcaaaagccgagtggtcctgccctacctggttccaaaactgactaccccacctgtgaataccagagtcctggccttcctgagtagtgttgctggcgacgcacttacccgccatctgggcgtcatcctgcctgcagtcatgctggctctgaaggagaaactgggcacccccgatgagcagctcgaaatggctaactgccaggcagtgatcctcagcgtggaagatgacaccggccaccgtattatcatagagtatctgctcgaggccacacgctctcccgaagtgggcatgcgccaggccgccgccattatcctgaatatctattgtagcaggtccaaggccgattatacatcacacttgagatctctggtgtcaggactgattcgcctatttaatgacagctcccccgttgttctggaagagtcttgggacgctcttaacgccataactaagaaactcgacgctgggaaccaactcgccctgattgaggaactgcataaagagatcaggctgattggtaacgagtccaagggcgaacacgtgcctgggttctgcttaccaaaaaagggagtgacttcaatcctgcccgtgctgcgcgagggagtccttactggttctcccgaacagaaagaagaggccgcgaaggccttgggccttgtcatcagacttaccagcgccgacgcactcagaccctccgtagtatccattaccgggccgctgattcgtatcctgggagacaggttttcctggaacgtaaaggctgccttactggagaccctgtcattactgcttgccaaagttgggattgccctcaagcccttcctgcctcaactgcagacgacctttactaaggccttgcaggactcaaaccgtggcgtacgcctgaaggccgcggatgcactcgggaaacttattagcattcacattaaggtagatcctctgttcactgaactactgaacggtatacgggccatggaggaccctggagtgcgggacaccatgttgcaggccctgcgatttgtgatccagggcgctggcgccaaagtggatgcagttataagaaagaatatagtcagtcttctcttgtcaatgctggggcacgacgaagacaacactagaattagcagtgcgggctgtctcggcgaactttgcgctttcctgacggaagaggaactcagcgcagtcctccaacagtgcctgcttgccgacgtttctggtatagactggatggtacgccacgggagaagccttgccctcagcgtggctgtcaacgttgctccaggacggctctgcgcaggccggtactcttccgatgtgcaggagatgatactgtctagcgccacagctgataggattccaatcgcggtttctggggtgcgcgggatgggctttctgatgcgtcatcatatcgagactggtggagggcagctgccagcaaaattgtcaagcttgtttgttaaatgtctgcagaatcccagcagtgatatcaggttggttgccgaaaagatgatttggtgggcaaataaggatccactgccccctctggatcctcaggcaattaagcccatcctaaaggcactgttggacaacaccaaggataagaataccgtggtcagagcttactccgaccaagctatagtgaatctcctcaaaatgcggcagggtgaagaagtgttccaatctttaagcaagattctagatgtggcctctcttgaggtacttaacgaggtgaataggcgaagcctgaaaaagttggcctcacaggctgactctaccgagcaagtggatgacacgatcctgacgtag

SEQ ID NO: 168484 - DNA, 8675 bp, Artificial Sequence
  derived and/or modified sequence
cagccccggcaggatggcggcggacacgcaggtttccgagacactaaagcgttttgcagggaaggtgacaacagccagtgtaaaggaacggagagaaatcctcagtgaacttgggaagtgtgttgctggaaaagatcttccagagggagcagtgaaggggctctgcaaattgttctgcttgactctgcatcgatatagagatgcagcctcccgcagggccttgcaggcagccatccagcagttggctgaggcccagccagaagccactgctaagaaccttctacactctctgcagtcttctggtataggctccaaagcaggtgttcccagtaagagcagtggctctgccgccttgctggccttgacctggacctgcctcctggtgcgcattgtctttccatcgagagccaagcgacaaggagacatctggaacaaactggtggaagtgcagtgcctgctcttgctggaggtgctgggtggctcccacaagcacgccgtggatggtgctgtgaagaaactcacgaagctgtggaaagagaaccccgggctggtggaacagtacttgtcagccattctcagcctagagcccaaccagaactatgctggcatgctggggctgctggtgcagttctgcacgagtcacaaggagatggacgtggtcagtcagcacaagagcgccctactggacttttacatgaagaacatcctgatgagcaaagtcaagcctccgaagtacctgttggatagctgtgcccctctgctccgatacctgtcccactcagaatttaaggatctgatactgcccaccatacagaagtccttactgaggagtccagagaatgttattgaaactatttctagtctgctggcatcagtgacgcttgacctcagccagtatgccatggacatcgtgaaaggactggctggtcacctgaaatccaacagtccccgcctgatggatgaagctgtgctggcactgcggaacctggcacgccagtgcagtgactcttcggccatggaatccctgaccaagcacctatttgctatcctcggaggctcggaaggaaaactaactgttgtagcccagaagatgagcgtcctctcagggattgggagcgtcagtcatcacgtggtgtctggaccttccagtcaggtcctgaatgggatcgtggctgagctgttcatcccgttccttcagcaggaagttcatgaagggaccttggtacacgctgtctcagtcctggctctctggtgtaaccgattcactatggaagtgcccaagaagctcactgaatggttcaaaaaagctttcagccttaaaacctccacatctgcggtgaggcatgcctacctgcagtgcatgttggcctcttaccggggtgacacgctgttgcaggccctggacttactgcccttgctcatccagacagtggagaaggcagcctcccaaagcactcaggttcccaccatcactgaaggggttgccgcagccttgttgctcttaaagttgtcagtggctgactcacaggctgaggccaaactgagcagtttctggcagttgattgtggatgagaaaaagcaggttttcacttctgagaaattcctggtcatggcttcagaggatgccctgtgtactgtgttgcatctgacagagagacttttccttgaccacccgcatagactcactggcaacaaagttcagcagtaccaccgggctctggtggcggtgctcctgagccgcacctggcacgtccgcaggcaggctcagcagacagttcggaagctgctgtcctctcttgggggctttaagctggcgcacggactcttggaggagctgaagactgtcctcagttctcacaaggtgctgcccttagaggctttggtgactgatgctggagaggtgactgaggcaggcaaggcctacgtgcctccacgggtcctgcaggaggctctgtgtgtcatctccggtgtgccagggctcaagggtgatgtcaccgacactgaacaactggcccaggaaatgctgatcatctcccaccacccatccttagttgccgtgcagtctggactttggccagcacttcttgccaggatgaagatcgatcctgaagcctttatcaccaggcacctggatcagatcattcccaggatgaccacacagagtcccctaaaccagtcctccatgaatgccatgggctccctttccgtcctgtcgccggaccgggtcctcccacagctcatcagcaccatcactgcctccgtgcagaaccctgcactgcgcctggtgacgcgggaggagtttgccattatgcagacccctgctggggagctgtatgacaaatccatcattcagagtgcccagcaggacagcataaaaaaggccaacatgaagcgagagaacaaagcttattccttcaaagagcagatcatcgagctggagctgaaggaggagataaagaagaagaaaggcatcaaagaggaggtgcagctgaccagcaagcagaaggagatgctgcaggcccagctagacagggaggcgcaggtccggaggcggctgcaggagctggatggggagctggaggcggcgcttggactgctggacatcatcctggccaagaacccgtccggcctgacccagtacatccctgttttggtcgactcttttctgcccttgctgaagtctcccctggctgctcccaggatcaagaaccccttcttgtccttggctgcctgtgtcatgccctctaggctcaaggctttgggcactttggtgagccacgtgaccctgcgcctgctgaagccagagtgtgtcctggataagtcctggtgccaggaagagctgtcggtggctgtgaagagggcggtgatgctgctgcacacccacaccatcaccagcagggtgggcaagggggagccaggtgctgcgcccttgtccgcgccagccttctccttagtcttcccgtttctgaagatggtgctgacggagatgccccaccacagtgaggaggaggaggagtggatggcccagattcttcagatcctcactgtccaagcccagctgagggcctcccccaacaccccacccgggcgggtggacgagaatggcccggagttgctgcctcgcgtggccatgctgcgtcttctgacttgggtgatcgggacgggctcgcctcgcttacaggttctggcttcagacaccctgaccaccctgtgtgccagcagcagtggtgatgatggctgtgcctttgcagagcaggaggaggtggacgtgctgctctgtgccttgcagtccccgtgtgccagcgtgcgggaaaccgtgctccgggggctgatggaactccacatggtattgccagcacctgatactgatgagaagaatggcctgaaccttctgcggagactctgggtggtcaagtttgacaaggaggaggagatccggaagctggctgagaggctctggtcaatgatgggcctagacctgcagccagacctctgctccttgctgattgacgacgtgatctatcatgaggcggctgtaaggcaggcaggggccgaagccctctcccaagcagtggcacgttaccagcggcaggcggcggaggttatgggcaggctcatggagatttaccaggaaaagctctaccggccgcccccagtgctggatgctttgggacgagttatttcagaatctcctccagatcagtgggaagccaggtgtggcttggcgttggccctcaacaagctctcccagtatttggacagctctcaggtgaagccactctttcagttttttgtccctgatgccctcaatgaccgacacccagatgtccggaagtgcatgttggatgcagccctcgcaacgctcaacactcatgggaaggagaacgtcaactcgctgttgccagtattcgaggagttcctgaagaacgcgcccaatgatgccagctatgatgctgtgcgacagagtgtggtggtcctgatgggctctctggccaagcacctggacaagagtgaccccaaagtgaagcccattgttgccaagctcatcgctgccctctccaccccctcccagcaggtccaggagtccgtagccagctgcttgccaccccttgtgccagccatcaaggaggatgctggagggatgatccagaggcttatgcagcagctgctggagtcagacaagtacgcagagcgcaaaggggccgcctatggcctggcgggcctggtgaagggcctgggcatcctctcgctgaagcaacaggagatgatggcggcactgactgatgccatccaagataagaagaacttccgccggcgagagggagccctctttgccttcgagatgctctgcaccatgctggggaaactttttgagccgtatgtggttcacgtgctgccccatctgctcctgtgctttggggatggaaaccagtatgtgcgtgaggctgcagatgactgtgccaaggctgtgatgagcaacttgagtgctcacggggtgaagctggtgctcccctccttactggctgccctggaggaggaatcgtggcggaccaaagctgggtcagtggagcttcttggggcaatggcgtactgtgctcctaagcagctgtcatcctgtctacccaacattgtgcccaagcttacggaggtgctgaccgactcccatgtcaaagtccagaaggctggacagcaggcgctcaggcagatcggctccgttatcaggaacccggagatcctggccattgctccagtcctcctggatgccctgacggatccctccaggaagacccagaagtgcttgcagaccctgctggacaccaagtttgtccacttcattgatgccccatccctggccctcatcatgcccattgtccagagagccttccaggaccgttccacggacacgcggaagatggcagcccagattattggcaacatgtactccctgacagaccagaaggacttggctccgtacctgcccagcgtgacgcctggcctgaaagcatcgcttttggaccctgtgcctgaggtgcggaccgtatctgcaaaggcccttggggccatggtgaagggcatgggggagtcgtgctttgaggacttgctgccgtggctgatggagacactgacctatgagcagagctctgtggatcgctcaggcgctgcacaggggttggctgaggtcatggccggtttgggggtggagaagttggagaagttgatgccagaaatcgtggctacagccagcaaagtggacattgcaccccatgtccgagatggctacattatgatgtttaactacctgcccatcacctttggagacaagtttactccttatgtggggcccatcatcccctgtatcctcaaagctcttgctgatgagaatgagtttgtgcgtgacaccgccctgcgcgcgggccagcgggttatctccatgtacgctgagacagccatcgccctgctgctgccccagctagagcaaggcctctttgatgacctttggagaatcaggttcagctctgttcagctccttggggatctcctgtttcacatctcaggagtcactgggaagatgaccacagaaactgcctctgaggatgataactttggaactgcccagtccaacaaggcgatcatcactgccctgggggtagagcggcggaaccgggtgttggcagggctgtacatgggccgctcagacacccagctggtggtgcggcaggcgtccctgcatgtctggaagattgttgtctccaataccccccgcaccttgcgtgagatcctacccactctctttgggctcctgctgggtttcctggccagcacgtgtgcagataagagaacgattgcagcgagaacattgggagatcttgtgcggaagttaggggagaaaatcctccccgagatcatccccatccttgaggaaggcctgaggtctcagaagagcgatgagaggcagggtgtgtgcattggcctaagtgagatcatgaagtccaccagccgggatgccgtgctgtatttctctgaatccctcgtgcccacggcaaggaaggctttgtgtgacccactggaggaggtcagagaggcggcagccaagactttcgagcagctgcattccaccatcggccaccaggctctggaggacattctcccatttttactaaagcagctggatgacgaggaggtgtcagagtttgccttggatggtctgaagcaagtcatggctattaagagtcgtgtggtgctgccctaccttgtgcccaagctgacaacgccacctgtcaacacccgggtgctggctttcctttcgtcagtggctggtgatgccctcacccgtcatcttggcgtgatcctcccagcggtcatgctggccctgaaggaaaagcttgggaccccagatgagcagctggagatggccaattgtcaggctgtgatcctctccgtagaggatgacacagggcaccggatcatcatcgagtatctgctggaggccacccgcagccctgaggtgggcatgaggcaagctgctgccatcatcctcaacatctactgttcccgctcaaaggctgactacaccagccacctgcggagcctggtctcgggcctgatccgcctcttcaatgactccagccctgtggttctggaggagagctgggatgccctaaatgccatcactaagaagctggatgctggcaaccagttggcactcattgaagagctgcacaaggaaatccggctcatagggaacgagagcaaaggcgagcatgtgccaggattctgcctcccgaagaagggagtgacctccatccttccagtgttgcgggaaggagtcctgactggcagccctgagcagaaggaggaggcagccaaagccttaggcttggtaatccgcctgacctcggctgacgccctgaggccctccgtggtcagcatcactggccctctgatccgcatcctgggggacaggttcagctggaatgtgaaggcggctctgctcgagacactcagcctcttgttggctaaggttgggattgccctgaagcccttcctgccccagctgcagaccactttcaccaaagccctgcaggactccaaccggggggtgcgcctgaaggccgcagatgctctggggaagctcatttccatccacattaaggtggaccccctcttcacagagctgctcaatggcatccgcgccatggaggacccaggtgtcagggacaccatgctgcaggccctgaggtttgtgattcagggagcaggggccaaagtggatgccgtcatccggaaaaacatcgtctcactcctgctgagcatgctgggacacgatgaggacaacactcgcatctcctcagccgggtgcctaggggaactgtgtgcctttttgactgaagaggagcttagtgccgttctacagcagtgcttgctggcggacgtgtccggcattgactggatggttcggcacgggcggagcctggcactttccgtggctgtgaatgtggctcctggcagactttgtgccggcagatatagcagtgatgttcaggaaatgatcctgagcagtgccacggcggacaggatccccattgcggtgagcggggtccggggcatgggctttctcatgagacaccacatcgagacaggcggagggcagttgccggccaaactttccagcctgttcgttaagtgtctgcagaacccatccagcgacatcaggctggtggctgagaagatgatctggtgggcaaataaggacccactgcctcccctggacccccaggccatcaagcccatcctgaaggctcttcttgacaacaccaaggataagaacaccgtggtcagggcctacagcgaccaggcaattgtcaacctcctcaagatgcggcagggtgaagaggtgtttcagtccctctccaagatcctggatgtggccagtttggaggtgctgaacgaggttaaccgaaggtccctgaagaagctggccagccaggccgactccacggagcaggtggacgacaccatcctgacatgagaggcctgggccagcagcagcattgccgctccacatctttgctcaatgttttcatttttgaaaatacatttgttccaatggggagcttggaagatggcgttcccagaaagtattttaatatcaatagaccacagccaaagccttaaatcaaacccacacacaactgaaaattgcctcctccatctctcaccttttcctgtggagaagagaaggaaaagcacacgcatgcgcctcagcaaatggcagcccaggagctgtttgtccagtttagcatggctaggtctggaactataatagcagggtcagactgtgggttcctcttctcctgtgcttgagctctggtttgagagctggcgctaccaacctttttcctatatcccgagtggggcacagacggtggatctctgcccagtgtggtgtgtctggcttggcttttcaatattgtgaggtctgaatggatctgacccctgtcagatgaaaatgattcacagctctggcagttcccaagtctggggaggggtataggtttgaaaggctgtttgaaagaggaatgtttaataaaggctttgatttaatcttgatataaacagatttttaaaaatctccacccattaaacatgaagcttcctgcatcaggaataaggaa

SEQ ID NO: 168485 - DNA, 8016 bp, Artificial Sequence
  derived and/or modified sequence
atggctgctgacacccaggtgtctgagaccctgaagagatttgctgggaaggtgaccacagcctctgtgaaggagcggcgggagatcctgtctgagctgggcaaatgtgtggccggcaaggacctgcctgagggcgctgtgaagggcctgtgcaagctgttctgcctgaccctgcaccgctacagagatgctgccagcagaagagccctgcaggccgccatccagcagctggccgaggcccagcctgaggccacagccaagaacctgctgcacagcctgcagagcagcggcatcggcagcaaggccggcgtgcccagcaagagcagcggcagcgctgccctgctggccctgacctggacctgcctgctggtgcgcatcgtgttccccagccgggccaagaggcagggcgacatctggaacaagctggtggaggtgcagtgcctgctgctgctggaggtgctgggcggcagccacaagcatgctgtggatggagctgtgaagaagctgaccaagctgtggaaggaaaatcctggcctggtggagcagtacctgagcgccatcctgagcctggagcccaaccagaactatgccggcatgctgggcctgctggtgcagttctgcaccagccacaaggagatggatgtggtgtcccagcacaagagcgccctgctggacttctacatgaagaacatcctgatgagcaaggtgaagccacccaagtacctgctggacagctgtgcccccctgctgcgctacctgagccacagcgagttcaaggacctgatcctgcccaccatccagaagagcctgctgcggagcccagaaaatgtcatcgagaccatcagcagcctgctggcctctgtgaccctggacctgagccagtatgccatggacatcgtgaagggcctggccggccacctgaagagcaacagcccccggctgatggatgaggccgtgctggccctgaggaacctggcccggcagtgcagcgacagcagcgccatggagagcctgaccaagcacctgtttgccatcctgggcggcagcgagggcaagctgactgtggtggcccagaagatgtctgtgctgagcggcatcggctctgtgagccaccacgtggtgtctggccccagcagccaggtgctgaatggaattgtggccgagctgttcatccccttcctgcagcaggaggtgcatgagggcaccctggtgcatgctgtgtctgtgctggccctgtggtgcaaccgcttcaccatggaggtgcccaagaagctgacagagtggttcaagaaggccttcagcctgaagaccagcaccagcgctgtgagacatgcctacctgcagtgcatgctggccagctacagaggagacaccctgctgcaggccctggacctgctgcccctgctgatccagacagtggagaaggccgccagccagagcacccaggtgcccaccatcacagaaggagtggccgccgccctgctgctgctgaagctgtctgtggccgacagccaggccgaggccaagctgagcagcttctggcagctgattgtggatgagaagaagcaggtgttcaccagcgagaagttcctggtgatggcctctgaagatgccctgtgcaccgtgctgcacctgacagagcggctcttcctggaccacccccaccggctgaccggcaacaaggtgcagcagtaccaccgggccctggtggccgtgctgctgagcaggacctggcacgtgcggcggcaggcccagcagacagtgaggaagctgctgagcagcctgggcggcttcaagctggcccacggcctgctggaggagctgaagacagtgctgagcagccacaaggtgctgcccctggaggccctggtgacagatgctggggaggtgacagaagctgggaaggcctacgtgcccccccgggtgctgcaggaggccctgtgtgtgatctctggagtgcccggcctgaagggagatgtgacagacacagagcagctggcccaggagatgctgatcatcagccaccaccccagcctggtggccgtgcagagcggcctgtggccagccctgctggccaggatgaagattgatcctgaggccttcatcaccaggcacctggaccagatcatccccaggatgaccacccagagccccctgaaccagagctccatgaatgccatgggcagcctgtctgtgctgagcccagacagagtgctgccccagctgatcagcaccatcacagcctctgtgcagaacccagccctgcggctggtgacccgggaggagtttgccatcatgcagaccccagctggggagctgtatgacaagagcatcatccagagcgcccagcaggacagcatcaagaaggccaacatgaagcgggagaacaaggcctacagcttcaaggagcagatcatcgagctggagctgaaggaggagatcaagaagaagaagggcatcaaggaggaggtgcagctgaccagcaagcagaaggagatgctgcaggcccagctggaccgggaggcccaggtgagaagaaggctgcaggagctggatggagagctggaggccgccctgggcctgctggacatcatcctggccaagaaccccagcggcctgacccagtacatccctgtgctggtggacagcttcctgcccctgctgaagagccccctggccgccccccgcatcaagaaccccttcctgagcctggccgcctgtgtgatgcccagccggctgaaggccctgggcaccctggtgagccacgtgaccctgcggctgctgaagccagaatgtgtgctggacaagtcctggtgccaggaggagctgtctgtggccgtgaagagagctgtgatgctgctgcacacccacaccatcaccagccgggtgggcaaaggagagcccggggccgcccccctgagcgccccagccttcagcctggtgttccccttcctgaagatggtgctgacagagatgccccaccacagcgaggaggaggaggagtggatggcccagatcctgcagatcctgactgtgcaggcccagctgcgggccagccccaacaccccacctggccgggtggatgaaaatggacctgagctgctgccccgggtggccatgctgcggctgctgacctgggtgattggcaccggcagcccccggctgcaggtgctggccagtgacaccctgaccaccctgtgtgccagcagcagtggagatgatggctgtgcctttgctgagcaggaggaggtggatgtgctgctgtgtgccctgcagagcccctgtgcctctgtgcgggagaccgtgctgcggggcctgatggagctgcacatggtgctgcctgccccagacacagatgagaagaatggcctgaacctgctgcggcggctgtgggtggtgaagtttgacaaggaggaggagatcaggaagctggccgagcggctgtggagcatgatgggcctggacctgcagcctgacctgtgcagcctgctgattgatgatgtgatctaccatgaagctgctgtgcggcaggccggggctgaggccctgagccaggccgtggcccgctaccagaggcaggccgctgaggtgatgggccgcctgatggagatctaccaggagaagctgtaccggcccccacctgtgctggatgccctgggccgggtcatcagcgagagccccccagaccagtgggaggcccgctgtggcctggccctggccctgaacaagctgagccagtacctggacagcagccaggtgaagcccctcttccagttctttgtgcctgatgccctgaatgacagacacccagatgtgaggaagtgcatgctggatgctgccctggccaccctgaacacccacggcaaggaaaatgtgaacagcctgctgcctgtgtttgaggagttcctgaagaatgccccaaatgatgccagctatgatgctgtgcggcagagcgtggtggtgctgatgggcagcctggccaagcacctggacaagagtgaccccaaggtgaagcccatcgtggccaagctgattgctgccctgagcacccccagccagcaggtgcaggagagcgtggccagctgcctgccccccctggtgcctgccatcaaggaggatgctgggggcatgatccagaggctgatgcagcagctgctggagagtgacaagtatgcagagaggaaaggagctgcctacggcctggccggcctggtgaagggcctgggcatcctgagcctgaagcagcaggagatgatggccgccctgacagatgccatccaggacaagaagaacttcagaagaagagaaggagccctgtttgcctttgagatgctgtgcaccatgctgggcaagctgtttgagccctacgtggtgcacgtgctgccccacctgctgctgtgctttggagatggcaaccagtatgtgcgggaggccgcagatgactgtgccaaggctgtgatgagcaacctgagcgcccatggagtgaagctggtgctgcccagcctgctggccgccctggaggaggagagctggaggaccaaggccggctctgtggagctgctgggcgccatggcctactgtgcccccaagcagctgagcagctgcctgcccaacatcgtgcccaagctgacagaggtgctgacagacagccacgtgaaggtgcagaaggccggccagcaggccctgcggcagatcggcagcgtcatccggaaccctgagatcctggccatcgcccctgtgctgctggatgccctgacagaccccagcaggaagacccagaagtgcctgcagaccctgctggacaccaagtttgtgcacttcattgatgcccccagcctggccctgatcatgcccatcgtgcagagggccttccaggacaggagcacagacaccaggaagatggccgcccagatcatcggcaacatgtacagcctgacagaccagaaggacctggccccctacctgcccagcgtgaccccaggcctgaaggccagcctgctggaccctgtgcctgaggtgaggacagtgtctgccaaggccctgggcgccatggtgaagggcatgggagagagctgctttgaggacctgctgccctggctgatggagaccctgacctatgagcagagctctgtggacagaagtggggccgcccagggcctggccgaggtgatggccggcctgggcgtggagaagctggagaagctgatgcctgagatcgtggccacagccagcaaggtggacatcgcccctcatgtgagagatggctacatcatgatgttcaactacctgcccatcacctttggagacaagttcaccccctacgtgggccccatcatcccctgcatcctgaaggccctggctgatgaaaatgaatttgtgcgggacacagccctgcgggccggccagagggtcatctccatgtatgcagagacagccatcgccctgctgctgccccagctggagcagggcctgtttgatgacctgtggaggatccgcttcagctctgtgcagctgctgggggacctgctcttccacatctctggagtgacaggcaagatgaccacagaaacagcctctgaagatgacaactttggaacagcccagagcaacaaggccatcatcacagccctgggcgtggagaggaggaacagagtgctggccggcctgtacatgggccgcagtgacacccagctggtggtgcggcaggccagcctgcacgtgtggaagatcgtggtgagcaacacccccaggaccctgcgggagatcctgcccaccctgtttggcctgctgctgggcttcctggccagcacctgtgccgacaagaggaccatcgccgcccggaccctgggggacctggtgaggaagctgggggagaagatcctgcctgagatcatccccatcctggaggagggcctgcggagccagaagagtgatgagcggcagggcgtgtgcatcggcctgtctgagatcatgaagagcaccagcagagatgctgtgctgtacttcagcgagagcctggtgcccacagccaggaaggccctgtgtgaccccctggaggaggtgcgggaggccgccgccaagacctttgagcagctgcacagcaccatcggccaccaggccctggaggacatcctgcccttcctgctgaagcagctggatgatgaggaggtgtctgaatttgccctggatggcctgaagcaggtgatggccatcaagagccgggtggtgctgccctacctggtgcccaagctgaccaccccacctgtgaacaccagggtgctggccttcctgagctctgtggccggagatgccctgaccaggcacctgggcgtcatcctgcctgctgtgatgctggccctgaaggagaagctgggcaccccagatgagcagctggagatggccaactgccaggccgtcatcctgtctgtggaggatgacaccggccaccgcatcatcatcgagtacctgctggaggccaccaggagccctgaggtgggcatgaggcaggccgccgccatcatcctgaacatctactgcagccgcagcaaggctgactacaccagccacctgcggagcctggtgtctggcctcatccgcctcttcaatgacagcagccctgtggtgctggaggagagctgggatgccctgaatgccatcaccaagaagctggatgctggcaaccagctggccctgattgaggagctgcacaaggagatccggctgattggaaatgaaagcaaaggagagcacgtgcccggcttctgcctgcccaagaagggcgtgaccagcatcctgcctgtgctgcgggagggcgtgctgaccggcagccctgagcagaaggaggaggccgccaaggccctgggcctggtgatccggctgaccagcgcagatgccctgcggcccagcgtggtgtccatcaccggccccctcatccgcatcctgggggaccgcttctcctggaatgtgaaggccgccctgctggagaccctgagcctgctgctggccaaggtgggcatcgccctgaagcccttcctgccccagctgcagaccaccttcaccaaggccctgcaggacagcaacagaggagtgcggctgaaggccgcagatgccctgggcaagctgatcagcatccacatcaaggtggaccccctcttcacagagctgctgaatggcatccgggccatggaggaccccggggtgcgggacaccatgctgcaggccctgcgcttcgtcatccagggcgctggggccaaggtggatgctgtgatcaggaagaacatcgtgtccctgctgctgtccatgctgggccatgatgaggacaacacccgcatcagcagcgctggctgcctgggggagctgtgtgccttcctgacagaggaggagctgtctgctgtgctgcagcagtgcctgctggctgatgtgtctggaattgactggatggtgagacatggccgcagcctggccctgtctgtggccgtgaatgtggcccctggccgcctgtgtgccggccgctacagcagtgatgtgcaggagatgatcctgagcagcgccacagctgaccgcatccccatcgctgtgtctggagtgcggggcatgggcttcctgatgaggcaccacatcgagaccggcggcggccagctgcctgccaagctgagcagcctgtttgtgaagtgcctgcagaaccccagcagtgacatccggctggtggccgagaagatgatctggtgggccaacaaggaccccctgccccccctggacccccaggccatcaagcccatcctgaaggccctgctggacaacaccaaggacaagaacacagtggtgcgggcctacagcgaccaggccatcgtgaacctgctgaagatgaggcagggcgaggaggtgttccagagcctgagcaagatcctggatgtggccagcctggaggtgctgaatgaggtgaacagaagaagcctgaagaagctggccagccaggccgacagcacagagcaggtggatgacaccatcctgacctag

SEQ ID NO: 168486 - DNA, 8016 bp, Artificial Sequence
  derived and/or modified sequence
atggccgccgacacccaggtgagcgagaccctgaagcggttcgccggcaaagtgaccactgcatctgttaaggaacggcgggaaatcctgagtgaactcgggaaatgtgtcgctggcaaggacctgcccgagggcgctgtgaagggcctttgtaagctgttctgccttaccctgcaccgataccgcgatgccgcttcccgaagggcactccaggcggccatccagcagcttgccgaagcccagcccgaggccacagccaagaatctgctacactcacttcagtcctctgggattggcagtaaagcgggcgttcctagtaagtcatccggatctgcagcattgctggccctcacctggacttgtttgctagtacgcatcgtatttccatcccgcgcaaagagacagggcgatatatggaacaaactcgtggaggtgcagtgcctgcttttgttggaggtcctcgggggcagtcataagcacgcagtggatggtgctgtgaagaaacttaccaagctctggaaggagaacccaggcttggtagagcaatatttgagtgccatcctgagtttggagccaaatcagaattacgccggaatgcttggcctgctagtgcaattttgcacatctcataaggagatggacgttgtaagccaacacaaatctgccttgctggacttttatatgaagaatatccttatgtcaaaggttaaaccacccaagtacctcctggatagctgtgctcctttactgagatacctaagtcatagcgaattcaaagacttaattctgccaaccattcagaagtccctgctgcggtctcctgaaaatgttattgagactatttctagcctgctggccagcgttaccctcgatttatcccagtacgccatggacatagtgaaaggcctagccggacacctgaagagcaattcaccgcgcctgatggacgaagctgtgttggctctaaggaatttagcccgccagtgtagtgatagctcagcgatggagagcctgaccaaacaccttttcgccattttaggcggctcagagggcaaactcaccgtggtcgcccagaagatgagtgtcttgtccggcattggcagcgtgagccaccacgtagtgtccgggccctcttcccaagtcctgaatggcattgtggctgaattgttcattcccttccttcaacaggaggtccatgagggaaccctggtacacgcagtgagcgtccttgctttgtggtgcaatcggttcaccatggaagtgcccaaaaagctgaccgaatggtttaagaaagctttttcactaaagacatcgacaagcgccgtgaggcacgcgtatttgcagtgcatgctcgcatcataccggggggatactttgctgcaggcgttagatctactccctctgctgattcagaccgttgagaaggccgcctcccagagcacacaagtgccaacgattactgagggagtcgcagctgcgctgctcctcctaaaactgtcggtggccgactcccaggctgaggccaagctatctagcttctggcagctgatagtcgatgagaagaagcaggtgtttacatccgagaaattcttggttatggcatccgaagatgcactatgcactgtgttacatttaaccgagcgcctgttcctcgaccaccctcacagactgaccgggaataaagtgcagcaataccacagagctctggttgcagtgctgcttagcagaacttggcatgttaggaggcaggctcagcagactgtgcgcaagcttctgtctagtctcgggggttttaagctggctcacgggctcctggaagaactgaagacagtgctctcaagccacaaagtgcttccactcgaggcactggtgaccgatgcaggagaagtgacagaagccggcaaagcctatgtgcctcctcgggttttgcaggaagccttgtgtgtgatatctggcgttcccggtctgaagggagacgtcaccgatactgagcagctggcccaagaaatgctgatcatatcgcaccatccttcccttgtggcagtccaaagcgggctgtggcccgcgctgctggctagaatgaaaatcgacccagaagcctttatcacaaggcacctggaccaaataataccaaggatgacaactcagtccccactgaaccagtcctctatgaatgccatgggatcactgtctgtactgtctcccgatagggtgttgccgcagctcatctccactattaccgccagtgtccaaaatcccgccttgcgtttagttaccagggaagagttcgccattatgcagaccccagcgggcgagctgtacgacaagagtatcatccagtccgcccagcaggactcgatcaagaaagctaacatgaaacgcgagaataaggcctacagtttcaaagagcagatcatcgaactggagctgaaggaggaaattaagaagaaaaagggaatcaaagaagaggtacaactgaccagtaagcagaaagaaatgctgcaggcccagctcgaccgtgaagctcaagttaggcgacgcctgcaggagctggacggagagcttgaagccgctctcggtctgttagatataatactcgccaaaaacccgagcggtctaacccagtacatccctgttttggtagattcctttctgcccctgttaaagtcgccactggctgcccccaggatcaagaacccatttttatctctcgccgcctgtgtgatgccatccagacttaaagcattgggaaccctggtctcccatgtaacgctccggctgctcaaacctgagtgtgtgcttgacaaaagctggtgccaagaagaactcagcgtggccgttaaacgggctgtgatgctgttgcatacccatactatcacatcacgcgtcggtaaaggagaacctggcgcagcaccactctctgcccccgccttttccctcgtttttcctttccttaagatggtgctgacagaaatgccgcatcattctgaagaggaagaagagtggatggcacaaatactgcagatcctgaccgtacaggcccaactcagggcctctccgaacacgccccccggacgggtcgatgaaaatggcccggagctgctgcctcgcgttgcaatgctccgactcctgacctgggtcattggaacgggttcccctagactgcaggtactggcctctgacacactgacaactctgtgcgcttcttcaagtggcgacgacggctgcgcttttgcggagcaggaagaggtggacgtgctgctttgcgctctgcagtccccctgtgcatccgtgcgggagacagtgctccgaggactcatggaattgcacatggtactccctgccccagataccgacgagaagaacggactgaacctgcttcgccgactttgggtggtcaaatttgacaaagaggaagagatacggaagttagctgagaggctttggtctatgatgggattggatctccagccagatctttgctctctcctgatcgacgatgtaatctaccacgaggcggctgtgcgacaggccggtgcagaagccctgtcccaggctgtggccagatatcagcggcaagccgcggaggtgatgggacggctgatggagatttatcaagaaaagctctaccgcccgccccctgtcttggatgctctcgggagggttatttccgaaagtccgcccgaccagtgggaagcgaggtgtgggcttgccctggccctgaataaactgagccaatatctggactccagtcaagtgaagcccttgttccagttttttgtcccagacgcactgaacgataggcacccagacgtgcgaaagtgtatgctggacgcagccctcgccactctcaatacacatggtaaagagaatgtgaacagtttgctaccagtcttcgaggagttcctgaaaaatgcacctaacgatgccagctatgatgctgtgcgccagtcagttgtggtgctgatgggctcactggccaaacacctggataaatccgatcctaaggtgaagccaatcgttgcaaaattaatcgcggctttgagcacacctagccagcaagtccaggagagcgtcgcgtcatgcctgccaccactggtgcctgccattaaggaggatgcgggcggaatgatacagcgattaatgcaacagttgctggagtcggacaaatacgctgaacgaaaaggtgcggcgtacggcttggccgggctggtaaagggactcgggatcttaagcctcaagcagcaagaaatgatggcggcgctaacggatgccattcaagacaaaaaaaacttccggagaagggagggcgccctgtttgccttcgaaatgctgtgcacgatgttaggcaaattatttgagccgtatgtggtgcacgtcctgccccacctgcttctgtgtttcggtgatggcaaccaatatgttcgggaggcggccgacgattgtgccaaggctgttatgtcaaatctgagcgcgcatggtgtgaagctggtgttgccctcgctgctggcagcgctcgaagaggagtcttggaggaccaaggccggttctgtggagttgctgggcgcgatggcatactgcgcacccaagcagctatccagctgtctgcccaatatcgtgcctaagctgactgaagtgttaacagatagtcatgtcaaagttcagaaggccgggcagcaagcattgaggcaaattggctcagtgatcagaaaccctgagatcttagcaatcgcgccagtactactggatgcgctgacggatccttctagaaaaacccagaagtgtctccagacactgcttgacacaaagtttgtccactttatcgacgctccttctctggctctaattatgcccatcgtccaacgagcgttccaggaccggtctaccgacacccgcaaaatggctgctcagatcataggcaacatgtatagcctgaccgatcagaaagatctggcaccataccttccttcagttacccccggattgaaagctagccttctcgaccctgtgccagaagttcggacagtgagcgcaaaggccctgggtgctatggtgaaggggatgggtgagtcgtgttttgaggatttattaccatggttgatggagactttgacttacgaacagtcttctgtggataggtcaggagctgcccaggggctagcagaggttatggcaggcctcggcgtggagaagctggaaaaactgatgccagagattgttgcaactgcctctaaggtagacatagctccacacgtaagggatgggtatattatgatgttcaactacctgcccattactttcggggacaagttcaccccatatgtcgggcccatcatcccatgtatcctgaaagctctggctgatgagaatgagtttgtgcgtgacaccgctctgcgagcaggccagagagtcatctctatgtatgcagagactgctatagctttgctcctgccacagcttgaacagggactcttcgatgacctgtggcgaatccggttcagtagcgtgcagttactcggagacttgctattccatattagcggggtaactggcaagatgactaccgagaccgcctctgaggacgataacttcgggaccgctcagtctaacaaggctatcattacggccctgggtgtggaaaggagaaaccgcgtattagccggcctgtacatggggagaagcgacacgcaactggtggtgcggcaggctagccttcacgtctggaagatagttgtgtcaaacacaccccgcacattacgtgagatcctgcctaccctctttgggctgctgttgggctttttagcctcaacttgcgccgataaaagaactattgcagcgcgtactctaggtgatctcgttagaaaactgggtgagaaaatattgccagagatcattcccatcttagaagaggggctgaggtctcagaaaagcgacgagagacaaggggtctgtatcgggctttctgagatcatgaagagtaccagccgcgatgccgttctgtatttctctgagtcccttgtgcctactgccaggaaagcattatgcgatcccttagaggaggtccgcgaggccgccgctaaaaccttcgagcagcttcattccaccattgggcaccaagcactggaagatatcctgccatttctgctgaaacagttagatgacgaggaagttagcgaatttgcactcgacgggctcaagcaggtaatggccatcaaaagtagggtagtgctgccctacctggtgccaaaactgaccactcccccagttaacacaagagtccttgcatttctctcttcggtggctggcgacgccttgacgaggcatcttggggtcatcctgcccgccgtcatgttagcactcaaagaaaagctgggaacccctgacgaacagcttgagatggctaactgtcaagctgtcatcctcagtgtggaagacgacacaggccacagaatcataattgagtatctcctggaggctacacgctccccggaagtgggtatgaggcaggcagcagccattatactcaacatctattgttctcgatcaaaggctgactacacctctcatcttcggagtctcgtgtcaggcttgattaggctgtttaacgactcatccccggttgtcctggaggagagctgggacgctcttaacgctattacgaagaaactggacgctggaaatcagctggcactaatcgaggagctgcacaaggagattaggcttatcggcaacgagagcaaaggggagcacgttccgggcttttgcctcccgaagaagggtgtgacctctattctccctgtgcttcgggaaggcgttctcactggctcgcctgaacaaaaggaagaggccgctaaggccctgggtttagtaatcagattgacatccgctgacgccctgagaccctcagtggtgtccatcactggacccctcatccggatattgggagataggttctcatggaatgtgaaagcagccctactcgagaccctgtcccttttgctcgccaaagttggtatagcactgaagccttttcttcctcagctgcagacaacatttaccaaagcactgcaggacagcaatcggggcgttaggcttaaagcggccgatgctctgggcaagctgatttcaattcacataaaagtggaccctctctttacggaactgttgaatgggataagagcaatggaggaccccggcgtaagggacactatgctccaggctctgcggttcgtgatccagggggccggagctaaggtggacgccgtgattcgcaaaaatattgtatctttgctcctgtctatgttaggacatgatgaggacaacacacggatttcaagcgctggttgtcttggcgagctgtgcgcattcctaacggaagaggaattgagcgctgtactgcagcagtgtctcttagccgacgtctcaggtatcgattggatggtaagacatggcaggtccctggcattgtcagtcgcagtgaacgtagcgccggggaggttgtgtgccggccgttattcttctgatgtgcaggaaatgatcttaagtagcgccactgctgaccgaatccccattgctgtaagtggagtcagagggatgggattccttatgcggcatcatatcgaaaccgggggaggtcagctccctgcgaagctgagttccctctttgtgaagtgtctccaaaatcccagctcagacatcaggctagtggccgagaagatgatctggtgggccaacaaggatccactgcctccgttggacccccaagctataaagccgattctaaaggcattactggataacactaaagataaaaacaccgtggttagagcctactcggaccaggccatcgtcaatctccttaaaatgagacagggggaggaggtgttccagtcgctcagcaagatcttggacgtggcgtccctggaagtgctaaatgaagtcaatcgaaggtctcttaaaaagctagcctcccaggctgactccacggagcaggtggatgacacaattttgacctag

SEQ ID NO: 168487 - DNA, 8015 bp, Artificial Sequence
  derived and/or modified sequence
atggctgccgacactcaggtgtccgagacactgaagcggttcgccggaaaggtgacaacagcctctgtgaaagagagacgcgaaatcctctctgagctgggcaagtgtgtggcaggaaaggatctgccggaaggggcagtcaaaggtctttgcaagctgttctgcttgacccttcaccgctaccgcgatgcggcatctagaagagctctgcaggccgctatccagcagttggcagaggcccaacctgaggccactgccaagaatctgctccactcactccagtcctctggaataggctcaaaggctggtgttccctccaagtcgtccggttccgctgctctactggccctgacatggacctgcttactggtgcgcatcgtgtttccctccagggcaaagagacaaggggacatttggaataagctggttgaagttcagtgtctactgctgctcgaagttttaggagggagccataagcacgccgtcgacggagctgtcaagaagctgactaagctctggaaagagaatcccggactagtagagcaatacctcagcgcaattctgagcctggagccgaatcagaactacgccggaatgctaggccttctggtccagttctgcacatcccacaaggagatggatgttgtgtcgcagcataaatccgcactgctggacttttatatgaagaacatcctgatgtccaaagtgaagcctccaaaatacctccttgattcgtgtgccccactactccgctatcttagccactctgagttcaaagatttaattctgcctactatccagaagagcctccttagaagcccagagaacgttattgagaccattagttccctgctcgcgagcgtgacactggacctgtcccagtatgccatggatatagttaaaggcctggcgggtcacctcaaatcgaacagccctcgactcatggatgaggctgttctggcccttcgcaacttagctagacaatgttccgattcgtctgctatggagtcattaaccaaacacctgtttgcaatactggggggatctgaaggaaaacttacggtggttgcgcagaagatgtctgtactgtctggcatcggctctgtgagccaccatgttgtatctggcccatcttcgcaagttctcaatggcatagtggctgaactgttcattcccttcctgcagcaagaggtgcacgagggcaccctggtacacgcagtctctgtcctagctctgtggtgcaaccgattcaccatggaggtgcctaaaaaactcacagagtggtttaagaaggccttctctctgaagacctcaacatctgctgtcaggcacgcatatctgcagtgcatgctggcctcttaccggggtgatacgctcctgcaagccctggacttactgccactgctcatacagacagtagaaaaagctgccagccagtccacacaagttcctactattactgaaggagtggccgctgccctcctactgcttaagttgtctgtggccgattcacaggccgaggctaagctatctagcttctggcagttaatcgttgacgaaaaaaaacaagtctttacttctgagaagttccttgtgatggcgtctgaagatgcactgtgcactgtgcttcacctcacagaacgcctgttcctcgaccatccgcaccgactcacaggcaataaggtgcagcagtaccaccgcgcactggtggcagtgctgctctctaggacttggcacgtgagaaggcaggctcagcagaccgtcagaaagctgctgagcagtcttggcggtttcaaactggctcacgggttgttagaggaactgaaaacagtcctttctagccacaaggttttaccactagaggctctggtgacagatgcaggcgaagttactgaagctggcaaggcttacgtacccccacgagtcctgcaggaggccctgtgtgttatctccggcgtccccggacttaagggggatgtgaccgataccgaacagctggctcaggagatgcttatcattagtcatcacccaagcttggtggccgtgcagtctggtttgtggcccgcactcctggctaggatgaaaatagaccccgaagcctttatcactaggcatctggaccagataattcctagaatgaccacacagtctcccctgaatcagtcgtcaatgaacgctatggggtcattaagcgtcctgtcccctgatcgtgttctccctcagctcatctccacaatcactgctagcgtgcagaaccctgcgctcagattggtgacccgggaggagttcgcaattatgcaaactcccgcaggcgaactctatgacaaatcaattatccagtccgctcaacaggattcaatcaagaaagctaatatgaaaagggaaaataaggcgtatagctttaaagagcagatcattgagctggaacttaaggaggaaattaagaagaaaaaaggtatcaaagaggaggtccaactcacaagcaagcaaaaagaaatgcttcaagcgcagttggaccgtgaagcccaggtgaggcgtcgacttcaggagctggacggggaactggaggccgcattaggtctgctcgacatcattctggctaagaatcctagcggcctgacgcagtatattcctgtccttgtggactcttttctaccgctgctgaagtcccctctggccgctcctcgcatcaagaatcccttcctatctctcgcggcatgtgtcatgccatcaaggttgaaagcactggggacattggtcagtcatgtgacactcaggctgcttaaacccgaatgcgtcctcgataagtcctggtgtcaagaggagctctcagtggcagtgaagagggctgtgatgctgctccatacacacaccatcacgtccagggttggcaagggggagcctggcgcagcccctttaagcgcaccggctttctccctcgtgtttccttttttgaagatggtcttaacagagatgccacatcatagcgaggaggaggaagaatggatggctcagatcctgcaaattttgaccgtgcaggcacagctgagggcctcacccaacactccaccaggacgagtggatgagaatggtcccgagttgctgcctcgcgtggcaatgttgcgcctcctgacttgggttataggaactgggtcacccaggctgcaggtcctcgccagtgacaccttaaccactctgtgcgcttcctccagtggcgacgacggttgtgctttcgccgaacaggaagaagtcgacgtgctcctgtgtgccctccagtctccatgtgccagtgtgcgggagactgtgcttaggggcttgatggagctgcacatggtgttgccggcaccggacaccgatgaaaaaaacgggcttaacctgctccgacggctgtgggtggtgaaatttgataaggaagaagagatcaggaaactggccgagcgcctgtggtcaatgatgggactggacctccagcccgatttgtgctctcttctcattgatgacgttatctaccacgaggctgccgtccgtcaggccggagccgaggctctttctcaagccgtggcacggtaccagaggcaagccgctgaagtgatggggaggctaatggaaatttatcaggagaagctctacaggccgcctcctgtgctagacgccttgggtcgcgtgatttccgaaagtcctcctgatcagtgggaggcccgttgcggtctcgcgctggccctgaataaactcagtcagtatttagacagcagtcaggttaagccactttttcagtttttcgtgcctgacgccctcaacgatagacaccctgatgtgcgaaagtgtatgctggacgctgccctcgcgaccctcaacacacatggaaaggagaacgtgaattcactcctgcctgttttcgaagagtttctaaaaaacgccccaaatgacgcttcatatgacgctgtgcggcagagcgtggtcgtgctcatgggatctctggccaagcatcttgacaagtctgatccgaaagtcaaaccaatcgtcgcaaaactcattgcagcactttcaacaccaagccagcaggtacaagagagcgtggcctcatgtctgccccctctcgttccagccataaaggaagatgctggcggaatgatccaacgcctgatgcagcaactgttggagtccgacaaatacgccgagcggaagggcgcagcatacgggcttgctggtttggtgaagggccttggcattctgtcgctaaaacagcaggaaatgatggcagctcttacagatgctattcaagacaagaagaattttcgacgcagagaaggtgctctatttgcattcgaaatgctctgtaccatgctgggaaaactttttgagccgtatgttgttcacgtgctgccgcatctgttactctgcttcggagacgggaaccaatatgtccgagaggctgcggatgactgtgcaaaggccgtgatgtctaatctgtccgcccacggggtgaagctggtcctccccagtttactggccgctttggaggaagaaagctggcgtaccaaggctggtagcgtggagttgttaggtgctatggcctattgcgctccaaagcagctctccagctgcctgcccaacattgtccctaagctaactgaggtactgaccgactcgcatgtaaaggtgcagaaagccggacagcaggcgcttaggcaaatagggagtgtgattcgcaatcctgagatcctggcaatcgccccagtgttgctggatgcactgaccgaccctagtcggaagacgcagaaatgcctacaaaccctactagataccaagttcgttcactttatagacgccccttcccttgcgctaattatgcccatagtgcagcgggcattccaggacaggagcacagacacccgcaaaatggccgctcagataatcggtaatatgtactcgttgactgatcaaaaagatctcgccccttatttacccagtgtgacccccggtctgaaggctagcctccttgaccccgtccctgaggtccggactgtttccgcaaaggcgcttggcgctatggtgaaaggaatgggtgaaagctgttttgaagacctgctgccctggttaatggaaactctgacctatgagcaatcctctgttgatcgcagcggcgctgctcagggcctcgcagaggtgatggccggacttggagttgagaaactcgaaaaactaatgcccgagatcgttgcgacggctagtaaggtcgatattgcaccgcatgtgagggatggctacattatgatgtttaactatctgccaatcacttttggggacaagttcacaccttacgttggccctataatcccctgcatcctgaaggcattagccgatgaaaatgagttcgttcgtgatactgcactgcgcgctgggcagcgggtgatctcaatgtacgctgaaacagctattgctctgttgctgcctcagctggagcaaggcctgtttgatgatctgtggcgaatccgcttttcttcagtccagctgctgggagacctgctctttcatatttctggtgtgacagggaaaatgactactgagacagccagtgaggatgataactttggaacagcgcagtccaataaggctattatcaccgccttaggcgtggaacggagaaacagggtactagccggattatacatgggaagaagcgatacacagctagtcgtgcgccaggcatctctgcacgtctggaaaatcgtagtctcaaacactcctcgaacccttcgtgagatcctacctactctattcggcctcctactgggatttctggcgtcaacatgtgcagataagcgcactattgccgcacgcaccctgggcgatctcgtgagaaagctgggagaaaagatcctccccgaaattataccgattctggaagaagggctgcgtagtcagaaatccgatgagaggcagggagtctgtatcggactgtccgagatcatgaaaagcacttcacgcgacgctgttctctacttctctgagtccttagttcctactgccaggaaagcactctgcgatccactggaggaggtcagagaggctgcggctaaaacattcgaacaattgcactccacaattggccatcaggctctagaggacatcttgccatttttgctgaagcaactggacgacgaagaggtttctgagtttgccttggatggtctgaagcaggtcatggctataaaatccagagttgtcttgccatatctggtccccaagctcactactcctccagtgaacactcgggtgctggctttcctctccagcgtggccggagacgccttgacaagacatctgggggtgatcctgcccgctgtcatgctagcgttaaaagagaaacttgggaccccggacgagcagctggagatggctaactgtcaggcggttatcctttcggtggaggatgacaccgggcacaggattattatagaatatctccttgaagccaccaggagccctgaggtggggatgcggcaagcagcagcaatcatcttaaatatctactgttcccggtctaaggcagactataccagtcaccttaggtctctggtgtccggattaatacgtttgttcaacgattcctctccggtcgtcctggaagaatcctgggacgctctgaacgccatcaccaagaagttggatgcaggaaaccagctggcattgattgaagagcttcataaggagataagactaatcggaaacgaaagtaaaggtgaacacgtgcccggtttttgcctgcctaaaaagggcgtcacatccattctccccgtgttacgcgaaggggttctcactggttctcccgagcagaaagaagaagctgccaaagctcttgggctcgtaataaggttaacatccgctgacgccctgaggcccagcgtcgtcagcattaccggacctctgatccggatcctgggggatcggttttcctggaacgtgaaagctgctttattagagactttgagtctgctgctggccaaggtgggaattgccctgaaacccttcctgccacagctccagaccacttttacaaaggccctgcaggactctaaccggggagtcaggctaaaagcggctgacgcactgggaaagttgatctccattcacatcaaggtggaccctcttttcactgagttactgaatgggattcgggcaatggaagaccctggcgttagagatacgatgctccaggccctcaggttcgtgatccaaggagctggcgcaaaagtcgacgctgtcattagaaagaatatcgtctctctgcttctgagcatgcttggccacgacgaggacaacactagaattagcagtgctggatgcctcggagaactatgcgcctttctaacagaggaagagctttccgcggtgttacaacaatgcctgctggccgatgtgtccggtattgactggatggtaaggcacggtaggtccttggccctgtctgttgctgtgaacgtggcgccagggagactttgtgccggacgctactcctctgacgtgcaggaaatgatcttgagtagcgccaccgctgaccgcattcctattgccgtgagcggcgtgagaggaatgggcttcctgatgcgccaccacatcgaaacaggtgggggtcaacttccagcaaaattaagcagcctgttcgtgaagtgtctgcagaatcccagtagcgacataagactggtggcagaaaaaatgatctggtgggccaataaagatcctttaccaccattagatcctcaagccattaagcccatactcaaggcactgctagataacactaaggacaagaacacagtggttagagcttactcagatcaggccatcgtaaatctcctaaagatgaggcagggagaggaggtttttcaatctctgtctaaaattttagacgtggccagtctcgaggtccttaacgaggtgaatcgaagatctctcaagaaattggcaagccaagccgatagcacagagcaggtggacgatacaatcctgaccta

SEQ ID NO: 168488 - DNA, 8016 bp, Artificial Sequence
  derived and/or modified sequence
atggccgccgacacccaggtgagcgagaccctgaagagattcgccggcaaggtgaccaccgccagcgtgaaggagagaagagagatcctgagcgagctgggcaagtgcgtggccggcaaggacctgcccgagggcgccgtgaagggcctgtgcaagctgttctgcctgaccctgcacagatacagagacgccgccagcagaagagccctgcaggccgccatccagcagctggccgaggcccagcccgaggccaccgccaagaacctgctgcacagcctgcagagcagcggcatcggcagcaaggccggcgtgcccagcaagagcagcggcagcgccgccctgctggccctgacctggacctgcctgctggtgagaatcgtgttccccagcagagccaagagacagggcgacatctggaacaagctggtggaggtgcagtgcctgctgctgctggaggtgctgggcggcagccacaagcacgccgtggacggcgccgtgaagaagctgaccaagctgtggaaggagaaccccggcctggtggagcagtacctgagcgccatcctgagcctggagcccaaccagaactacgccggcatgctgggcctgctggtgcagttctgcaccagccacaaggagatggacgtggtgagccagcacaagagcgccctgctggacttctacatgaagaacatcctgatgagcaaggtgaagccccccaagtacctgctggacagctgcgcccccctgctgagatacctgagccacagcgagttcaaggacctgatcctgcccaccatccagaagagcctgctgagaagccccgagaacgtgatcgagaccatcagcagcctgctggccagcgtgaccctggacctgagccagtacgccatggacatcgtgaagggcctggccggccacctgaagagcaacagccccagactgatggacgaggccgtgctggccctgagaaacctggccagacagtgcagcgacagcagcgccatggagagcctgaccaagcacctgttcgccatcctgggcggcagcgagggcaagctgaccgtggtggcccagaagatgagcgtgctgagcggcatcggcagcgtgagccaccacgtggtgagcggccccagcagccaggtgctgaacggcatcgtggccgagctgttcatccccttcctgcagcaggaggtgcacgagggcaccctggtgcacgccgtgagcgtgctggccctgtggtgcaacagattcaccatggaggtgcccaagaagctgaccgagtggttcaagaaggccttcagcctgaagaccagcaccagcgccgtgagacacgcctacctgcagtgcatgctggccagctacagaggcgacaccctgctgcaggccctggacctgctgcccctgctgatccagaccgtggagaaggccgccagccagagcacccaggtgcccaccatcaccgagggcgtggccgccgccctgctgctgctgaagctgagcgtggccgacagccaggccgaggccaagctgagcagcttctggcagctgatcgtggacgagaagaagcaggtgttcaccagcgagaagttcctggtgatggccagcgaggacgccctgtgcaccgtgctgcacctgaccgagagactgttcctggaccacccccacagactgaccggcaacaaggtgcagcagtaccacagagccctggtggccgtgctgctgagcagaacctggcacgtgagaagacaggcccagcagaccgtgagaaagctgctgagcagcctgggcggcttcaagctggcccacggcctgctggaggagctgaagaccgtgctgagcagccacaaggtgctgcccctggaggccctggtgaccgacgccggcgaggtgaccgaggccggcaaggcctacgtgccccccagagtgctgcaggaggccctgtgcgtgatcagcggcgtgcccggcctgaagggcgacgtgaccgacaccgagcagctggcccaggagatgctgatcatcagccaccaccccagcctggtggccgtgcagagcggcctgtggcccgccctgctggccagaatgaagatcgaccccgaggccttcatcaccagacacctggaccagatcatccccagaatgaccacccagagccccctgaaccagagcagcatgaacgccatgggcagcctgagcgtgctgagccccgacagagtgctgccccagctgatcagcaccatcaccgccagcgtgcagaaccccgccctgagactggtgaccagagaggagttcgccatcatgcagacccccgccggcgagctgtacgacaagagcatcatccagagcgcccagcaggacagcatcaagaaggccaacatgaagagagagaacaaggcctacagcttcaaggagcagatcatcgagctggagctgaaggaggagatcaagaagaagaagggcatcaaggaggaggtgcagctgaccagcaagcagaaggagatgctgcaggcccagctggacagagaggcccaggtgagaagaagactgcaggagctggacggcgagctggaggccgccctgggcctgctggacatcatcctggccaagaaccccagcggcctgacccagtacatccccgtgctggtggacagcttcctgcccctgctgaagagccccctggccgcccccagaatcaagaaccccttcctgagcctggccgcctgcgtgatgcccagcagactgaaggccctgggcaccctggtgagccacgtgaccctgagactgctgaagcccgagtgcgtgctggacaagagctggtgccaggaggagctgagcgtggccgtgaagagagccgtgatgctgctgcacacccacaccatcaccagcagagtgggcaagggcgagcccggcgccgcccccctgagcgcccccgccttcagcctggtgttccccttcctgaagatggtgctgaccgagatgccccaccacagcgaggaggaggaggagtggatggcccagatcctgcagatcctgaccgtgcaggcccagctgagagccagccccaacaccccccccggcagagtggacgagaacggccccgagctgctgcccagagtggccatgctgagactgctgacctgggtgatcggcaccggcagccccagactgcaggtgctggccagcgacaccctgaccaccctgtgcgccagcagcagcggcgacgacggctgcgccttcgccgagcaggaggaggtggacgtgctgctgtgcgccctgcagagcccctgcgccagcgtgagagagaccgtgctgagaggcctgatggagctgcacatggtgctgcccgcccccgacaccgacgagaagaacggcctgaacctgctgagaagactgtgggtggtgaagttcgacaaggaggaggagatcagaaagctggccgagagactgtggagcatgatgggcctggacctgcagcccgacctgtgcagcctgctgatcgacgacgtgatctaccacgaggccgccgtgagacaggccggcgccgaggccctgagccaggccgtggccagataccagagacaggccgccgaggtgatgggcagactgatggagatctaccaggagaagctgtacagacccccccccgtgctggacgccctgggcagagtgatcagcgagagcccccccgaccagtgggaggccagatgcggcctggccctggccctgaacaagctgagccagtacctggacagcagccaggtgaagcccctgttccagttcttcgtgcccgacgccctgaacgacagacaccccgacgtgagaaagtgcatgctggacgccgccctggccaccctgaacacccacggcaaggagaacgtgaacagcctgctgcccgtgttcgaggagttcctgaagaacgcccccaacgacgccagctacgacgccgtgagacagagcgtggtggtgctgatgggcagcctggccaagcacctggacaagagcgaccccaaggtgaagcccatcgtggccaagctgatcgccgccctgagcacccccagccagcaggtgcaggagagcgtggccagctgcctgccccccctggtgcccgccatcaaggaggacgccggcggcatgatccagagactgatgcagcagctgctggagagcgacaagtacgccgagagaaagggcgccgcctacggcctggccggcctggtgaagggcctgggcatcctgagcctgaagcagcaggagatgatggccgccctgaccgacgccatccaggacaagaagaacttcagaagaagagagggcgccctgttcgccttcgagatgctgtgcaccatgctgggcaagctgttcgagccctacgtggtgcacgtgctgccccacctgctgctgtgcttcggcgacggcaaccagtacgtgagagaggccgccgacgactgcgccaaggccgtgatgagcaacctgagcgcccacggcgtgaagctggtgctgcccagcctgctggccgccctggaggaggagagctggagaaccaaggccggcagcgtggagctgctgggcgccatggcctactgcgcccccaagcagctgagcagctgcctgcccaacatcgtgcccaagctgaccgaggtgctgaccgacagccacgtgaaggtgcagaaggccggccagcaggccctgagacagatcggcagcgtgatcagaaaccccgagatcctggccatcgcccccgtgctgctggacgccctgaccgaccccagcagaaagacccagaagtgcctgcagaccctgctggacaccaagttcgtgcacttcatcgacgcccccagcctggccctgatcatgcccatcgtgcagagagccttccaggacagaagcaccgacaccagaaagatggccgcccagatcatcggcaacatgtacagcctgaccgaccagaaggacctggccccctacctgcccagcgtgacccccggcctgaaggccagcctgctggaccccgtgcccgaggtgagaaccgtgagcgccaaggccctgggcgccatggtgaagggcatgggcgagagctgcttcgaggacctgctgccctggctgatggagaccctgacctacgagcagagcagcgtggacagaagcggcgccgcccagggcctggccgaggtgatggccggcctgggcgtggagaagctggagaagctgatgcccgagatcgtggccaccgccagcaaggtggacatcgccccccacgtgagagacggctacatcatgatgttcaactacctgcccatcaccttcggcgacaagttcaccccctacgtgggccccatcatcccctgcatcctgaaggccctggccgacgagaacgagttcgtgagagacaccgccctgagagccggccagagagtgatcagcatgtacgccgagaccgccatcgccctgctgctgccccagctggagcagggcctgttcgacgacctgtggagaatcagattcagcagcgtgcagctgctgggcgacctgctgttccacatcagcggcgtgaccggcaagatgaccaccgagaccgccagcgaggacgacaacttcggcaccgcccagagcaacaaggccatcatcaccgccctgggcgtggagagaagaaacagagtgctggccggcctgtacatgggcagaagcgacacccagctggtggtgagacaggccagcctgcacgtgtggaagatcgtggtgagcaacacccccagaaccctgagagagatcctgcccaccctgttcggcctgctgctgggcttcctggccagcacctgcgccgacaagagaaccatcgccgccagaaccctgggcgacctggtgagaaagctgggcgagaagatcctgcccgagatcatccccatcctggaggagggcctgagaagccagaagagcgacgagagacagggcgtgtgcatcggcctgagcgagatcatgaagagcaccagcagagacgccgtgctgtacttcagcgagagcctggtgcccaccgccagaaaggccctgtgcgaccccctggaggaggtgagagaggccgccgccaagaccttcgagcagctgcacagcaccatcggccaccaggccctggaggacatcctgcccttcctgctgaagcagctggacgacgaggaggtgagcgagttcgccctggacggcctgaagcaggtgatggccatcaagagcagagtggtgctgccctacctggtgcccaagctgaccaccccccccgtgaacaccagagtgctggccttcctgagcagcgtggccggcgacgccctgaccagacacctgggcgtgatcctgcccgccgtgatgctggccctgaaggagaagctgggcacccccgacgagcagctggagatggccaactgccaggccgtgatcctgagcgtggaggacgacaccggccacagaatcatcatcgagtacctgctggaggccaccagaagccccgaggtgggcatgagacaggccgccgccatcatcctgaacatctactgcagcagaagcaaggccgactacaccagccacctgagaagcctggtgagcggcctgatcagactgttcaacgacagcagccccgtggtgctggaggagagctgggacgccctgaacgccatcaccaagaagctggacgccggcaaccagctggccctgatcgaggagctgcacaaggagatcagactgatcggcaacgagagcaagggcgagcacgtgcccggcttctgcctgcccaagaagggcgtgaccagcatcctgcccgtgctgagagagggcgtgctgaccggcagccccgagcagaaggaggaggccgccaaggccctgggcctggtgatcagactgaccagcgccgacgccctgagacccagcgtggtgagcatcaccggccccctgatcagaatcctgggcgacagattcagctggaacgtgaaggccgccctgctggagaccctgagcctgctgctggccaaggtgggcatcgccctgaagcccttcctgccccagctgcagaccaccttcaccaaggccctgcaggacagcaacagaggcgtgagactgaaggccgccgacgccctgggcaagctgatcagcatccacatcaaggtggaccccctgttcaccgagctgctgaacggcatcagagccatggaggaccccggcgtgagagacaccatgctgcaggccctgagattcgtgatccagggcgccggcgccaaggtggacgccgtgatcagaaagaacatcgtgagcctgctgctgagcatgctgggccacgacgaggacaacaccagaatcagcagcgccggctgcctgggcgagctgtgcgccttcctgaccgaggaggagctgagcgccgtgctgcagcagtgcctgctggccgacgtgagcggcatcgactggatggtgagacacggcagaagcctggccctgagcgtggccgtgaacgtggcccccggcagactgtgcgccggcagatacagcagcgacgtgcaggagatgatcctgagcagcgccaccgccgacagaatccccatcgccgtgagcggcgtgagaggcatgggcttcctgatgagacaccacatcgagaccggcggcggccagctgcccgccaagctgagcagcctgttcgtgaagtgcctgcagaaccccagcagcgacatcagactggtggccgagaagatgatctggtgggccaacaaggaccccctgccccccctggacccccaggccatcaagcccatcctgaaggccctgctggacaacaccaaggacaagaacaccgtggtgagagcctacagcgaccaggccatcgtgaacctgctgaagatgagacagggcgaggaggtgttccagagcctgagcaagatcctggacgtggccagcctggaggtgctgaacgaggtgaacagaagaagcctgaagaagctggccagccaggccgacagcaccgagcaggtggacgacaccatcctgacctag

SEQ ID NO: 168489 - protein, 334 aa, Artificial Sequence
  derived and/or modified sequence
MAASGSGMAQKTWELANNMQEAQSIDEIYKYDKKQQQEILAAKPWTKDHHYFKYCKISALALLKMVMHARSGGNLEVMGLMLGKVDGETMIIMDSFALPVEGTETRVNAQAAAYEYMAAYIENAKQVGRLENAIGWYHSHPGYGCWLSGIDVSTQMLNQQFQEPFVAVVIDPTRTISAGKVNLGAFRTYPKGYKPPDEGPSEYQTIPLNKIEDFGVHCKQYYALEVSYFKSSLDRKLLELLWNKYWVNTLSSSSLLTNADYTTGQVFDLSEKLEQSEAQLGRGSFMLGLETHDRKSEDKLAKATRDSCKTTIEAIHGLMSQVIKDKLFNQINIS

SEQ ID NO: 168490 - DNA, 1510 bp, Artificial Sequence
  derived and/or modified sequence
gactataccactcccataccctataactttgtttgttctatttcacacatataattttccgagacaagatgttctcatttaagcaacaagaagattcgtctctcgctattactgtaactgctgtttatatcgtcatgtcccggaaaggtccctgtcttccctgaatggtctctaccaacttcacctccggttctaggtgtcatggctgccccaagagtctaggtaagagtttgttcccgtggtgcggagggtcaaggcccacacccggaaacctagcgaggtaaagttgcgtcttggttgtagagacgacaacttctccgcttcctcggcgatggcggcgtccgggagcggtatggcccagaaaacctgggaactggccaacaacatgcaggaagctcagagtatcgatgaaatctacaaatacgacaagaaacagcagcaagaaatcctggcggcgaagccctggactaaggatcaccattactttaagtactgcaaaatctcagcattggctctgctgaagatggtgatgcatgccagatcgggaggcaacttggaagtgatgggtctgatgctaggaaaggtggatggtgaaaccatgatcattatggacagttttgctttgcctgtggagggcactgaaacccgagtaaatgctcaggctgctgcatatgaatacatggctgcatacatagaaaatgcaaaacaggttggccgccttgaaaatgcaatcgggtggtatcatagccaccctggctatggctgctggctttctgggattgatgttagtactcagatgctcaatcagcagttccaggaaccatttgtagcagtggtgattgatccaacaagaacaatatccgcagggaaagtgaatcttggcgcctttaggacatacccaaagggctacaaacctcctgatgaaggaccttctgagtaccagactattccacttaataaaatagaagattttggtgtacactgcaaacaatattatgccttagaagtctcatatttcaaatcctctttggatcgcaaattgcttgagctgttgtggaataaatactgggtgaatacgttgagttcttctagcttgcttactaatgcagactataccactggtcaggtctttgatttgtctgaaaagttagagcagtcagaagcccagctgggacgagggagtttcatgttgggtttagaaacgcatgaccgaaaatcagaagacaaacttgccaaagctacaagagacagctgtaaaactaccatagaagctatccatggattgatgtctcaggttattaaggataaactgtttaatcaaattaacatctcttaaacagtctctgagaagtactttacctgaaagacagtatgagaaaaatattcaagtaacactttaaaaccagttacccaaaatctgattagaagtataaggtgctctgaagtgtcctaaatattaatatcctgtaataaagctctttaaaatgaaaaaaaaaaaaaaaaaaaaaaa

SEQ ID NO: 168491 - DNA, 1005 bp, Artificial Sequence
  derived and/or modified sequence
atggccgccagcggcagcggcatggcccagaagacctgggagctggccaacaacatgcaggaggcccagagcatcgacgagatctacaagtacgacaagaagcagcagcaggagatcctggccgccaagccctggaccaaggaccaccactacttcaagtactgcaagatcagcgccctggccctgctgaagatggtgatgcacgccagaagcggcggcaacctggaggtgatgggcctgatgctgggcaaggtggacggcgagaccatgatcatcatggacagcttcgccctgcccgtggagggcaccgagaccagagtgaacgcccaggccgccgcctacgagtacatggccgcctacatcgagaacgccaagcaggtgggcagactggagaacgccatcggctggtaccacagccaccccggctacggctgctggctgagcggcatcgacgtgagcacccagatgctgaaccagcagttccaggagcccttcgtggccgtggtgatcgaccccaccagaaccatcagcgccggcaaggtgaacctgggcgccttcagaacctaccccaagggctacaagccccccgacgagggccccagcgagtaccagaccatccccctgaacaagatcgaggacttcggcgtgcactgcaagcagtactacgccctggaggtgagctacttcaagagcagcctggacagaaagctgctggagctgctgtggaacaagtactgggtgaacaccctgagcagcagcagcctgctgaccaacgccgactacaccaccggccaggtgttcgacctgagcgagaagctggagcagagcgaggcccagctgggcagaggcagcttcatgctgggcctggagacccacgacagaaagagcgaggacaagctggccaaggccaccagagacagctgcaagaccaccatcgaggccatccacggcctgatgagccaggtgatcaaggacaagctgttcaaccagatcaacatcagctag

SEQ ID NO: 168492 - DNA, 1480 bp, Artificial Sequence
  derived and/or modified sequence
ctcccataccctataactttgtttgttctatttcacacatataattttccgagacaagatgttctcatttaagcaacaagaagattcgtctctcgctattactgtaactgctgtttatatcgtcatgtcccggaaaggtccctgtcttccctgaatggtctctaccaacttcacctccggttctaggtgtcatggctgccccaagagtctaggtaagagtttgttcccgtggtgcggagggtcaaggcccacacccggaaacctagcgaggtaaagttgcgtcttggttgtagagacgacaacttctccgcttcctcggcgatggcggcgtccgggagcggtatggcccagaaaacctgggaactggccaacaacatgcaggaagctcagagtatcgatgaaatctacaaatacgacaagaaacagcagcaagaaatcctggcggcgaagccctggactaaggatcaccattactttaagtactgcaaaatctcagcattggctctgctgaagatggtgatgcatgccagatcgggaggcaacttggaagtgatgggtctgatgctaggaaaggtggatggtgaaaccatgatcattatggacagttttgctttgcctgtggagggcactgaaacccgagtaaatgctcaggctgctgcatatgaatacatggctgcatacatagaaaatgcaaaacaggttggccgccttgaaaatgcaatcgggtggtatcatagccaccctggctatggctgctggctttctgggattgatgttagtactcagatgctcaatcagcagttccaggaaccatttgtagcagtggtgattgatccaacaagaacaatatccgcagggaaagtgaatcttggcgcctttaggacatacccaaagggctacaaacctcctgatgaaggaccttctgagtaccagactattccacttaataaaatagaagattttggtgtacactgcaaacaatattatgccttagaagtctcatatttcaaatcctctttggatcgcaaattgcttgagctgttgtggaataaatactgggtgaatacgttgagttcttctagcttgcttactaatgcagactataccactggtcaggtctttgatttgtctgaaaagttagagcagtcagaagcccagctgggacgagggagtttcatgttgggtttagaaacgcatgaccgaaaatcagaagacaaacttgccaaagctacaagagacagctgtaaaactaccatagaagctatccatggattgatgtctcaggttattaaggataaactgtttaatcaaattaacatctcttaaacagtctctgagaagtactttacctgaaagacagtatgagaaaaatattcaagtaacactttaaaaccagttacccaaaatctgattagaagtataaggtgctctgaagtgtcctaaatattaatatcctgtaataaagctctttaaaatgaaa

SEQ ID NO: 168493 - DNA, 1005 bp, Artificial Sequence
  derived and/or modified sequence
atggctgcaagtggcagcgggatggcccagaagacgtgggaattagcaaacaatatgcaagaggctcaatcaattgatgagatttataagtacgacaagaaacagcagcaggaaattctagccgcgaaaccctggaccaaagaccaccactacttcaagtattgcaagatatcggcccttgccctgctaaagatggtgatgcacgcccgaagcggtggtaacttagaagttatgggccttatgctcgggaaagtcgatggcgagacaatgattatcatggattcctttgccctgcccgtagaggggacagagacccgcgttaacgctcaggctgctgcctacgaatatatggctgcatacatcgaaaatgcaaagcaggtcggacggctggagaacgcaatcggatggtaccactcccaccccggatatggatgctggttaagcggaatcgacgtgtcaacacagatgcttaaccagcagttccaggaaccatttgtagccgtggtgatcgaccctacacgaacaatatccgctggcaaggtgaatctgggcgcttttcggacttatccaaagggctataaacccccagatgagggcccatctgagtatcagaccattcccctgaacaagatcgaagattttggcgtgcactgcaagcagtactatgctctggaggtatcatattttaagtcgagtcttgacagaaagttgctcgagctactatggaataaatattgggtaaacaccttgagctcgagcagcctgctgacaaacgccgattacaccaccggacaggtgtttgatctgagtgagaagctggagcagtccgaagcccagttgggcaggggctcattcatgctgggcctagaaacgcatgaccgcaaaagcgaggataaactggctaaggctacacgagactcctgcaagactactattgaggccatccacggccttatgtcccaagtgataaaggacaaactcttcaaccaaataaatatctcatag

SEQ ID NO: 168494 - DNA, 1005 bp, Artificial Sequence
  derived and/or modified sequence
atggccgccagcggcagcggcatggcccagaagacctgggagctggccaacaacatgcaggaggcccagagcattgatgagatctacaagtatgacaagaagcagcagcaggagatcctggccgccaagccctggaccaaggaccaccactacttcaagtactgcaagatcagcgccctggccctgctgaagatggtgatgcacgcccggagcggcggcaacctggaggtgatgggcctgatgctgggcaaggtggatggagagaccatgatcatcatggacagctttgccctgcctgtggagggcacagagaccagggtgaatgcccaggccgccgcctatgagtacatggccgcctacattgaaaatgccaagcaggtgggccgcctggagaatgccatcggctggtaccacagccaccctggctacggctgctggctgagcggcattgatgtgtccacccagatgctgaaccagcagttccaggagccctttgtggccgtggtgattgaccccaccaggaccatctctgctgggaaggtgaacctgggcgccttccgcacctaccccaagggctacaagcccccagatgagggccccagcgagtaccagaccatccccctgaacaagattgaggactttggagtgcactgcaagcagtactatgccctggaggtgtcctacttcaagagcagcctggacaggaagctgctggagctgctgtggaacaagtactgggtgaacaccctgagcagcagcagcctgctgaccaatgctgactacaccaccggccaggtgtttgacctgtctgagaagctggagcagagcgaggcccagctgggccggggcagcttcatgctgggcctggagacccatgacaggaagtctgaggacaagctggccaaggccacccgggacagctgcaagaccaccatcgaggccatccacggcctgatgagccaggtgatcaaggacaagctgttcaaccagatcaacatctcctag

SEQ ID NO: 168495 - DNA, 1005 bp, Artificial Sequence
  derived and/or modified sequence
atggccgccagcggcagcggcatggcccagaagacctgggagctggccaacaacatgcaggaagcgcaatccattgatgagatttacaagtatgacaagaagcagcagcaggagatcctagccgctaagccgtggacaaaagaccatcactactttaaatattgcaaaatctcagcccttgcccttcttaaaatggtaatgcacgccagatctggaggaaatctcgaggtcatgggcctgatgttggggaaagtcgacggagagaccatgattatcatggattcctttgcgctgcctgtggaggggactgagacacgcgtcaacgcccaggctgcagcttatgaatatatggcggcctacatagagaacgctaaacaggtgggtcgactggaaaacgctattggctggtatcattcccatcccggatatggttgctggctgagtggaatcgatgtgagtacacagatgctcaatcagcagttccaggagccattcgtggccgttgttatagatcctaccaggacaatcagcgcaggaaaagtcaatctgggtgcgttccgcacctaccccaaaggttacaaacccccggatgagggtccgtctgaatatcaaacgatccccctcaacaagattgaagactttggtgttcactgtaaacagtattacgccctggaggtgagttatttcaaatcttctctggacagaaagctcctcgagctcctatggaataagtactgggtcaacacactgtccagttcttcgctcttgaccaacgctgattacaccacaggtcaggtgttcgacctatcagagaaactcgaacagtcggaagcccagctggggcgcgggagttttatgctgggcctggagacgcatgaccggaagtctgaagataaactggccaaggctacaagggactcgtgcaagaccacaattgaggctatccatggcttgatgagccaggtaatcaaagataaactgttcaatcagatcaacatcagttag

SEQ ID NO: 168496 - DNA, 1005 bp, Artificial Sequence
  derived and/or modified sequence
atggctgcctctggatccgggatggcgcagaagacgtgggaattagcaaacaatatgcaggaggcccagtccatcgatgagatttacaagtacgacaagaaacagcaacaggagatcttggctgccaagccttggacgaaggaccaccactacttcaaatactgcaagatctctgcactggccctgctcaaaatggtgatgcatgccagatccggcggaaatctggaagtgatgggcctcatgctcggcaaggtagacggtgagacaatgattattatggacagtttcgccctcccggtcgagggaacggagacccgagtcaacgcccaggccgcagcttacgaatacatggccgcttacatcgaaaacgccaagcaagttggcagactcgagaacgccattggttggtatcactcgcacccaggctatggctgctggcttagtggcattgacgtgagtacacagatgctgaatcaacagttccaggagccattcgttgcagtggtgattgacccaacaagaactatttccgccggtaaggttaacctgggcgctttccgaacttaccccaagggttataaacccccagacgagggaccatcagagtaccagactatcccactgaataagatagaagactttggagtgcattgcaaacaatactacgcactggaagtatcatactttaagtccagccttgatcgcaagctgctggagctcctgtggaataaatactgggttaatacactaagcagcagtagtctgctcacaaatgccgattatacgacaggccaagtcttcgatctgtctgagaaattagagcaatctgaagcccagctcggtagagggtcattcatgctggggttggagacacatgatcgcaaaagtgaagataaactggccaaggccacccgcgattcttgtaagacaactatagaggcaatccacgggctgatgtctcaggtaatcaaagacaaacttttcaaccagatcaatattagttag

SEQ ID NO: 168497 - protein, 478 aa, Artificial Sequence
  derived and/or modified sequence
MAGVEEVAASGSHLNGDLDPDDREEGAASTAEEAAKKKRRKKKKSKGPSAAGEQEPDKESGASVDEVARQLERSALEDKERDEDDEDGDGDGDGATGKKKKKKKKKRGPKVQTDPPSVPICDLYPNGVFPKGQECEYPPTQDGRTAAWRTTSEEKKALDQASEEIWNDFREAAEAHRQVRKYVMSWIKPGMTMIEICEKLEDCSRKLIKENGLNAGLAFPTGCSLNNCAAHYTPNAGDTTVLQYDDICKIDFGTHISGRIIDCAFTVTFNPKYDTLLKAVKDATNTGIKCAGIDVRLCDVGEAIQEVMESYEVEIDGKTYQVKPIRNLNGHSIGQYRIHAGKTVPIVKGGEATRMEEGEVYAIETFGSTGKGVVHDDMECSHYMKNFDVGHVPIRLPRTKHLLNVINENFGTLAFCRRWLDRLGESKYLMALKNLCDLGIVDPYPPLCDIKGSYTAQFEHTILLRPTCKEVVSRGDDY

SEQ ID NO: 168498 - DNA, 1437 bp, Artificial Sequence
  derived and/or modified sequence
atggccggcgtggaggaggtggccgccagcggcagccacctgaacggcgacctggaccccgacgacagagaggagggcgccgccagcaccgccgaggaggccgccaagaagaagagaagaaagaagaagaagagcaagggccccagcgccgccggcgagcaggagcccgacaaggagagcggcgccagcgtggacgaggtggccagacagctggagagaagcgccctggaggacaaggagagagacgaggacgacgaggacggcgacggcgacggcgacggcgccaccggcaagaagaagaagaagaagaagaagaagagaggccccaaggtgcagaccgacccccccagcgtgcccatctgcgacctgtaccccaacggcgtgttccccaagggccaggagtgcgagtacccccccacccaggacggcagaaccgccgcctggagaaccaccagcgaggagaagaaggccctggaccaggccagcgaggagatctggaacgacttcagagaggccgccgaggcccacagacaggtgagaaagtacgtgatgagctggatcaagcccggcatgaccatgatcgagatctgcgagaagctggaggactgcagcagaaagctgatcaaggagaacggcctgaacgccggcctggccttccccaccggctgcagcctgaacaactgcgccgcccactacacccccaacgccggcgacaccaccgtgctgcagtacgacgacatctgcaagatcgacttcggcacccacatcagcggcagaatcatcgactgcgccttcaccgtgaccttcaaccccaagtacgacaccctgctgaaggccgtgaaggacgccaccaacaccggcatcaagtgcgccggcatcgacgtgagactgtgcgacgtgggcgaggccatccaggaggtgatggagagctacgaggtggagatcgacggcaagacctaccaggtgaagcccatcagaaacctgaacggccacagcatcggccagtacagaatccacgccggcaagaccgtgcccatcgtgaagggcggcgaggccaccagaatggaggagggcgaggtgtacgccatcgagaccttcggcagcaccggcaagggcgtggtgcacgacgacatggagtgcagccactacatgaagaacttcgacgtgggccacgtgcccatcagactgcccagaaccaagcacctgctgaacgtgatcaacgagaacttcggcaccctggccttctgcagaagatggctggacagactgggcgagagcaagtacctgatggccctgaagaacctgtgcgacctgggcatcgtggacccctacccccccctgtgcgacatcaagggcagctacaccgcccagttcgagcacaccatcctgctgagacccacctgcaaggaggtggtgagcagaggcgacgactactag

SEQ ID NO: 168499 - DNA, 1437 bp, Artificial Sequence
  derived and/or modified sequence
atggcaggggtagaggaggtggcagcgagtggcagccaccttaatggtgacctggacccagatgatcgagaggagggagccgcctccaccgccgaggaagccgcaaaaaagaagcgccgcaagaagaaaaagagtaaaggcccctctgccgctggagaacaggaacccgacaaagaatcaggagcttccgtggatgaggtcgcaagacagctggagcgatcagcgctggaggataaggaacgagacgaagacgatgaagacggagatggagatggcgatggtgccactggtaagaaaaagaagaagaaaaaaaaaaagcgcggtccaaaagtgcagactgacccccccagcgtcccaatttgcgacctttaccccaatggggtgttccccaagggacaagagtgcgagtatccacctactcaggacggccgcacagcagcctggcgcacgaccagcgaggagaagaaggccctggaccaggcctcagaggagatctggaatgatttccgtgaagcagctgaagcacacagacaggtgcgaaagtatgtcatgtcctggataaagccagggatgaccatgatcgagatctgcgagaaactggaagactgcagccgtaaactcatcaaggagaacgggctgaacgccggcctggcttttcccacaggatgctcccttaataattgtgccgcacactacacccccaacgcaggagatacgacggtgctgcagtatgatgacatttgcaaaatcgactttgggacccacatcagcggaaggatcatcgactgcgcgtttaccgttaccttcaacccgaaatatgataccttgttgaaagccgtaaaagatgccacaaatactggcatcaagtgcgccggcattgacgtgcggctttgtgacgtgggagaagcaatccaagaagtgatggaatcatatgaagtcgaaatcgacggcaaaacctatcaagtgaagcccatcaggaacttgaacggccatagcatcgggcagtaccggatccacgccgggaagacagtgcccatagtgaaagggggcgaagctacccgtatggaagagggcgaggtgtacgccattgagacctttggctctaccggcaagggcgtcgtgcatgacgacatggagtgctcccattatatgaagaactttgatgtaggccatgtgccaatcaggttgccgaggaccaagcacctgcttaatgtcatcaatgagaatttcggcaccttggccttctgcagacggtggctggatagactgggcgagtccaaatatcttatggctttgaaaaatctgtgcgatctgggcatcgtggatccatacccccccctgtgcgatatcaagggctcctacactgcacagttcgagcatactattctcctccgcccaacctgcaaagaggtagtcagccgaggcgacgattattag

SEQ ID NO: 168500 - DNA, 1437 bp, Artificial Sequence
  derived and/or modified sequence
atggccggcgtggaggaggtggccgccagcggcagccacctgaatggagacctggaccctgatgaccgggaggagggcgccgccagcacagctgaggaggccgccaagaagaagaggaggaagaagaagaagagcaagggccccagcgctgctggggagcaggagccagacaaggagagcggggcctctgtggatgaggtggcccggcagctggagaggtctgccctggaggacaaggagagagatgaagatgatgaagatggagatggagatggagatggagccaccgggaagaagaagaagaagaagaagaagaagaggggccccaaggtgcagacagatcctccttctgtgcccatctgtgacctgtaccccaacggggtcttccccaagggccaggagtgtgagtacccacccacccaggacggccgcacagctgcctggaggaccaccagcgaggagaagaaggccctggaccaggccagcgaggagatctggaatgacttccgggaggccgctgaggcccaccggcaggtgaggaaatatgtgatgtcctggatcaagccaggcatgaccatgattgagatctgtgagaagctggaggactgcagcaggaagctgatcaaggaaaatggcctgaatgccggcctggccttccccaccggctgcagcctgaacaactgtgccgcccactacaccccaaatgctggggacaccaccgtgctgcagtatgatgacatctgcaagattgactttggcacccacatcagcggccgcatcatcgactgtgccttcaccgtgaccttcaaccccaagtatgacaccctgctgaaggctgtgaaggatgccaccaacacaggcatcaagtgtgccggcattgatgtgcggctgtgtgatgtgggggaggccatccaggaggtgatggagagctatgaggtggagattgatggcaagacctaccaggtgaagcccatccggaacctgaatggccacagcatcggccagtaccgcatccacgccggcaagacagtgcccatcgtgaagggcggggaggccaccaggatggaggagggggaggtgtatgccatcgagaccttcggcagcactggaaaaggagtggtgcatgatgacatggagtgcagccactacatgaagaactttgatgtgggccacgtgcccatccggctgcccaggaccaagcacctgctgaatgtcatcaatgaaaattttggcaccctggccttctgccgccgctggctggaccggctgggggagagcaagtacctgatggccctgaagaacctgtgtgacctgggcatcgtggacccctacccacccctgtgtgacatcaagggcagctacacagcccagtttgagcacaccatcctgctgcggcccacctgcaaggaggtggtgtccagaggagatgactactag

SEQ ID NO: 168501 - DNA, 3601 bp, Artificial Sequence
  derived and/or modified sequence
gcagtcgggtctggccccagtcgactccagccaggcggggctccaagccgagactcctgcacgcccggcccgaagctagcccgacaccctcagctgagtcctccgccgtcccagcattccctgcgtccctaccatcgagagcagcttccggcgtggctggtgtaggcgggtggagaaggatcggggccctcgccgctctgtctcattccctcgcgctctctcgggcaacatggcgggtgtggaggaggtagcggcctccgggagccacctgaatggcgacctggatccagacgacagggaagaaggagctgcctctacggctgaggaagcagccaagaaaaaaagacgaaagaagaagaagagcaaagggccttctgcagcaggggaacaggaacctgataaagaatcaggagcctcagtggatgaagtagcaagacagttggaaagatcagcattggaagataaagaaagagatgaagatgatgaagatggagatggcgatggagatggagcaactggaaagaagaagaaaaagaagaagaagaagagaggaccaaaagttcaaacagaccctccctcagttccaatatgtgacctgtatcctaatggtgtatttcccaaaggacaagaatgcgaatacccacccacacaagatgggcgaacagctgcttggagaactacaagtgaagaaaagaaagcattagatcaggcaagtgaagagatttggaatgattttcgagaagctgcagaagcacatcgacaagttagaaaatacgtaatgagctggatcaagcctgggatgacaatgatagaaatctgtgaaaagttggaagactgttcacgcaagttaataaaagagaatggattaaatgcaggcctggcatttcctactggatgttctctcaataattgtgctgcccattatactcccaatgccggtgacacaacagtattacagtatgatgacatctgtaaaatagactttggaacacatataagtggtaggattattgactgtgcttttactgtcacttttaatcccaaatatgatacgttattaaaagctgtaaaagatgctactaacactggaataaagtgtgctggaattgatgttcgtctgtgtgatgttggtgaggccatccaagaagttatggagtcctatgaagttgaaatagatgggaagacatatcaagtgaaaccaatccgtaatctaaatggacattcaattgggcaatatagaatacatgctggaaaaacagtgccgattgtgaaaggaggggaggcaacaagaatggaggaaggagaagtatatgcaattgaaacctttggtagtacaggaaaaggtgttgttcatgatgatatggaatgttcacattacatgaaaaattttgatgttggacatgtgccaataaggcttccaagaacaaaacacttgttaaatgtcatcaatgaaaactttggaacccttgccttctgccgcagatggctggatcgcttgggagaaagtaaatacttgatggctctgaagaatctgtgtgacttgggcattgtagatccatatccaccattatgtgacattaaaggatcatatacagcgcaatttgaacataccatcctgttgcgtccaacatgtaaagaagttgtcagcagaggagatgactattaaacttagtccaaagccacctcaacacctttattttctgagctttgttggaaaacatgataccagaattaatttgccacatgttgtctgttttaacagtggacccatgtaatacttttatccatgtttaaaaaagaaggaatttggacaaaggcaaaccgtctaatgtaattaaccaacgaaaaagctttccggacttttaaatgctaactgtttttccccttcctgtctaggaaaatgctataaagctcaaattagttaggaatgacttatacgttttgttttgaatacctaagagatactttttggatatttatattgccatattcttacttgaatgctttgaatgactacatccagttctgcacctataccctctggtgttgctttttaaccttcctggaatccattttctaaaaaataaagacattttcagatctgagagctacatctcaatgtctgtggttataattctggacaggataaatagctaaacttaatgtaggcaaatgcagagacatttatctgaaatgtagacctctacactgagacttttctggcatagtggctaaaacaagatctacacatgcataaaaagggacaatcaccttttcttcataaatatacagctttaggaatatttcaccattctttgtaggacatagtagtccttgtctttttttctcctgacattggaaagatgtgctaattgaaacttgacttagtaggaacattgtgccaactcaaaaccttgatttagtaaaaatctcaatgtttagatcctttgtccagtggtggtgtttatcagggaatgtattcagcttgctcagaaaaccaaaagggtattaaagccacaaaagcaaagaagaaaaaaaaaaacttcccatgtttggatcttgttctagttagaaaaattaagttgaaattcttggactttttcattcatgaggcaaatgctgtaataccttcccctttgacaggtttggattcttaacattactagtggtatttcaggaagtgacgttacagttactttccttatagcggctaagtgtattaagttgaatgtaacgatggtaatattaatttgtttgaactgaggcccactactgattctttgacaaattgaattcttatatttaaataattttatgggaatgttccatcataatttctaaatcatttatatatcaaggtagccttaatttgtatatgtttcagtacaatgagattttattgcctctgggatgctgtttagtttgtattttgttgaacgtttttatcctaggaagagaaacctatgacttgtgtacctagatcatctgttacattaaaaagctgctctttcagcattagagctataaatgaatgttaccttgtcgggaaacaatctaggttttagctgtatgagctatgtttattatggtgctaatgttcagtagccacatttgactaatgtctccattctctgtgatgctgtggctagcagcagagctcgccagttcatgcctggacatactgtcagggctgggccctccagctagctcctttggggttgagtccgtatctttttgatgtggaagtataaagcaagtatcttgatttctaaacccagcaattttagaattgacctttatgagtgaagacttttggagcttttaaagaccttggcagtcatgatctcaaaccaattaggagctccaagctcccttcccaggtaactgttgggagcaatggcatcactgtatgcccttgtaatggctggaagggacatgatcttgtaagtaggaaagctgtaactaaaaattgtattgtttgcttattagccatgtatctcttaaaattttgttatgtttacaacgatgtaccttattggcaacaagttattagtttgatgtttaacaatagtgcctttagtaaattattttacaactaaaa

SEQ ID NO: 168502 - DNA, 1437 bp, Artificial Sequence
  derived and/or modified sequence
atggccggcgtggaggaggtggccgccagcggcagccacctgaacggcgatctggacccagatgaccgcgaggagggcgcggcctctacagcagaggaggctgcaaagaaaaaacggagaaaaaagaagaagtctaagggcccctcagctgctggtgaacaggagcctgataaagagtcgggtgcctccgtggacgaagtggcaaggcagctggagagatctgctttggaagacaaggagagagatgaagatgacgaggacggggacggggatggtgatggtgctacaggtaagaagaaaaagaagaagaagaaaaaaaggggcccaaaggttcagaccgatccacctagtgtccccatttgcgatctctatcctaatggtgtgtttccaaaaggccaggagtgtgaatacccaccaactcaggatggacgcacagccgcttggcgcaccacttccgaggaaaagaaggctctggaccaggcctcagaggagatttggaatgactttagagaagccgccgaggcccaccgacaggtcaggaagtatgtaatgtcctggatcaaacctggaatgaccatgatagaaatttgtgagaagctggaagattgctcccgtaaattgattaaagaaaacggattgaacgcaggactggctttccccacagggtgttcccttaataactgcgccgcccactacactcctaatgccggggacacaactgtcctccagtacgacgatatctgtaagatcgattttggtactcacatcagcggccggatcatcgattgtgctttcactgtgacgttcaatcccaagtatgacactctcttgaaagctgtgaaagatgcaactaatacggggatcaaatgtgccgggatcgatgtcaggctctgcgacgtcggtgaggctatccaggaggtgatggagtcctacgaagtggagatcgatgggaagacctaccaagtgaaaccgatacgcaacctgaatgggcacagcattgggcagtatagaatccacgccggtaagacagtgccaatcgtgaagggaggcgaggcaactcgtatggaagaaggagaggtgtacgctattgaaacattcggctccaccgggaagggcgttgtccacgatgacatggagtgttcacattatatgaaaaactttgatgtcggccatgtacccattcgactgccccgaacaaagcatctactgaacgtgatcaatgagaattttggtacgctggcgttctgcagacgatggctggaccggctgggagaaagtaaatacttgatggctctcaagaatctctgcgaccttggaatcgtcgacccatatcctccgctgtgcgatataaaggggtcatatacagcacagttcgagcatacgatcctcctgcgccccacctgtaaagaagttgtgagcagaggcgatgattattag

SEQ ID NO: 168503 - DNA, 1437 bp, Artificial Sequence
  derived and/or modified sequence
atggccggtgtggaggaagtggctgccagcggttcacacctaaatggggatcttgaccccgatgatagggaagagggagctgccagtacggctgaggaggccgcaaagaagaaacggagaaaaaagaagaagtctaagggcccaagtgccgctggcgagcaggaacctgacaaggaatccggcgctagtgtggatgaagtcgcccgtcagttggaaagatccgccctggaagataaggagcgggatgaagacgacgaggacggagatggagacggggacggggcaaccggaaagaaaaagaagaagaaaaagaaaaagcgcggtccaaaagtgcaaaccgacccaccctcggttcccatttgcgatttataccccaatggcgtgttccctaagggacaagaatgcgagtacccgccaacacaggatggacgaaccgccgcatggcgaactacctccgaggagaaaaaagccctggaccaggcttctgaagagatctggaacgatttccgggaggcggcagaagcgcatcggcaggtgcggaagtacgttatgtcctggatcaaaccaggaatgaccatgatagagatttgtgaaaaactggaagactgctcccgcaagttgatcaaagaaaatggattgaacgctgggctggcattccctaccggatgctcactgaacaactgtgcagcccattacactccaaatgccggagacactaccgttctccagtacgacgacatatgcaaaatcgacttcggcactcacatctccgggaggattatagactgcgccttcaccgtgacctttaatcctaagtatgatactttactgaaggcagtaaaggacgccaccaacaccgggataaaatgcgccggtatcgacgttagactctgcgatgtgggtgaggctattcaggaagttatggaatcctacgaggttgagattgacggcaaaacataccaagttaaaccgataaggaacctgaacggtcactccattggccagtatagaatccacgccggaaagaccgtgccaattgtaaaaggcggagaagcaacccgcatggaggaaggcgaagtgtacgcaatcgaaacattcgggtctactgggaaaggagtggtccacgacgatatggagtgcagccattacatgaaaaatttcgacgtcggccatgttcccatccgattgccgcgaactaaacacttgctgaatgtgatcaacgaaaattttggaactctggcattctgcagacgctggttggaccggctaggggaaagtaaatatctgatggcgctgaaaaacctgtgtgatttgggcattgtcgacccatatccccctctttgcgatataaaaggctcctatacggctcagttcgaacacaccatcctactgcggccaacatgtaaagaagtggtgtcccgaggtgacgattattag

SEQ ID NO: 168504 - protein, 758 aa, Artificial Sequence
  derived and/or modified sequence
MLRACQLSGVTAAAQSCLCGKFVLRPLRPCRRYSTSGSSGLTTGKIAGAGLLFVGGGIGGTILYAKWDSHFRESVEKTIPYSDKLFEMVLGPAAYNVPLPKKSIQSGPLKISSVSEVMKESKQPASQLQKQKGDTPASATAPTEAAQIISAAGDTLSVPAPAVQPEESLKTDHPEIGEGKPTPALSEEASSSSIRERPPEEVAARLAQQEKQEQVKIESLAKSLEDALRQTASVTLQAIAAQNAAVQAVNAHSNILKAAMDNSEIAGEKKSAQWRTVEGALKERRKAVDEAADALLKAKEELEKMKSVIENAKKKEVAGAKPHITAAEGKLHNMIVDLDNVVKKVQAAQSEAKVVSQYHELVVQARDDFKRELDSITPEVLPGWKGMSVSDLADKLSTDDLNSLIAHAHRRIDQLNRELAEQKATEKQHITLALEKQKLEEKRAFDSAVAKALEHHRSEIQAEQDRKIEEVRDAMENEMRTQLRRQAAAHTDHLRDVLRVQEQELKSEFEQNLSEKLSEQELQFRRLSQEQVDNFTLDINTAYARLRGIEQAVQSHAVAEEEARKAHQLWLSVEALKYSMKTSSAETPTIPLGSAVEAIKANCSDNEFTQALTAAIPPESLTRGVYSEETLRARFYAVQKLARRVAMIDETRNSLYQYFLSYLQSLLLFPPQQLKPPPELCPEDINTFKLLSYASYCIEHGDLELAAKFVNQLKGESRRVAQDWLKEARMTLETKQIVEILTAYASAVGIGTTQVQPE

SEQ ID NO: 168505 - DNA, 2277 bp, Artificial Sequence
  derived and/or modified sequence
atgctccgggcttgtcaactgtctggcgtgacggccgcggctcaaagctgtctctgtggcaagttcgtacttcgcccccttcggccttgccggcggtactccactagcgggagctccggactgacgacggggaaaatcgctggagcagggctcctgtttgtaggcgggggcatcggaggaactatactgtatgccaagtgggactcccacttccgagagtcagtagagaaaaccattccctacagcgataaactgttcgagatggtgcttggacctgctgcttacaacgtgcccctgcctaagaagagtatccagtccggccccttaaagatctcctctgtgagtgaggtcatgaaggaaagcaagcagcccgccagccagctccagaaacagaagggggatactccggcctctgctaccgctcccactgaggcagcccaaattatcagcgctgccggggacacactcagtgtccccgccccagccgttcagccagaagagtcactaaagactgaccatcctgaaattggggaggggaagcccacgcctgccctctccgaggaggcatcttccagcagcattagggagcgacctcctgaggaggtggctgcacggttggcacagcaagaaaaacaagagcaggtgaaaatcgaatctctagcaaaatctcttgaggacgcacttaggcagaccgcttccgtgaccctgcaggctatcgcagctcaaaacgctgccgtgcaggcggtgaacgcccatagcaatatcctgaaggcagcgatggacaattccgagattgccggcgagaagaaatccgcgcagtggcggacagtcgaaggcgcgctcaaggaacgtcgaaaggctgtggacgaggccgccgacgccctgttaaaagccaaggaagaattggaaaaaatgaagtccgtgatcgagaacgccaaaaaaaaggaagtcgcgggcgccaaacctcacataactgccgcggaaggcaaactccacaatatgatcgtggacttggacaacgtcgtgaaaaaagtgcaagcggcccaaagcgaagccaaagtggtgtcccaataccacgagctggtagtgcaggcgagagacgacttcaagcgagagcttgactcaataactcccgaggttctgccaggttggaaaggtatgagcgtctccgaccttgccgataagctctcaacagatgacctgaactcattgattgctcatgcccataggcgtattgaccagcttaacagagagttggccgagcagaaagcaacagaaaagcaacacataactttggccctggagaagcagaagctggaggagaagagagccttcgattctgccgtcgctaaagccttggagcaccacaggtcagagatccaagccgaacaggatcggaaaatcgaagaagtgagagatgccatggaaaacgaaatgaggacgcagctgcgacggcaagccgccgcacatactgatcatctacgggacgtattgcgggttcaagagcaagagttaaaaagcgagttcgagcagaatttaagcgagaaactgtcagagcaagagctgcagtttagacgacttagccaggaacaggtggacaactttacactcgacatcaacacggcatatgcccgactgagaggcatagaacaggcggttcagtctcatgcagtcgcagaggaggaggccaggaaggcccatcagttgtggctgtctgtggaggcgctaaaatacagtatgaagacctcctctgccgagaccccaacgatccccctgggttctgccgtagaggcaatcaaggccaattgctcggataatgagtttactcaggccctcactgccgccatccctccagagtcgttgacccggggagtctactcagaggaaacattgcgcgcacgcttttacgctgttcaaaagttggcaaggagagtagccatgattgatgaaactagaaactccctctatcagtacttcctgtcgtacttacagtctctattgttattcccgcctcaacagctgaaaccacccccagaattgtgccccgaggatatcaatactttcaaactgctgtcttacgcctcatattgtatagagcatggggatctagagttggcagccaaatttgtcaaccagctgaagggagaaagccggcgtgtggctcaagattggcttaaagaagctcgaatgacgctcgagaccaagcagatcgtggaaattctgaccgcttatgcaagtgccgttggcatcgggaccacacaggtgcagcccgaatag

SEQ ID NO: 168506 - DNA, 3001 bp, Artificial Sequence
  derived and/or modified sequence
aattctctttaagagtcacagctgtccattttccacgtgcggctgaagaatggatttcagagcgctctccctccggcagtgttcacctagtaaccccttccggataaggacctgcagcccgggcgcgacccggaaagggaatccgcccttttcgcctccttcgcgccaatcgcctggagttggcgtttccgcagccgggacacagcccaccctctaagagccgcggagtcggggacggtagaaggggccgcgcgtgcgcagtggcgtccgctgtgcttccggtgcgccgggcgcggacgcgggcacgcacacacgcaagcacgcctccacttaactcgcgccgccgcggcagctcgagtccaccagcagcgccgtccgcttgaccgagatgctgcgggcctgtcagttatcgggtgtgaccgccgccgcccagagttgtctctgtgggaagtttgtcctccgtccattgcgaccatgccgcagatactctacttcaggcagctctgggttgactactggcaaaattgctggagctggccttttgtttgttggtggaggtattggtggcactatcctatatgccaaatgggattcccatttccgggaaagtgtagagaaaaccataccttactcagacaaactcttcgagatggttcttggtcctgcagcttataatgttccattgccaaagaaatcgattcagtcgggtccactaaaaatctctagtgtatcagaagtaatgaaagaatctaaacagcctgcctcacaactccaaaaacaaaagggagatactccagcttcagcaacagcacctacagaagcggctcaaattatttctgcagcaggtgataccctgtcggtcccagcccctgcagttcagcctgaggaatctttaaaaactgatcaccctgaaattggtgaaggaaaacccacacctgcactttcagaagaagcatcctcatcttctataagggagcgaccacctgaagaagttgcagctcgccttgcacaacaggaaaaacaagaacaagttaaaattgagtctctagccaagagcttagaagatgctctgaggcaaactgcaagtgtcactctgcaggctattgcagctcagaatgctgcggtccaggctgtcaatgcacactccaacatattgaaagccgccatggacaattctgagattgcaggcgagaagaaatctgctcagtggcgcacagtggagggtgcattgaaggaacgcagaaaggcagtagatgaagctgccgatgcccttctcaaagccaaagaagagttagagaagatgaaaagtgtgattgaaaatgcaaagaaaaaagaggttgctggggccaagcctcatataactgctgcagagggtaaacttcacaacatgatagttgatctggataatgtggtcaaaaaggtccaagcagctcagtctgaggctaaggttgtatctcagtatcatgagctggtggtccaagctcgggatgactttaaacgagagctggacagtattactccagaagtccttcctgggtggaaaggaatgagtgtttcagacttagctgacaagctctctactgatgatctgaactccctcattgctcatgcacatcgtcgtattgatcagctgaacagagagctggcagaacagaaggccaccgaaaagcagcacatcacgttagccttggagaaacaaaagctggaagaaaagcgggcatttgactctgcagtagcaaaagcattagaacatcacagaagtgaaatacaggctgaacaggacagaaagatagaagaagtcagagatgccatggaaaatgaaatgagaacccagcttcgccgacaggcagctgcccacactgatcacttgcgagatgtccttagggtacaagaacaggaattgaagtctgaatttgagcagaacctgtctgagaaactctctgaacaagaattacaatttcgtcgtctcagtcaagagcaagttgacaactttactctggatataaatactgcctatgccagactcagaggaatcgaacaggctgttcagagccatgcagttgctgaagaggaagccagaaaagcccaccaactctggctttcagtggaggcattaaagtacagcatgaagacctcatctgcagaaacacctactatcccgctgggtagtgcagttgaggccatcaaagccaactgttctgataatgaattcacccaagctttaaccgcagctatccctccagagtccctgacccgtggggtgtacagtgaagagacccttagagcccgtttctatgctgttcaaaaactggcccgaagggtagcaatgattgatgaaaccagaaatagcttgtaccagtacttcctctcctacctacagtccctgctcctattcccacctcagcaactgaagccgcccccagagctctgccctgaggatataaacacatttaaattactgtcatatgcttcctattgcattgagcatggtgatctggagctagcagcaaagtttgtcaatcagctgaagggggaatccagacgagtggcacaggactggctgaaggaagcccgaatgaccctagaaacgaaacagatagtggaaatcctgacagcatatgccagcgccgtaggaataggaaccactcaggtgcagccagagtgaggtttaggaagattttcataaagtcatatttcatgtcaaaggaaatcagcagtgatagatgaagggttcgcagcgagagtcccggacttgtctagaaatgagcaggtttacaagtactgttctaaatgttaacacctgttgcatttatattctttccatttgctatcatgtcagtgaacgccaggagtgctttctttgcaacttgtgtaacattttctgttttttcaggttttactgatgaggcttgtgaggccaatcaaaataatgtttgtgatctctactactgttgattttgccctcggagcaaactgaataaagcaacaagatgaaaactga

SEQ ID NO: 168507 - DNA, 2277 bp, Artificial Sequence
  derived and/or modified sequence
atgctgcgggcctgccagctgagcggcgtgacagctgctgcccagagctgcctgtgtgggaagtttgtgctgcggcccctgcggccctgccgccgctacagcaccagcggcagcagcggcctgaccaccgggaagattgctggagctggcctgctgtttgtgggcggcggcatcggcggcaccatcctgtatgccaagtgggacagccacttccgggagagcgtggagaagaccatcccctacagcgacaagctgtttgagatggtgctgggccctgctgcctacaacgtgcccctgcccaagaagagcatccagagcggccccctgaagatcagctctgtgtctgaggtgatgaaggagagcaagcagcctgccagccagctgcagaagcagaagggggacaccccagccagcgccacagcccccacagaagctgcccagatcatctctgctgctggggacaccctgtctgtgcctgccccagctgtgcagcctgaggagagcctgaagacagaccaccctgagatcggggagggcaagcccaccccagccctgtctgaggaggccagcagcagcagcatccgggagcggcccccagaggaggtggccgcccggctggcccagcaggagaagcaggagcaggtgaagattgagagcctggccaagagcctggaggatgccctgcggcagacagcctctgtgaccctgcaggccatcgccgcccagaatgctgctgtgcaggccgtgaatgcccacagcaacatcctgaaggccgccatggacaacagcgagattgctggggagaagaagagcgcccagtggaggacagtggagggcgccctgaaggagaggaggaaggctgtggatgaagctgctgatgccctgctgaaggccaaggaggagctggagaagatgaagtctgtgattgaaaatgccaagaagaaggaggtggccggggccaagccccacatcacagctgctgagggcaagctgcacaacatgattgtggacctggacaacgtggtgaagaaggtgcaggccgcccagagcgaggccaaggtggtgtcccagtaccacgagctggtggtgcaggccagagatgacttcaagcgggagctggacagcatcaccccagaggtgctgcccggctggaagggcatgtctgtgtctgacctggccgacaagctgagcacagatgacctgaacagcctgattgcccacgcccacagaagaattgaccagctgaaccgggagctggccgagcagaaggccacagagaagcagcacatcaccctggccctggagaagcagaagctggaggagaagagggcctttgattctgctgtggccaaggccctggagcaccacaggtctgagatccaggccgagcaggacaggaagattgaggaggtgagagatgccatggagaatgagatgaggacccagctgcggcggcaggccgccgcccacacagaccacctgagagatgtgctgcgggtgcaggagcaggagctgaagtcagaatttgagcagaacctgtctgagaagctgtctgagcaggagctgcagttccggcggctgagccaggagcaggtggacaacttcaccctggacatcaacacagcctatgcccggctgcggggcatcgagcaggccgtgcagagccatgctgtggccgaggaggaggccaggaaggcccaccagctgtggctgtctgtggaggccctgaagtacagcatgaagaccagcagcgctgagacccccaccatccccctgggcagcgctgtggaggccatcaaggccaactgcagcgacaatgagttcacccaggccctgacagctgccatccccccagagagcctgacccggggcgtgtacagcgaggagaccctgcgggcccgcttctatgctgtgcagaagctggccaggagagtggccatgattgatgagaccaggaacagcctgtaccagtacttcctgagctacctgcagagcctgctgctcttccccccccagcagctgaagcccccacctgagctgtgcccagaggacatcaacaccttcaagctgctgtcctatgccagctactgcatcgagcacggggacctggagctggccgccaagtttgtgaaccagctgaagggggagagccggcgggtggcccaggactggctgaaggaggccaggatgaccctggagaccaagcagatcgtggagatcctgacagcctatgccagcgctgtgggcatcggcaccacccaggtgcagcctgagtag

SEQ ID NO: 168508 - DNA, 2277 bp, Artificial Sequence
  derived and/or modified sequence
atgctgcgggcctgccagctgagcggcgtgaccgccgccgcccagtcctgcctgtgtggaaaattcgttctgcgtcctcttaggccgtgcaggcgctattctacttccggctcatctggattaacgactgggaagatcgccggagctggccttcttttcgtcggtggaggtattggcggcactatactgtatgcaaagtgggactcccattttagggaaagcgtggagaaaactattccctactcagacaagctttttgagatggtgctcgggccggctgcttataatgtgcctctgccaaagaaatcaattcagtccgggccgctaaagattagctccgtgagtgaagttatgaaagagagtaagcagcccgccagtcagctacaaaagcagaaaggggatactcccgcaagcgctaccgcgccgactgaagcagctcaaatcattagcgcggcaggtgacaccctgtcagtcccagctcccgccgttcagccggaggagtccctaaaaacggatcaccccgagatcggagagggcaagcctacacctgcgctgtccgaggaagcctcatcctcatcgattcgtgagcgcccccccgaggaagtggctgcacgactggcacagcaagaaaagcaagagcaggtaaagatcgagtcccttgctaaaagcctcgaagatgcattgcgacagacagcttctgtgacccttcaggcaatcgctgcccagaacgctgcagtgcaagccgtgaatgcccatagtaacatcttgaaagcggcaatggataactccgaaatcgccggcgaaaagaagtctgcccagtggagaacagttgagggtgcactcaaggagcgcaggaaagccgttgacgaggcagctgacgcgctgctgaaggcaaaggaggaattggagaaaatgaagtcggtgatcgaaaatgcaaaaaagaaagaagtagcaggagcaaagccccatatcactgccgcagagggaaagttacataacatgatagtagatctcgataatgtggtgaagaaggtccaagccgcacaatctgaggcgaaagtcgtcagtcagtatcatgagcttgtggtgcaggccagagatgatttcaagcgggaactggactccattacaccagaagtgctgccaggctggaagggcatgtccgtatctgacttggccgacaagctgtcaactgatgacctcaattccttgatcgcccatgctcaccgtcgcatagaccagctgaaccgggaactagccgagcagaaggctacagagaagcaacacatcaccctggccctggagaagcagaagttagaggagaagagagcgtttgactccgcagtggccaaagcgttagagcatcaccggtccgagatccaggctgaacaggatcggaagatcgaagaagtgagggacgccatggagaatgaaatgagaacccaactccggcgccaggctgccgcccacactgaccacttgcgcgatgtcctgagggtgcaggagcaggagttaaagagtgagtttgaacagaacctaagcgagaaattgtctgagcaagagctgcagtttaggagactctctcaagaacaggtggacaattttaccttggacataaatacagcttacgcacgattgcgaggaatcgagcaggctgtccagtcccacgctgtcgccgaggaggaggctcgcaaggcacaccagttatggctcagtgtggaagccctgaagtactccatgaagacgtcgtctgctgagaccccaacgatccctctgggctcagctgtggaggctattaaggcaaactgttcagataacgagtttacacaggccttaacagctgctattccacccgagtccctcacccgcggagtttactctgaagaaacattgagggcccgtttttatgccgtgcagaagctggcaaggcgcgtggccatgatcgacgaaacaagaaactctctgtaccagtacttcctttcttatctgcagtcactcttactatttccaccacagcagcttaagccaccacccgaactgtgcccagaagacatcaatacatttaaacttctaagctacgcgtcctattgcatcgagcatggagacctggagctggccgccaaatttgtaaaccagctgaaaggcgaatccaggagagtggcacaagattggctgaaggaagcccgaatgaccctagagaccaagcagattgtcgagattctcactgcatatgcaagtgctgtgggtataggaaccacgcaggtacaacctgagtag

SEQ ID NO: 168509 - DNA, 2277 bp, Artificial Sequence
  derived and/or modified sequence
atgctcagggcttgtcagctgagcggtgttaccgcagcagcgcaatcctgcctttgcgggaaattcgtgcttagaccactacgaccttgcaggagatactcgaccagcgggtcaagcggactgaccaccgggaaaattgctggagctggcttgctttttgtcggtgggggtattggcggaacaattctgtatgccaaatgggacagccatttccgggagtcagtggagaagacaatcccctactccgacaaacttttcgagatggtgctcggtcctgccgcttacaatgtccccctcccaaaaaagtcaatccagagtgggcctctgaagattagctccgttagcgaagtgatgaaggagtcaaagcagccggcatctcaactgcagaagcagaagggtgacactcctgccagcgcaaccgcgccaaccgaggcggctcagattatctccgccgcaggagataccctgagtgtcccagcacccgcagtgcagccggaggaatcccttaagaccgatcaccccgaaatcggagagggtaagccgacaccagccctgtccgaggaggcaagcagcagctcgatacgggaacgccctcccgaagaagtggctgctcggctagcccagcaggagaagcaggaacaagttaagatcgaatccctcgccaagtccctggaagatgccttgaggcagacagcatcagtgacgctccaggcaattgcagcgcagaacgccgctgtgcaggctgtgaacgcgcactccaacattttaaaagcagccatggataattccgaaatcgcaggcgagaaaaagagcgcccaatggaggaccgtggagggtgctttgaaggagcgtcgcaaagccgtggatgaggccgctgacgctctcttgaaggccaaggaagagttggagaagatgaagagcgttattgaaaatgcgaagaagaaggaggtggcgggagcgaaaccacacattacggcagcagaagggaaactccataatatgatcgtcgacctggacaacgtggtaaagaaggtgcaggcagctcagtccgaggccaaagtggtgagccagtatcacgagcttgtggtccaagccagagatgacttcaaacgggaattggactcaattacccccgaggtgctccccggatggaagggaatgagcgtcagcgatcttgctgataaactgtcaacggacgacctcaatagcttgatcgcacacgcccatcgccgaattgatcaactaaacagggaacttgccgaacagaaagctactgaaaagcaacacataacccttgcgctggaaaaacagaaattggaagagaagagggcgttcgatagtgcagtagccaaagccctcgaacatcatcgctccgagatccaagccgaacaggatcggaaaatagaggaggtgcgcgatgcgatggaaaacgaaatgaggacacagttacggcgacaagccgctgcccatacagaccatcttcgggacgtgctgcgtgttcaggagcaggaactgaaaagcgagtttgagcaaaatctgtcagagaagctgtcggagcaagagttgcagtttcgacgtctgagtcaagaacaggtggataactttactcttgatatcaatacagcatacgccaggctgcgcggtattgagcaggctgttcaaagccacgcagttgccgaggaagaggctcgcaaagcacatcagctgtggctgagcgtcgaagccctgaaatatagcatgaaaacctctagcgccgagacaccaaccatccccctcggcagtgccgtggaggctatcaaagcaaattgttccgataacgagttcacccaggccctcaccgctgcgattcctccagaaagtctcacgaggggcgtctattcagaggagactctgcgagccagattttacgctgtacagaagctggcacgcagagtggccatgatagacgagacaagaaatagtctgtatcagtactttctttcatacttacagagcctccttctgttccctccccagcagttaaagcctcctcctgagctgtgccccgaagacatcaacacatttaagctcctttcctatgctagttactgtattgaacatggggacctcgagctggcagccaaattcgttaaccagctgaagggagagtcccggagggtggctcaggactggttgaaggaggcacgaatgaccctggagacaaagcagattgtcgagatactgaccgcctatgcaagcgctgtgggaatcggcacaacacaagtccagcctgaatag

SEQ ID NO: 168510 - DNA, 2277 bp, Artificial Sequence
  derived and/or modified sequence
atgctgagagcctgccagctgagcggcgtgaccgccgccgcccagagctgcctgtgcggcaagttcgtgctgagacccctgagaccctgcagaagatacagcaccagcggcagcagcggcctgaccaccggcaagatcgccggcgccggcctgctgttcgtgggcggcggcatcggcggcaccatcctgtacgccaagtgggacagccacttcagagagagcgtggagaagaccatcccctacagcgacaagctgttcgagatggtgctgggccccgccgcctacaacgtgcccctgcccaagaagagcatccagagcggccccctgaagatcagcagcgtgagcgaggtgatgaaggagagcaagcagcccgccagccagctgcagaagcagaagggcgacacccccgccagcgccaccgcccccaccgaggccgcccagatcatcagcgccgccggcgacaccctgagcgtgcccgcccccgccgtgcagcccgaggagagcctgaagaccgaccaccccgagatcggcgagggcaagcccacccccgccctgagcgaggaggccagcagcagcagcatcagagagagaccccccgaggaggtggccgccagactggcccagcaggagaagcaggagcaggtgaagatcgagagcctggccaagagcctggaggacgccctgagacagaccgccagcgtgaccctgcaggccatcgccgcccagaacgccgccgtgcaggccgtgaacgcccacagcaacatcctgaaggccgccatggacaacagcgagatcgccggcgagaagaagagcgcccagtggagaaccgtggagggcgccctgaaggagagaagaaaggccgtggacgaggccgccgacgccctgctgaaggccaaggaggagctggagaagatgaagagcgtgatcgagaacgccaagaagaaggaggtggccggcgccaagccccacatcaccgccgccgagggcaagctgcacaacatgatcgtggacctggacaacgtggtgaagaaggtgcaggccgcccagagcgaggccaaggtggtgagccagtaccacgagctggtggtgcaggccagagacgacttcaagagagagctggacagcatcacccccgaggtgctgcccggctggaagggcatgagcgtgagcgacctggccgacaagctgagcaccgacgacctgaacagcctgatcgcccacgcccacagaagaatcgaccagctgaacagagagctggccgagcagaaggccaccgagaagcagcacatcaccctggccctggagaagcagaagctggaggagaagagagccttcgacagcgccgtggccaaggccctggagcaccacagaagcgagatccaggccgagcaggacagaaagatcgaggaggtgagagacgccatggagaacgagatgagaacccagctgagaagacaggccgccgcccacaccgaccacctgagagacgtgctgagagtgcaggagcaggagctgaagagcgagttcgagcagaacctgagcgagaagctgagcgagcaggagctgcagttcagaagactgagccaggagcaggtggacaacttcaccctggacatcaacaccgcctacgccagactgagaggcatcgagcaggccgtgcagagccacgccgtggccgaggaggaggccagaaaggcccaccagctgtggctgagcgtggaggccctgaagtacagcatgaagaccagcagcgccgagacccccaccatccccctgggcagcgccgtggaggccatcaaggccaactgcagcgacaacgagttcacccaggccctgaccgccgccatcccccccgagagcctgaccagaggcgtgtacagcgaggagaccctgagagccagattctacgccgtgcagaagctggccagaagagtggccatgatcgacgagaccagaaacagcctgtaccagtacttcctgagctacctgcagagcctgctgctgttccccccccagcagctgaagcccccccccgagctgtgccccgaggacatcaacaccttcaagctgctgagctacgccagctactgcatcgagcacggcgacctggagctggccgccaagttcgtgaaccagctgaagggcgagagcagaagagtggcccaggactggctgaaggaggccagaatgaccctggagaccaagcagatcgtggagatcctgaccgcctacgccagcgccgtgggcatcggcaccacccaggtgcagcccgagtag

SEQ ID NO: 168511 - protein, 590 aa, Artificial Sequence
  derived and/or modified sequence
MTLTLSVLICLGLSVGPRTCVQAGTLPKPTLWAEPASVIARGKPVTLWCQGPLETEEYRLDKEGLPWARKRQNPLEPGAKAKFHIPSTVYDSAGRYRCYYETPAGWSEPSDPLELVATGFYAEPTLLALPSPVVASGGNVTLQCDTLDGLLTFVLVEEEQKLPRTLYSQKLPKGPSQALFPVGPVTPSCRWRFRCYYYYRKNPQVWSNPSDLLEILVPGVSRKPSLLIPQGSVVARGGSLTLQCRSDVGYDIFVLYKEGEHDLVQGSGQQPQAGLSQANFTLGPVSRSHGGQYRCYGAHNLSPRWSAPSDPLDILIAGLIPDIPALSVQPGPKVASGENVTLLCQSWHQIDTFFLTKEGAAHPPLCLKSKYQSYRHQAEFSMSPVTSAQGGTYRCYSAIRSYPYLLSSPSYPQELVVSGPSGDPSLSPTGSTPTPGPEDQPLTPTGLDPQSGLGRHLGVVTGVSVAFVLLLFLLLFLLLRHRHQSKHRTSAHFYRPAGAAGPEPKDQGLQKRASPVADIQEEILNAAVKDTQPKDGVEMDARAAASEAPQDVTYAQLHSLTLRREATEPPPSQEREPPAEPSIYAPLAIH

SEQ ID NO: 168512 - DNA, 1773 bp, Artificial Sequence
  derived and/or modified sequence
atgacactgactctctcagtattgatttgcctcggattgtctgttggaccaagaacttgtgtgcaggcaggaacattacctaagccaacgctctgggcggagcctgcctctgtgattgcaaggggaaaacccgttactctctggtgtcaaggcccccttgaaaccgaagaataccgcctcgataaggaaggactgccctgggcgagaaaacgacagaatcctcttgaaccgggagcgaaggccaagtttcatatacccagcacagtctatgattccgctggacggtaccgatgctactacgagactcctgcgggatggtccgagccatcagacccgcttgaactagtcgcaaccgggttctacgcagagcctactcttttggcactgccaagtcctgtcgtggcctctgggggaaatgttacactacagtgcgacaccttagacggcttgctgaccttcgttctggtggaagaagagcagaaactgcctcggactttgtattcccagaagctgcccaagggaccatctcaagccttgtttccagtggggccggtcactcctagttgcagatggcggttccgatgctactactactacagaaagaatccgcaggtctggtccaatccatctgacttgttagaaatcctcgtgccaggagtgagccggaagccttcactccttatcccccagggcagtgttgttgcgagaggcgggtcgctaacactgcaatgcaggagtgacgtgggatacgatatatttgtgctttataaagaaggcgaacatgacctcgtgcaggggtcaggccagcagccccaggccggactgagccaggctaatttcaccttaggtcccgtatccaggagccacggcggacagtatcgctgttacggcgcccacaatctgagcccgcgctggtccgcaccaagtgatcccctggatatcctaatcgccggactgataccggatataccggccctctcagtacagccgggaccaaaagtggcgagtggagaaaacgtgacgctcctttgtcagtcttggcatcagatcgacaccttctttttaaccaaagaaggagcagctcatccccctctgtgtttaaagagcaaataccagtcttataggcaccaagccgagttctctatgagtcctgtgacgagcgctcaaggcggaacctacagatgttattctgcgataaggtcctatccctatctgctgtcttctccatcttacccccaggagctggttgtatcagggcctagcggcgacccaagtctgtccccgacaggatccacccccacccctggccccgaagatcagcccctgactcctactggacttgacccacagagcgggttggggcgccacctcggggtggtgactggcgtttctgtggccttcgtcttactgttgtttctcctgttgttccttctgctcagacaccgacaccaaagcaaacatagaactagcgcacatttctatcgtcccgccggagccgccggtcccgagccaaaagatcaaggtcttcagaagagagctagcccagttgcagatattcaagaagaaatcttgaacgcagccgtgaaagacacgcagcccaaagacggcgtcgaaatggatgccagagccgctgcttctgaagcgcctcaggatgtgacatacgcccagctgcattccctgacattgcggagggaggctacagagcctcctccaagccaggagcgtgagccccccgccgaaccttccatctacgcaccactagcaatccattag

SEQ ID NO: 168513 - DNA, 1773 bp, Artificial Sequence
  derived and/or modified sequence
atgaccctgaccctgtctgtgctgatctgcctgggcctgtctgtgggccccaggacctgtgtgcaggccggcaccctgcccaagcccaccctgtgggccgagcccgcctctgtgattgcccggggcaagcctgtgaccctgtggtgccagggccccctggagacagaggagtaccgcctggacaaggagggcctgccctgggccaggaagaggcagaaccccctggagcccggggccaaggccaagttccacatccccagcacagtgtatgacagcgctggccgctaccgctgctactatgagaccccagctggctggagcgagcccagcgaccccctggagctggtggccaccggcttctacgccgagcccaccctgctggccctgcccagccctgtggtggccagcggcggcaatgtgaccctgcagtgtgacaccctggatggcctgctgacctttgtgctggtggaggaggagcagaagctgcccaggaccctgtacagccagaagctgcccaagggccccagccaggccctcttccctgtgggccctgtgacccccagctgccgctggaggttccgctgctactactactacaggaagaacccccaggtgtggagcaaccccagcgacctgctggagatcctggtgcctggggtgtccaggaagcccagcctgctgatcccccagggctctgtggtggcccggggcggcagcctgaccctgcagtgccgcagtgatgtgggctatgacatctttgtgctgtacaaggagggggagcatgacctggtgcagggcagcggccagcagccccaggccggcctgagccaggccaacttcaccctgggccctgtgagccgcagccatggaggccagtaccgctgctacggggcccacaacctgagcccccgctggagcgcccccagcgaccccctggacatcctgattgctggcctcatcccagacatcccagccctgtctgtgcagcccggccccaaggtggccagcggggagaatgtgaccctgctgtgccagagctggcaccagattgacaccttcttcctgaccaaggagggcgccgcccacccccccctgtgcctgaagagcaagtaccagagctaccgccaccaggccgagttctccatgagccctgtgaccagcgcccagggcggcacctaccgctgctacagcgccatccgcagctacccctacctgctgagcagccccagctacccccaggagctggtggtgtctggccccagcggggaccccagcctgagccccaccggcagcacccccaccccaggccctgaggaccagcccctgacccccaccggcctggacccccagagcggcctgggccgccacctgggcgtggtgactggagtgtctgtggcctttgtgctgctgctcttcctgctgctcttcctgctgctgcggcaccgccaccagagcaagcacaggaccagcgcccacttctacagacctgctggagctgctggccctgagcccaaggaccagggcctgcagaagagggccagccctgtggccgacatccaggaggagatcctgaatgctgctgtgaaggacacccagcccaaggatggagtggagatggatgcccgggccgccgccagcgaggccccccaggatgtgacctacgcccagctgcacagcctgaccctgcggcgggaggccacagagcccccacccagccaggagcgggagcccccagctgagcccagcatctatgcccccctggccatccactag

SEQ ID NO: 168514 - DNA, 2268 bp, Artificial Sequence
  derived and/or modified sequence
gtgacagggagaacccagcctccagtccacactctgcgtgtttttgtgtcctgccaggcaccgtggtctcatccgcctgcacagctgagtccagtgggagctgacgccatgaccctcaccctctcagtcctgatttgcctcgggctgagtgtgggccccaggacctgcgtgcaggcaggcaccctccccaaacccaccctctgggctgagccagcctctgtgatagctcgggggaagcccgtgaccctctggtgtcaggggcccctggagactgaggagtaccgtctggataaggagggactcccatgggcccggaagagacagaacccactggagcctggagccaaggccaagttccacattccatccacggtgtatgacagtgcagggcgataccgctgctactatgagacccctgcaggctggtcagagcccagtgaccccctggagctggtggcgacaggattctatgcagaacccactcttttagccctgccgagtcctgtggtggcctcaggaggaaatgtgaccctccagtgtgatacactggacggacttctcacgtttgttcttgttgaggaagaacagaagctccccaggaccctgtactcacagaagctccccaaagggccatcccaggccctgttccctgtgggtcccgtgacccccagctgcaggtggaggttcagatgctattactattacaggaaaaaccctcaggtgtggtcgaaccccagtgacctcctggagattctggtcccaggcgtgtctaggaagccctccctcctgatcccgcagggctctgtcgtggcccgcggaggcagcctgaccctgcagtgtcgctctgatgtcggctatgacatattcgttctgtacaaggagggggaacatgacctcgtccagggctctggccagcagccccaggctgggctctcccaggccaacttcaccctgggccctgtgagccgctcccacgggggccagtacagatgctacggtgcacacaacctctcccctaggtggtcggcccccagcgaccccctggacatcctgatcgcaggactgatccctgacatacccgccctctcggtgcagccgggccccaaggtggcctcaggagagaacgtgaccctgctgtgtcagtcatggcatcagatagacactttctttttgaccaaggagggggcagcccatcccccgctgtgtctaaagtcaaagtaccagtcttatagacaccaggctgaattctccatgagtcctgtgacctcagcccagggtggaacctaccgatgctacagcgcaatcaggtcctacccctacctgctgtccagccctagttacccccaggagctcgtggtctcaggaccctctggggatcccagcctctcacctacaggctccacccccacacctggccctgaggaccagcccctcacccccacggggttggatccccagagtggtctgggaaggcacctgggggttgtgactggggtctcagtggccttcgtcctgctgctgttcctcctcctcttcctcctcctccgacatcggcatcagagcaaacacaggacatcggcccatttctaccgtcctgcaggggctgcggggccagagcccaaggaccagggcctgcagaagagggccagcccagttgctgacatccaggaggaaattctcaatgctgccgtgaaggacacacagcccaaggacggggtggagatggatgctcgggctgctgcatctgaagccccccaggatgtgacctacgcccagctacacagcttgaccctcagacgggaggcaactgagcctcctccatcccaggaaagggaacctccagctgaacccagcatctacgcccccctggccatccactagcccacgggggacccagatctcatactcaacagaaggagactcagagactccagaaggcacaggagctgcccccagtggacaccaatgaaccccagccagcctggacccctaacaaagaccaccaggacatcctgggaactctgggactcactagattctgcagtcaaagatgactaatatccttgcatttttgaaatgaagccacagacttctcaataaatcaatgagctgagaaaactgaaacagaaattagagcatggtataaatttggaatgataatgtaaatattacacattaaatgatgaaatcggaaaactacaaatgagcgaatgaattagaaaagaataaaacctacgtaattaatgaccttggcaatgacagaaagaa

SEQ ID NO: 168515 - DNA, 1773 bp, Artificial Sequence
  derived and/or modified sequence
atgaccctgaccctgagcgtgctgatctgcctgggcctgagcgtgggccctcgaacttgcgtccaggctggcaccttgccaaaaccaactctctgggccgaacccgcctcagtgattgcgagagggaaacctgtgaccctgtggtgccaggggcctctggagacagaggagtataggctcgacaaggagggcttaccatgggcgagaaagcggcaaaaccccctggaacccggcgcaaaggctaaatttcatataccatccaccgtgtacgatagcgctgggagataccgttgttactatgaaacgccagcgggatggtcagagccctccgacccgttggagctggtggcaacagggttttacgcggaacccacattgctggccctgccctctccagtggtagcttccggtggcaacgtgactttgcagtgcgataccctggacggcttattgacgttcgtcctcgtggaggaggaacagaagctcccccgaaccctgtattcacagaagttgcccaaaggaccctcccaagccctgtttcctgtcggcccagtaaccccatcctgtcggtggcgcttccgatgctactattactatcgcaagaatcctcaggtatggtcaaacccatccgacttgctagaaattctagtccctggagtgagccgcaagcccagcctgcttatcccacagggatccgttgtagcaaggggaggtagtctgacgctccaatgcaggtcagatgtggggtacgatatcttcgttttatacaaagagggcgagcacgatctggtccaaggatctggccagcaacctcaggctggtttgagccaggcgaatttcacacttgggccggtgtctcgaagtcatgggggtcagtatcgatgctacggcgcccacaacctttctccacgatggagcgctccatctgaccctttggacatcctaatagcggggctgattccggacattcccgccctgagcgtgcagcctggccctaaggtcgcaagcggtgagaacgtgaccttactgtgtcagtcatggcatcaaatagatacattttttctgaccaaggagggtgccgcacatcccccactctgcctgaagtctaagtatcaatcataccgacatcaggcagaattttcaatgtccccggtgactagtgcacaggggggcacttacagatgctatagtgcaattcgctcatatccttacctgctgagcagtccgtcttatcctcaggagcttgtcgtttcaggcccaagcggagatccaagcctcagcccaaccgggagcacccctactcccggtcctgaggatcagcctctcactccaaccggcttagatccccagagcggactcggccgccatctaggtgtcgtgactggggtctcagtggccttcgtgctgctgctgttcctcctgcttttcttgctattacgacaccggcaccagtcaaagcaccgcaccagcgctcacttctatcgccccgccggcgcagcaggccccgagccaaaggatcagggtctgcagaaacgggcttctccagtagcggatatccaagaggagatccttaatgccgcagtcaaggatactcagcctaaagacggagtagaaatggatgctagggccgctgccagtgaagccccacaggacgttacctacgcccaattgcattccctgaccctgaggagagaggccaccgaacctcctccatcacaggagcgcgagccgccagctgagccgtccatttacgccccgctggccatacattag

SEQ ID NO: 168516 - DNA, 1773 bp, Artificial Sequence
  derived and/or modified sequence
atgaccttgacactgagcgtgctgatctgcctcgggctttctgttggtccaagaacgtgtgttcaggctggaaccctgccaaagcccaccttgtgggcagagccggcatcagtaatcgcccgtgggaagcccgtgacactgtggtgccaaggtcctttggaaactgaggaatatcgcttggacaaagaggggctcccttgggccagaaaacgtcagaatccactggaacctggggcaaaagccaagtttcatataccatctaccgtttacgacagcgcaggtcggtacaggtgttactatgaaacccctgccggatggtccgaaccatccgatccactggagctggtcgccacagggttttacgctgagcccacgttgttggcactaccgtcaccagttgtggcgtccggaggcaacgtcaccctgcaatgcgacactctcgacggtctgctgacattcgtcttggtggaggaggaacagaagcttcccaggaccctctactctcagaagctcccgaaagggccatctcaggcgttatttcctgttggacctgtgactccatcctgtcgatggcggtttaggtgttattattattatagaaagaatcctcaagtgtggtcaaacccatccgaccttctggagattcttgtgccaggcgtttccagaaaacccagcttgctcattcctcaaggaagcgtggtggcccgaggaggttcccttactttgcagtgccgaagcgacgtagggtacgatatattcgtgctgtataaagagggtgagcacgacctcgtccagggaagtgggcagcagccgcaggcaggactgagccaggccaactttaccctgggacccgtttccagaagtcacggaggtcaatacagatgttatggcgctcataatctgtcaccaaggtggagtgccccatctgatcctctcgacattctgatcgcaggtctgattcccgacatcccggctttgtcagtacagcccggtcctaaagtcgcgtcaggtgagaacgttacgttactctgccaatcctggcaccagatcgatacattctttctgaccaaggagggcgctgcccaccctccactgtgtctcaagagcaaatatcagtcctatcgccaccaagctgaatttagcatgtcaccggtgacatctgcccagggtggtacctatcgatgctattctgctatccggtcttacccatatctgctctcaagtccatcctatccacaggaattggtagtttccgggccttccggtgatccttccctatctcctactggctccacccctaccccagggccagaagatcagccactgaccccaaccggtctggatccgcagagcggcctcggcaggcacttgggcgtagttacaggggtctctgttgcgtttgtgttgctgctgttcctgctcctcttcttgctcctgaggcatcggcaccaatccaagcaccgaacgtccgcacatttctaccgcccagccggagccgcagggcctgagcctaaagatcagggactgcaaaagagggctagtcctgtggcagatatccaggaagagattctcaatgctgcagtgaaggatacacagcctaaagacggtgtggagatggacgcccgagctgccgctagcgaggcccctcaggatgtgacctacgctcagctccattccctgacactccgcagggaggcgactgaaccccctccttcacaggaacgcgaaccacctgctgaaccctcaatttacgctcccctggctattcactag

SEQ ID NO: 168517 - DNA, 1773 bp, Artificial Sequence
  derived and/or modified sequence
atgaccctgaccctgagcgtgctgatctgcctgggcctgagcgtgggccccagaacctgcgtgcaggccggcaccctgcccaagcccaccctgtgggccgagcccgccagcgtgatcgccagaggcaagcccgtgaccctgtggtgccagggccccctggagaccgaggagtacagactggacaaggagggcctgccctgggccagaaagagacagaaccccctggagcccggcgccaaggccaagttccacatccccagcaccgtgtacgacagcgccggcagatacagatgctactacgagacccccgccggctggagcgagcccagcgaccccctggagctggtggccaccggcttctacgccgagcccaccctgctggccctgcccagccccgtggtggccagcggcggcaacgtgaccctgcagtgcgacaccctggacggcctgctgaccttcgtgctggtggaggaggagcagaagctgcccagaaccctgtacagccagaagctgcccaagggccccagccaggccctgttccccgtgggccccgtgacccccagctgcagatggagattcagatgctactactactacagaaagaacccccaggtgtggagcaaccccagcgacctgctggagatcctggtgcccggcgtgagcagaaagcccagcctgctgatcccccagggcagcgtggtggccagaggcggcagcctgaccctgcagtgcagaagcgacgtgggctacgacatcttcgtgctgtacaaggagggcgagcacgacctggtgcagggcagcggccagcagccccaggccggcctgagccaggccaacttcaccctgggccccgtgagcagaagccacggcggccagtacagatgctacggcgcccacaacctgagccccagatggagcgcccccagcgaccccctggacatcctgatcgccggcctgatccccgacatccccgccctgagcgtgcagcccggccccaaggtggccagcggcgagaacgtgaccctgctgtgccagagctggcaccagatcgacaccttcttcctgaccaaggagggcgccgcccacccccccctgtgcctgaagagcaagtaccagagctacagacaccaggccgagttcagcatgagccccgtgaccagcgcccagggcggcacctacagatgctacagcgccatcagaagctacccctacctgctgagcagccccagctacccccaggagctggtggtgagcggccccagcggcgaccccagcctgagccccaccggcagcacccccacccccggccccgaggaccagcccctgacccccaccggcctggacccccagagcggcctgggcagacacctgggcgtggtgaccggcgtgagcgtggccttcgtgctgctgctgttcctgctgctgttcctgctgctgagacacagacaccagagcaagcacagaaccagcgcccacttctacagacccgccggcgccgccggccccgagcccaaggaccagggcctgcagaagagagccagccccgtggccgacatccaggaggagatcctgaacgccgccgtgaaggacacccagcccaaggacggcgtggagatggacgccagagccgccgccagcgaggccccccaggacgtgacctacgcccagctgcacagcctgaccctgagaagagaggccaccgagcccccccccagccaggagagagagccccccgccgagcccagcatctacgcccccctggccatccactag

SEQ ID NO: 168518 - protein, 895 aa, Artificial Sequence
  derived and/or modified sequence
MATEHPEPPKAELQLPPPPPPGHYGAWAAQELQAKLAEIGAPIQGNREELVERLQSYTRQTGIVLNRPVLRGEDGDKAAPPPMSAQLPGIPMPPPPLGLPPLQPPPPPPPPPPGLGLGFPMAHPPNLGPPPPLRVGEPVALSEEERLKLAQQQAALLMQQEERAKQQGDHSLKEHELLEQQKRAAVLLEQERQQEIAKMGTPVPRPPQDMGQIGVRTPLGPRVAAPVGPVGPTPTVLPMGAPVPRPRGPPPPPGDENREMDDPSVGPKIPQALEKILQLKESRQEEMNSQQEEEEMETDARSSLGQSASETEEDTVSVSKKEKNRKRRNRKKKKKPQRVRGVSSESSGDREKDSTRSRGSDSPAADVEIEYVTEEPEIYEPNFIFFKRIFEAFKLTDDVKKEKEKEPEKLDKLENSAAPKKKGFEEEHKDSDDDSSDDEQEKKPEAPKLSKKKLRRMNRFTVAELKQLVARPDVVEMHDVTAQDPKLLVHLKATRNSVPVPRHWCFKRKYLQGKRGIEKPPFELPDFIKRTGIQEMREALQEKEEQKTMKSKMREKVRPKMGKIDIDYQKLHDAFFKWQTKPKLTIHGDLYYEGKEFETRLKEKKPGDLSDELRISLGMPVGPNAHKVPPPWLIAMQRYGPPPSYPNLKIPGLNSPIPESCSFGYHAGGWGKPPVDETGKPLYGDVFGTNAAEFQTKTEEEEIDRTPWGELEPSDEESSEEEEEEESDEDKPDETGFITPADSGLITPGGFSSVPAGMETPELIELRKKKIEEAMDGSETPQLFTVLPEKRTATVGGAMMGSTHIYDMSTVMSRKGPAPELQGVEVALAPEELELDPMAMTQKYEEHVREQQAQVEKEDFSDMVAEHAAKQKQKKRKAQPQDSRGGSKKYKEFKF

SEQ ID NO: 168519 - DNA, 2688 bp, Artificial Sequence
  derived and/or modified sequence
atggccaccgagcaccccgagccccccaaggccgagctgcagctgccccccccccccccccccggccactacggcgcctgggccgcccaggagctgcaggccaagctggccgagatcggcgcccccatccagggcaacagagaggagctggtggagagactgcagagctacaccagacagaccggcatcgtgctgaacagacccgtgctgagaggcgaggacggcgacaaggccgcccccccccccatgagcgcccagctgcccggcatccccatgccccccccccccctgggcctgccccccctgcagccccccccccccccccccccccccccccccggcctgggcctgggcttccccatggcccacccccccaacctgggcccccccccccccctgagagtgggcgagcccgtggccctgagcgaggaggagagactgaagctggcccagcagcaggccgccctgctgatgcagcaggaggagagagccaagcagcagggcgaccacagcctgaaggagcacgagctgctggagcagcagaagagagccgccgtgctgctggagcaggagagacagcaggagatcgccaagatgggcacccccgtgcccagacccccccaggacatgggccagatcggcgtgagaacccccctgggccccagagtggccgcccccgtgggccccgtgggccccacccccaccgtgctgcccatgggcgcccccgtgcccagacccagaggccccccccccccccccggcgacgagaacagagagatggacgaccccagcgtgggccccaagatcccccaggccctggagaagatcctgcagctgaaggagagcagacaggaggagatgaacagccagcaggaggaggaggagatggagaccgacgccagaagcagcctgggccagagcgccagcgagaccgaggaggacaccgtgagcgtgagcaagaaggagaagaacagaaagagaagaaacagaaagaagaagaagaagccccagagagtgagaggcgtgagcagcgagagcagcggcgacagagagaaggacagcaccagaagcagaggcagcgacagccccgccgccgacgtggagatcgagtacgtgaccgaggagcccgagatctacgagcccaacttcatcttcttcaagagaatcttcgaggccttcaagctgaccgacgacgtgaagaaggagaaggagaaggagcccgagaagctggacaagctggagaacagcgccgcccccaagaagaagggcttcgaggaggagcacaaggacagcgacgacgacagcagcgacgacgagcaggagaagaagcccgaggcccccaagctgagcaagaagaagctgagaagaatgaacagattcaccgtggccgagctgaagcagctggtggccagacccgacgtggtggagatgcacgacgtgaccgcccaggaccccaagctgctggtgcacctgaaggccaccagaaacagcgtgcccgtgcccagacactggtgcttcaagagaaagtacctgcagggcaagagaggcatcgagaagccccccttcgagctgcccgacttcatcaagagaaccggcatccaggagatgagagaggccctgcaggagaaggaggagcagaagaccatgaagagcaagatgagagagaaggtgagacccaagatgggcaagatcgacatcgactaccagaagctgcacgacgccttcttcaagtggcagaccaagcccaagctgaccatccacggcgacctgtactacgagggcaaggagttcgagaccagactgaaggagaagaagcccggcgacctgagcgacgagctgagaatcagcctgggcatgcccgtgggccccaacgcccacaaggtgccccccccctggctgatcgccatgcagagatacggccccccccccagctaccccaacctgaagatccccggcctgaacagccccatccccgagagctgcagcttcggctaccacgccggcggctggggcaagccccccgtggacgagaccggcaagcccctgtacggcgacgtgttcggcaccaacgccgccgagttccagaccaagaccgaggaggaggagatcgacagaaccccctggggcgagctggagcccagcgacgaggagagcagcgaggaggaggaggaggaggagagcgacgaggacaagcccgacgagaccggcttcatcacccccgccgacagcggcctgatcacccccggcggcttcagcagcgtgcccgccggcatggagacccccgagctgatcgagctgagaaagaagaagatcgaggaggccatggacggcagcgagaccccccagctgttcaccgtgctgcccgagaagagaaccgccaccgtgggcggcgccatgatgggcagcacccacatctacgacatgagcaccgtgatgagcagaaagggccccgcccccgagctgcagggcgtggaggtggccctggcccccgaggagctggagctggaccccatggccatgacccagaagtacgaggagcacgtgagagagcagcaggcccaggtggagaaggaggacttcagcgacatggtggccgagcacgccgccaagcagaagcagaagaagagaaaggcccagccccaggacagcagaggcggcagcaagaagtacaaggagttcaagttctag

SEQ ID NO: 168520 - DNA, 2400 bp, Artificial Sequence
  derived and/or modified sequence
gccaagatggccaccgagcaccccgagccccccaaggccgagctgcagctgccccccccccccccccccggccactacggcgcctgggccgcccaggagctgcaggccaagctggccgagatcggcgcccccatccagggcaacagagaggagctggtggagagactgcagagctacaccagacagaccggcatcgtgctgaacagacccgtgctgagaggcgaggacggcgacaaggccgcccccccccccatgagcgcccagctgcccggcatccccatgccccccccccccctgggcctgccccccctgcagccccccccccccccccccccccccccccccggcctgggcctgggcttccccatggcccacccccccaacctgggcccccccccccccctgagagtgggcgagcccgtggccctgagcgaggaggagagactgaagctggcccagcagcaggccgccctgctgatgcagcaggaggagagagccaagcagggcgaccacagcctgaaggagcacgagctgctggagcagcagaagagagccgccgtgctgctggagcaggagagacagcaggaggaggaggagatggagaccgacgccagaagcagcctgggccagagcgccagcgagaccgaggaggacaccgtgagcgtgagcaagaaggagaagaacagaaagagaagaaacagaaagaagaagaagaagccccagagagtgagaggcgtgagcagcgagagcagcggcgacagagagaaggacagcaccagaagcagaggcagcgacagccccgccgccgacgtggagatcgagtacgtgaccgaggagcccgagatctacgagcccaacttcatcttcttcaagagaatcttcgaggccttcaagctgaccgacgacgtgaagaaggagaaggagaaggagcccgagaagctggacaagctggagaacagcgccgcccccaagaagaagggcttcgaggaggagcacaaggacagcgacgacgacagcagcgacgacgagcaggagaagaagcccgaggcccccaagctgagcaagaagaagctgagaagaatgaacagattcaccgtggccgagctgaagcagctggtggccagacccgacgtggtggagatgcacgacgtgaccgcccaggaccccaagctgctggtgcacctgaaggccaccagaaacagcgtgcccgtgcccagacactggtgcttcaagagaaagtacctgcagggcaagagaggcatcgagaagccccccttcgagctgcccgacttcatcaagagaaccggcatccaggagatgagagaggccctgcaggagaaggaggagcagaagaccatgaagagcaagatgagagagaaggtgagacccaagatgggcaagatcgacatcgactaccagaagctgcacgacgccttcttcaagtggcagaccaagcccaagctgaccatccacggcgacctgtactacgagggcaaggagttcgagaccagactgaaggagaagaagcccggcgacctgagcgacgagctgagaatcagcctgggcatgcccgtgggccccaacgcccacaaggtgccccccccctggctgatcgccatgcagagatacggccccccccccagctaccccaacctgaagatccccggcctgaacagccccatccccgagagctgcagcttcggctaccacgccggcggctggggcaagccccccgtggacgagaccggcaagcccctgtacggcgacgtgttcggcaccaacgccgccgagttccagaccaagaccgaggaggaggagatcgacagaaccccctggggcgagctggagcccagcgacgaggagagcagcgaggaggaggaggaggaggagagcgacgaggacaagcccgacgagaccggcttcatcacccccgccgacagcggcctgatcacccccggcggcttcagcagcgtgcccgccggcatggagacccccgagctgatcgagctgagaaagaagaagatcgaggaggccatggacggcagcgagaccccccagctgttcaccgtgctgcccgagaagagaaccgccaccgtgggcggcgccatgatgggcagcacccacatctacgacatgagcaccgtgatgagcagaaagggccccgcccccgagctgcagggcgtggaggtggccctggcccccgaggagctggagctggaccccatggccatgacccagaagtacgaggagcacgtgagagagcagcaggcccaggtggagaaggaggacttcagcgacatggtggccgagcacgccgccaagcagaagcagaagaagagaaaggcccagccccaggacagcagaggcggcagcaagaagtacaaggagttcaagttctag

SEQ ID NO: 168521 - DNA, 2688 bp, Artificial Sequence
  derived and/or modified sequence
atggctacggaacaccctgagcctcctaaggctgaacttcagctgccacctccacctccccccggtcattacggcgcatgggcagcccaagagctgcaagcaaagcttgcagagatcggggctcctatccaaggcaatagggaggaacttgtggagcggctccaaagttatacccggcagaccggcatcgtgctcaaccggcccgtcctcagaggggaggacggcgacaaagcagcacctcccccgatgagcgcccagctacccggcatcccaatgcctcctcccccgcttgggctgccacccctacagcctccccctcctccacccccaccccctcccgggcttggtcttggatttcctatggctcatcctcccaacctggggcccccaccccctttacgggttggagagcctgtcgcactgtccgaggaagagaggctaaaattggctcagcagcaagccgcgctgctgatgcagcaggaggagcgtgctaaacaacagggcgatcacagtctgaaggaacatgaacttctggaacagcaaaagcgggcagctgtactgctggagcaggagcgacagcaggaaatagccaaaatgggaacccctgtgcctcggcctcctcaagatatgggccagattggggtgcggacacctctcggtcctagggtggccgcacctgtgggtccagttggccctacgccaacggtgctgcctatgggcgcacccgtgcccaggcccagggggcctccccccccccccggggatgaaaatcgcgaaatggacgaccctagtgttgggcctaagattcctcaggctctcgagaagatccttcagctgaaagagtcccggcaggaggagatgaatagtcagcaggaggaggaggaaatggagacagacgcacgctcttccctggggcagagcgcatctgaaacagaggaagacacggtgtcagtgtcaaaaaaggagaagaacaggaagaggcggaacaggaagaaaaaaaagaaaccccagagggtaaggggggtaagcagcgaatcttccggggaccgcgagaaagactccacgcgcagcagaggtagtgactctcccgcggctgacgtcgaaattgagtacgtaacagaagagcccgagatttacgaaccgaatttcatcttcttcaagcgcatcttcgaggcctttaaactgactgatgatgtgaagaaagaaaaggagaaggagccagagaagctggacaaattagagaatagcgcagccccaaaaaagaaaggatttgaggaggaacataaggatagcgacgacgactcctcggacgacgaacaggaaaagaagccggaagcccctaaattgtccaaaaagaagctccgtcgcatgaacaggtttacagtggccgaacttaagcagctggtggctcggcctgatgtcgtggaaatgcacgatgtgacagcacaggatcctaagctactggtgcatctgaaggcaacaaggaatagcgtgcccgtgcccagacactggtgttttaagcggaagtatctgcagggcaaacgggggattgaaaaaccgcccttcgaactgccggattttatcaagcgtacaggaatccaggagatgagggaagcacttcaagaaaaagaggagcagaaaactatgaagtcgaagatgcgcgagaaggtgcggcctaaaatggggaaaatcgacattgattaccaaaaattgcacgatgcgttctttaagtggcaaacgaagcctaagctgacaattcacggcgatctttattatgagggcaaggagttcgaaacccggctcaaggagaaaaaacccggcgacctgagcgatgaattacgtatctcactaggcatgccagtgggccctaatgctcacaaagtacccccaccctggctcatcgcgatgcagcgttacggacctcctcccagctatccaaatctgaaaatacctgggttgaatagccccatcccagagagttgttcctttggatatcatgccggaggctggggcaaacctccagtggatgaaactggaaagcccctgtatggcgacgtgtttggaacaaacgccgcggagttccaaacaaagaccgaggaggaggaaattgatcgcaccccatggggggaattggaaccgagcgatgaagagtctagcgaggaagaggaggaagaagaatccgatgaagacaagcccgatgaaacaggatttatcacaccagcggactctggcctgataacacctggggggtttagctctgtgcccgcaggcatggagacaccagagctcatcgagctccggaaaaagaagattgaggaggccatggacggcagcgagactccccaactgttcaccgttcttccagaaaaacgtacggccacagtggggggtgccatgatgggatcaacacacatctatgatatgagcacagtgatgagccgcaagggccccgcgccagagctccagggagtcgaggtggcactcgctcccgaagagctggagttagacccaatggctatgacccagaagtatgaagagcacgtgagagaacagcaggctcaggtcgaaaaagaagattttagcgatatggtcgctgagcacgcagccaaacagaaacagaaaaagcgtaaagcacagcctcaggactcgcgtggcggcagcaagaagtacaaggagtttaagttttag

SEQ ID NO: 168522 - DNA, 2400 bp, Artificial Sequence
  derived and/or modified sequence
gccaagatggccacagaacaccctgagccacccaaagcagaactccaactccctcccccccctccacccggccactacggcgcatgggccgcacaggagttgcaggccaaactggctgagataggagcccccattcagggcaacagagaggaactcgtggagcgactgcagtcatacacacgtcagaccggcatagttctgaataggcccgtcctaaggggcgaagacggcgacaaggccgccccacctcccatgtccgctcagctgccaggcatccccatgcctccaccccctttgggactgcccccgctgcagcccccaccacccccccctccgccaccgcctggcctagggcttggcttcccaatggcacaccctcccaatctggggcctccgcctccccttcgcgtaggtgaaccagtcgcactttccgaagaggagagactcaagctggcacaacagcaggccgcactcctgatgcaacaggaagagagagcgaagcaaggagatcactccctaaaagagcacgagctacttgaacagcagaagcgggcggccgtgctgcttgagcaggaacggcagcaagaagaagaagagatggagacagatgcacgcagtagcttaggccagagcgcctccgaaaccgaggaggataccgtgagtgtttctaaaaaggagaaaaatcgaaagcgcagaaataggaaaaaaaaaaaaaagcctcagcgcgtcaggggggtctcgagcgagagctccggcgacagggaaaaagactccacgcgcagtcgcggttctgattcccccgctgctgatgtcgagatcgaatacgtcaccgaggagcccgagatctacgaacctaactttatcttcttcaagcgtatttttgaggcctttaagttaaccgatgacgtcaagaaggaaaaggagaaggagccggaaaagttggataagcttgagaattcagccgccccaaagaaaaaagggtttgaggaggaacacaaggacagtgacgacgacagttcagacgatgagcaggaaaagaagcctgaagctcctaaattaagcaagaaaaagctgagaagaatgaataggtttacggtggccgaactgaaacagcttgttgctcgcccagacgtggtcgagatgcacgatgtgacagcccaggatcctaaacttctggtgcacctaaaagctacccggaattcagtcccggtgccgcggcactggtgcttcaaaagaaaataccttcagggcaagcgcggaatcgaaaagcccccgttcgagctccccgactttatcaaaaggacaggtatccaggagatgagggaggcccttcaggaaaaggaggagcagaaaactatgaagagtaaaatgagagagaaggttcgtcccaaaatggggaagatcgatattgactaccagaagcttcatgacgcattcttcaagtggcaaaccaaaccaaagctgaccattcatggggatttgtactacgaggggaaggaatttgagaccaggctcaaggaaaagaagcctggcgatctgtcggatgaactccggatttcactcgggatgccagtagggccaaatgcgcacaaggtgcctccaccctggctgattgcaatgcagcgttacggcccaccaccatcctacccaaacctgaagatacccgggctcaatagtcctatcccagagtcctgctcgtttggataccacgccggtgggtggggcaagcctcccgtggacgagactggaaaacccctctacggcgatgtgtttgggacaaacgcagccgagttccaaaccaaaaccgaggaagaggagattgatcgtactccatggggagagctggaaccatccgacgaggagagtagcgaggaggaagaggaagaggaatctgatgaagataagccggatgaaactggatttattactccagctgattccgggctgattaccccgggggggttttcgagtgtgcccgctggcatggaaacgcccgagctgatagaactgcgtaaaaagaaaatagaggaggcaatggacggtagcgaaacaccccagctgttcactgtgctgcccgagaaacggacagccacagtcgggggagccatgatgggctccacccacatctatgacatgagcactgtgatgagccgcaaaggacctgctcctgaactccagggcgtggaggtagcactcgcccccgaggagctggaactcgaccccatggctatgacccagaagtatgaggagcacgtgcgagagcagcaggcccaagtagaaaaagaagatttctctgatatggtggccgagcacgcggcaaagcaaaagcagaaaaagcgaaaggctcagccccaggactcaagaggtggatccaagaaatataaagagttcaaattctag

SEQ ID NO: 168523 - DNA, 2688 bp, Artificial Sequence
  derived and/or modified sequence
atggccacagagcaccctgagccccccaaggccgagctgcagctgcccccacctcctcctcctggccactacggggcctgggccgcccaggagctgcaggccaagctggccgagattggagcccccatccagggcaaccgggaggagctggtggagcggctgcagagctacacccggcagacaggaattgtgctgaacagacctgtgctgcggggagaagatggagacaaggccgcccccccacccatgtctgcccagctgcccggcatccccatgcctcctccacccctgggcctgccccccctgcagcccccacctcctcctcctcctcctcctcctggcctgggcctgggcttccccatggcccacccccccaacctgggccccccaccacccctgcgggtgggggagcctgtggccctgtctgaggaggagcggctgaagctggcccagcagcaggccgccctgctgatgcagcaggaggagcgggccaagcagcagggcgaccacagcctgaaggagcacgagctgctggagcagcagaagagagctgctgtgctgctggagcaggagcggcagcaggagatcgccaagatgggcacccctgtgccccggcccccccaggacatgggccagattggagtgaggacccccctgggcccccgggtggccgcccctgtgggccctgtgggccccacccccaccgtgctgcccatgggcgcccctgtgccccggccccggggccccccacctcctcctggagatgagaaccgggagatggatgaccccagcgtgggccccaagatcccccaggccctggagaagatcctgcagctgaaggagagccggcaggaggagatgaacagccagcaggaggaggaggagatggagacagatgcccggagcagcctgggccagagcgccagcgagacagaagaagatactgtgtctgtgtccaagaaggagaagaacaggaagagaagaaacaggaagaagaagaagaagccccagagggtgcggggcgtgagcagcgagagcagcggggaccgggagaaggacagcaccaggagccggggcagtgacagccctgctgctgatgtggagattgaatatgtgacagaggagcctgagatctatgagcccaacttcatcttcttcaagaggatctttgaggccttcaagctgacagatgatgtgaagaaggagaaggagaaggagcctgagaagctggacaagctggagaacagcgctgcccccaagaagaagggctttgaggaggagcacaaggacagtgatgatgacagcagtgatgatgagcaggagaagaagccagaggcccccaagctgagcaagaagaagctgcggaggatgaaccgcttcaccgtggccgagctgaagcagctggtggcccggccagatgtggtggagatgcatgatgtgacagcccaggaccccaagctgctggtgcacctgaaggccaccagaaattctgtgcctgtgcccaggcactggtgcttcaagaggaagtacctgcagggcaagaggggcatcgagaagcccccatttgagctgcctgacttcatcaagaggacaggcatccaggagatgagggaggccctgcaggagaaggaggagcagaagaccatgaagagcaagatgagggagaaggtgcggcccaagatgggcaagattgacatcgactaccagaagctgcatgatgccttcttcaagtggcagaccaagcccaagctgaccatccatggagacctgtactatgagggcaaggagtttgagacccggctgaaggagaagaagccaggggacctgagtgatgagctgcgcatcagcctgggcatgcctgtgggccccaatgcccacaaggtgcccccaccctggctgattgccatgcagagatatggccccccacccagctaccccaacctgaagatccctggcctgaacagccccatccctgagagctgcagctttggctaccacgccggcggctggggcaagccccctgtggatgagaccgggaagcccctgtatggagatgtgtttggcaccaatgctgctgagttccagaccaagacagaggaggaggagattgacaggaccccctggggcgagctggagcccagtgatgaggagagcagcgaggaggaggaggaggaggagagtgatgaggacaagccagatgaaacaggcttcatcaccccagctgacagcggcctcatcacccctgggggcttcagctctgtgcctgctggcatggagaccccagagctgattgagctgaggaagaagaagattgaggaggccatggatggcagcgagaccccccagctgttcaccgtgctgcctgagaagaggacagccaccgtgggcggggccatgatgggcagcacccacatctatgacatgagcacagtgatgagcaggaaaggacctgcccctgagctgcagggcgtggaggtggccctggcccctgaggagctggagctggaccccatggccatgacccagaagtatgaggagcacgtgcgggagcagcaggcccaggtggagaaggaggacttcagtgacatggtggccgagcacgccgccaagcagaagcagaagaagaggaaggcccagccccaggacagcagaggaggcagcaagaagtacaaggagttcaagttctag

SEQ ID NO: 168524 - DNA, 2400 bp, Artificial Sequence
  derived and/or modified sequence
gccaagatggccacagagcaccctgagccccccaaggccgagctgcagctgcccccacctcctcctcctggccactacggggcctgggccgcccaggagctgcaggccaagctggccgagattggagcccccatccagggcaaccgggaggagctggtggagcggctgcagagctacacccggcagacaggaattgtgctgaacagacctgtgctgcggggagaagatggagacaaggccgcccccccacccatgtctgcccagctgcccggcatccccatgcctcctccacccctgggcctgccccccctgcagcccccacctcctcctcctcctcctcctcctggcctgggcctgggcttccccatggcccacccccccaacctgggccccccaccacccctgcgggtgggggagcctgtggccctgtctgaggaggagcggctgaagctggcccagcagcaggccgccctgctgatgcagcaggaggagcgggccaagcagggcgaccacagcctgaaggagcacgagctgctggagcagcagaagagagctgctgtgctgctggagcaggagcggcagcaggaggaggaggagatggagacagatgcccggagcagcctgggccagagcgccagcgagacagaagaagatactgtgtctgtgtccaagaaggagaagaacaggaagagaagaaacaggaagaagaagaagaagccccagagggtgcggggcgtgagcagcgagagcagcggggaccgggagaaggacagcaccaggagccggggcagtgacagccctgctgctgatgtggagattgaatatgtgacagaggagcctgagatctatgagcccaacttcatcttcttcaagaggatctttgaggccttcaagctgacagatgatgtgaagaaggagaaggagaaggagcctgagaagctggacaagctggagaacagcgctgcccccaagaagaagggctttgaggaggagcacaaggacagtgatgatgacagcagtgatgatgagcaggagaagaagccagaggcccccaagctgagcaagaagaagctgcggaggatgaaccgcttcaccgtggccgagctgaagcagctggtggcccggccagatgtggtggagatgcatgatgtgacagcccaggaccccaagctgctggtgcacctgaaggccaccagaaattctgtgcctgtgcccaggcactggtgcttcaagaggaagtacctgcagggcaagaggggcatcgagaagcccccatttgagctgcctgacttcatcaagaggacaggcatccaggagatgagggaggccctgcaggagaaggaggagcagaagaccatgaagagcaagatgagggagaaggtgcggcccaagatgggcaagattgacatcgactaccagaagctgcatgatgccttcttcaagtggcagaccaagcccaagctgaccatccatggagacctgtactatgagggcaaggagtttgagacccggctgaaggagaagaagccaggggacctgagtgatgagctgcgcatcagcctgggcatgcctgtgggccccaatgcccacaaggtgcccccaccctggctgattgccatgcagagatatggccccccacccagctaccccaacctgaagatccctggcctgaacagccccatccctgagagctgcagctttggctaccacgccggcggctggggcaagccccctgtggatgagaccgggaagcccctgtatggagatgtgtttggcaccaatgctgctgagttccagaccaagacagaggaggaggagattgacaggaccccctggggcgagctggagcccagtgatgaggagagcagcgaggaggaggaggaggaggagagtgatgaggacaagccagatgaaacaggcttcatcaccccagctgacagcggcctcatcacccctgggggcttcagctctgtgcctgctggcatggagaccccagagctgattgagctgaggaagaagaagattgaggaggccatggatggcagcgagaccccccagctgttcaccgtgctgcctgagaagaggacagccaccgtgggcggggccatgatgggcagcacccacatctatgacatgagcacagtgatgagcaggaaaggacctgcccctgagctgcagggcgtggaggtggccctggcccctgaggagctggagctggaccccatggccatgacccagaagtatgaggagcacgtgcgggagcagcaggcccaggtggagaaggaggacttcagtgacatggtggccgagcacgccgccaagcagaagcagaagaagaggaaggcccagccccaggacagcagaggaggcagcaagaagtacaaggagttcaagttctag

SEQ ID NO: 168525 - DNA, 2688 bp, Artificial Sequence
  derived and/or modified sequence
atggccaccgagcaccccgagccccccaaggccgagctgcagctgccccctccaccgccaccaggccactatggggcttgggccgcccaggaacttcaagccaagttggcagaaattggggcccccattcagggaaatcgggaggagctggtggagagactgcagagctatacgaggcagactggaatcgtgctaaatcggcccgttttgaggggcgaagatggagataaggccgctccgccaccaatgagcgctcagctaccaggaatcccaatgccaccgccgcctctgggattgccccctcttcagcctccacctccccccccgccgccccctccaggtctgggcctgggttttccaatggctcaccctcctaatttagggcctcctccccctcttcgtgtcggtgaacccgtggccttgagtgaggaagaacggcttaagctggcacagcagcaagccgccctcctgatgcagcaggaggagagggccaaacagcagggcgaccattccctgaaggaacacgaattgttggaacagcaaaagcgtgcggcggttctcctggagcaggaacggcagcaggagatcgcgaagatggggactcccgttccccggccgccccaggacatggggcagattggagttcgcacgcccctgggccccagagtagcggccccggttggacccgtcggcccaacccccaccgttcttcctatgggggcaccagttccaagaccccgtggaccaccccccccgcccggcgatgaaaatcgcgagatggacgatccttctgttggtcccaagattccacaggctttagaaaaaattctccagctcaaggaaagccgtcaggaggaaatgaacagtcagcaggaggaagaggagatggagaccgacgctagaagttccttagggcagtccgcttcagagacagaggaggacacggtttcggttagtaaaaaagaaaagaacaggaagaggcgcaacagaaaaaagaagaagaagccccagagggtgcggggagtgtctagcgaaagctccggcgatagagagaaagatagcacccgtagtagaggatctgattcccccgctgccgacgtggagatcgagtacgtgacggaagagccggaaatttacgaacctaactttatcttcttcaagcggatcttcgaggccttcaagctgaccgacgatgtgaagaaagagaaagaaaaagagcctgaaaaattggacaagcttgaaaactcagctgctcctaagaaaaaggggttcgaagaggagcacaaggactccgacgatgacagcagcgacgacgagcaggagaaaaagcctgaagctcccaagctctcaaaaaaaaagctacggaggatgaatcgatttacggttgctgaactcaagcagcttgtagcacgacccgatgttgtggagatgcatgatgtcacagcacaagacccgaagttgcttgttcatcttaaggctacacgcaatagcgtccccgtgccccgacattggtgctttaaaagaaagtacttgcagggaaagcgcgggattgaaaagcctcctttcgagctccctgatttcattaaacgcactggtatccaagagatgcgcgaggccctgcaagagaaggaggagcagaagacgatgaagtcaaagatgagagaaaaggtgcgccctaagatggggaaaatcgacattgactatcagaagttgcacgacgcgttttttaagtggcaaacaaagcctaagctgaccatccacggcgatttgtactacgagggtaaggaatttgagacccgtctgaaggagaaaaaacccggcgatttgtccgacgagctgcgaatttctttgggcatgcctgtggggccaaatgcgcacaaggtaccaccaccatggctgatcgcaatgcagcgatatgggccacctccctcttacccaaatcttaagatcccggggctgaacagcccgattcccgaaagctgtagcttcggatatcacgctggggggtggggcaaacccccagtggacgaaacggggaaaccactgtatggagatgtgttcggaaccaacgctgccgagttccagaccaagacggaggaagaagagatcgaccggacaccatggggagagctggaacccagcgatgaggagagtagcgaggaggaggaagaggaggagagtgacgaagacaagccagacgagactggatttataactccggccgactccggcctgatcactccgggcgggttctcctccgtgcccgccgggatggaaacccctgaactcatcgaattgagaaaaaagaaaatcgaggaagcgatggatggcagtgagacgcctcagctcttcaccgtccttccagaaaagcgaacagcaaccgtgggcggggcgatgatgggttcgacacatatctatgacatgtctaccgtgatgtcccgcaaaggacctgcacccgagctgcagggtgtggaggtagcactcgcaccagaggagctggagctcgacccaatggccatgacccagaagtacgaggagcatgtgcgggagcaacaggctcaggtggagaaagaggacttcagcgacatggtggccgagcacgccgcaaaacagaaacagaaaaagcggaaggctcagcctcaggatagtcgcggtggctccaaaaagtataaggagttcaagttctag

SEQ ID NO: 168526 - DNA, 2400 bp, Artificial Sequence
  derived and/or modified sequence
gccaagatggccaccgagcaccccgagccccccaaggccgagctgcagctgcctccccctccaccccctggccactatggcgcatgggccgctcaggaactccaggccaagctggcagaaatcggcgcacctatccagggcaatagggaagagctcgtggaacggttgcagagctataccagacagacaggaatcgttctgaatcgccccgtcttgcggggagaggatggcgacaaagctgcaccaccaccaatgagtgcgcagctcccaggcattcccatgcccccacccccccttgggctcccccctcttcagccacctcctccgccccctccgccccctccaggtcttggactggggttccccatggcccacccccctaacctggggcccccaccgcccctgcgggtgggcgaaccagtggctctatctgaggaagagaggcttaaactcgcccagcagcaggccgcactactgatgcagcaagaggaacgtgccaaacaaggggaccattccctgaaggagcacgagctgcttgaacagcagaagcgggcagccgtcctgctggaacaggagcgtcagcaagaggaagaggagatggagactgatgcgcgttcctcgctgggccagagtgctagtgaaaccgaggaggacactgtcagcgtcagcaaaaaggagaagaatagaaagcgccgtaaccggaaaaagaaaaagaagccccagcgcgtgcgaggcgtatcaagcgaatctagtggagatcgtgaaaaagacagcaccaggagcagagggtccgacagccccgccgctgacgttgaaattgaatacgtgacagaggaacctgaaatttatgagcctaacttcattttcttcaaacgtattttcgaggccttcaagctcaccgatgacgtgaagaaggagaaggaaaaggaaccagagaaactcgacaagctcgagaactcagctgcccccaagaaaaagggctttgaggaggaacataaggactccgatgacgactcctccgacgatgagcaggaaaaaaagccggaggccccaaagctctccaagaaaaagttgcggagaatgaatcggtttaccgtcgccgaactaaaacaactggtcgcaagacccgacgtcgtggaaatgcacgacgtcacagcccaggatcccaagttattggtacatctgaaggccacgcgcaactctgtgccagtgccacgtcattggtgtttcaaaaggaaatatctgcaggggaagagaggaatcgagaagcctcccttcgagcttcccgattttatcaagagaacaggtatccaggagatgcgtgaagcactgcaggagaaagaggagcagaaaacaatgaagtccaaaatgcgcgagaaggtaagacccaagatggggaaaatagacatcgattaccagaaactgcacgatgcgttcttcaagtggcagactaagcccaaactgactatccatggcgacttgtattacgagggtaaggagtttgagaccagattgaaagagaagaagccaggagatctgagtgacgagcttaggatttccttaggcatgccggtggggccaaatgctcacaaagtgcctccaccatggctgatcgccatgcagaggtatgggccacctccaagctaccccaacctcaagattcccggcctcaacagccctatcccagaatcttgttcttttggctatcatgctggaggttggggtaagccccctgtggacgagacaggcaagccactctacggggatgtcttcggtactaacgccgccgagtttcagactaagaccgaagaagaggaaattgatagaacaccatggggagagctggagcctagtgacgaagagtcttctgaggaagaggaggaggaggagagcgacgaagacaagcctgacgagacaggtttcatcacaccagctgatagcggccttattacacccggcggcttcagtagtgtccctgccggtatggaaactcctgagctcattgaattacggaagaagaagatcgaagaggctatggatggcagtgagaccccccagctgttcactgttctgccggaaaagaggacagctacagtcggcggggcaatgatgggttctactcacatctatgacatgagcactgtaatgagccggaaaggccctgctcccgaactgcagggcgtggaggtagctctggcacccgaggaattggagctcgatcctatggccatgactcagaaatacgaagaacacgtgcgcgaacaacaagcccaggtcgaaaaggaggacttttccgacatggtcgctgagcacgcggcaaagcagaagcagaaaaaaaggaaagcccagccccaagacagtcgtggcggttcaaagaagtacaaggaatttaaattttag

SEQ ID NO: 168527 - DNA, 2688 bp, Artificial Sequence
  derived and/or modified sequence
atggccacagagcatcccgagcctccaaaagcagagctccagctgccccctccccctcctcccggacactatggggcatgggccgcacaggaattgcaggcaaagctggctgagattggggcacctatacagggaaacagggaagagctggttgagaggctccagtcttacacccgccagaccggaatagttctcaataggccggtgctgaggggggaggacggcgataaggcagcgcctcctcccatgagcgctcagctgcctgggattcccatgccccctcctccgctgggactgcccccattgcagcccccaccgcctccccctccaccccctcccggtcttggtctaggtttcccaatggcacatcctccaaatttgggaccccctcccccactgcgcgttggcgaacctgttgccctgagtgaggaggaaagactcaagctagcacagcagcaagccgctctgctcatgcagcaggaagaaagagccaaacagcagggtgaccatagcctcaaggagcacgagctgcttgaacaacagaaacgcgctgctgtgctcctcgaacaagagcgccagcaggaaatcgccaaaatgggcacaccagtgcccagacccccacaggacatgggccagattggggtgcggactccactgggcccaagggtcgcagctccagtggggcctgtgggaccaacacccacagtgctgccgatgggggcacctgtacccagaccaagaggtccgcctcccccacctggagacgagaacagagaaatggatgatccctcggttgggcctaagatcccccaggcactagaaaagatacttcagcttaaggagtctaggcaggaagagatgaactcacaacaggaagaggaggagatggagaccgatgcgaggtcaagtcttggacagagcgcatctgagacagaagaggacaccgttagcgtaagtaagaaagagaagaataggaagagaaggaaccgaaagaagaaaaagaagccacagcgagtgcgaggggtatcttcggagagttctggagatagggagaaagattcaaccagaagcaggggatccgactcccctgccgcagacgtcgagatcgagtatgtcacagaagaacccgaaatctacgaacctaatttcatattctttaaacgcattttcgaggccttcaaactcactgatgatgtgaagaaagagaaggagaaggagcccgagaagctggataaactggagaactctgccgctcctaagaagaaagggtttgaggaggaacacaaagattcagatgacgatagctccgacgacgaacaggagaagaaacctgaggctcccaaactttcgaaaaaaaagttacgcaggatgaatcgctttactgttgccgaattgaagcaactcgttgcgcgaccagatgtggtggagatgcatgacgtcactgcacaggaccccaagttactggtgcatctaaaagccacccgcaactctgtgcctgttcctcgccactggtgtttcaagcggaagtacctacagggcaagcgaggcattgagaagcctccattcgaactgcccgacttcatcaagagaacggggatccaggagatgcgcgaagcgctgcaagaaaaggaagagcagaaaacaatgaagagtaagatgcgcgagaaggttcgcccaaagatggggaaaattgacatcgactaccagaaacttcacgatgcttttttcaagtggcagaccaaacccaaactgacgattcacggtgacctgtattacgaggggaaagagtttgagacacgacttaaagagaaaaagcccggagatctgagcgatgagttacggatcagtctggggatgccagtgggacctaacgcccataaagtgcccccaccttggctcatcgccatgcagcggtatggcccaccaccaagctaccccaacctaaaaattcctggcctgaactctcccatccccgagtcctgctcattcggctaccatgccggaggctggggcaaacctcccgtggatgaaactggcaagcccttgtacggggatgtatttggtaccaatgccgcagagtttcaaacaaagacggaggaagaggagatagatagaaccccttggggggagctagagccgagtgacgaagagagctccgaagaagaagaggaggaggagtccgacgaagacaagcctgacgagactggattcatcacacccgcagactctggcctgatcactccagggggtttttcgtccgtcccggcaggtatggaaactcctgagctgatagagctaaggaagaagaagatcgaggaggcgatggacggatcagagacaccacagctcttcaccgttctcccagagaagaggaccgccactgtgggtggtgctatgatggggagtacacacatatacgatatgagcacggttatgtcacgcaaaggtcccgcaccagaactacaaggagttgaagtagcactagcccctgaagaacttgaattggatccaatggcaatgactcaaaaatacgaagagcacgtacgcgagcagcaagcccaagttgaaaaagaggatttttcggacatggtagcggagcacgccgctaagcaaaaacagaagaaacggaaagcgcagcctcaggattcaagaggcggttcaaagaagtacaaggaattcaaattttag

SEQ ID NO: 168528 - DNA, 2400 bp, Artificial Sequence
  derived and/or modified sequence
gcgaagatggccactgaacatcccgaacctccaaaagctgagttacagttacccccaccgcctcccccaggccactatggcgcatgggctgcccaagagctccaagccaaattggccgaaataggtgcccctattcaaggtaacagagaagagctcgtggaaagactgcaatcatacacaagacagaccgggattgtgcttaatagacccgttcttcggggagaagatggagacaaggcagctccacctccaatgagcgctcagcttccgggaattcccatgccgcctcctcctctggggctgcccccattgcagcctcctccaccccctccaccccctccccctggcttgggcttaggattcccaatggctcaccctcctaacttaggaccgcctcccccacttcgcgtgggtgagcctgtagccctcagtgaagaggaaagattgaagttggcacagcagcaggcagcgttgctgatgcagcaggaggaaagggccaagcaaggagatcacagtctgaaagaacacgaattactggaacaacagaagcgcgcagcggttctgttggaacaagagcgccagcaagaggaagaagagatggaaacagacgcaaggtccagcctcgggcagtccgcctcagaaacagaggaggataccgtcagcgtaagcaagaaagaaaaaaaccggaagcgcagaaaccggaaaaaaaaaaaaaaaccccagcgcgttcgaggtgttagctccgagtcctctggggatcgcgagaaggacagtacacggtccaggggctctgattcccccgcagcggatgtcgaaatagagtatgtaacagaagaacctgagatctatgaacctaatttcattttttttaagaggatctttgaggcgttcaagctgaccgatgatgtgaaaaaagagaaagaaaaggagcccgagaagctggacaaactggagaattccgccgcacccaaaaagaaagggttcgaggaagagcacaaagacagcgatgatgacagttccgacgatgagcaggaaaagaagccggaagcccctaagctgtcaaagaagaagctgcgacgcatgaaccgattcaccgtggcagaactgaaacagctggtcgcacgaccagatgtagtggagatgcatgacgttactgcccaggaccctaaactcttggttcatctgaaagccacaagaaactctgtgcccgtgcccagacattggtgtttcaagcgcaaatacttgcagggcaaaaggggaatcgaaaaacccccatttgagcttcccgattttattaagcggactggcatccaggaaatgcgcgaagccctgcaagagaaagaagagcagaagacgatgaaatctaagatgcgcgaaaaggtacggcctaaaatgggcaagattgacatagattaccagaagctgcacgatgcttttttcaaatggcagacgaaacctaaacttactatacatggcgacctgtattacgaaggaaaggagtttgagacgaggctgaaggaaaaaaagccaggcgatctttccgacgagttgaggatttcgttgggaatgcccgtcggcccaaacgctcacaaggtgcccccaccctggttaattgcgatgcagcgctatggacctccaccgagctacccaaacttgaagatacctggtctgaacagcccaatcccagagagctgttcctttggataccatgcaggcggttggggcaagcccccagtcgatgaaacggggaaacccttgtacggagatgtgtttggcacgaatgctgctgaatttcaaactaagaccgaagaggaggagattgacaggaccccttggggcgagctggaaccatccgacgaagaaagctccgaggaggaggaggaggaagaatcagacgaagataagccggacgaaaccggattcatcacccctgcagattctggactgatcaccccgggagggttcagctctgtaccagcaggcatggaaacccccgagttgatagagctccgcaaaaaaaaaatcgaagaagcgatggatggaagcgagaccccgcagctcttcactgtgttacccgaaaagaggacggccaccgttggaggagctatgatggggtctactcatatttatgacatgtccactgtcatgtcccgcaaaggcccagcaccagagctccagggtgttgaggtagcgctggcaccagaagagcttgaattagacccgatggccatgacacagaaatatgaagaacatgtgagagagcaacaggctcaggtcgaaaaggaggatttcagcgacatggtggctgagcacgcagccaaacagaaacagaaaaaaaggaaggcccaacctcaagatagccgcggaggtagtaaaaaatataaagagttcaagttttag

SEQ ID NO: 168529 - DNA, 2903 bp, Artificial Sequence
  derived and/or modified sequence
gaggctggccccagcttccgggttggtcgcgcgccttcctgcggctaagatggcgacggagcatcccgagcctcccaaagcagaattgcagctgccgccgccgccacctccaggccactatggcgcctgggctgcccaggagcttcaggccaagttggcagagatcggagctccgatccagggtaatcgcgaggagctggtggagcggctgcagagctacacccgccagactggcatcgtgctgaatcggccggttttgagaggggaagatggggacaaagccgctccacctcccatgtcggcacagctccctggaattcccatgccaccaccacctttgggactcccccctctgcagcctcctccgccacccccaccacctccaccaggccttggccttggctttcctatggcccacccaccaaatttggggcccccgcctcctctccgtgtgggtgagccagtggcactgtcagaggaggagcggctgaagttggctcagcagcaggcggcattgctgatgcagcaggaggagcgtgccaagcagcagggagatcattcgctgaaggaacatgagctcttggagcagcagaagcgggcagctgtgttactggagcaggaacgacagcaggagattgccaagatgggcaccccagtccctcggcccccacaagacatgggccagattggtgtgcgcactcctctgggtcctcgagtagctgctccagtgggcccagtgggccccactcctacagttttgcccatgggagcccctgttccccggcctcgtggtcccccaccgccccctggagatgagaacagagagatggatgacccctctgtgggccccaagatcccccaggctttggagaagatcctgcagctgaaggagagccgccaggaagagatgaattctcagcaggaggaagaggaaatggaaacagatgctcgctcgtccctgggccagtcagcgtcagagactgaggaggacacagtgtccgtatctaaaaaggagaaaaaccggaagcgtaggaaccgaaagaagaagaaaaagccccagcgggtgcgaggggtgtcctctgagagctctggggaccgggagaaagactcaacccggtcccgtggctctgattccccagcagctgatgttgagattgagtatgtgactgaagaacctgaaatttacgagcccaactttatcttctttaagaggatctttgaggcttttaagctcactgatgatgtgaagaaggagaaagagaaggagccagagaaacttgacaaactggagaactctgcagcccccaagaagaagggatttgaagaggagcacaaggacagtgatgatgacagcagtgatgacgagcaggaaaagaagccagaagcccccaagctgtccaagaagaagttgcgccgaatgaaccgcttcactgtggctgaactcaagcagctggtggctcggcccgatgtcgtggagatgcacgatgtgacagcgcaggaccctaagctcttggttcacctcaaggccactcggaactctgtgcctgtgccacgccactggtgttttaagcgcaaatacctgcagggcaaacggggcattgagaagccccccttcgagctgccagacttcatcaaacgcacaggcatccaggagatgcgagaggccctgcaggagaaggaagaacagaagaccatgaagtcaaaaatgcgagagaaagttcggcctaagatgggcaaaattgacatcgactaccagaaactgcatgatgccttcttcaagtggcagaccaagccaaagctgaccatccatggggacctgtactatgaggggaaggagttcgagacacgactgaaggagaagaagccaggagatctgtctgatgagctaaggatttccttggggatgccagtaggaccaaatgcccacaaggtccctcccccatggctgattgccatgcagcgatatggaccacccccatcgtatcccaacctgaaaatccctgggctgaactcgcccatccctgagagctgttcctttgggtaccatgctggtggctggggcaaacctccagtggatgagactgggaaaccgctctatggggacgtgtttggaaccaatgctgctgaatttcagaccaagactgaggaagaagagattgatcggaccccttggggggaactggaaccatctgatgaagaatcctcagaagaagaggaagaggaagaaagtgatgaagacaaaccagatgagacaggctttattacccctgcagacagtggccttatcactcctggaggcttttcatcagtgcctgctggaatggagacccctgaactcattgagctgaggaagaagaagattgaggaggcgatggacggaagtgagacacctcagctcttcactgtgttgccagagaagagaacagccactgttggaggggccatgatgggatcaacccacatttatgacatgtccacggttatgagccggaagggcccggctcctgagctgcaaggtgtggaagtggcgctggcgcctgaagagttggagctggatcctatggccatgacccagaagtatgaggagcatgtgcgggagcagcaggctcaagtagagaaggaggacttcagtgacatggtggctgagcacgctgccaaacagaagcaaaaaaaacggaaagctcagccccaggacagccgtgggggcagcaagaaatataaggagttcaagttttaggtcccctcacactagccctttttttggccctacgtctggatgcctgggcttcacacaagaaccacctctcccgcagttcccaaggacttgtcatttcatgttcttattttagacctgttttgtaaataaagctgtttcccaaggaaagagatgaatatttaacact

SEQ ID NO: 168530 - DNA, 2553 bp, Artificial Sequence
  derived and/or modified sequence
gctaagatggcgacggagcatcccgagcctcccaaagcagaattgcagctgccgccgccgccacctccaggccactatggcgcctgggctgcccaggagcttcaggccaagttggcagagatcggagctccgatccagggtaatcgcgaggagctggtggagcggctgcagagctacacccgccagactggcatcgtgctgaatcggccggttttgagaggggaagatggggacaaagccgctccacctcccatgtcggcacagctccctggaattcccatgccaccaccacctttgggactcccccctctgcagcctcctccgccacccccaccacctccaccaggccttggccttggctttcctatggcccacccaccaaatttggggcccccgcctcctctccgtgtgggtgagccagtggcactgtcagaggaggagcggctgaagttggctcagcagcaggcggcattgctgatgcagcaggaggagcgtgccaagcagggagatcattcgctgaaggaacatgagctcttggagcagcagaagcgggcagctgtgttactggagcaggaacgacagcaggaggaagaggaaatggaaacagatgctcgctcgtccctgggccagtcagcgtcagagactgaggaggacacagtgtccgtatctaaaaaggagaaaaaccggaagcgtaggaaccgaaagaagaagaaaaagccccagcgggtgcgaggggtgtcctctgagagctctggggaccgggagaaagactcaacccggtcccgtggctctgattccccagcagctgatgttgagattgagtatgtgactgaagaacctgaaatttacgagcccaactttatcttctttaagaggatctttgaggcttttaagctcactgatgatgtgaagaaggagaaagagaaggagccagagaaacttgacaaactggagaactctgcagcccccaagaagaagggatttgaagaggagcacaaggacagtgatgatgacagcagtgatgacgagcaggaaaagaagccagaagcccccaagctgtccaagaagaagttgcgccgaatgaaccgcttcactgtggctgaactcaagcagctggtggctcggcccgatgtcgtggagatgcacgatgtgacagcgcaggaccctaagctcttggttcacctcaaggccactcggaactctgtgcctgtgccacgccactggtgttttaagcgcaaatacctgcagggcaaacggggcattgagaagccccccttcgagctgccagacttcatcaaacgcacaggcatccaggagatgcgagaggccctgcaggagaaggaagaacagaagaccatgaagtcaaaaatgcgagagaaagttcggcctaagatgggcaaaattgacatcgactaccagaaactgcatgatgccttcttcaagtggcagaccaagccaaagctgaccatccatggggacctgtactatgaggggaaggagttcgagacacgactgaaggagaagaagccaggagatctgtctgatgagctaaggatttccttggggatgccagtaggaccaaatgcccacaaggtccctcccccatggctgattgccatgcagcgatatggaccacccccatcgtatcccaacctgaaaatccctgggctgaactcgcccatccctgagagctgttcctttgggtaccatgctggtggctggggcaaacctccagtggatgagactgggaaaccgctctatggggacgtgtttggaaccaatgctgctgaatttcagaccaagactgaggaagaagagattgatcggaccccttggggggaactggaaccatctgatgaagaatcctcagaagaagaggaagaggaagaaagtgatgaagacaaaccagatgagacaggctttattacccctgcagacagtggccttatcactcctggaggcttttcatcagtgcctgctggaatggagacccctgaactcattgagctgaggaagaagaagattgaggaggcgatggacggaagtgagacacctcagctcttcactgtgttgccagagaagagaacagccactgttggaggggccatgatgggatcaacccacatttatgacatgtccacggttatgagccggaagggcccggctcctgagctgcaaggtgtggaagtggcgctggcgcctgaagagttggagctggatcctatggccatgacccagaagtatgaggagcatgtgcgggagcagcaggctcaagtagagaaggaggacttcagtgacatggtggctgagcacgctgccaaacagaagcaaaaaaaacggaaagctcagccccaggacagccgtgggggcagcaagaaatataaggagttcaagttttaggtcccctcacactagccctttttttggccctacgtctggatgcctgggcttcacacaagaaccacctctcccgcagttcccaaggacttgtcatttcatgttcttattttagacctgttttgtaaataaagctgtttcccaaggaaagagatg

SEQ ID NO: 168531 - protein, 328 aa, Artificial Sequence
  derived and/or modified sequence
MMSGEPLHVKTPIRDSMALSKMAGTSVYLKMDSAQPSGSFKIRGIGHFCKRWAKQGCAHFVCSSAGNAGMAAAYAARQLGVPATIVVPSTTPALTIERLKNEGATVKVVGELLDEAFELAKALAKNNPGWVYIPPFDDPLIWEGHASIVKELKETLWEKPGAIALSVGGGGLLCGVVQGLQEVGWGDVPVIAMETFGAHSFHAATTAGKLVSLPKITSVAKALGVKTVGAQALKLFQEHPIFSEVISDQEAVAAIEKFVDDEKILVEPACGAALAAVYSHVIQKLQLEGNLRTPLPSLVVIVCGGSNISLAQLRALKEQLGMTNRLPK

SEQ ID NO: 168532 - protein, 218 aa, Artificial Sequence
  derived and/or modified sequence
MMSGEPLHVKTPIRDSMALSKMAGTSVYLKMDSAQPSGSFKIRGIGHFCKRWAKQGCAHFVCSSAGNAGMAAAYAARQLGVPATIVVPSTTPALTIERLKNEGATVKVVGELLDEAFELAKALAKNNPGWVYIPPFDDPLIWEGHASIVKELKETLWEKPGAIALSVGGGGLLCGVVQGLQEVGWGDVPVIAMETFGAHSFHAATTAGKLVSLPKITR

SEQ ID NO: 168533 - DNA, 987 bp, Artificial Sequence
  derived and/or modified sequence
atgatgtctggggaacccctgcacgttaagacacccattcgcgatagtatggctctatctaagatggctggtacatccgtatacctcaaaatggactcagcacagcccagtgggtcctttaagattagggggattggtcacttttgtaaaaggtgggcaaaacaaggctgtgcacacttcgtgtgttcaagcgccggaaacgccggtatggcggccgcttatgcagcgagacagctgggtgttccagcgacaatcgttgtcccaagcaccacaccagctctcacaatagagcgccttaagaacgaaggcgcaacggtgaaagtggtgggcgagttactggacgaagctttcgagctagccaaggccctggcaaagaacaaccctggatgggtttacatccccccattcgacgatccgttaatttgggaggggcacgctagcatcgttaaggaactgaaggaaactctctgggagaagcccggagcaatcgccctgagcgtgggaggcggaggcctgctgtgtggcgtggtgcagggtctccaggaggtcggatggggtgatgtcccagtgattgcaatggagactttcggggcccacagcttccatgctgctacgacagctggtaagcttgtttcattaccaaagattacgagtgtggccaaggctctcggggtaaaaacagttggggcccaggcgctcaaactttttcaggaacatcccattttctcagaggtgatttctgatcaggaggcggtagcagctattgagaaatttgtggacgatgaaaaaattctcgttgaacccgcctgtggagcagccctggccgctgtctattctcacgtgatccagaagctccagctcgaggggaatttacggacccctctgccctccctcgttgtgattgtatgtggaggatctaatattagccttgcccaactgagagctctgaaagaacagctcggaatgacaaaccggcttcccaaatag

SEQ ID NO: 168534 - DNA, 657 bp, Artificial Sequence
  derived and/or modified sequence
atgatgagtggagagcccctgcacgtgaagacacccatccgagactcaatggctctgagtaaaatggccggcacatccgtgtacttgaagatggattctgcccaaccctcaggctcattcaagatcagggggatcgggcacttctgtaaacgatgggctaagcagggctgcgctcacttcgtgtgctcatcagctggaaatgccggaatggcagccgcatacgcagcccgccagttgggagtgcccgcaaccattgtagtcccaagcaccactcctgctctgaccattgagcggctgaagaacgagggtgccacagtcaaggtggttggggagctgctggatgaagcttttgagctcgccaaagctctggcaaagaataatcccggatgggtgtacataccgccatttgacgacccactcatttgggaagggcacgccagtatagtaaaggaactcaaggagaccttatgggaaaaaccgggcgcaatcgcgctgtctgtaggcgggggagggctattgtgtggagttgtacagggcttgcaagaagttggatggggtgatgtgccagtaatagcaatggagacttttggcgcacattcattccacgcagccacgacggcaggcaagctggtgtccttgcccaagataacgaggtag

SEQ ID NO: 168535 - DNA, 987 bp, Artificial Sequence
  derived and/or modified sequence
atgatgtctggagagcccctgcacgtgaagacccccatccgggacagcatggccctgagcaagatggccggcacctctgtgtacctgaagatggattctgcccagcccagcggcagcttcaagatccggggcatcggccacttctgcaagcgctgggccaagcagggctgtgcccactttgtgtgcagcagcgctggaaatgccggcatggccgccgcctatgctgcccggcagctgggcgtgcctgccaccatcgtggtgcccagcaccaccccagccctgaccatcgagcggctgaagaatgaaggagccaccgtgaaggtggtgggggagctgctggatgaggcctttgagctggccaaggccctggccaagaacaaccctggctgggtgtacatccccccatttgatgaccccctcatctgggagggccacgccagcatcgtgaaggagctgaaggagaccctgtgggagaagccaggggccatcgccctgtctgtgggcggcggcggcctgctgtgtggggtggtgcagggcctgcaggaggtgggctggggagatgtgcctgtgattgccatggagaccttcggggcccacagcttccacgccgccaccacagctgggaagctggtgtccctgcccaagatcacctctgtggccaaggccctgggcgtgaagacagtgggcgcccaggccctgaagctgttccaggagcaccccatcttcagcgaggtgatcagtgaccaggaggccgtggccgccatcgagaagtttgtggatgatgagaagatcctggtggagcccgcctgtggggccgccctggccgctgtgtacagccacgtgatccagaagctgcagctggagggcaacctgcggacccccctgcccagcctggtggtgattgtgtgtggcggcagcaacatcagcctggcccagctgcgggccctgaaggagcagctgggcatgaccaaccggctgcccaagtag

SEQ ID NO: 168536 - DNA, 657 bp, Artificial Sequence
  derived and/or modified sequence
atgatgtctggagagcccctgcacgtgaagacccccatccgggacagcatggccctgagcaagatggccggcacctctgtgtacctgaagatggattctgcccagcccagcggcagcttcaagatccggggcatcggccacttctgcaagcgctgggccaagcagggctgtgcccactttgtgtgcagcagcgctggaaatgccggcatggccgccgcctatgctgcccggcagctgggcgtgcctgccaccatcgtggtgcccagcaccaccccagccctgaccatcgagcggctgaagaatgaaggagccaccgtgaaggtggtgggggagctgctggatgaggcctttgagctggccaaggccctggccaagaacaaccctggctgggtgtacatccccccatttgatgaccccctcatctgggagggccacgccagcatcgtgaaggagctgaaggagaccctgtgggagaagccaggggccatcgccctgtctgtgggcggcggcggcctgctgtgtggggtggtgcagggcctgcaggaggtgggctggggagatgtgcctgtgattgccatggagaccttcggggcccacagcttccacgccgccaccacagctgggaagctggtgtccctgcccaagatcaccaggtag

SEQ ID NO: 168537 - DNA, 987 bp, Artificial Sequence
  derived and/or modified sequence
atgatgagcggcgagcccctgcacgtgaagacccccatccgggactcaatggctctgtctaagatggcaggcaccagcgtgtaccttaaaatggatagcgcccagccatcaggctcatttaagattaggggcatcggtcatttttgcaagcggtgggccaaacagggatgtgcgcacttcgtgtgctcgtccgcagggaacgccggaatggcggctgcatacgctgcccggcagctgggcgtacctgcaactattgtggtgccatcgaccactcccgcactaaccatcgagaggctgaagaatgagggcgctacggtgaaggtggtcggcgagctgctggatgaagcttttgagctggccaaggcccttgccaaaaacaatcctggctgggtgtatattcctccctttgacgacccactgatatgggaaggacatgcctctatcgtgaaggaacttaaggagacgttgtgggagaagcccggcgcaatcgcactgtccgtgggaggtggcggactgctgtgcggcgtggtgcaaggtctgcaggaagtgggatggggtgacgttccagttatcgccatggaaacctttggcgctcactcattccatgctgcaaccaccgctggaaagctggtgagcctgcccaaaataacatcggtggcaaaggccttgggagtcaaaacggtgggggctcaggctctcaaactatttcaggagcacccaatattcagtgaggtgatttcggatcaggaagcagtcgccgccatcgaaaaattcgtggatgacgaaaagattcttgttgagcccgcgtgtggagcggcactggctgccgtgtatagtcacgttatccagaagctgcagctagaaggtaaccttaggacccccttaccctcattggtggttatagtctgtggtggcagcaatatctcccttgctcaactgcgggcgttgaaagaacaattaggcatgaccaataggttgcctaagtag

SEQ ID NO: 168538 - DNA, 657 bp, Artificial Sequence
  derived and/or modified sequence
atgatgagcggcgagcccctgcacgtgaagacccccatccgggactcgatggctttaagcaagatggccggtacctcagtgtatctgaaaatggactctgcgcagccgagtggcagcttcaagatcagagggataggacacttctgcaaacgatgggcaaagcagggttgtgcacactttgtttgttccagtgccgggaacgcgggtatggccgctgcatatgcagccagacagctgggcgtccccgctacaatagtggttccctcgacgaccccagccttaacaatcgagcgtctcaaaaacgaaggggcaaccgtcaaggtggtgggggagcttctggacgaagcttttgagctggccaaggctttggcgaaaaacaatcccggctgggtctatataccaccgtttgatgacccactgatctgggagggccatgccagcatagtcaaagagcttaaggagacactttgggaaaagcctggagctattgctctgagtgtgggcggcggcgggctcctttgtggcgtcgtgcagggactgcaggaggtcggatggggggacgtccctgttattgccatggaaacctttggcgctcacagtttccatgcagccactacggccggcaagctggtgtccctcccaaaaatcacaaggtag

SEQ ID NO: 168539 - DNA, 987 bp, Artificial Sequence
  derived and/or modified sequence
atgatgagcggcgaacctttgcacgtgaagaccccaatacgggactccatggcgttatccaaaatggccggaacgagcgtctatctgaaaatggatagcgctcagccttctggcagtttcaaaatcagaggaatcggccatttttgcaagaggtgggccaaacagggatgcgcccacttcgtgtgcagctctgccggtaacgccggtatggcagccgcttatgcagcaaggcagttaggcgttcccgcaacaatcgtggtcccgtcgactacaccagcgcttaccatcgaaaggctgaaaaatgagggcgctacggtgaaagtggtgggggagctattagacgaggcctttgaactcgctaaggccttggccaagaacaatcccggatgggtctatattccgcctttcgacgatcctctaatctgggagggtcatgccagcatcgtaaaagagctgaaagagacactttgggaaaagcccggagcaatagcccttagcgtcggaggcggtggactgctttgcggggtggtacagggattgcaagaagtgggctggggagatgtgcccgtcattgccatggaaacgttcggcgctcatagcttccatgctgctactacagctggcaagctcgtgtcccttcccaagattactagcgttgccaaagccttgggagtgaaaactgtgggcgctcaggcattgaagctatttcaggaacacccaatcttcagtgaggtgatctcagaccaggaagctgtcgccgctatcgagaagttcgtggacgatgaaaaaattttagtggagcctgcgtgtggagcggcactggcagctgtgtactcccatgtcatccagaagctccaactggaagggaatcttcgaactccactgcccagtttggtggtaattgtctgtgggggtagcaacatttctttggcacagctcagagcgttgaaagagcagctgggcatgaccaatagactgccgaagtag

SEQ ID NO: 168540 - DNA, 657 bp, Artificial Sequence
  derived and/or modified sequence
atgatgtctggggaacccctacacgtgaagacacccatccgggacagcatggccctctccaagatggcaggtacctctgtctatctgaaaatggacagtgcccagccttcaggcagttttaagataaggggcatcggccacttttgcaaacgatgggctaaacagggatgcgctcactttgtgtgcagctccgctgggaacgcgggtatggcagctgcctacgcagctcgtcagcttggagtgcccgcaactattgttgttccttccacaacccccgcacttacaatcgaacggctaaagaacgaaggcgctaccgtgaaagtcgtcggagagctgctagacgaagccttcgaattagctaaagctctcgccaaaaataacccgggttgggtgtacattccacctttcgacgaccctctgatttgggaaggtcatgcctcaatcgtgaaagagctgaaggagacactgtgggaaaaacctggagcaatcgccctgtcggtgggaggcggaggtctgctgtgcggggtggtccagggcctgcaggaggtgggttggggggatgtccccgtgatcgccatggaaaccttcggtgcccacagcttccacgcagcgaccactgctgggaaactggttagtttgcccaagataaccaggtag

SEQ ID NO: 168541 - DNA, 1606 bp, Artificial Sequence
  derived and/or modified sequence
ggaccattcagaagactgtccacccgtcctcagccccctctcttcgtgggctatctactcagttgatccctccctcgctggcttggctctgactcctgctcagacccatcacctttgccgggaatgatgtctggagaacccctgcacgtgaagacccccatccgtgacagcatggccctgtccaaaatggccggcaccagcgtctacctcaagatggacagtgcccagccctccggctccttcaagatccggggcattgggcacttctgcaagaggtgggccaagcaaggctgtgcacattttgtctgctcctcggcgggcaacgcaggcatggcggctgcatatgcggccaggcaactcggcgtccccgccaccatcgtggtgcccagcaccacacctgctctcaccattgagcgcctcaagaatgaaggtgccacagtcaaggtggtgggtgagttattggatgaagccttcgagctggccaaggccctagcgaagaacaacccgggttgggtctacattcccccctttgatgaccccctcatctgggaaggccacgcttccatcgtgaaagagctgaaggagacactgtgggaaaagccgggggccatcgcgctgtcagtgggcggcgggggcctgctgtgtggagtggtccaggggctgcaggaggtgggctggggggacgtgcctgtcatcgccatggagacttttggtgcccacagcttccacgctgccaccaccgcaggcaaacttgtctccctgcccaagatcaccagtgttgccaaggccctgggcgtgaagactgtgggggctcaggccctgaagctgtttcaggaacaccccattttctctgaagttatctcggaccaggaggctgtggccgccattgagaagttcgtggatgatgagaagatcctggtggagcccgcctgcggggcagccctggccgctgtctatagccacgtgatccagaagctccaactggaggggaatctccgaaccccgctgccatccctcgtggtcatcgtctgcgggggcagcaacatcagcctggcccagctgcgggcgctcaaggaacagctgggcatgacaaataggttgcccaagtgaggacggaccccttaccgatctgtgctctcctagcccaagagacccctggaggggctggagttttatccagcgcctcgtcgtatgtttggctgagcacctgtggcctgggtgcaggttaacttcttgttatcaggagcccactatgcagaggccaaaggtcggcagccagcgaggctatgaattggacctttttggtatctgtgtgactgctctgtgcccatccttagccaacttgctggcgtgacaagtgcccacaagtaacacaccaggtacccagagcagggtggacaggagagacctgaatcacagcagtgaggaattcctcaaagctgtgacctcgcccctgaacttgttcccagtgaaggtcaacagggccaccaaccagggttgaggaaccatctcagccatcctcccaggaagcccacccctgacccttactaatttttctaatgtgcaaactttttcattgaaaaataaaatatatttatgaaacaaa

SEQ ID NO: 168542 - DNA, 1281 bp, Artificial Sequence
  derived and/or modified sequence
accattcagaagactgtccacccgtcctcagccccctctcttcgtgggctatctactcagttgatccctccctcgctggcttggctctgactcctgctcagacccatcacctttgccgggaatgatgtctggagaacccctgcacgtgaagacccccatccgtgacagcatggccctgtccaaaatggccggcaccagcgtctacctcaagatggacagtgcccagccctccggctccttcaagatccggggcattgggcacttctgcaagaggtgggccaagcaaggctgtgcacattttgtctgctcctcggcgggcaacgcaggcatggcggctgcatatgcggccaggcaactcggcgtccccgccaccatcgtggtgcccagcaccacacctgctctcaccattgagcgcctcaagaatgaaggtgccacagtcaaggtggtgggtgagttattggatgaagccttcgagctggccaaggccctagcgaagaacaacccgggttgggtctacattcccccctttgatgaccccctcatctgggaaggccacgcttccatcgtgaaagagctgaaggagacactgtgggaaaagccgggggccatcgcgctgtcagtgggcggcgggggcctgctgtgtggagtggtccaggggctgcaggaggtgggctggggggacgtgcctgtcatcgccatggagacttttggtgcccacagcttccacgctgccaccaccgcaggcaaacttgtctccctgcccaagatcaccaggtgagcagctggggtgcctccctcgggtgtccagcaagcactggggagtcccccttagggctggctttgagatagatcctgatgtcagcctgtttcacagatgagacaatggaggctttgatcgcttgcccagggccacgtccagtgagtggtacagcttggactcaaacccaagtctgtgtgactccaacatgtcacacttcctcacgtgaaaagcctcatatgaggctgggcacagtgacttgtgcctgtaatcccagcactttggaaggccgaggggggtggatcacctaaggtcaggaattcgaggccagcctggtcaacatagtgaaaccccatctctactaaaaatacaaaaattagccgggtgtggtggtgggcacctgtagtcccagctactcggtaggctgaggctggagaattgcttgaacccgggaggcagagattgcagtgagctgagatcgcaccactgcactccagcctgggcaacagagcaagactccgtct

SEQ ID NO: 168543 - DNA, 987 bp, Artificial Sequence
  derived and/or modified sequence
atgatgagcggcgagcccctgcacgtgaagacccccatcagagacagcatggccctgagcaagatggccggcaccagcgtgtacctgaagatggacagcgcccagcccagcggcagcttcaagatcagaggcatcggccacttctgcaagagatgggccaagcagggctgcgcccacttcgtgtgcagcagcgccggcaacgccggcatggccgccgcctacgccgccagacagctgggcgtgcccgccaccatcgtggtgcccagcaccacccccgccctgaccatcgagagactgaagaacgagggcgccaccgtgaaggtggtgggcgagctgctggacgaggccttcgagctggccaaggccctggccaagaacaaccccggctgggtgtacatcccccccttcgacgaccccctgatctgggagggccacgccagcatcgtgaaggagctgaaggagaccctgtgggagaagcccggcgccatcgccctgagcgtgggcggcggcggcctgctgtgcggcgtggtgcagggcctgcaggaggtgggctggggcgacgtgcccgtgatcgccatggagaccttcggcgcccacagcttccacgccgccaccaccgccggcaagctggtgagcctgcccaagatcaccagcgtggccaaggccctgggcgtgaagaccgtgggcgcccaggccctgaagctgttccaggagcaccccatcttcagcgaggtgatcagcgaccaggaggccgtggccgccatcgagaagttcgtggacgacgagaagatcctggtggagcccgcctgcggcgccgccctggccgccgtgtacagccacgtgatccagaagctgcagctggagggcaacctgagaacccccctgcccagcctggtggtgatcgtgtgcggcggcagcaacatcagcctggcccagctgagagccctgaaggagcagctgggcatgaccaacagactgcccaagtag

SEQ ID NO: 168544 - DNA, 657 bp, Artificial Sequence
  derived and/or modified sequence
atgatgagcggcgagcccctgcacgtgaagacccccatcagagacagcatggccctgagcaagatggccggcaccagcgtgtacctgaagatggacagcgcccagcccagcggcagcttcaagatcagaggcatcggccacttctgcaagagatgggccaagcagggctgcgcccacttcgtgtgcagcagcgccggcaacgccggcatggccgccgcctacgccgccagacagctgggcgtgcccgccaccatcgtggtgcccagcaccacccccgccctgaccatcgagagactgaagaacgagggcgccaccgtgaaggtggtgggcgagctgctggacgaggccttcgagctggccaaggccctggccaagaacaaccccggctgggtgtacatcccccccttcgacgaccccctgatctgggagggccacgccagcatcgtgaaggagctgaaggagaccctgtgggagaagcccggcgccatcgccctgagcgtgggcggcggcggcctgctgtgcggcgtggtgcagggcctgcaggaggtgggctggggcgacgtgcccgtgatcgccatggagaccttcggcgcccacagcttccacgccgccaccaccgccggcaagctggtgagcctgcccaagatcaccagatag

SEQ ID NO: 168545 - protein, 1064 aa, Artificial Sequence
  derived and/or modified sequence
MKIATVSVLLPLALCLIQDAASKNEDQEMCHEFQAFMKNGKLFCPQDKKFFQSLDGIMFINKCATCKMILEKEAKSQKRARHLARAPKATAPTELNCDDFKKGERDGDFICPDYYEAVCGTDGKTYDNRCALCAENAKTGSQIGVKSEGECKSSNPEQDVCSAFRPFVRDGRLGCTRENDPVLGPDGKTHGNKCAMCAELFLKEAENAKREGETRIRRNAEKDFCKEYEKQVRNGRLFCTRESDPVRGPDGRMHGNKCALCAEIFKQRFSEENSKTDQNLGKAEEKTKVKREIVKLCSQYQNQAKNGILFCTRENDPIRGPDGKMHGNLCSMCQAYFQAENEEKKKAEARARNKRESGKATSYAELCSEYRKLVRNGKLACTRENDPIQGPDGKVHGNTCSMCEVFFQAEEEEKKKKEGKSRNKRQSKSTASFEELCSEYRKSRKNGRLFCTRENDPIQGPDGKMHGNTCSMCEAFFQQEERARAKAKREAAKEICSEFRDQVRNGTLICTREHNPVRGPDGKMHGNKCAMCASVFKLEEEEKKNDKEEKGKVEAEKVKREAVQELCSEYRHYVRNGRLPCTRENDPIEGLDGKIHGNTCSMCEAFFQQEAKEKERAEPRAKVKREAEKETCDEFRRLLQNGKLFCTRENDPVRGPDGKTHGNKCAMCKAVFQKENEERKRKEEEDQRNAAGHGSSGGGGGNTQDECAEYREQMKNGRLSCTRESDPVRDADGKSYNNQCTMCKAKLEREAERKNEYSRSRSNGTGSESGKDTCDEFRSQMKNGKLICTRESDPVRGPDGKTHGNKCTMCKEKLEREAAEKKKKEDEDRSNTGERSNTGERSNDKEDLCREFRSMQRNGKLICTRENNPVRGPYGKMHINKCAMCQSIFDREANERKKKDEEKSSSKPSNNAKDECSEFRNYIRNNELICPRENDPVHGADGKFYTNKCYMCRAVFLTEALERAKLQEKPSHVRASQEEDSPDSFSSLDSEMCKDYRVLPRIGYLCPKDLKPVCGDDGQTYNNPCMLCHENLIRQTNTHIRSTGKCEESSTPGTTAASMPPSDE

SEQ ID NO: 168546 - DNA, 3195 bp, Artificial Sequence
  derived and/or modified sequence
atgaagattgccacagtatccgtcctgctgcctctggcactttgtctgattcaggatgcagcctccaaaaacgaagaccaagagatgtgccacgaatttcaggcattcatgaagaacggtaaactattctgtccccaggacaagaagtttttccagtccctggatggcatcatgttcattaacaaatgcgccacctgtaagatgatcctggagaaggaagctaaaagccaaaagcgggcccgacatctagcacgagctcctaaggcaaccgctcccacagagctgaactgcgacgactttaaaaagggtgaaagagatggcgacttcatatgcccagattactatgaggcagtgtgcgggactgacggaaagacctacgacaataggtgcgctctttgcgccgagaatgcaaaaacaggttcccagataggcgtgaagagcgagggagaatgtaaaagctctaatcccgagcaagacgtctgcagcgcttttcgacccttcgttagggacggcagactgggatgcactcgcgaaaatgacccagtgctgggacctgacggcaagacacatggaaataagtgtgctatgtgcgccgaactcttcctgaaggaggctgagaatgccaaaagagagggggagacgcggatcagaagaaacgctgagaaagacttttgcaaagagtacgagaagcaggtaagaaatggacgactgttctgcacgcgtgagtcagaccccgtgagaggacctgatggcagaatgcatgggaataagtgtgcactgtgcgccgagatttttaagcaaaggtttagcgaagagaatagtaaaacagaccaaaatctgggaaaggccgaggaaaaaaccaaggtgaagagggaaatcgtgaaattgtgcagtcagtaccagaatcaggcaaaaaacggaatactgttttgcacccgcgagaacgaccccattcgcggaccagacggaaagatgcacggtaacctctgttccatgtgccaggcatactttcaggcggaaaacgaggagaagaaaaaggccgaggccagggcaagaaacaagcgcgagtccggtaaagcaacgtcttacgctgaattatgctccgagtatcggaagttggtgcggaatggaaagctggcatgtacaagagaaaacgaccctattcaaggccctgacggaaaagtccacggcaacacctgctcaatgtgcgaagtgtttttccaagcagaagaagaggaaaagaagaagaaggaaggtaagtcacggaacaaacggcaatccaaatctactgcatcttttgaggaactgtgctccgagtaccgcaaaagccgaaaaaacggtcgactgttctgcacgcgggagaatgatcctatacagggccccgacggcaagatgcacggcaacacctgttcaatgtgcgaagcttttttccagcaggaggagagggcccgagctaaggcaaaaagagaagccgccaaagaaatctgctcggagtttagagaccaggtcaggaacggaacgctaatctgcactagagaacacaaccctgtgcgcggccctgacgggaagatgcacggaaacaagtgtgctatgtgtgcttccgtgttcaaacttgaggaagaggaaaagaaaaacgataaagaggagaaggggaaggtcgaagctgagaaagtgaaacgggaggctgtgcaggagctatgctctgagtatcgccactacgtcaggaatgggcgactaccttgtacacgggaaaacgatccaattgaggggcttgacggaaaaatccatggaaatacttgctccatgtgcgaggctttttttcaacaggaggcaaaggaaaaggaacgcgcagagccacgagccaaagtcaaacgggaggctgagaaggaaacgtgcgatgagttccgccgcctgctacagaatggtaagctgttctgcactcgggaaaacgatcccgtgagggggccagatggtaaaactcacgggaataagtgcgcaatgtgcaaagccgtgtttcaaaaggagaatgaagagagaaaaagaaaggaagaggaggaccaaaggaatgcagccggtcacggctcctccggaggcggaggggggaatactcaagatgagtgcgcagagtaccgggagcagatgaaaaacggcagactgagctgtacgcgagaatcagatcctgtgcgcgacgccgatggtaagtcatataataaccagtgtacaatgtgtaaggcgaagttggaaagagaggcggaacgtaagaacgagtattcacggtcccgttcaaatggtacgggcagcgagtctggcaaggatacctgtgacgagtttaggtcacagatgaagaatgggaaactcatctgcacgcgggaatctgatccggtgagagggcctgacggcaaaacccatggcaataaatgcaccatgtgtaaggagaagttggagcgggaggcggcagagaaaaaaaaaaaggaagatgaagaccgctcaaacacaggggagcgaagcaacactggtgaacggtccaacgataaggaggacctctgtagggagttccgatctatgcaacgcaatggaaaactgatctgcacccgggagaataaccccgtcagagggccgtacggtaagatgcacataaataaatgcgccatgtgtcagtccattttcgatagggaggctaacgaacggaagaagaaggatgaggaaaaaagctcttcaaaaccttccaataatgcgaaagacgaatgctctgagtttcgtaactatatacgtaacaatgaactcatttgcccccgagagaacgacccggtacacggcgccgatggcaagttctatactaacaagtgttatatgtgtcgggccgtgtttcttaccgaagccctagaacgagcaaaacttcaagagaaaccaagccacgtccgcgctagtcaagaggaggactctcccgattccttctcttcactggactcagaaatgtgtaaagactacagggtgctccctcgaataggttacttgtgtcccaaggatctaaaacctgtttgcggcgacgacggccaaacatacaataatccttgtatgctgtgtcacgagaatctaatacggcagactaatacacacatcaggagcaccggtaaatgtgaagagtcatcgactcctgggactactgcggcctctatgcctccatcggacgagtag

SEQ ID NO: 168547 - DNA, 3195 bp, Artificial Sequence
  derived and/or modified sequence
atgaagatcgccaccgtgtctgtgctgctgcccctggccctgtgcctgatccaggatgctgccagcaagaatgaagaccaggagatgtgccacgagttccaggccttcatgaagaatggcaagctgttctgcccccaggacaagaagttcttccagagcctggatggcatcatgttcatcaacaagtgtgccacctgcaagatgatcctggagaaggaggccaagagccagaagagggcccggcacctggcccgggcccccaaggccacagcccccacagagctgaactgtgatgacttcaagaagggggagagagatggagacttcatctgcccagactactatgaagctgtgtgtggcacagatggcaagacctatgacaacagatgtgccctgtgtgctgaaaatgccaagacaggcagccagattggagtgaagtctgagggggagtgcaagagcagcaaccctgagcaggatgtgtgcagcgccttccggccctttgtgagagatggccgcctgggctgcacccgggagaatgaccctgtgctgggcccagatggcaagacccacggcaacaagtgtgccatgtgtgccgagctgttcctgaaggaggccgagaatgccaagcgggagggggagacccgcatcagaagaaatgctgagaaggacttctgcaaggagtatgagaagcaggtgagaaatggccgcctcttctgcacccgggagagtgaccctgtgcggggcccagatggccgcatgcacggcaacaagtgtgccctgtgtgccgagatcttcaagcagcgcttcagcgaggagaacagcaagacagaccagaacctgggcaaggccgaggagaagaccaaggtgaagcgggagatcgtgaagctgtgcagccagtaccagaaccaggccaagaatggcatcctcttctgcacccgggagaatgaccccatccggggcccagatggcaagatgcacggcaacctgtgcagcatgtgccaggcctacttccaggccgagaatgaggagaagaagaaggccgaggcccgggccaggaacaagcgggagagcggcaaggccaccagctatgcagagctgtgcagcgagtacaggaagctggtgagaaatggcaagctggcctgcacccgggagaatgaccccatccagggcccagatggcaaggtgcacggcaacacctgcagcatgtgtgaggtgttcttccaggccgaggaggaggagaagaagaagaaggagggcaagagcaggaacaagaggcagagcaagagcacagccagctttgaggagctgtgcagcgagtacaggaagagcaggaagaatggccgcctcttctgcacccgggagaatgaccccatccagggcccagatggcaagatgcacggcaacacctgcagcatgtgtgaggccttcttccagcaggaggagcgggcccgggccaaggccaagcgggaggccgccaaggagatctgcagcgagttccgggaccaggtgagaaatggcaccctcatctgcacccgggagcacaaccctgtgcggggcccagatggcaagatgcacggcaacaagtgtgccatgtgtgccagcgtcttcaagctggaggaggaggagaagaagaatgacaaggaggagaagggcaaggtggaggccgagaaggtgaagcgggaggccgtgcaggagctgtgcagcgagtaccgccactacgtgagaaatggccgcctgccctgcacccgggagaatgaccccatcgagggcctggatggcaagatccacggcaacacctgcagcatgtgtgaggccttcttccagcaggaggccaaggagaaggagagagctgagccccgggccaaggtgaagcgggaggccgagaaggagacctgtgatgagttccggcggctgctgcagaatggcaagctgttctgcaccagagaaaatgaccctgtgcggggcccagatggcaagacccacggcaacaagtgtgccatgtgcaaggctgtgttccagaaggaaaatgaggagaggaagaggaaggaggaggaggaccagagaaatgctgctggccacggcagcagcggcggcggcggcggcaacacccaggatgaatgtgccgagtaccgggagcagatgaagaatggccgcctgagctgcacccgggagagtgaccctgtgagagatgctgatggcaagagctacaacaaccagtgcaccatgtgcaaggccaagctggagcgggaggccgagaggaagaatgagtacagccgcagccgcagcaatggaactggaagtgaaagtggcaaggacacctgtgatgagttccgcagccagatgaagaatggcaagctgatctgcacccgggagagtgaccctgtgcggggcccagatggcaagacccacggcaacaagtgcaccatgtgcaaggagaagctggagcgggaggccgctgagaagaagaagaaggaggatgaagatagaagcaacacaggagagaggagcaacacaggagagaggagcaatgacaaggaggacctgtgccgggagttccgctccatgcagagaaatggcaagctgatctgcacccgggagaacaaccctgtgcggggcccctacggcaagatgcacatcaacaagtgtgccatgtgccagagcatctttgaccgggaggccaatgaaaggaagaagaaggatgaggagaagagcagcagcaagcccagcaacaatgccaaggatgaatgttctgagttcaggaactacatccggaacaatgagctgatctgccccagagaaaatgaccctgtgcacggggctgatggcaagttctacaccaacaagtgctacatgtgcagagctgtgttcctgacagaggccctggagcgggccaagctgcaggagaagcccagccacgtgcgggccagccaggaggaggacagcccagacagcttcagcagcctggacagcgagatgtgcaaggactacagagtgctgccccgcatcggctacctgtgccccaaggacctgaagcctgtgtgtggagatgatggccagacctacaacaacccctgcatgctgtgccacgagaacctgatccggcagaccaacacccacatccgcagcactggaaaatgtgaggagagcagcaccccaggcaccacagctgcctccatgccacccagtgatgaatag

SEQ ID NO: 168548 - DNA, 3195 bp, Artificial Sequence
  derived and/or modified sequence
atgaagatcgccaccgtgagcgtgctgctgcccctggccctgtgccttatacaagacgccgcctctaagaatgaagatcaggagatgtgtcatgaattccaggccttcatgaaaaacggaaagctgttctgcccccaagacaagaaatttttccaatcactggatggcattatgttcattaataagtgtgccacctgcaagatgatcctcgagaaggaagctaaaagtcaaaaacgtgcccggcaccttgcacgcgcaccaaaggcaaccgctcctacagagctgaattgtgacgatttcaaaaagggcgagagagatggggactttatctgtccagactattatgaggcagtctgtggtactgatggaaagacttacgacaatcgttgcgctctatgcgccgaaaacgctaagacaggaagtcagattggcgtgaaatcagagggggagtgtaaatcgtccaacccagagcaagatgtgtgtagcgccttccgccctttcgtccgcgacgggagattgggttgcaccagggagaacgacccggttctcggacccgatggtaagacacatggcaataagtgcgccatgtgtgccgaactatttcttaaggaagccgaaaatgctaagcgagagggggaaactcggattaggcgcaatgctgaaaaggatttttgtaaggagtacgagaagcaggtgcgaaacggcaggttattttgcacgagagagtcagacccagtcaggggtcctgatgggagaatgcacgggaacaaatgcgccctttgcgccgaaatttttaagcagcggttttcagaagagaactctaaaacggaccagaatttggggaaagctgaagagaaaaccaaagtgaaaagagagattgtgaaattgtgttctcagtaccagaaccaggccaagaacggcatcctgttctgcactcgggagaacgaccccatcagaggccccgacgggaagatgcatggaaatctctgcagtatgtgccaggcttacttccaggcggaaaatgaagagaaaaagaaggccgaagccagagctagaaataagcgggaaagcggaaaagccacgtcttatgccgagctttgtagtgagtatcggaagttggtgcggaacggcaaattggcctgcactagggaaaacgatccaatccagggtccggatggaaaggtccacggtaacacctgcagcatgtgcgaagtcttctttcaggcagaagaagaagagaagaagaagaaggagggcaagagcagaaataagcgccaaagcaaaagcaccgcctcttttgaggaactttgttcagagtataggaagtctcgcaaaaacggccgtctgttctgtaccagggagaatgaccctattcagggccctgatggcaaaatgcatggaaacacctgctctatgtgcgaagctttctttcagcaggaagagcgggccagggcaaaagcaaaaagggaagccgcaaaggagatctgcagtgaatttagagatcaagttcggaacggaaccttgatttgcacccgggagcacaatcccgtgaggggaccagatggcaaaatgcacgggaataagtgtgcaatgtgcgccagtgtgtttaaactagaggaagaggagaagaagaacgataaagaggagaagggaaaggtggaggctgagaaggttaagcgggaagcagtgcaggagctgtgctccgaataccggcactacgtccgaaatggtcgcttaccatgtacccgggagaacgaccccatcgagggtctggacgggaagatccatggaaacacttgttccatgtgtgaggcctttttccaacaggaggcaaaggaaaaagagagagccgaaccaagagccaaagtaaagcgggaagccgagaaggaaacatgtgatgagtttaggaggcttcttcagaacggcaagctcttttgcacccgggaaaatgatcctgtgcgaggccccgacggcaagacccatggcaacaagtgcgctatgtgcaaagccgtttttcaaaaggaaaacgaagaaagaaaacggaaggaggaggaagaccaaagaaatgccgcgggacacgggtcatctggtgggggtggaggtaatacccaggacgagtgcgccgagtaccgggagcagatgaaaaatgggaggttgtcctgcacaagggaatccgacccggtacgagacgcagacggaaagagctacaacaaccagtgtactatgtgtaaagcaaaactggagcgcgaggcagagcgcaagaatgagtattccagaagcaggtccaatggcacaggctccgaaagtggcaaagatacatgcgacgagtttcggtctcaaatgaagaacggcaagctgatatgtacacgggagtccgaccccgtccgagggccagacggcaagacacatggaaacaagtgtacgatgtgcaaagaaaaactcgaaagggaggcggctgagaaaaagaagaaagaagacgaggatagaagcaacacaggggagcggtccaacaccggggaacggtccaacgataaggaagacctctgtagggagtttaggagcatgcaaagaaatggcaagttgatctgtactcgggagaataatccagtaagagggccatacgggaagatgcatattaataagtgtgcaatgtgtcagtctatcttcgaccgtgaggcaaatgaacggaaaaaaaaagacgaggaaaagtcgtcctccaaacccagtaacaatgctaaagacgagtgttctgagtttcgcaattatattcgtaataacgaactcatctgcccgagggagaacgacccggtgcacggagccgacggcaagttttacactaataaatgttatatgtgcagagccgttttcctgactgaggcacttgagcgggctaagttacaggagaaaccgagtcacgtccgagcctcacaggaggaggattcgcctgactctttcagttccctggacagtgagatgtgcaaagattatcgcgtgcttccaagaattgggtacctctgccctaaagacctaaagccggtgtgtggggatgacggccagacctacaataacccatgtatgttgtgccatgagaatttgattaggcaaaccaacacccacatcaggagcactggcaagtgcgaagagtcttccacaccaggtacaacagccgcttccatgccaccttcggacgaatag

SEQ ID NO: 168549 - DNA, 3195 bp, Artificial Sequence
  derived and/or modified sequence
atgaaaatagctactgttagcgtcttactccccttagctttatgccttattcaggacgccgcttcaaaaaacgaagaccaggaaatgtgtcacgaattccaggcctttatgaaaaatgggaagttgttctgtcctcaagacaaaaaattctttcaaagcttagacggaattatgttcatcaataagtgcgccacctgtaaaatgatcctggagaaggaagctaagagccagaagagagcgaggcacctggctagggcgccaaaagctactgcccctactgaactaaattgcgatgatttcaaaaagggcgagagagacggagattttatctgtcccgattattacgaggcagtctgcgggacagatggaaagacgtacgataatcgttgcgcactctgtgcagagaacgccaaaacagggtcacagatcggggtgaaatccgagggagaatgcaagagcagcaacccagaacaggatgtctgctcagccttcaggcccttcgtgcgcgatgggagacttggatgcactcgagagaacgatcctgttctgggcccagacggtaaaacacacgggaacaaatgcgcaatgtgtgctgaactgttcctgaaggaagctgaaaacgccaaacgggagggcgaaaccaggattcggaggaatgccgaaaaggatttctgcaaggagtatgagaagcaggtgagaaacggacggctcttctgcacaagagagagcgatcccgtgcgtggacctgacgggagaatgcacggaaacaaatgcgctctttgtgctgaaatttttaagcagagatttagcgaggaaaattctaagactgatcagaatttaggaaaagcagaggaaaaaactaaggtgaagcgggagattgtgaaactgtgctcccagtaccagaaccaggcaaaaaacggaattctcttctgtacacgtgagaacgaccctatcaggggccctgatggcaagatgcacgggaacttatgttccatgtgccaggcttactttcaggccgagaatgaggagaagaagaaggctgaggctcgcgcaaggaataagagggaatctgggaaagcaacatcttacgctgagctttgctcagagtataggaaactcgtacgtaacgggaaactagcttgcaccagagaaaatgaccctatccaggggccagatggaaaggtgcatggcaacacgtgctcaatgtgtgaggtgttctttcaagccgaagaggaggagaagaaaaagaaggaaggaaagagtcgaaacaagcggcagtctaagtccactgcctcattcgaggaactgtgctcggagtaccggaaaagccgaaagaatggtaggctattttgtactagggagaatgaccccatccagggccctgacggcaagatgcatggaaacacctgttcgatgtgcgaggcattcttccagcaggaagagcgagcacgcgctaaggccaaaagggaagctgctaaggaaatctgttcagaatttcgggatcaggttcgaaatggtaccctcatttgcacgagagagcacaatcccgtgaggggacctgatgggaagatgcatggaaacaaatgtgcaatgtgcgccagcgtgttcaaattagaggaagaagagaaaaagaacgacaaggaggaaaaggggaaggtcgaagcagagaaagtgaaacgtgaagccgtacaggaactgtgttctgagtacagacattacgtgcgaaacggccgattaccctgtacccgcgaaaatgaccctattgagggcctggacggcaaaatacatggcaatacctgttctatgtgtgaggcgttctttcagcaagaagctaaggaaaaggagcgggctgaacccagggctaaggttaaaagagaggccgagaaggaaacttgcgatgagttccgacggctcctgcagaacggaaagctgttctgcacgcgggaaaatgaccccgtgaggggccctgatggcaaaacacatgggaacaagtgtgccatgtgcaaggctgttttccaaaaggaaaacgaggagcgtaagaggaaagaggaagaggatcagcgcaatgccgctggccacgggtcttcgggcggaggaggcggaaatacccaagatgagtgcgccgagtacagggagcagatgaagaatggaagactgtcctgcacgagagagtctgatccggtgagggatgcggatgggaagagctacaacaaccagtgtaccatgtgcaaagctaagctcgagagggaggcagaacgcaagaacgagtacagtcggtcacgaagcaatggcacagggtcagaaagcggcaaagacacttgcgatgaattccgctcccaaatgaaaaacggcaagttgatctgtacgagagagagcgatcccgtccggggacccgacgggaaaacccacggcaataaatgcaccatgtgtaaggaaaagttagaacgcgaagccgcagagaaaaagaagaaggaggatgaggacagatcaaacaccggggaaaggtccaacaccggcgaaagatccaatgacaaggaagatctctgcagggaatttcgcagtatgcagagaaatgggaaactgatctgtacacgggaaaacaaccctgtacgtggaccttatggcaagatgcatattaacaagtgtgctatgtgccagagcattttcgaccgggaggccaacgagaggaagaagaaggacgaagagaaatcttctagcaagccttcaaataatgccaaggatgagtgtagcgagttccgaaattatatccgcaacaacgagttaatctgccccagagagaatgacccggtccacggggcagacggcaaattctacacaaataaatgttacatgtgtcgcgctgttttcctgaccgaggccttggaaagagctaagctgcaagagaaaccttctcacgtccgcgcatcacaggaagaggactctcccgactcatttagctctctggactcggaaatgtgcaaagactaccgggtcctgccgaggatcgggtacctgtgcccaaaagatttgaagcccgtatgtggagacgatggccagacatacaacaacccctgcatgctgtgccatgaaaatcttatacgacagactaacacacacatcagatcaaccggaaagtgcgaggaaagctcgacccctgggacaacggcagcctctatgccgccatctgacgagtag

SEQ ID NO: 168550 - DNA, 3535 bp, Artificial Sequence
  derived and/or modified sequence
atgcatggagtggacctgtaggcgacttgcatcgtcttcaacatgaagatagccacagtgtcagtgcttctgcccttggctctttgcctcatacaagatgctgccagtaagaatgaagatcaggaaatgtgccatgaatttcaggcatttatgaaaaatggaaaactgttctgtccccaggataagaaattttttcaaagtcttgatggaataatgttcatcaataaatgtgccacgtgcaaaatgatactggaaaaagaagcaaaatcacagaagagggccaggcatttagcaagagctcccaaggctactgccccaacagagctgaattgtgatgattttaaaaaaggagaaagagatggggattttatctgtcctgattattatgaagctgtttgtggcacagatgggaaaacatatgacaacagatgtgcactgtgtgctgagaatgcgaaaaccgggtcccaaattggtgtaaaaagtgaaggggaatgtaagagcagtaatccagagcaggatgtatgcagtgcttttcggccctttgttagagatggaagacttggatgcacaagggaaaatgatcctgttcttggtcctgatgggaagacgcatggcaataagtgtgcaatgtgtgctgagctgtttttaaaagaagctgaaaatgccaagcgagagggtgaaactagaattcgacgaaatgctgaaaaggatttttgcaaggaatatgaaaaacaagtgagaaatggaaggcttttttgtacacgggagagtgatccagtccgtggccctgacggcaggatgcatggcaacaaatgtgccctgtgtgctgaaattttcaagcagcgtttttcagaggaaaacagtaaaacagatcaaaatttgggaaaagctgaagaaaaaactaaagttaaaagagaaattgtgaaactctgcagtcaatatcaaaatcaggcaaagaatggaatacttttctgtaccagagaaaatgaccctattcgtggtccagatgggaaaatgcatggcaacttgtgttccatgtgtcaagcctacttccaagcagaaaatgaagaaaagaaaaaggctgaagcacgagctagaaacaaaagagaatctggaaaagcaacctcatatgcagagctttgcagtgaatatcgaaagcttgtgaggaacggaaaacttgcttgcaccagagagaacgatcctatccagggcccagatgggaaagtgcatggcaacacctgctccatgtgtgaggtcttcttccaagcagaagaagaagaaaagaaaaagaaggaaggtaaatcaagaaacaaaagacaatctaagagtacagcttcctttgaggagttgtgtagtgaataccgcaaatccaggaaaaacggacggcttttttgcaccagagagaatgaccccatccagggcccagatggaaaaatgcatggcaacacctgctccatgtgtgaggccttctttcaacaagaagaaagagcaagagcaaaggctaaaagagaagctgcaaaggaaatctgcagtgaatttcgggaccaagtgaggaatggaacacttatatgcaccagggagcataatcctgtccgtggcccagatggcaaaatgcatggaaacaagtgtgccatgtgtgccagtgtgttcaaacttgaagaagaagagaagaaaaatgataaagaagaaaaagggaaagtcgaggctgaaaaagttaagagagaagcagttcaggagctgtgcagtgaatatcgtcattatgtgaggaatggacgactcccctgtaccagagagaatgatcctattgagggtctagatgggaaaatccacggcaacacctgctccatgtgtgaagccttcttccagcaagaagcaaaagaaaaagaaagagctgaacccagagcaaaagtcaaaagagaagctgaaaaggagacatgcgatgaatttcggagacttttgcaaaatggaaaacttttctgcacaagagaaaatgatcctgtgcgtggcccagatggcaagacccatggcaacaagtgtgccatgtgtaaggcagtcttccagaaagaaaatgaggaaagaaagaggaaagaagaggaagatcagagaaatgctgcaggacatggttccagtggtggtggaggaggaaacactcaggacgaatgtgctgagtatcgggaacaaatgaaaaatggaagactcagctgtactcgggagagtgatcctgtacgtgatgctgatggcaaatcgtacaacaatcagtgtaccatgtgtaaagcaaaattggaaagagaagcagagagaaaaaatgagtattctcgctccagatcaaatgggactggatcagaatcagggaaggatacatgtgatgagtttagaagccaaatgaaaaatggaaaactcatctgcactcgagaaagtgaccctgtccggggtccagatggcaagacacatggcaataagtgtactatgtgtaaggaaaaactggaaagggaagcagctgaaaaaaaaaagaaagaggatgaagacaggagcaatacaggagaaaggagcaatacaggagaaaggagcaatgacaaagaggatctgtgtcgtgaatttcgaagcatgcagagaaatggaaagcttatctgcaccagagaaaataaccctgttcgaggcccatatggcaagatgcacatcaataaatgtgctatgtgtcagagcatctttgatcgagaagctaatgaaagaaaaaagaaagatgaagagaaatcaagtagcaagccctcaaataatgcaaaggatgagtgcagtgaatttcgaaactatataaggaacaatgaactcatctgccctagagagaatgacccagtgcacggtgctgatggaaagttctatacaaacaagtgctacatgtgcagagctgtctttctaacagaagctttggaaagggcaaagcttcaagaaaagccatcccatgttagagcttctcaagaggaagacagcccagactctttcagttctctggattctgagatgtgcaaagactaccgagtattgcccaggataggttatctttgtccaaaggatttaaagcctgtctgtggtgacgatggccaaacctacaacaatccttgcatgctctgtcatgaaaacctgatacgccaaacaaatacacacatccgcagtacagggaagtgtgaggagagcagcaccccaggaaccaccgcagccagcatgcccccgtctgacgaatgacaggaagattgttgaaagccatgagggaaaaaataaaccccagttctgaatcacctaccttcaccatctgtatatacaaagaattcttcggagcttgtcttatttgctatagaaaacaatacagagcttttgggaatggactcactgattttcagtcttttccatctctttcctcctagactctgtgatctgagggtataaagacatctccaccaagtctgagccctcaaaatgtcctgattacaatgctgtctgtccaactgcctgttcaataaaagtaaactcagcagaacaccct

SEQ ID NO: 168551 - DNA, 3195 bp, Artificial Sequence
  derived and/or modified sequence
atgaagatcgccaccgtgagcgtgctgctgcccctggccctgtgcctgatccaggacgccgccagcaagaacgaggaccaggagatgtgccacgagttccaggccttcatgaagaacggcaagctgttctgcccccaggacaagaagttcttccagagcctggacggcatcatgttcatcaacaagtgcgccacctgcaagatgatcctggagaaggaggccaagagccagaagagagccagacacctggccagagcccccaaggccaccgcccccaccgagctgaactgcgacgacttcaagaagggcgagagagacggcgacttcatctgccccgactactacgaggccgtgtgcggcaccgacggcaagacctacgacaacagatgcgccctgtgcgccgagaacgccaagaccggcagccagatcggcgtgaagagcgagggcgagtgcaagagcagcaaccccgagcaggacgtgtgcagcgccttcagacccttcgtgagagacggcagactgggctgcaccagagagaacgaccccgtgctgggccccgacggcaagacccacggcaacaagtgcgccatgtgcgccgagctgttcctgaaggaggccgagaacgccaagagagagggcgagaccagaatcagaagaaacgccgagaaggacttctgcaaggagtacgagaagcaggtgagaaacggcagactgttctgcaccagagagagcgaccccgtgagaggccccgacggcagaatgcacggcaacaagtgcgccctgtgcgccgagatcttcaagcagagattcagcgaggagaacagcaagaccgaccagaacctgggcaaggccgaggagaagaccaaggtgaagagagagatcgtgaagctgtgcagccagtaccagaaccaggccaagaacggcatcctgttctgcaccagagagaacgaccccatcagaggccccgacggcaagatgcacggcaacctgtgcagcatgtgccaggcctacttccaggccgagaacgaggagaagaagaaggccgaggccagagccagaaacaagagagagagcggcaaggccaccagctacgccgagctgtgcagcgagtacagaaagctggtgagaaacggcaagctggcctgcaccagagagaacgaccccatccagggccccgacggcaaggtgcacggcaacacctgcagcatgtgcgaggtgttcttccaggccgaggaggaggagaagaagaagaaggagggcaagagcagaaacaagagacagagcaagagcaccgccagcttcgaggagctgtgcagcgagtacagaaagagcagaaagaacggcagactgttctgcaccagagagaacgaccccatccagggccccgacggcaagatgcacggcaacacctgcagcatgtgcgaggccttcttccagcaggaggagagagccagagccaaggccaagagagaggccgccaaggagatctgcagcgagttcagagaccaggtgagaaacggcaccctgatctgcaccagagagcacaaccccgtgagaggccccgacggcaagatgcacggcaacaagtgcgccatgtgcgccagcgtgttcaagctggaggaggaggagaagaagaacgacaaggaggagaagggcaaggtggaggccgagaaggtgaagagagaggccgtgcaggagctgtgcagcgagtacagacactacgtgagaaacggcagactgccctgcaccagagagaacgaccccatcgagggcctggacggcaagatccacggcaacacctgcagcatgtgcgaggccttcttccagcaggaggccaaggagaaggagagagccgagcccagagccaaggtgaagagagaggccgagaaggagacctgcgacgagttcagaagactgctgcagaacggcaagctgttctgcaccagagagaacgaccccgtgagaggccccgacggcaagacccacggcaacaagtgcgccatgtgcaaggccgtgttccagaaggagaacgaggagagaaagagaaaggaggaggaggaccagagaaacgccgccggccacggcagcagcggcggcggcggcggcaacacccaggacgagtgcgccgagtacagagagcagatgaagaacggcagactgagctgcaccagagagagcgaccccgtgagagacgccgacggcaagagctacaacaaccagtgcaccatgtgcaaggccaagctggagagagaggccgagagaaagaacgagtacagcagaagcagaagcaacggcaccggcagcgagagcggcaaggacacctgcgacgagttcagaagccagatgaagaacggcaagctgatctgcaccagagagagcgaccccgtgagaggccccgacggcaagacccacggcaacaagtgcaccatgtgcaaggagaagctggagagagaggccgccgagaagaagaagaaggaggacgaggacagaagcaacaccggcgagagaagcaacaccggcgagagaagcaacgacaaggaggacctgtgcagagagttcagaagcatgcagagaaacggcaagctgatctgcaccagagagaacaaccccgtgagaggcccctacggcaagatgcacatcaacaagtgcgccatgtgccagagcatcttcgacagagaggccaacgagagaaagaagaaggacgaggagaagagcagcagcaagcccagcaacaacgccaaggacgagtgcagcgagttcagaaactacatcagaaacaacgagctgatctgccccagagagaacgaccccgtgcacggcgccgacggcaagttctacaccaacaagtgctacatgtgcagagccgtgttcctgaccgaggccctggagagagccaagctgcaggagaagcccagccacgtgagagccagccaggaggaggacagccccgacagcttcagcagcctggacagcgagatgtgcaaggactacagagtgctgcccagaatcggctacctgtgccccaaggacctgaagcccgtgtgcggcgacgacggccagacctacaacaacccctgcatgctgtgccacgagaacctgatcagacagaccaacacccacatcagaagcaccggcaagtgcgaggagagcagcacccccggcaccaccgccgccagcatgccccccagcgacgagtag

SEQ ID NO: 168552 - protein, 525 aa, Artificial Sequence
  derived and/or modified sequence
MSRQLLPVLLLLLLRASCPWGQEQGARSPSEEPPEEEIPKEDGILVLSRHTLGLALREHPALLVEFYAPWCGHCQALAPEYSKAAAVLAAESMVVTLAKVDGPAQRELAEEFGVTEYPTLKFFRNGNRTHPEEYTGPRDAEGIAEWLRRRVGPSAMRLEDEAAAQALIGGRDLVVIGFFQDLQDEDVATFLALAQDALDMTFGLTDRPRLFQQFGLTKDTVVLFKKFDEGRADFPVDEELGLDLGDLSRFLVTHSMRLVTEFNSQTSAKIFAARILNHLLLFVNQTLAAHRELLAGFGEAAPRFRGQVLFVVVDVAADNEHVLQYFGLKAEAAPTLRLVNLETTKKYAPVDGGPVTAASITAFCHAVLNGQVKPYLLSQEIPPDWDQRPVKTLVGKNFEQVAFDETKNVFVKFYAPWCTHCKEMAPAWEALAEKYQDHEDIIIAELDATANELDAFAVHGFPTLKYFPAGPGRKVIEYKSTRDLETFSKFLDNGGVLPTEEPPEEPAAPFPEPPANSTMGSKEEL

SEQ ID NO: 168553 - protein, 522 aa, Artificial Sequence
  derived and/or modified sequence
MSRQLLPVLLLLLLRASCPWGQEQGARSPSEEPPEEEIPKEDGILVLSRHTLGLALREHPALLVEFYAPWCGHCQALAPEYSKAAAVLAAESMVVTLAKVDGPAQRELAEEFGVTEYPTLKFFRNGNRTHPEEYTGPRDAEGIAEWLRRRVGPSAMRLEDEAAAQALIGGRDLVVIGFFQDEDVATFLALAQDALDMTFGLTDRPRLFQQFGLTKDTVVLFKKFDEGRADFPVDEELGLDLGDLSRFLVTHSMRLVTEFNSQTSAKIFAARILNHLLLFVNQTLAAHRELLAGFGEAAPRFRGQVLFVVVDVAADNEHVLQYFGLKAEAAPTLRLVNLETTKKYAPVDGGPVTAASITAFCHAVLNGQVKPYLLSQEIPPDWDQRPVKTLVGKNFEQVAFDETKNVFVKFYAPWCTHCKEMAPAWEALAEKYQDHEDIIIAELDATANELDAFAVHGFPTLKYFPAGPGRKVIEYKSTRDLETFSKFLDNGGVLPTEEPPEEPAAPFPEPPANSTMGSKEEL

SEQ ID NO: 168554 - protein, 494 aa, Artificial Sequence
  derived and/or modified sequence
MGSGTGSEEPLGGASRGGNPQGGWDLGAEPPHPGPGPAGAPCPAGGILCPVVWALPGPGPRVQQGSCRARGRVNGGHAEEFGVTEYPTLKFFRNGNRTHPEEYTGPRDAEGIAEWLRRRVGPSAMRLEDEAAAQALIGGRDLVVIGFFQDLQDEDVATFLALAQDALDMTFGLTDRPRLFQQFGLTKDTVVLFKKFDEGRADFPVDEELGLDLGDLSRFLVTHSMRLVTEFNSQTSAKIFAARILNHLLLFVNQTLAAHRELLAGFGEAAPRFRGQVLFVVVDVAADNEHVLQYFGLKAEAAPTLRLVNLETTKKYAPVDGGPVTAASITAFCHAVLNGQVKPYLLSQEIPPDWDQRPVKTLVGKNFEQVAFDETKNVFVKFYAPWCTHCKEMAPAWEALAEKYQDHEDIIIAELDATANELDAFAVHGFPTLKYFPAGPGRKVIEYKSTRDLETFSKFLDNGGVLPTEEPPEEPAAPFPEPPANSTMGSKEEL

SEQ ID NO: 168555 - DNA, 1578 bp, Artificial Sequence
  derived and/or modified sequence
atgtcgcgacagctgctacctgttctgttgcttctgttgcttcgcgcatcttgcccatggggtcaagagcagggtgctagatcacctagcgaggagcccccagaggaagaaattcctaaggaagacggaattttggtcctgtctcgccacactctgggtcttgctttgcgggagcatcccgcactgctggtggaattttatgccccctggtgtggccactgtcaggccttggctcctgaatacagcaaagccgccgctgtgttggccgctgagtctatggttgtgacactggccaaggtggacggcccagcacagcgagagctggccgaagagttcggcgtgactgagtatcccaccctaaagttctttcgcaatggtaaccgcacacaccctgaggagtatacgggcccacgtgatgccgagggcatcgccgaatggttgcgcagacgggttgggccgtccgccatgcgactggaggatgaagccgctgcccaagcccttatcggcgggcgggatctcgttgtgataggcttcttccaggacctgcaggatgaagacgtggccaccttcctcgccttggcacaggacgctttggatatgacattcgggctgactgacaggccacgactcttccagcaatttgggcttacgaaggacactgtggttcttttcaaaaaattcgacgagggtagggccgactttccggtagacgaagagcttgggctggatctgggcgacttgagccgctttctagtaactcactcgatgcgtctcgtgaccgagttcaattcacaaacgtcggccaagatattcgctgcccggatcctcaaccacctgttgctgttcgttaatcaaacattagcagcccatagagagctgcttgccggtttcggcgaggctgctcctcggttccgggggcaggtgttattcgtggtggtggacgtggccgctgacaacgagcacgtacttcaatattttggcctaaaagctgaggctgcgcctacactccgtctggtgaatcttgagactactaagaagtatgctcctgttgacggggggccagtaaccgccgcttctattaccgccttttgccacgcggttttaaatggccaggttaagccttacctgctctctcaagaaattcctcccgattgggatcagagacctgttaaaacccttgtcggaaagaatttcgaacaggttgcgttcgatgagactaaaaatgtgttcgtgaagttttacgctccgtggtgcacccattgtaaagagatggccccagcctgggaggcccttgccgaaaagtatcaggatcatgaagacatcattattgctgagcttgacgcaacggctaatgagctggatgccttcgccgttcacggcttccctactctgaagtactttccagctgggccaggccgcaaagtgatcgagtataagtccacccgtgatctggagacattcagcaagttcctggacaatggtggagtgcttcctacagaagagcctccagaggagccggccgcaccattccctgagcccccggcaaatagtacgatgggcagcaaagaagagctgtag

SEQ ID NO: 168556 - DNA, 1578 bp, Artificial Sequence
  derived and/or modified sequence
atgagccggcagctgctgcctgtgctgctgctgctgctgctgcgggccagctgcccctggggccaggagcagggcgcccggagccccagcgaggagcccccagaggaggagatccccaaggaggatggcatcctggtgctgagccgccacaccctgggcctggccctgcgggagcacccagccctgctggtggagttctacgccccctggtgtggccactgccaggccctggcccctgagtacagcaaggctgctgctgtgctggccgctgagagcatggtggtgaccctggccaaggtggatggccctgcccagcgggagctggccgaggagtttggagtgacagagtaccccaccctgaagttcttcagaaatggaaacagaacccaccctgaggagtacacaggccccagagatgctgagggcattgctgagtggctgcggaggagagtgggccccagcgccatgaggctggaggatgaggccgccgcccaggccctgattggaggccgggacctggtggtgattggcttcttccaggacctgcaggatgaagatgtggccaccttcctggccctggcccaggatgccctggacatgaccttcggcctgacagaccggcccaggctcttccagcagtttggcctgaccaaggacacagtggtgctcttcaagaagtttgatgagggccgggctgacttccctgtggatgaggagctgggcctggacctgggggacctgagccgcttcctggtgacccacagcatgaggctggtgacagagttcaacagccagaccagcgccaagatctttgctgcccgcatcctgaaccacctgctgctgtttgtgaaccagaccctggccgcccaccgggagctgctggccggctttggagaggccgccccccgcttccggggccaggtgctgtttgtggtggtggatgtggccgctgacaatgaacatgtgctgcagtacttcggcctgaaggccgaggccgcccccaccctgcggctggtgaacctggagaccaccaagaagtatgcccctgtggatggcggccctgtgacagctgccagcatcacagccttctgccacgctgtgctgaatggccaggtgaagccctacctgctgagccaggagatccccccagactgggaccagaggcctgtgaagaccctggtgggcaagaactttgagcaggtggcctttgatgagaccaagaatgtgtttgtgaagttctacgccccctggtgcacccactgcaaggagatggccccagcctgggaggccctggccgagaagtaccaggaccacgaggacatcatcatcgccgagctggatgccacagccaatgagctggatgcctttgctgtgcacggcttccccaccctgaagtacttccctgctggccctggcaggaaggtgattgagtacaagagcacccgggacctggagaccttcagcaagttcctggacaatggaggagtgctgcccacagaggagcccccagaggagcctgctgcccccttccctgagcccccagccaacagcaccatgggcagcaaggaggagctgtag

SEQ ID NO: 168557 - DNA, 1578 bp, Artificial Sequence
  derived and/or modified sequence
atgagccggcagctgctgcccgtgctgctgctgctgctgctgcgggccagttgtccctggggacaggagcagggcgcccgctctcccagtgaggaaccacctgaggaggaaattccaaaagaagatggcatcttagttctgtcaaggcatactctcggattggccctaagggagcaccctgccctgctcgtggagttttacgctccctggtgcggtcattgccaggccctcgcacccgagtactccaaagccgccgcagtgctggccgcagaatccatggtcgtgaccctggccaaagtggacggccctgctcagcgggaactcgccgaggaattcggggtcacagagtatcccactctgaaatttttccgcaatggtaatcgcacccaccccgaggagtacacaggcccacgcgatgctgaaggaatcgccgaatggcttcgtcggagagtcgggccatccgctatgagacttgaagatgaggcagccgcgcaggcactcatcggcggcagggacctcgtggtgattggtttctttcaggatttgcaggatgaagacgtggctacatttttggccctcgcacaggatgctctggacatgacattcggcctcaccgacagaccacgtctgtttcagcaattcggactcacaaaagacaccgtggtgttatttaagaaattcgatgaaggtcgcgcggattttcctgtggatgaggagcttggcctggaccttggcgatctcagtcgcttcctcgtgacgcatagtatgcggctggtgactgagtttaacagtcagacctccgcaaaaatatttgcggctaggattctgaaccatctgctcctgtttgtcaaccagactctggctgcacaccgagagctcttagcaggcttcggagaggccgcccctcgttttcgcggacaggttctgtttgtggtcgtcgatgtggccgctgacaatgagcatgtgctccagtactttggcctaaaagcagaggcggcccccacccttcggctggtgaacctggagacaacaaagaagtacgcgcctgtggatggcggtccggtgacggccgcgtcaattacagcattttgccatgccgtactgaatggtcaagtcaaaccttatttgctttcccaggaaatacctcctgactgggaccagcgtccagtgaagaccctcgtggggaagaatttcgagcaagttgctttcgacgagacaaagaatgtattcgtgaagttctacgctccatggtgcactcactgcaaggaaatggcaccagcttgggaggcactggccgagaagtaccaagatcacgaggacattattattgccgagctcgatgccaccgcaaacgagctagatgcatttgctgtgcatgggtttcccacactgaaatactttcccgcgggcccaggcagaaaggtgattgagtataagtctactagagaccttgagacattttcaaagttcctggacaatggtggagtactgcctactgaagaaccccctgaggagcctgcggcgccattccccgagcctcctgcaaacagcacgatgggatccaaggaggaactgtag

SEQ ID NO: 168558 - DNA, 1578 bp, Artificial Sequence
  derived and/or modified sequence
atgtcaaggcaattgctgcccgttctcctactcctactactcagggctagttgtccttgggggcaggagcagggcgcaaggagccccagcgaggagcctcccgaagaagaaatccccaaggaagacgggatcctcgtactgtcccgccacacactcggccttgcactgcgtgaacatcctgccttactggtcgaattttacgctccgtggtgcggacattgtcaggccctggcccctgaatactcaaaagctgccgcagtcctggcagccgagagcatggtggttacgctcgccaaggtggacggccctgcccagagagagctagcagaagaatttggagtcactgagtatcctaccctgaaattttttcgcaacgggaatagaactcatcccgaggaatataccggacctcgggacgccgagggcatcgccgaatggcttcgaagaagggttggtcctagcgccatgagactggaagacgaggcagctgctcaggctctgataggagggcgagatctggttgtgatagggtttttccaagacttgcaagatgaagatgtcgctacgttcttggcgctggcgcaagacgcactggatatgacatttggcctgacggacagaccgagattgtttcaacagttcggacttactaaggacactgtagtattgttcaagaaatttgacgagggaagagccgatttcccagtggatgaggagctcggcttagatctgggcgacctgtccagatttctggtgacccactcaatgcgacttgtgaccgaatttaattcccagacaagtgccaagatcttcgccgcacgcattcttaaccatctgctgttatttgtgaaccagactctcgctgcccatagggagctgctcgcgggatttggcgaagcagcccctaggtttaggggccaggttctgttcgttgtagtagacgtggctgccgacaacgaacacgttctgcagtacttcggtctgaaagcagaagccgcaccaaccctgcggttagtaaatctcgagactactaagaaatacgcccctgtggacggcggtccagtcactgccgctagcatcacggcattttgccacgccgtgttgaacgggcaggtcaagccttatttgctctcccaggaaatccctccggattgggatcaacggccagtaaaaaccttagtgggtaaaaactttgagcaagtggcattcgatgagactaagaatgtgttcgtgaagttctatgcaccatggtgtacccactgcaaagaaatggctcccgcatgggaggcactagcagaaaaataccaggatcacgaagatatcatcatagcagaacttgatgctacagcgaatgagttagatgcatttgccgtacatggcttccctactctaaagtacttccctgccggacctggtagaaaggtaatagagtacaaatccacccgtgacctggaaacgttcagcaagtttctggacaacgggggagtgttgcctaccgaggagcctcccgaggaacccgcagctccatttccggagccgcctgcaaatagtaccatggggagtaaggaagagctctag

SEQ ID NO: 168559 - DNA, 1578 bp, Artificial Sequence
  derived and/or modified sequence
atgagcagacagctgctgcccgtgctgctgctgctgctgctgagagccagctgcccctggggccaggagcagggcgccagaagccccagcgaggagccccccgaggaggagatccccaaggaggacggcatcctggtgctgagcagacacaccctgggcctggccctgagagagcaccccgccctgctggtggagttctacgccccctggtgcggccactgccaggccctggcccccgagtacagcaaggccgccgccgtgctggccgccgagagcatggtggtgaccctggccaaggtggacggccccgcccagagagagctggccgaggagttcggcgtgaccgagtaccccaccctgaagttcttcagaaacggcaacagaacccaccccgaggagtacaccggccccagagacgccgagggcatcgccgagtggctgagaagaagagtgggccccagcgccatgagactggaggacgaggccgccgcccaggccctgatcggcggcagagacctggtggtgatcggcttcttccaggacctgcaggacgaggacgtggccaccttcctggccctggcccaggacgccctggacatgaccttcggcctgaccgacagacccagactgttccagcagttcggcctgaccaaggacaccgtggtgctgttcaagaagttcgacgagggcagagccgacttccccgtggacgaggagctgggcctggacctgggcgacctgagcagattcctggtgacccacagcatgagactggtgaccgagttcaacagccagaccagcgccaagatcttcgccgccagaatcctgaaccacctgctgctgttcgtgaaccagaccctggccgcccacagagagctgctggccggcttcggcgaggccgcccccagattcagaggccaggtgctgttcgtggtggtggacgtggccgccgacaacgagcacgtgctgcagtacttcggcctgaaggccgaggccgcccccaccctgagactggtgaacctggagaccaccaagaagtacgcccccgtggacggcggccccgtgaccgccgccagcatcaccgccttctgccacgccgtgctgaacggccaggtgaagccctacctgctgagccaggagatcccccccgactgggaccagagacccgtgaagaccctggtgggcaagaacttcgagcaggtggccttcgacgagaccaagaacgtgttcgtgaagttctacgccccctggtgcacccactgcaaggagatggcccccgcctgggaggccctggccgagaagtaccaggaccacgaggacatcatcatcgccgagctggacgccaccgccaacgagctggacgccttcgccgtgcacggcttccccaccctgaagtacttccccgccggccccggcagaaaggtgatcgagtacaagagcaccagagacctggagaccttcagcaagttcctggacaacggcggcgtgctgcccaccgaggagccccccgaggagcccgccgcccccttccccgagccccccgccaacagcaccatgggcagcaaggaggagctgtag

SEQ ID NO: 168560 - DNA, 1569 bp, Artificial Sequence
  derived and/or modified sequence
atgagccggcaactcctgccagttcttctcctgctgttgttacgggcctcctgtccctgggggcaggagcagggcgcgcggagtccaagtgaagagcccccagaggaggaaatccccaaggaggatggaattctggtcttaagtaggcacaccctgggccttgctctgcgggagcaccccgccctgctggtcgagttctacgcaccctggtgcggccattgccaagctttggcacccgagtatagtaaagccgctgctgtccttgccgccgagtcgatggtcgtaaccctcgccaaggtcgacggtccagctcagcgagagttagccgaagaatttggggtgactgagtatcccactttaaaattcttccgcaatggcaaccgaacccatcctgaggaatacaccggtccccgtgacgccgagggaatcgcagaatggctgaggcggagggtgggtccttctgcaatgagattagaagacgaagctgcagcacaggcccttatcggaggcagagatttagtcgtcatcgggttctttcaggacgaagacgtcgccacgttcttagccctggcccaggacgctttagatatgaccttcggacttaccgaccgccctcgcttgtttcaacagttcggactaacgaaagacacagttgtgctctttaaaaaattcgatgagggcagggctgattttccagttgacgaagaactgggcctggacctgggggatttgtcacggttcttggttactcattctatgcgcctagttactgaattcaacagccaaacaagcgcgaaaatcttcgctgctaggatcctgaaccacctgctgctttttgtgaaccaaaccctggccgcccatagagagctgttggccggattcggtgaggctgcaccaagatttcgaggccaggttctgttcgttgtcgttgacgtcgcggccgacaatgaacacgtgttgcaatattttgggctgaaggcagaagccgcccctacactccgcctggtgaacctggaaacaacaaaaaagtacgcgccagttgatggtggtcctgtgaccgcggctagcatcactgccttctgccatgccgtgctcaatggacaggtaaagccatatctcctgtctcaggaaatccccccagattgggaccagcgccccgtcaaaaccttagttggaaaaaacttcgaacaggttgcctttgacgagacaaagaacgtgttcgtcaagttctacgcgccatggtgcactcactgcaaggaaatggccccagcttgggaggctctggcagaaaaataccaggatcatgaggatatcattattgcagaactggacgcaactgccaatgaactggacgcctttgctgtgcacggctttccgactctcaagtactttcccgctggacccggtcgcaaggtgattgagtataagagcacgagagatttggaaacttttagcaagtttctagacaacggcggtgtgctccccaccgaggaaccaccagaagaacccgccgcgccttttcctgagcctcctgccaattccactatgggcagcaaggaagaattgtag

SEQ ID NO: 168561 - DNA, 1485 bp, Artificial Sequence
  derived and/or modified sequence
atgggcagcggaaccgggagcgaggagccgctaggcggtgcctctcgaggggggaatcctcaagggggctgggatctgggcgcagagcccccccaccctggccctgggcctgctggggcgccatgccccgccgggggcatcctttgcccagttgtttgggctcttccaggaccaggacctagggttcaacagggtagttgtagggcccgagggcgagttaacggggggcacgccgaggagtttggcgtgacagaatacccaacattaaagttctttcggaacggcaaccgaactcaccctgaagaatatactggaccacgagatgccgaaggaattgccgaatggctgcggaggagagttgggccctcagctatgcgtctcgaggacgaagctgctgcgcaggccctcatcgggggccgcgacctggtggtcatagggttctttcaagatttgcaggacgaagacgttgccacgtttctggcacttgctcaagatgcccttgatatgactttcggacttaccgatcgcccacgactgtttcagcagttcggactgactaaagacacggtggtccttttcaagaagttcgatgagggccgcgctgacttcccagtggacgaggaactgggactggatttaggggatctgagccgcttcctcgtgacccatagcatgagacttgttaccgaattcaacagccagacctctgcgaaaatctttgcagctcgaatcctcaaccacttgttgctgttcgttaatcagacactggctgcccatagagaactcttggcaggtttcggggaggccgcacctcgatttagaggacaggtgctgttcgtagtggtggatgtggctgctgataacgagcacgttctgcagtacttcggcctgaaagccgaggctgcgcccactttacgcctcgtgaaccttgaaaccaccaagaagtatgctccagtcgacggtggccctgtcacagccgcttcaatcaccgcgttctgccacgccgtactaaacgggcaagtgaaaccatatctcctaagtcaggagattccgcccgactgggatcagaggcccgtgaagacgcttgtggggaagaactttgaacaagtcgcatttgacgagactaagaacgtttttgttaaattttacgcgccgtggtgcacccattgtaaggagatggctcctgcctgggaggccctagccgagaagtaccaagaccacgaagacattattatcgctgagctggacgctaccgccaacgagttggacgcattcgccgtgcacggattccccaccctgaagtattttcccgcgggcccgggacggaaggtgattgagtataagagcacgcgggacctggaaactttctctaagtttctggacaatggaggggtccttccgacagaagaaccccccgaggagccagccgccccattccccgaacccccagctaattccacaatggggtccaaggaggaactttag

SEQ ID NO: 168562 - DNA, 1569 bp, Artificial Sequence
  derived and/or modified sequence
atgagccggcagctgctgcctgtgctgctgctgctgctgctgcgggccagctgcccctggggccaggagcagggcgcccggagccccagcgaggagcccccagaggaggagatccccaaggaggatggcatcctggtgctgagccgccacaccctgggcctggccctgcgggagcacccagccctgctggtggagttctacgccccctggtgtggccactgccaggccctggcccctgagtacagcaaggctgctgctgtgctggccgctgagagcatggtggtgaccctggccaaggtggatggccctgcccagcgggagctggccgaggagtttggagtgacagagtaccccaccctgaagttcttcagaaatggaaacagaacccaccctgaggagtacacaggccccagagatgctgagggcattgctgagtggctgcggaggagagtgggccccagcgccatgaggctggaggatgaggccgccgcccaggccctgattggaggccgggacctggtggtgattggcttcttccaggatgaagatgtggccaccttcctggccctggcccaggatgccctggacatgaccttcggcctgacagaccggcccaggctcttccagcagtttggcctgaccaaggacacagtggtgctcttcaagaagtttgatgagggccgggctgacttccctgtggatgaggagctgggcctggacctgggggacctgagccgcttcctggtgacccacagcatgaggctggtgacagagttcaacagccagaccagcgccaagatctttgctgcccgcatcctgaaccacctgctgctgtttgtgaaccagaccctggccgcccaccgggagctgctggccggctttggagaggccgccccccgcttccggggccaggtgctgtttgtggtggtggatgtggccgctgacaatgagcacgtgctgcagtacttcggcctgaaggccgaggccgcccccaccctgcggctggtgaacctggagaccaccaagaagtatgcccctgtggatggcggccctgtgacagctgccagcatcacagccttctgccacgctgtgctgaatggccaggtgaagccctacctgctgagccaggagatccccccagactgggaccagaggcctgtgaagaccctggtgggcaagaactttgagcaggtggcctttgatgagaccaagaatgtgtttgtgaagttctacgccccctggtgcacccactgcaaggagatggccccagcctgggaggccctggccgagaagtaccaggaccacgaggacatcatcatcgccgagctggatgccacagccaatgagctggatgcctttgctgtgcacggcttccccaccctgaagtacttccctgctggccctggcaggaaggtgattgagtacaagagcacccgggacctggagaccttcagcaagttcctggacaatggaggagtgctgcccacagaggagcccccagaggagcctgctgcccccttccctgagcccccagccaacagcaccatgggcagcaaggaggagctgtag

SEQ ID NO: 168563 - DNA, 1485 bp, Artificial Sequence
  derived and/or modified sequence
atgggcagcggcactggaagtgaggagcccctgggcggggccagcagaggaggcaacccccagggcggctgggacctgggcgctgagcccccccaccctggccctggccctgctggggccccctgcccagctgggggcatcctgtgccctgtggtgtgggccctgcccggccctggcccccgggtgcagcagggcagctgccgggcccggggccgggtgaatggaggccacgccgaggagtttggagtgacagagtaccccaccctgaagttcttcagaaatggaaacagaacccaccctgaggagtacacaggccccagagatgctgagggcattgctgagtggctgcggcggcgggtgggccccagcgccatgaggctggaggatgaagctgctgcccaggccctgattggaggccgggacctggtggtgattggcttcttccaggacctgcaggatgaagatgtggccaccttcctggccctggcccaggatgccctggacatgaccttcggcctgacagaccggcccaggctcttccagcagtttggcctgaccaaggacacagtggtgctcttcaagaagtttgatgagggccgggctgacttccctgtggatgaggagctgggcctggacctgggggacctgagccgcttcctggtgacccacagcatgaggctggtgacagagttcaacagccagaccagcgccaagatctttgctgcccgcatcctgaaccacctgctgctgtttgtgaaccagaccctggccgcccaccgggagctgctggccggctttggagaggccgccccccgcttccggggccaggtgctgtttgtggtggtggatgtggccgctgacaatgagcacgtgctgcagtacttcggcctgaaggccgaggccgcccccaccctgcggctggtgaacctggagaccaccaagaagtatgcccctgtggatggcggccctgtgacagctgccagcatcacagccttctgccacgctgtgctgaatggccaggtgaagccctacctgctgagccaggagatccccccagactgggaccagaggcctgtgaagaccctggtgggcaagaactttgagcaggtggcctttgatgagaccaagaatgtgtttgtgaagttctacgccccctggtgcacccactgcaaggagatggccccagcctgggaggccctggccgagaagtaccaggaccacgaggacatcatcatcgccgagctggatgccacagccaatgagctggatgcctttgctgtgcacggcttccccaccctgaagtacttccctgctggccctggcaggaaggtgattgagtacaagagcacccgggacctggagaccttcagcaagttcctggacaatggaggagtgctgcccacagaggagcccccagaggagcctgctgcccccttccctgagcccccagccaacagcaccatgggcagcaaggaggagctgtag

SEQ ID NO: 168564 - DNA, 1569 bp, Artificial Sequence
  derived and/or modified sequence
atgagccggcagctgctgcccgtgctgctgctgctgctgctgcgggcatcctgcccctggggacaggagcagggtgcacgatctcctagtgaagaaccgccagaagaggagataccgaaggaggacgggattttggtgctaagtaggcacacattaggccttgccttgcgggagcatcctgctctactggtagagttttatgctccctggtgtggtcactgccaggcccttgccccagaatactcaaaagctgccgctgtcttggccgcagagagcatggtagtcactctggccaaggtggacggacctgctcagcgggagcttgcagaagagttcggagtaaccgagtatccaacactgaagttctttagaaacgggaataggacccaccccgaagaatatactggtccccgggatgcggaagggattgctgagtggctccgcagaagggtgggaccttctgcaatgcgcctggaggatgaagcagcagctcaagcgctgatcgggggccgtgacttggtcgttataggtttctttcaagatgaagacgtggctacttttctcgctttggcgcaggacgcccttgacatgacctttgggctgaccgataggcccaggctgttccagcagtttgggctaaccaaagatactgtggtgctgttcaaaaagtttgacgagggccgcgctgacttccccgtggatgaagaacttggtctggacttgggggatctctcgcgattcctagtgactcacagcatgcgtctcgtgaccgagttcaattctcaaacatctgcaaagatatttgcagctcgaattttgaatcacctgttactgtttgtgaaccagacgcttgcagcccatcgagaactgcttgccggctttggtgaggccgcgcctaggtttagggggcaggtgctctttgtggtggtcgacgttgctgctgataatgaacatgtgctgcagtattttggactgaaggctgaagctgcaccaacactgcgcttggtgaatctggaaactactaaaaaatacgcaccagtcgatggaggccctgtgaccgcggcgagcataaccgccttttgtcacgccgtgctgaacggccaggtcaagccctacctcctttcccaggagattcctcctgactgggaccagaggccagtcaaaacactagttggcaaaaattttgaacaggtcgcctttgacgagactaagaacgtgtttgtgaagttttacgctccttggtgcacacattgcaaagaaatggcccccgcctgggaagccctcgctgaaaagtatcaagatcacgaagacatcatcattgcagagctggacgcaacagcgaacgagctggacgctttcgccgtgcatggatttcctacactgaagtacttcccggcaggtccgggacggaaggtaatagagtataaatctacccgggatctcgagacctttagcaaattccttgataacggaggggtgctccctaccgaggagcctcctgaagagcccgccgctccatttccagagccccccgcgaattcgacaatgggcagcaaagaagagttgtag

SEQ ID NO: 168565 - DNA, 1485 bp, Artificial Sequence
  derived and/or modified sequence
atgggcagcggcaccggcagcgaggagcccctgggcggcgccagcaggggcggcaatccgcaaggggggtgggatcttggcgccgagcccccacatcccggccctggacccgccggcgctccctgccctgctggggggatcctttgccccgtggtatgggctctgcctggacccggaccccgagtgcaacaaggtagctgtcgagcgaggggccgggtcaatggaggtcacgcagaagagtttggggtgacagaataccccactcttaagttctttaggaatggcaacagaacgcatccagaggagtatacagggccaagggacgcggaaggcattgccgagtggctaagacgcagagtcggacctagcgccatgcggctcgaagatgaggccgcagcccaggctctgattggagggagggatttagttgtgatcggcttttttcaggacctgcaggatgaggacgtggctaccttccttgccctggcccaggacgcgctcgatatgacttttggtctgactgacagaccccgtctctttcagcaattcgggcttaccaaggatactgtggtgctgtttaagaagttcgacgaagggcgagctgactttccagtcgatgaggagctaggcctcgacttgggcgacctgtcaaggttcctggttacccattccatgcggctcgtcacagaattcaactctcagacctctgcaaagatctttgccgccagaattcttaatcaccttttgctgtttgttaaccaaacattagccgcccaccgggagctgctggcgggtttcggcgaggctgctccacgttttcgcggtcaggtgctgttcgtggtggtcgatgtggcagccgataacgaacatgtcctgcagtattttgggttgaaagctgaagcagctcctacactgcggttagtgaatctggaaactaccaagaaatatgctccagtcgacggtggcccagtcacagcagcttcgatcactgctttttgtcacgcagtgctaaatggccaagtcaagccatatttactgtcacaggagattccccctgattgggaccagaggccagtaaagacgctggtgggaaaaaacttcgagcaagtggcgtttgatgagactaaaaacgtgttcgttaaattctacgctccatggtgcacccactgtaaggagatggcacccgcctgggaagccctcgccgagaaataccaagatcacgaggatattattatcgctgagctggatgccactgcaaacgagttggacgcgttcgctgtacacggatttccaacattaaaatatttccctgctggacccggacggaaggtgattgaatacaaaagcacacgcgacctcgaaacattttctaagtttctggataacgggggcgttttgcccaccgaggagccacccgaggagcctgccgccccttttccagaaccacccgccaattcaactatggggtccaaggaggagctttag

SEQ ID NO: 168566 - DNA, 1569 bp, Artificial Sequence
  derived and/or modified sequence
atgagcaggcagctcttgcctgtgctgctactgttgctcctgcgagcaagctgcccgtggggtcaggagcagggcgcaagatctccatccgaggagcctcccgaagaggaaatcccgaaagaagacggcattctggttctatcaagacacactctcggcttagctttgcgcgaacatccggcactgttggtggaattttatgcaccctggtgcggccattgccaggccttggctccagaatacagcaaggccgcagctgtgctggccgctgaaagcatggtggtgaccctcgccaaggtggacggacccgctcagagggagcttgcggaggagttcggggttaccgaatatccgaccttgaaatttttcaggaacggcaatcgtacccatccagaggaatataccggcccaagagacgctgaaggcatcgccgagtggttaagaagaagggtgggaccctcggcaatgcgtctcgaagacgaagctgccgcacaggcactgatcggcggaagggatctggttgtcatcgggttttttcaggacgaagatgttgctacctttcttgctctggcgcaggatgctctggacatgacttttggcctcaccgatcggccacgcttgttccagcagtttggtttaaccaaggataccgttgtgctattcaagaaatttgatgagggcagggcggatttcccagtggacgaagaactcggactagatctaggcgatctcagcagatttctcgttactcacagcatgagactcgtgaccgagtttaatagtcagacctcggcgaagatctttgccgcaaggattctaaatcacctgttgctgttcgtgaaccagacactggcagcccatcgcgaactgctcgcagggttcggtgaagccgcacccagattcagaggccaggtgctcttcgtggtcgtcgatgtggccgcagacaacgaacacgttctgcagtacttcgggctgaaggcagaagccgctcccaccctgcgccttgtaaatctggagacaacaaagaaatacgcacccgtggacggcggacccgtaactgccgcttctatcaccgccttttgtcatgcagtgctgaacgggcaggtcaagccttatcttctgagccaggaaattccaccagactgggaccagaggccagtcaaaactctcgtgggtaaaaacttcgagcaggtagcatttgacgagaccaagaacgtcttcgtaaagttctacgcgccatggtgtacccattgcaaggagatggctccggcatgggaggctctggctgagaaatatcaggaccacgaagatatcatcatcgccgagcttgacgccacagccaacgagctcgacgccttcgctgtgcacggcttccccactctgaaatattttcctgctggcccaggaaggaaggtaatcgaatacaagtctactagggaccttgaaaccttctcaaaatttctcgataacggtggtgtgctcccgaccgaagagcccccagaggaaccggctgccccttttcctgagccccctgccaactctaccatggggagtaaggaagagctgtag

SEQ ID NO: 168567 - DNA, 1485 bp, Artificial Sequence
  derived and/or modified sequence
atggggtcgggcactggcagtgaagaacccctgggaggcgcttcccggggtggcaacccgcagggcggatgggatttgggcgcagagccccctcaccctggccctgggcctgcaggcgctccttgtccagctggagggatcctgtgtcccgtcgtatgggctctcccaggacccggaccgcgagtgcagcagggcagttgcagggctaggggcagggtcaacggagggcacgccgaagagttcggagtgaccgaataccctaccctgaagttctttaggaacggcaaccggacccaccccgaggagtacaccggacctcgagacgctgagggtatcgccgaatggctgcgacggagggtcggcccttcggccatgaggttggaggacgaagcagcggcacaagcgctgatcgggggtagagatctggtggtgattgggttctttcaggatctccaagacgaagatgtcgccacatttttagctctggcccaggatgctctggacatgacttttggccttacagaccggcctaggctgttccaacagtttggattgaccaaagatactgttgtactcttcaagaaattcgatgagggcagggcagattttcctgttgacgaggagctgggactcgaccttggcgatttgagccgcttcctcgtaacgcacagcatgaggcttgtgacggagttcaactctcaaacttctgccaagatcttcgcagccagaattcttaatcacctgctattgttcgtaaaccagactctggcagctcacagggaactcctggctgggttcggcgaggccgcaccccgatttagagggcaggtgctgtttgtggtcgttgacgtggcagccgacaacgagcacgtgttgcagtattttggtctgaaggccgaggctgcaccaacattgcggctcgtgaacctggagaccactaagaagtatgcccctgtggacggagggcctgttaccgcggcttccatcactgccttttgtcatgccgtgctgaacggacaggtaaaaccttacctccttagccaggagatccccccagattgggaccagaggcccgtgaaaacgttggtggggaagaattttgagcaggtggcatttgacgagaccaaaaacgtctttgtcaagttctatgccccttggtgcacccactgtaaggaaatggcccctgcttgggaagcattggctgaaaaataccaggatcatgaagacatcatcattgccgagttagacgccaccgccaacgaattggacgcatttgccgtgcatgggtttcccaccctcaaatactttcctgccggtcctggtcgaaaagtcattgaatacaagagcacccgagacctggagacattttctaaattcctcgacaacggcggagtgctccccacagaagaaccacctgaggagcctgcagccccattcccagagccgcctgcaaatagcaccatgggtagcaaggaggagctttag

SEQ ID NO: 168568 - DNA, 1698 bp, Artificial Sequence
  derived and/or modified sequence
acgcgccctggcagcaccatgagccgccagcttctgcctgtactgctgctgctgctgctcagggcttcgtgcccatggggtcaggaacagggagcgaggagcccctcggaggagcctccagaggaggaaatccccaaggaggatgggatcttggtgctgagccgccacaccctgggcctggccctgcgggagcaccctgccctgctggtggaattctatgccccgtggtgtgggcactgccaggccctggcccccgagtacagcaaggcagctgccgtgctcgcggccgagtcaatggtggtcacgctggccaaggtggatgggcccgcgcagcgcgagctggctgaggagtttggtgtgacggagtaccctacgctcaagttcttccgcaatgggaaccgcacgcacccggaggagtacacaggaccacgggacgctgagggcattgccgagtggctgcgacggcgggtggggcccagtgccatgcggctggaggacgaggcggccgcccaggcgctgatcggtggccgggacctagtggtcattggcttcttccaggacctgcaggacgaggacgtggccaccttcttggccttggcccaggacgccctggacatgacctttggcctcacagaccggccgcggctctttcagcagtttggcctcaccaaggacactgtggttctcttcaagaagtttgatgaggggcgggcagacttccccgtggacgaggagcttggcctggacctgggggatctgtcgcgcttcctggtcacacacagcatgcgcctggtcacggagttcaacagccagacgtctgccaagatcttcgcggccaggatcctcaaccacctgctgctgtttgtcaaccagacgctggctgcgcaccgggagctcctagcgggctttggggaggcagctccccgcttccgggggcaggtgctgttcgtggtggtggacgtggcggccgacaatgagcacgtgctgcagtactttggactcaaggctgaggcagcccccactctgcgcttggtcaaccttgaaaccactaagaagtatgcgcctgtggatgggggccctgtcaccgcagcgtccatcactgctttctgccatgcagtcctcaacggccaagtcaagccctatctcctgagccaggagataccccctgattgggatcagcggccagttaagaccctcgtgggcaagaattttgagcaggtggcttttgacgaaaccaagaatgtgtttgtcaagttctatgccccgtggtgcacccactgcaaggagatggcccctgcctgggaggcattggctgagaagtaccaagaccacgaggacatcatcattgctgagctggatgccacggccaacgagctggatgccttcgctgtgcacggcttccctactctcaagtacttcccagcagggccaggtcggaaggtgattgaatacaaaagcaccagggacctggagactttctccaagttcctggacaacgggggcgtgctgcccacggaggagcccccggaggagccagcagccccgttcccggagccaccggccaactccactatggggtccaaggaggaactgtagctgcccccgtgtcacccccgccatcactgctggacaggagccacccccttgggtaccagagggagctgtgcattgtgaataaagagtgagcttggttctgga

SEQ ID NO: 168569 - DNA, 1575 bp, Artificial Sequence
  derived and/or modified sequence
gcaccatgagccgccagcttctgcctgtactgctgctgctgctgctcagggcttcgtgcccatggggtcaggaacagggagcgaggagcccctcggaggagcctccagaggaggaaatccccaaggaggatgggatcttggtgctgagccgccacaccctgggcctggccctgcgggagcaccctgccctgctggtggaattctatgccccgtggtgtgggcactgccaggccctggcccccgagtacagcaaggcagctgccgtgctcgcggccgagtcaatggtggtcacgctggccaaggtggatgggcccgcgcagcgcgagctggctgaggagtttggtgtgacggagtaccctacgctcaagttcttccgcaatgggaaccgcacgcacccggaggagtacacaggaccacgggacgctgagggcattgccgagtggctgcgacggcgggtggggcccagtgccatgcggctggaggacgaggcggccgcccaggcgctgatcggtggccgggacctagtggtcattggcttcttccaggacgaggacgtggccaccttcttggccttggcccaggacgccctggacatgacctttggcctcacagaccggccgcggctctttcagcagtttggcctcaccaaggacactgtggttctcttcaagaagtttgatgaggggcgggcagacttccccgtggacgaggagcttggcctggacctgggggatctgtcgcgcttcctggtcacacacagcatgcgcctggtcacggagttcaacagccagacgtctgccaagatcttcgcggccaggatcctcaaccacctgctgctgtttgtcaaccagacgctggctgcgcaccgggagctcctagcgggctttggggaggcagctccccgcttccgggggcaggtgctgttcgtggtggtggacgtggcggccgacaatgagcacgtgctgcagtactttggactcaaggctgaggcagcccccactctgcgcttggtcaaccttgaaaccactaagaagtatgcgcctgtggatgggggccctgtcaccgcagcgtccatcactgctttctgccatgcagtcctcaacggccaagtcaagccctatctcctgagccaggagataccccctgattgggatcagcggccagttaagaccctcgtgggcaagaattttgagcaggtggcttttgacgaaaccaagaatgtgtttgtcaagttctatgccccgtggtgcacccactgcaaggagatggcccctgcctgggaggcattggctgagaagtaccaagaccacgaggacatcatcattgctgagctggatgccacggccaacgagctggatgccttcgctgtgcacggcttccctactctcaagtacttcccagcagggccaggtcggaaggtgattgaatacaaaagcaccagggacctggagactttctccaagttcctggacaacgggggcgtgctgcccacggaggagcccccggaggagccagcagccccgttcccggagccaccggccaactccactatggggtccaaggaggaactgtagc

SEQ ID NO: 168570 - DNA, 1648 bp, Artificial Sequence
  derived and/or modified sequence
agcaccatgagccgccagcttctgcctgtactgctgctgctgctgctcagggcttcgtgcccatggggtcaggaacagggagcgaggagcccctcggaggagcctccagaggaggaaatccccaaggaggatgggatcttggtgctgagccgccacaccctgggcctggccctgcgggagcaccctgccctgctggtggaattctatgccccgtggtgtgggcactgccaggccctggcccccgagtacagcaaggcagctgccgtgctcgcggccgagtcaatggtggtcacgctgaggagtttggtgtgacggagtaccctacgctcaagttcttccgcaatgggaaccgcacgcacccggaggagtacacaggaccacgggacgctgagggcattgccgagtggctgcgacggcgggtggggcccagtgccatgcggctggaggacgaggcggccgcccaggcgctgatcggtggccgggacctagtggtcattggcttcttccaggacctgcaggacgaggacgtggccaccttcttggccttggcccaggacgccctggacatgacctttggcctcacagaccggccgcggctctttcagcagtttggcctcaccaaggacactgtggttctcttcaagaagtttgatgaggggcgggcagacttccccgtggacgaggagcttggcctggacctgggggatctgtcgcgcttcctggtcacacacagcatgcgcctggtcacggagttcaacagccagacgtctgccaagatcttcgcggccaggatcctcaaccacctgctgctgtttgtcaaccagacgctggctgcgcaccgggagctcctagcgggctttggggaggcagctccccgcttccgggggcaggtgctgttcgtggtggtggacgtggcggccgacaatgagcacgtgctgcagtactttggactcaaggctgaggcagcccccactctgcgcttggtcaaccttgaaaccactaagaagtatgcgcctgtggatgggggccctgtcaccgcagcgtccatcactgctttctgccatgcagtcctcaacggccaagtcaagccctatctcctgagccaggagataccccctgattgggatcagcggccagttaagaccctcgtgggcaagaattttgagcaggtggcttttgacgaaaccaagaatgtgtttgtcaagttctatgccccgtggtgcacccactgcaaggagatggcccctgcctgggaggcattggctgagaagtaccaagaccacgaggacatcatcattgctgagctggatgccacggccaacgagctggatgccttcgctgtgcacggcttccctactctcaagtacttcccagcagggccaggtcggaaggtgattgaatacaaaagcaccagggacctggagactttctccaagttcctggacaacgggggcgtgctgcccacggaggagcccccggaggagccagcagccccgttcccggagccaccggccaactccactatggggtccaaggaggaactgtagctgcccccgtgtcacccccgccatcactgctggacaggagccacccccttgggtaccagagggagctgtgcattgtgaataaagagtgagcttggttctgg

SEQ ID NO: 168571 - DNA, 1569 bp, Artificial Sequence
  derived and/or modified sequence
atgagcagacagctgctgcccgtgctgctgctgctgctgctgagagccagctgcccctggggccaggagcagggcgccagaagccccagcgaggagccccccgaggaggagatccccaaggaggacggcatcctggtgctgagcagacacaccctgggcctggccctgagagagcaccccgccctgctggtggagttctacgccccctggtgcggccactgccaggccctggcccccgagtacagcaaggccgccgccgtgctggccgccgagagcatggtggtgaccctggccaaggtggacggccccgcccagagagagctggccgaggagttcggcgtgaccgagtaccccaccctgaagttcttcagaaacggcaacagaacccaccccgaggagtacaccggccccagagacgccgagggcatcgccgagtggctgagaagaagagtgggccccagcgccatgagactggaggacgaggccgccgcccaggccctgatcggcggcagagacctggtggtgatcggcttcttccaggacgaggacgtggccaccttcctggccctggcccaggacgccctggacatgaccttcggcctgaccgacagacccagactgttccagcagttcggcctgaccaaggacaccgtggtgctgttcaagaagttcgacgagggcagagccgacttccccgtggacgaggagctgggcctggacctgggcgacctgagcagattcctggtgacccacagcatgagactggtgaccgagttcaacagccagaccagcgccaagatcttcgccgccagaatcctgaaccacctgctgctgttcgtgaaccagaccctggccgcccacagagagctgctggccggcttcggcgaggccgcccccagattcagaggccaggtgctgttcgtggtggtggacgtggccgccgacaacgagcacgtgctgcagtacttcggcctgaaggccgaggccgcccccaccctgagactggtgaacctggagaccaccaagaagtacgcccccgtggacggcggccccgtgaccgccgccagcatcaccgccttctgccacgccgtgctgaacggccaggtgaagccctacctgctgagccaggagatcccccccgactgggaccagagacccgtgaagaccctggtgggcaagaacttcgagcaggtggccttcgacgagaccaagaacgtgttcgtgaagttctacgccccctggtgcacccactgcaaggagatggcccccgcctgggaggccctggccgagaagtaccaggaccacgaggacatcatcatcgccgagctggacgccaccgccaacgagctggacgccttcgccgtgcacggcttccccaccctgaagtacttccccgccggccccggcagaaaggtgatcgagtacaagagcaccagagacctggagaccttcagcaagttcctggacaacggcggcgtgctgcccaccgaggagccccccgaggagcccgccgcccccttccccgagccccccgccaacagcaccatgggcagcaaggaggagctgtag

SEQ ID NO: 168572 - DNA, 1485 bp, Artificial Sequence
  derived and/or modified sequence
atgggcagcggcaccggcagcgaggagcccctgggcggcgccagcagaggcggcaacccccagggcggctgggacctgggcgccgagcccccccaccccggccccggccccgccggcgccccctgccccgccggcggcatcctgtgccccgtggtgtgggccctgcccggccccggccccagagtgcagcagggcagctgcagagccagaggcagagtgaacggcggccacgccgaggagttcggcgtgaccgagtaccccaccctgaagttcttcagaaacggcaacagaacccaccccgaggagtacaccggccccagagacgccgagggcatcgccgagtggctgagaagaagagtgggccccagcgccatgagactggaggacgaggccgccgcccaggccctgatcggcggcagagacctggtggtgatcggcttcttccaggacctgcaggacgaggacgtggccaccttcctggccctggcccaggacgccctggacatgaccttcggcctgaccgacagacccagactgttccagcagttcggcctgaccaaggacaccgtggtgctgttcaagaagttcgacgagggcagagccgacttccccgtggacgaggagctgggcctggacctgggcgacctgagcagattcctggtgacccacagcatgagactggtgaccgagttcaacagccagaccagcgccaagatcttcgccgccagaatcctgaaccacctgctgctgttcgtgaaccagaccctggccgcccacagagagctgctggccggcttcggcgaggccgcccccagattcagaggccaggtgctgttcgtggtggtggacgtggccgccgacaacgagcacgtgctgcagtacttcggcctgaaggccgaggccgcccccaccctgagactggtgaacctggagaccaccaagaagtacgcccccgtggacggcggccccgtgaccgccgccagcatcaccgccttctgccacgccgtgctgaacggccaggtgaagccctacctgctgagccaggagatcccccccgactgggaccagagacccgtgaagaccctggtgggcaagaacttcgagcaggtggccttcgacgagaccaagaacgtgttcgtgaagttctacgccccctggtgcacccactgcaaggagatggcccccgcctgggaggccctggccgagaagtaccaggaccacgaggacatcatcatcgccgagctggacgccaccgccaacgagctggacgccttcgccgtgcacggcttccccaccctgaagtacttccccgccggccccggcagaaaggtgatcgagtacaagagcaccagagacctggagaccttcagcaagttcctggacaacggcggcgtgctgcccaccgaggagccccccgaggagcccgccgcccccttccccgagccccccgccaacagcaccatgggcagcaaggaggagctgtag

SEQ ID NO: 168573 - protein, 206 aa, Artificial Sequence
  derived and/or modified sequence
MNFQQRLQSLWTLARPFCPPLLATASQMQMVVLPCLGFTLLLWSQVSGAQGQEFHFGPCQVKGVVPQKLWEAFWAVKDTMQAQDNITSARLLQQEVLQNVSDAESCYLVHTLLEFYLKTVFKNYHNRTVEVRTLKSFSTLANNFVLIVSQLQPSQENEMFSIRDSAHRRFLLFRRAFKQLDVEAALTKALGEVDILLTWMQKFYKL

SEQ ID NO: 168574 - DNA, 621 bp, Artificial Sequence
  derived and/or modified sequence
atgaacttccagcagagactgcagagcctgtggaccctggccagacccttctgcccccccctgctggccaccgccagccagatgcagatggtggtgctgccctgcctgggcttcaccctgctgctgtggagccaggtgagcggcgcccagggccaggagttccacttcggcccctgccaggtgaagggcgtggtgccccagaagctgtgggaggccttctgggccgtgaaggacaccatgcaggcccaggacaacatcaccagcgccagactgctgcagcaggaggtgctgcagaacgtgagcgacgccgagagctgctacctggtgcacaccctgctggagttctacctgaagaccgtgttcaagaactaccacaacagaaccgtggaggtgagaaccctgaagagcttcagcaccctggccaacaacttcgtgctgatcgtgagccagctgcagcccagccaggagaacgagatgttcagcatcagagacagcgcccacagaagattcctgctgttcagaagagccttcaagcagctggacgtggaggccgccctgaccaaggccctgggcgaggtggacatcctgctgacctggatgcagaagttctacaagctgtag

SEQ ID NO: 168575 - DNA, 621 bp, Artificial Sequence
  derived and/or modified sequence
atgaactttcaacagagactccagtctctgtggacacttgcccgtccgttctgtccgcccctcttggctactgcgtcccaaatgcagatggttgtgctcccctgcctcgggttcactcttttgctgtggagccaagtctccggggctcagggacaagagttccactttgggccttgccaagtcaagggggtcgtaccccaaaaactctgggaggctttctgggctgtcaaggatactatgcaagcccaggacaacattaccagcgctaggctgctccagcaggaggtgctgcagaatgtgtctgacgcggaaagctgctacctagtgcataccctactggaattctacctgaagactgtgttcaagaattatcacaatcgaaccgtggaagtgcgtactctgaaatccttctctacacttgctaataacttcgtgcttattgtgagtcaattgcagcctagtcaggagaatgaaatgttcagcattagagactccgcccaccgccgcttcttgttgttcagaagggcgttcaaacagctcgatgtagaagccgcgttgaccaaagccttgggcgaagtggatattctactcacctggatgcagaagttttataaactttag

SEQ ID NO: 168576 - DNA, 621 bp, Artificial Sequence
  derived and/or modified sequence
atgaacttccagcagaggctgcagagcctgtggaccctggcccggcccttctgcccccccctgctggccacagccagccagatgcagatggtggtgctgccctgcctgggcttcaccctgctgctgtggagccaggtgtctggggcccagggccaggagttccacttcggcccctgccaggtgaagggcgtggtgccccagaagctgtgggaggccttctgggccgtgaaggacaccatgcaggcccaggacaacatcaccagcgcccggctgctgcagcaggaggtgctgcagaatgtgtctgatgctgagagctgctacctggtgcacaccctgctggagttctacctgaagacagtgttcaagaactaccacaacagaacagtggaggtgaggaccctgaagagcttcagcaccctggccaacaactttgtgctgattgtgtcccagctgcagcccagccaggagaatgagatgttcagcatccgggacagcgcccaccggcgcttcctgctcttccggcgggccttcaagcagctggatgtggaggccgccctgaccaaggccctgggggaggtggacatcctgctgacctggatgcagaagttctacaagctgtag

SEQ ID NO: 168577 - DNA, 621 bp, Artificial Sequence
  derived and/or modified sequence
atgaacttccagcagcggctgcagagcctgtggaccctggcccggcccttttgcccccccctgctggctaccgccagccagatgcaaatggtggtgctgccatgcttggggtttactttgttgctttggagtcaggtctccggcgctcaaggacaagagttccatttcggaccatgtcaagtgaagggcgtggtcccccagaagctttgggaagctttctgggccgtcaaagataccatgcaggcacaggacaacataaccagcgctagactcttacaacaggaggtgctgcagaacgtgtccgatgccgagtcctgttacctggtacacaccttgctggagttctatctcaaaacagtgttcaagaactaccacaaccggacagtcgaggtccgtaccctaaaatccttctctactctggccaacaattttgtcctcatcgtgagtcagctccagccttcacaagagaatgaaatgttctcgatccgagactctgcccatagacggtttctgctcttccgccgtgccttcaagcagctggacgtagaggcggctctgacaaaagcgttaggggaagtggatatcctacttacatggatgcagaaattctataagctctag

SEQ ID NO: 168578 - DNA, 621 bp, Artificial Sequence
  derived and/or modified sequence
atgaattttcaacagagactgcagagcctgtggacacttgcaaggcctttttgcccaccattactcgctacagcttcacagatgcagatggtggtgctcccctgccttgggttcacacttctgctctggagtcaagtcagtggggcacagggacaggagttccacttcggcccatgccaggtcaagggggtcgttcctcagaagctgtgggaggcgttttgggcggtaaaggacacgatgcaggcacaggacaatattacaagcgcccgacttctgcagcaagaagttttacaaaacgtctcagatgccgagagctgttacttagtgcacactctgctcgagttctacctgaaaaccgtcttcaaaaactatcataaccggactgtagaagtgcgtacactgaagtcttttagtactttagctaataacttcgtgcttatagtaagccagctgcagccatctcaagagaacgaaatgttctccatcagggatagcgctcacagaagattccttctgttcaggcgggcattcaagcagctggacgtggaggccgcactgactaaagccttaggcgaagtggacattctgctaacatggatgcagaagttctacaaattatag

SEQ ID NO: 168579 - DNA, 621 bp, Artificial Sequence
  derived and/or modified sequence
atgaatttccaacagaggctgcagtcgttatggacactggcaagacctttttgccctcccctccttgctaccgcgtcccagatgcagatggtcgtactgccgtgtctgggctttactctactcctctggagccaagtgagtggcgctcagggccaggagttccattttggaccctgccaggtgaagggagtcgtgccccaaaagctgtgggaagcattctgggctgtcaaagacacaatgcaggctcaggacaacattacgagtgcacgcctgcttcaacaggaagtactccagaacgtttcagatgccgaatcttgttatctcgtacatacattactggaattttatcttaagacggtatttaagaactatcacaatagaactgtcgaggtgagaactttaaagtctttctctacgttagctaacaacttcgtgctcatagtatcgcagctgcagccttctcaagagaatgagatgtttagtatcagagatagtgcccaccgcaggttcctgttatttcgcagagccttcaaacaactcgatgtcgaggctgccctgaccaaagccctgggcgaggtggatatcctgttaacttggatgcagaaattctataagctatag

SEQ ID NO: 168580 - DNA, 621 bp, Artificial Sequence
  derived and/or modified sequence
atgaattttcaacagcggcttcagagcctgtggactctggcccgacccttctgccccccgcttttggccaccgcatctcaaatgcagatggttgtgcttccatgtctaggatttacactgctgctctggtcgcaagtttccggggctcagggacaagaatttcactttggaccctgccaggtaaaaggagtggttcctcagaagctgtgggaggcattctgggctgtgaaggacaccatgcaggcacaggacaatataacatccgcacggctccttcaacaggaggtgttgcagaacgtgtcagatgccgaatcttgttatctcgtacatacattactggaattttatcttaagacggtatttaagaactatcacaatagaactgtcgaggtgagaactttaaagtctttctctacgttagctaacaacttcgtgctcatagtatcgcagctgcagccttctcaagagaatgagatgtttagtatcagagatagtgcccaccgcaggttcctgttatttcgcagagccttcaaacaactcgatgtcgaggctgccctgaccaaagccctgggcgaggtggatatcctgttaacttggatgcaaaaattctataagctgtag

SEQ ID NO: 168581 - DNA, 1701 bp, Artificial Sequence
  derived and/or modified sequence
cttgcctgcaaacctttacttctgaaatgacttccacggctgggacgggaaccttccacccacagctatgcctctgattggtgaatggtgaaggtgcctgtctaacttttctgtaaaaagaaccagctgcctccaggcagccagccctcaagcatcacttacaggaccagagggacaagacatgactgtgatgaggagctgctttcgccaatttaacaccaagaagaattgaggctgcttgggaggaaggccaggaggaacacgagactgagagatgaattttcaacagaggctgcaaagcctgtggactttagccagacccttctgccctcctttgctggcgacagcctctcaaatgcagatggttgtgctcccttgcctgggttttaccctgcttctctggagccaggtatcaggggcccagggccaagaattccactttgggccctgccaagtgaagggggttgttccccagaaactgtgggaagccttctgggctgtgaaagacactatgcaagctcaggataacatcacgagtgcccggctgctgcagcaggaggttctgcagaacgtctcggatgctgagagctgttaccttgtccacaccctgctggagttctacttgaaaactgttttcaaaaactaccacaatagaacagttgaagtcaggactctgaagtcattctctactctggccaacaactttgttctcatcgtgtcacaactgcaacccagtcaagaaaatgagatgttttccatcagagacagtgcacacaggcggtttctgctattccggagagcattcaaacagttggacgtagaagcagctctgaccaaagcccttggggaagtggacattcttctgacctggatgcagaaattctacaagctctgaatgtctagaccaggacctccctccccctggcactggtttgttccctgtgtcatttcaaacagtctcccttcctatgctgttcactggacacttcacgcccttggccatgggtcccattcttggcccaggattattgtcaaagaagtcattctttaagcagcgccagtgacagtcagggaaggtgcctctggatgctgtgaagagtctacagagaagattcttgtatttattacaactctatttaattaatgtcagtatttcaactgaagttctatttatttgtgagactgtaagttacatgaaggcagcagaatattgtgccccatgcttctttacccctcacaatccttgccacagtgtggggcagtggatgggtgcttagtaagtacttaataaactgtggtgctttttttggcctgtctttggattgttaaaaaacagagagggatgcttggatgtaaaactgaacttcagagcatgaaaatcacactgtcttctgatatctgcagggacagagcattggggtgggggtaaggtgcatctgtttgaaaagtaaacgataaaatgtggattaaagtgcccagcacaaagcagatcctcaataaacatttcatttcccacccacactcgccagctcaccccatcatccctttcccttggtgccctccttttttttttatcctagtcattcttccctaatcttccacttgagtgtcaagctgaccttgctgatggtgacattgcacctggatgtactatccaatctgtgatgacattccctgctaataaaagacaacataactcaa

SEQ ID NO: 168582 - RNA, 621 nt, Artificial Sequence
  derived and/or modified sequence
augaauuuccaacagaggcugcagucguuauggacacuggcaagaccuuuuugcccuccccuccuugcuaccgcgucccagaugcagauggucguacugccgugucugggcuuuacucuacuccucuggagccaagugaguggcgcucagggccaggaguuccauuuuggacccugccaggugaagggagucgugccccaaaagcugugggaagcauucugggcugucaaagacacaaugcaggcucaggacaacauuacgagugcacgccugcuucaacaggaaguacuccagaacguuucagaugccgaaucuuguuaucucguacauacauuacuggaauuuuaucuuaagacgguauuuaagaacuaucacaauagaacugucgaggugagaacuuuaaagucuuucucuacguuagcuaacaacuucgugcucauaguaucgcagcugcagccuucucaagagaaugagauguuuaguaucagagauagugcccaccgcagguuccuguuauuucgcagagccuucaaacaacucgaugucgaggcugcccugaccaaagcccugggcgagguggauauccuguuaacuuggaugcagaaauucuauaagcuauag

SEQ ID NO: 168583 - RNA, 621 nt, Artificial Sequence
  derived and/or modified sequence
augaauuuucaacagcggcuucagagccuguggacucuggcccgacccuucugccccccgcuuuuggccaccgcaucucaaaugcagaugguugugcuuccaugucuaggauuuacacugcugcucuggucgcaaguuuccggggcucagggacaagaauuucacuuuggacccugccagguaaaaggagugguuccucagaagcugugggaggcauucugggcugugaaggacaccaugcaggcacaggacaauauaacauccgcacggcuccuucaacaggagguguugcagaacgugucagaugccgaaucuuguuaucucguacauacauuacuggaauuuuaucuuaagacgguauuuaagaacuaucacaauagaacugucgaggugagaacuuuaaagucuuucucuacguuagcuaacaacuucgugcucauaguaucgcagcugcagccuucucaagagaaugagauguuuaguaucagagauagugcccaccgcagguuccuguuauuucgcagagccuucaaacaacucgaugucgaggcugcccugaccaaagcccugggcgagguggauauccuguuaacuuggaugcaaaaauucuauaagcuguag

SEQ ID NO: 168584 - protein, 266 aa, Artificial Sequence
  derived and/or modified sequence
MRVTLATIAWMVSFVSNYSHTANILPDIENEDFIKDCVRIHNKFRSEVKPTASDMLYMTWDPALAQIAKAWASNCQFSHNTRLKPPHKLHPNFTSLGENIWTGSVPIFSVSSAITNWYDEIQDYDFKTRICKKVCGHYTQVVWADSYKVGCAVQFCPKVSGFDALSNGAHFICNYGPGGNYPTWPYKRGATCSACPNNDKCLDNLCVNRQRDQVKRYYSVVYPGWPIYPRNRYTSLFLIVNSVILILSVIITILVQHKYPNLVLLD

SEQ ID NO: 168585 - DNA, 801 bp, Artificial Sequence
  derived and/or modified sequence
atgagagtgaccctggccaccatcgcgtggatggtaagcttcgtctcaaactattcgcatacagccaacattctacccgacatcgaaaacgaggactttatcaaggactgcgtcagaatccacaacaagtttcggtccgaggtcaaacctaccgctagcgacatgttatatatgacatgggatcctgctctcgcccagattgcaaaggcctgggctagtaactgtcaattcagccacaacacacgtcttaagccaccccataagttgcaccctaattttacatcacttggggaaaacatatggaccggtagcgtgcccatcttttccgtgtcatccgctatcaccaattggtatgatgaaattcaagactatgactttaagaccaggatttgcaagaaggtctgcggacattacactcaggttgtctgggctgattcttacaaggtcggctgcgccgtccagttctgtcccaaagtcagcgggtttgacgcactatcaaacggcgctcacttcatctgcaactatgggcccggcggtaactacccgacctggccctacaaaagaggcgccacttgtagtgcttgccccaataacgacaagtgcctcgacaatctgtgtgtgaatagacagagggatcaggttaagagatattattctgtggtgtaccccggatggccaatttatccccgtaacagatatacatcactctttctaatcgtaaactccgtgattctgattttaagcgtgatcattactatcttggtgcagcataagtatccaaatctggtgctactggattag

SEQ ID NO: 168586 - DNA, 5877 bp, Artificial Sequence
  derived and/or modified sequence
agaacacaaagtgagctgcacaccatatatggagaaacccgtttcttaaaactagtgatgaactcatgctctgttctgttttctcaaagctgaagtcggctaggtttgcaaagctgtgggctgagcactcaggcaatcacactctcagaaactgcggcggctctggactgcagcctcccaaggctccatgccagacaaagcatgcgtgtcacacttgctacaatagcctggatggtttcttttgtctccaattattcacacacagcaaatattttgccagatatcgaaaatgaagatttcatcaaagactgcgttcgaatccataacaagttccgatcagaggtgaaaccaacagccagtgatatgctatacatgacttgggacccagcactagcccaaattgcaaaagcatgggccagcaattgccagttttcacataatacacggctgaagccaccccacaagctgcacccaaacttcacttcactgggagagaacatctggactgggtctgtgcccattttttctgtgtcttccgccatcacaaactggtatgacgaaatccaggactatgacttcaagactcggatatgcaaaaaagtctgtggccactacactcaggttgtttgggcagatagttacaaagttggctgcgcagttcaattttgccctaaagtttctggctttgacgctctttccaatggagcacattttatatgcaactacggaccaggagggaattacccaacttggccatataagagaggagccacctgcagtgcctgccccaataatgacaagtgtttggacaatctctgtgttaaccgacagcgagaccaagtcaaacgttactactctgttgtatatccaggctggcccatatatccacgtaacagatacacttctctctttctcattgttaattcagtaattctaatactgtctgttataattaccattttggtacagcacaagtaccctaatttagttcttttggactaatacaattcaggaaagaaaaaacccaaaaaccaacctcattcacatatggctttttttttaaccaataacaattaggtgtacttctattttaaaacatttcagaaaaaaatatatgttatagcaatactcttactcaaaagaagaaatttcctaactctatcagataaactcatctttagtataaataagcattatttgcaggttgccacaggtggacttttagtaagtaacctaacccatgtttcagcttctaaatctgcaaaatgagcaaggtacagtagcacatttttaggtgattcttagtaactccagtagccttcattagttaaaaacattattattttttgcatgctgcttcgactctaaatatctggttttccctgtctttttggtttactacttccccagattcagaacagaggagtaactaggggatctgattttagaggccttaattttctgttcatggactgttaaaagtaaaaccaaactttcaaaagggataaacctaaatatttacttgttatcattagagagggaacatcaaatgctgggacatcattactaaccaatagcatcagacactggatttaatggataatcacaatggtcgtaatgtatacaaagacttatataccactttctcgtataaatttttcaaaaaatacaataataatataatttataaagaacactcttctatgaacaaccaccaccaccaaaaaaaaaaaaagccctcagaaaatttctcacaaataaggcaactaatgcctgatatctcaaaatcctttacaaaaggagatagttctagtcaaggagttttgggtatgttacttttttttcttctttttcttttcatctgcctccatcttaagtgcaatttcttcagctgtaagagctcccagtttcttattctttgctttcttaaccttttccttgatgctggccacatcaattttagtttcagtagaagctagacaaattaaaagcacaacacatgtaatactttagattttaccaagtaaaacaaagaatatatgtttaacaaagaatatatgtttaaggcagttaacttcagagtattcttataattgaataattgaaaggtgatcacagtataaaatataaaaacacttgcctaaagcagttagaaatttcttcagattaagataaaacaaatcataaaatactttatatattagtacaagtatacataaaaatggcataaatggcataattgaaccaattactggattcaactatattaagactatttccttaaatcctacttcagactaaattattttacctacattcttttccatattttggaacttctgagtcattattttccatcttgcacattaaaataatttaaaattacatgtatcccttctcaataagtttaatcagctaaccctaagctagaggtcaaaatctacttcctctaatatcaaaacgaaaatttaaagttttccaaatattaattcaatattaattgaatattcaatgaattaattcatttaatgttagattaattcattgaatattaattcaatgaatgactaattaatagtattttaacaagattttggtatatttaacaacattttggtaataaagacaataatttgagagtgtgtggaagtccccctaatagaagccaactatctaatcaatgccaaaagtgtgaacaaaatagagaaaggaagcagtgaaaaagaatgcaactttttcttaccattcaaagtacaggatcacagcataaaagaatcataagataaaacatcaaactacccagcaacctgagaagcacagagtgttaaagcctccaccgtgtggagaaactaaattagggtaactagctattgagtatattgagtaccttcaaagcactcaactgacaggttttacagactggaaattataatacttatgacatttctaccttttatataaccaataatctaccatagaatgtagtatttttaaagctattaacaagcaatatattaaaataataatgtattatatctgtttctgacccagtctatgtacaatattgctggtgagccctctcccttcagtgtgtcactgttcactttggagggttactttaggaagaggataagtgttaccacaggggaaaaaaatgcagaagaggatgcatcagaagaaatggcatgacaatgttttctcttagtgtcttttaaatactaggttagtgcgaaagtgatttctgccatttaaaaaccacaatcactttcgcactaatagctcctgaataagacctgtcagcatcctttagtctaaggtgatgagaaatccatgttaccgatatagaagccaaactctaagccaagatcacataaagagaagaaaaagtacaacttctgataattcctctttgagaggcatgacagcagagctcagggatcttcttgcatttctacagaagatgcactggctgccctgggtttgtatctttcacaacaaagagtcttttccaagcacagaccagaggtcaggagaggactgtcaatccagtttgcactgaaataggcattagctgcctctaaattataaattatctcagccatcccttgtccttaggattagtaattaatgaaatgctaagagaactgatgaaaagatacaactgtttcttaaaaagattcagacaaatttattatgggtttacttttcctaattaataaagacttttacatcatagaaagcattaccttccttaggtttcacaattggtttttccttaggtggaataaatgctttgtttctttcctcttgtctcttactgatggcttctgcttgtttagcctacattaataaataaaaaatatatcagttaaatgtatttatagttaaataattcaagtatctatgaactttgctattcatgtgagccagacataaagtgccgtacctttattgcttccattttctgccgcttcttctgatttgccttcaaaaagtattcaccactagccaattctttatcgatctgttgaaaacggtatttacaattacatcagaaataatgtagaggagaagtcatgtcctaagcaagtcacaatatccttagggtaaaaacaatggggtcaaactgatttattaataaaaatggtagtgacataaaggaaacagagtctaagctgaggggaatacatacacaaaagtgtggaggtaggaaagcacctccatggaatacaacccagagtagttcagggatatggcatggaaggtcactgattcagaaaagtgtgagaagaaactggagagagagttttggggaaaatttgaagaagcttcaatggcagacaaagtaggagggataagatttagaaatgactgtaggtttctgagaagactgtaaagaccaaagaataattttaatggagaggaatgaagaatagatgagagcctggaataaaggtagtggcatgcagaataaaagccagaactatcaggaattggtgactaattagcaaaagcaacagcttgttcattcaatatacagccaacatgtaaaatgtgtataactgacctgtctcccacttacatagcattattatatctaaggcactgttctaagctctttataattactcatttaatcctcactaacaattctttaagataggtattaccattactcccactttaggtatggggaaacttaagtatggatgggataaataactcgcccagtcacataatgaattaagtgttaagaacaagtcaatcgagacatcactgtttcaagaagcttacacagctacagaagaaagataagtcaattactacaagaaagggccataagaaataaggcaggtgttatggaagcatggtttaatgactgcatcactccactttccccctaactactatcaatttcctccatgatccaaaacttccattgttttttcactatgatcatcattttccccgtcaatcacaaatcttccctgaaagactccaaccatggttgtggaaaaaagagatgtagaaagcaatgagttcacatgctgagcagaagtagaaagggaaggctttaggatatagccaaggaagggaataatgaagcaagaacccccaggagacaggtgaagatggaattcaaagaacacatagaagaggctgatgcaggtggaagaaaacccatacgtgagagaagaggaaacagaaaggggttcttatctggtggtctcaaatatttcaataaaatgcaatgtcatatgctaaacatgggagggcactgagagaattaagaggaaacatgaattttgaatgaaattaatccaaagataaaactttctctaacttaatttggtagccacgttgcaaggaagaagtcaagtttttagactgatccaagttttagagctttgctgagaaggtgggacagaagtaaaaaggggcatgaatcaaaacaatgatgtgcaagaacaaaatggaaactggtcatggtgggaaaggaaatgaagcagaagacacctgacaaaaggaatcataacttagaaaaacggtgggtgttacaatttacaatttaagatttcagaacaagaacaaccatagagcacacagtcacaataatgttgccaaatcagagaaaagagtattgcagactaaacgaacttttatccatggaacatttacagtggctacagggtcacaaacctcctggatgcagtttataatcaatgtgaacgccccactgcacacccccatgcactcagctcaaaatatgcctatttatatttaccctcagtttcttatagctctgcacacacacacacaatatatatatatacacatatcccacctgaaatactttcaataaagtttctgaccaaa

SEQ ID NO: 168587 - DNA, 801 bp, Artificial Sequence
  derived and/or modified sequence
atgagggtgaccctggccaccatcgcctggatggtgtcctttgtgagcaactacagccacacagccaacatcctgcctgacattgaaaatgaagacttcatcaaggactgtgtgcgcatccacaacaagttccgctctgaggtgaagcccacagccagtgacatgctgtacatgacctgggaccctgccctggcccagatcgccaaggcctgggccagcaactgccagttcagccacaacacccggctgaagccaccccacaagctgcaccccaacttcaccagcctgggggagaacatctggacaggctctgtgcccatcttctctgtgagcagcgccatcaccaactggtatgatgagatccaggactatgacttcaagacccgcatctgcaagaaggtgtgtggccactacacccaggtggtgtgggccgacagctacaaggtgggctgtgctgtgcagttctgccccaaggtgtctggctttgatgccctgagcaatggagcccacttcatctgcaactacggccctgggggcaactaccccacctggccctacaagagaggagccacctgcagcgcctgccccaacaatgacaagtgcctggacaacctgtgtgtgaaccggcagagggaccaggtgaagcgctactacagcgtggtgtacccaggctggcccatctaccccaggaaccgctacaccagcctcttcctgattgtgaacagcgtcatcctgatcctgagcgtcatcatcaccatcctggtgcagcacaagtaccccaacctggtgctgctggactag

SEQ ID NO: 168588 - DNA, 801 bp, Artificial Sequence
  derived and/or modified sequence
atgcgggtgaccctggccaccatcgcctggatggtgagcttcgtgagtaattattcgcacactgctaacattctgcctgacattgagaatgaggactttattaaagactgcgttcgcattcataacaaatttaggtcagaggtgaagccgactgccagtgatatgctttatatgacctgggatcccgccctcgctcagatcgccaaggcctgggccagtaactgccaattcagccacaatactcgccttaaacctccgcacaagctgcatcctaattttacaagcctgggcgagaacatctggaccggctcagttccaatcttcagcgtttcctcagccattaccaactggtacgatgaaattcaggactatgactttaagactaggatttgcaaaaaagtctgcggacattatacccaggtggtgtgggcagattcatacaaagtgggttgtgctgtccagttctgccccaaagtgtccggcttcgacgctctgagcaatggggcgcatttcatctgcaactacggaccaggaggcaactatccaacttggccgtataagcgtggtgcaacatgctcggcgtgcccaaacaatgataaatgtctggacaatctttgtgtgaacagacagagagatcaggtcaagaggtactactccgtagtgtaccctgggtggcctatctacccgaggaacagatacacatctctctttcttatagtgaatagtgtgattcttatactgtctgttatcattacgattcttgttcagcacaaatacccaaatctggtcctgctggactag

SEQ ID NO: 168589 - DNA, 801 bp, Artificial Sequence
  derived and/or modified sequence
atgcgagtgactttagctactatcgcctggatggtgtccttcgtgtcaaattattcccacactgccaatattttaccagacatcgaaaatgaggactttatcaaagactgcgtccgaatccacaataaattcagatctgaggtcaagcccacagcctcagacatgctgtatatgacatgggatcccgcactagctcagatcgctaaggcctgggctagcaactgtcaattctcacataacacccgcttaaaacctccccacaaactgcaccctaacttcacaagtttgggagaaaacatctggacgggctccgtgcctatcttcagcgtgtcttctgccattacaaattggtacgacgaaatccaggactacgattttaagacccgaatttgcaaaaaggtgtgtgggcactatacacaggtggtatgggctgactcttacaaagtcggttgtgccgtccagttctgccccaaggtttctgggttcgacgcattgagcaatggtgcccatttcatatgcaactacggaccaggcggtaactacccaacgtggccctacaaacgaggagctacctgttccgcctgccccaacaatgataaatgcctagacaatctgtgtgtgaataggcagagggaccaagttaaaaggtactactcagtggtgtatccgggttggcctatttatccaaggaatagatacacctcactctttttgatcgttaactcggttattctgatactgtccgtcatcatcacaattctcgtgcaacacaaataccccaacttggtattgctggactag

SEQ ID NO: 168590 - DNA, 801 bp, Artificial Sequence
  derived and/or modified sequence
atgagagtgaccctggccaccatcgcctggatggtgagcttcgtgagcaactacagccacaccgccaacatcctgcccgacatcgagaacgaggacttcatcaaggactgcgtgagaatccacaacaagttcagaagcgaggtgaagcccaccgccagcgacatgctgtacatgacctgggaccccgccctggcccagatcgccaaggcctgggccagcaactgccagttcagccacaacaccagactgaagcccccccacaagctgcaccccaacttcaccagcctgggcgagaacatctggaccggcagcgtgcccatcttcagcgtgagcagcgccatcaccaactggtacgacgagatccaggactacgacttcaagaccagaatctgcaagaaggtgtgcggccactacacccaggtggtgtgggccgacagctacaaggtgggctgcgccgtgcagttctgccccaaggtgagcggcttcgacgccctgagcaacggcgcccacttcatctgcaactacggccccggcggcaactaccccacctggccctacaagagaggcgccacctgcagcgcctgccccaacaacgacaagtgcctggacaacctgtgcgtgaacagacagagagaccaggtgaagagatactacagcgtggtgtaccccggctggcccatctaccccagaaacagatacaccagcctgttcctgatcgtgaacagcgtgatcctgatcctgagcgtgatcatcaccatcctggtgcagcacaagtaccccaacctggtgctgctggactag

SEQ ID NO: 168591 - protein, 750 aa, Artificial Sequence
  derived and/or modified sequence
MMEELHSLDPRRQELLEARFTGVGVSKGPLNSESSNQSLCSVGSLSDKEVETPEKKQNDQRNRKRKAEPYETSQGKGTPRGHKISDYFEFAGGSAPGTSPGRSVPPVARSSPQHSLSNPLPRRVEQPLYGLDGSAAKEATEEQSALPTLMSVMLAKPRLDTEQLAQRGAGLCFTFVSAQQNSPSSTGSGNTEHSCSSQKQISIQHRQTQSDLTIEKISALENSKNSDLEKKEGRIDDLLRANCDLRRQIDEQQKMLEKYKERLNRCVTMSKKLLIEKSKQEKMACRDKSMQDRLRLGHFTTVRHGASFTEQWTDGYAFQNLIKQQERINSQREEIERQRKMLAKRKPPAMGQAPPATNEQKQRKSKTNGAENETLTLAEYHEQEEIFKLRLGHLKKEEAEIQAELERLERVRNLHIRELKRIHNEDNSQFKDHPTLNDRYLLLHLLGRGGFSEVYKAFDLTEQRYVAVKIHQLNKNWRDEKKENYHKHACREYRIHKELDHPRIVKLYDYFSLDTDSFCTVLEYCEGNDLDFYLKQHKLMSEKEARSIIMQIVNALKYLNEIKPPIIHYDLKPGNILLVNGTACGEIKITDFGLSKIMDDDSYNSVDGMELTSQGAGTYWYLPPECFVVGKEPPKISNKVDVWSVGVIFYQCLYGRKPFGHNQSQQDILQENTILKATEVQFPPKPVVTPEAKAFIRRCLAYRKEDRIDVQQLACDPYLLPHIRKSVSTSSPAGAAIASTSGASNNSSSN

SEQ ID NO: 168592 - DNA, 2253 bp, Artificial Sequence
  derived and/or modified sequence
atgatggaggagctacacagtctcgaccctaggcgacaagaactcctcgaggccaggtttaccggtgttggcgtgtctaagggtcccctgaacagtgagagtagtaaccagtcactgtgttcagtggggtcactgtccgataaggaggtggaaacccctgagaagaagcagaacgaccagagaaaccgcaagcgtaaggccgagccgtacgaaacatcacagggaaagggcaccccgcgaggccacaagatcagcgactactttgaattcgccggcggctccgcacctggcacaagtcctgggcgaagcgtgcctcctgtagcccggagtagtccgcagcattcactttccaacccactacctagacgagtggagcagcccctgtatggtctggacggctctgccgccaaggaggccactgaggagcagagcgctctccccactttaatgtcagttatgttggcaaagcccagactcgataccgagcagttagcccaacgtggcgctggcctgtgttttactttcgtcagcgcgcagcagaactctccgagctctactgggtccgggaacacagaacattcctgttcttcacaaaagcagataagcatccagcatcgccagacacagagcgatcttacaattgagaaaataagtgcactagagaactccaagaatagtgaccttgagaagaaagaagggcggattgatgatcttctgagggccaattgtgacctccgcagacagatcgatgagcagcagaaaatgctcgagaagtataaggaaaggctgaatcgttgcgtgacaatgagtaaaaagctcctgatagaaaagagcaagcaggaaaagatggcttgtcgggacaagtccatgcaggacaggctgcgactaggccattttaccactgttaggcacggagccagcttcactgaacaatggacggacgggtatgcgttccagaatctaataaagcagcaggagcgcataaattcacagagagaagagatagagaggcagagaaaaatgctcgctaagcgcaagccacctgccatgggccaggcccctcctgcaaccaacgagcagaagcagagaaagtcaaaaaccaacggcgcggagaatgagacactgacactggcagagtatcacgagcaggaagagattttcaaactgcgcttgggacatctcaagaaggaggaggccgaaatacaggctgagctggagaggctggagcgagtgcgaaatctgcatatcagagagctgaaaaggattcataacgaagataatagccagtttaaggatcatccaaccctgaacgatcgttacctgttattgcatctgttgggcagagggggttttagcgaagtgtacaaagccttcgatctgactgaacaaagatatgtcgcggttaagatccatcagctgaataagaattggcgcgacgaaaaaaaggagaactaccataaacatgcctgcagggagtatcggatccataaagaacttgaccacccccggatcgtcaagctgtatgactatttcagcttagacactgacagtttttgcactgtcctggaatactgcgaaggcaatgacctggacttttatctgaaacagcacaagctcatgtccgaaaaggaggcccgctcaatcattatgcagattgtgaatgctcttaagtacctaaatgagatcaaacctcctatcattcactatgatcttaagcccggaaatattctgctcgtcaatggaaccgcttgtggggaaatcaaaataacagattttggtcttagcaaaatcatggatgacgactcctataatagcgtcgacggaatggaactgacaagccagggcgctgggacttattggtacctgccgccagaatgctttgtggtcggcaaggaacctcctaagatctccaataaagtagacgtatggtccgttggggtgatattttaccagtgtctgtacggacgcaagcctttcgggcacaatcaaagtcaacaggacatacttcaggaaaataccatactgaaggccactgaggtgcagttccccccgaagccggtagtgacaccggaggcaaaagctttcattcgacgatgcctcgcctacagaaaggaggacaggatagacgtccaacagctcgcatgtgacccctacttattgcctcatataaggaaatccgtgtccactagttcacctgcgggggcagctatcgcgtccacctccggcgcaagcaacaattcctcctccaactag

SEQ ID NO: 168593 - DNA, 2253 bp, Artificial Sequence
  derived and/or modified sequence
atgatggaggagctgcacagcctggacccccggcggcaggagctgctggaggcccgcttcaccggggtgggcgtgtccaagggccccctgaacagcgagagcagcaaccagagcctgtgcagcgtgggcagcctgagtgacaaggaggtggagaccccagagaagaagcagaatgaccagaggaacaggaagaggaaggccgagccctatgagaccagccagggcaagggcaccccccggggccacaagatcagtgactactttgaatttgctgggggcagcgcccctggcaccagccctggccgctctgtgccccctgtggcccggagcagcccccagcacagcctgagcaaccccctgccccggcgggtggagcagcccctgtatggcctggatggcagcgctgccaaggaggccacagaggagcagagcgccctgcccaccctgatgtctgtgatgctggccaagccccggctggacacagagcagctggcccagagaggagctggcctgtgcttcacctttgtgtctgcccagcagaacagccccagcagcacaggcagcggcaacacagagcacagctgcagcagccagaagcagatcagcatccagcaccggcagacccagagcgacctgaccatcgagaagatcagcgccctggagaacagcaagaacagcgacctggagaagaaggagggcagaattgatgacctgctgcgggccaactgtgacctgcggcggcagattgatgagcagcagaagatgctggagaagtacaaggagcggctgaacagatgtgtgaccatgagcaagaagctgctgattgagaagagcaagcaggagaagatggcctgccgggacaagtccatgcaggaccggctgcggctgggccacttcaccaccgtgcgccacggggccagcttcacagagcagtggacagatggctacgccttccagaacctgatcaagcagcaggagcgcatcaacagccagcgggaggagattgagcggcagaggaagatgctggccaagaggaagcccccagccatgggccaggcccccccagccaccaatgagcagaagcagaggaagagcaagaccaacggggctgaaaatgagaccctgaccctggccgagtaccacgagcaggaggagatcttcaagctgcggctgggccacctgaagaaggaggaggccgagatccaggccgagctggagcggctggagcgggtgaggaacctgcacatccgggagctgaagaggatccacaatgaagacaacagccagttcaaggaccaccccaccctgaatgaccgctacctgctgctgcacctgctgggccggggcggcttcagcgaggtgtacaaggcctttgacctgacagagcagagatatgtggccgtgaagatccaccagctgaacaagaactggagagatgagaagaaggagaactaccacaagcacgcctgccgggagtaccgcatccacaaggagctggaccacccccgcatcgtgaagctgtatgactacttcagcctggacacagacagcttctgcaccgtgctggagtactgtgagggcaatgacctggacttctacctgaagcagcacaagctgatgtctgagaaggaggcccggagcatcatcatgcagatcgtgaatgccctgaagtacctgaatgagatcaagccacccatcatccactatgacctgaagccaggcaacatcctgctggtgaatggaacagcctgtggggagatcaagatcacagactttggcctgagcaagatcatggatgatgacagctacaacagcgtggatggcatggagctgaccagccagggcgccggcacctactggtacctgcccccagaatgttttgtggtgggcaaggagccccccaagatcagcaacaaggtggatgtgtggagcgtgggcgtcatcttctaccagtgcctgtatggcaggaagcccttcggccacaaccagagccagcaggacatcctgcaggagaacaccatcctgaaggccacagaggtgcagtttcctcccaagcctgtggtgaccccagaggccaaggccttcatccgccgctgcctggcctacagaaaagaagatagaattgatgtgcagcagctggcctgtgacccctacctgctgccccacatcaggaagtctgtgtccaccagcagccctgctggagctgccatcgccagcaccagcggggccagcaacaacagcagcagcaactag

SEQ ID NO: 168594 - DNA, 2253 bp, Artificial Sequence
  derived and/or modified sequence
atgatggaggagctgcacagcctggacccccggcggcaggagctgctcgaagctcgctttactggtgtgggagtcagtaaggggcccctgaactccgagtcctcaaatcagtccctgtgctcagtcggctctctgtccgacaaggaggtagaaacccccgagaagaagcagaatgatcaacggaatcgcaaacgaaaagccgagccatacgagactagccaaggaaaaggtactccaagaggccacaaaatttctgactattttgagtttgcaggtggctcagctcctggaacctcaccaggccggtccgtccccccagtggccagaagcagcccacagcacagtctatccaatcctctgccaagaagagtggagcagccactgtatggactggatggcagcgctgctaaggaagccacagaagagcagtccgccttacctaccctgatgagcgtaatgctggctaaaccaagactcgacacagaacaactggcgcagcggggggccggcctttgtttcacatttgtctcagcgcagcagaactccccatcctccactgggtctggaaacaccgaacacagttgcagctctcagaagcagatcagtattcagcacaggcagactcagagcgatctgaccattgagaagatttccgctcttgagaatagtaaaaactccgacttggagaagaaggagggccgcattgacgatttgttgagggcgaattgtgacttacgtagacagattgacgagcagcagaaaatgctggagaaatataaagagaggctgaaccggtgtgtgactatgtccaagaagctccttattgaaaagagtaaacaggagaagatggcctgtagagacaaatctatgcaggatagactcagactcggccacttcacaacagtgaggcacggagcaagttttacggaacagtggacagacggatatgctttccagaacttaattaagcagcaggaacgaatcaacagtcagcgggaagagatagagcgtcaacggaagatgctagccaagcggaagcctcctgctatgggacaggctcctcctgccacgaacgagcagaaacagaggaagtccaagaccaacggagccgaaaatgagactttgacactggccgaataccatgaacaggaagaaatctttaagttacgccttggccacctgaaaaaagaggaagccgagatccaagcagagttagaacggctggaaagagtcagaaatctccacatccgtgagctcaaacggattcacaacgaagataactcccaatttaaggatcacccaacactgaacgatcgctacctactcttgcacctgctgggccggggaggcttcagcgaggtgtataaggcatttgacctgacagagcagagatatgtggctgtgaagatccatcagctcaacaaaaactggagggacgagaagaaagagaattaccacaaacacgcctgtcgggagtaccgcattcacaaagagctggaccaccccagaatagtaaaactctacgactatttttcactggacacggatagcttttgcactgtcctggagtactgcgaaggcaacgacctagatttctacttgaaacaacacaagctgatgtccgagaaagaggcccgctcaattattatgcagattgtgaatgctcttaagtacctgaatgagattaagccaccaattattcactatgatctgaagcccgggaacattttgctcgtgaatggaacggcctgtggagagattaagattacggactttggattgtccaaaataatggatgacgatagctacaatagcgtggatggaatggagcttaccagccagggggccggaacatactggtacctgccaccggagtgctttgttgtgggtaaggagcccccaaaaatatcaaacaaagtggatgtgtggtccgtgggcgtgatcttctaccagtgcctctatgggcgtaagccattcgggcataatcaatcacagcaggacattctccaggaaaataccatcttgaaggctacagaagtccaattcccaccaaagccggtggtaactccagaggccaaagcttttatcaggcgttgccttgcctacaggaaggaggatcggatcgatgtccaacagcttgcgtgcgatccgtacctgctgccacacattcgtaagtctgtatctacttcatccccagcgggggccgccattgctagcacgtcgggtgcttccaacaattcttcttccaattag

SEQ ID NO: 168595 - DNA, 5437 bp, Artificial Sequence
  derived and/or modified sequence
gcggccgcccgggcccgggcccgcgtcgggcgcctggctctgtacgcgagcccggggatctgcggccttcgtgccccccctcccccgcccgccctctcgtggagcccggcgccggcggcggctgcccgggcggggggttgcggcgctcaggagaggccccggctccgccccgggcctgcccagggggagagcggagcggtccgcagccgggtcgggtcggggcccctcccgggaggagcgtggagcggcggcggcggcggcggcagcagaaatgatggaagaattgcatagcctggacccacgacggcaggaattattggaggccaggtttactggagtaggtgttagtaagggaccacttaatagtgagtcttccaaccagagcttgtgcagcgtcggatccttgagtgataaagaagtagagactcccgagaaaaagcagaatgaccagcgaaatcggaaaagaaaagctgaaccatatgaaactagccaagggaaaggcactcctaggggacataaaattagtgattactttgagtttgctgggggaagcgcgccaggaaccagccctggcagaagtgttccaccagttgcacgatcctcaccgcaacattccttatccaatcccttaccgcgacgagtagaacagcccctctatggtttagatggcagtgctgcaaaggaggcaacggaggagcagtctgctctgccaaccctcatgtcagtgatgctagcaaaacctcggcttgacacagagcagctggcgcaaaggggagctggcctctgcttcacttttgtttcagctcagcaaaacagtccctcatctacgggatctggcaacacagagcattcctgcagctcccaaaaacagatctccatccagcacagacagacccagtccgacctcacaatagaaaaaatatctgcactagaaaacagtaagaattctgacttagagaagaaggagggaagaatagatgatttattaagagccaactgtgatttgagacggcagattgatgaacagcaaaagatgctagagaaatacaaggaacgattaaatagatgtgtgacaatgagcaagaaactccttatagaaaagtcaaaacaagagaagatggcgtgtagagataagagcatgcaagaccgcttgagactgggccactttactactgtccgacacggagcctcatttactgaacagtggacagatggttatgcttttcagaatcttatcaagcaacaggaaaggataaattcacagagggaagagatagaaagacaacggaaaatgttagcaaagcggaaacctcctgccatgggtcaggcccctcctgcaaccaatgagcagaaacagcggaaaagcaagaccaatggagctgaaaatgaaacgttaacgttagcagaataccatgaacaagaagaaatcttcaaactcagattaggtcatcttaaaaaggaggaagcagagatccaggcagagctggagagactagaaagggttagaaatctacatatcagggaactaaaaaggatacataatgaagataattcacaatttaaagatcatccaacgctaaatgacagatatttgttgttacatcttttgggtagaggaggtttcagtgaagtttacaaggcatttgatctaacagagcaaagatacgtagctgtgaaaattcaccagttaaataaaaactggagagatgagaaaaaggagaattaccacaagcatgcatgtagggaataccggattcataaagagctggatcatcccagaatagttaagctgtatgattacttttcactggatactgactcgttttgtacagtattagaatactgtgagggaaatgatctggacttctacctgaaacagcacaaattaatgtcggagaaagaggcccggtccattatcatgcagattgtgaatgctttaaagtacttaaatgaaataaaacctcccatcatacactatgacctcaaaccaggtaatattcttttagtaaatggtacagcgtgtggagagataaaaattacagattttggtctttcgaagatcatggatgatgatagctacaattcagtggatggcatggagctaacatcacaaggtgctggtacttattggtatttaccaccagagtgttttgtggttgggaaagaaccaccaaagatctcaaataaagttgatgtgtggtcggtgggtgtgatcttctatcagtgtctttatggaaggaagccttttggccataaccagtctcagcaagacatcctacaagagaatacgattcttaaagctactgaagtgcagttcccgccaaagccagtagtaacacctgaagcaaaggcgtttattcgacgatgcttggcctaccgaaaggaggaccgcattgatgtccagcagctggcctgtgatccctacttgttgcctcacatccgaaagtcagtctctacaagtagccctgctggagctgctattgcatcaacctctggggcgtccaataacagttcttctaattgagactgactccaaggccacaaactgttcaacacacacaaagtggacaaatggcgttcagcagcgggtttggaacatagcgaatccgaatggatctgatgaaacctgtaccaggtgcttttattttcttgcttttttcccatccatagagcatgacagcatcgattctcattgaggagaaaccttgggcagctccggccaggccttgtaggaaaaggccccgcccgaggttccagcgtcaacggccactgtgtgtggctgctctgagtgaggaaaaaattaaaaagaaaaactggttccatgtactgtgaacttgaaaacttgcagactcaggggggtccctgatgcagtgcttcagatgaagaatgtggacttgaaaatacagactgggctagtccagtgtctatatttaaacttgttcttttcttttaataaagtttaggtaacatctcctgaaaagcttgtagcacaaaggctcagctggggatggtgtttgacttcggaggaaaaaagttgctattgcccgttaaaggcactagagttagtgttttatccctaaataatttcaatttttaaaaacatgcagcttccctctccccttttttatttttgaaagaatacatttggtcataaagtgaaacccgtattagcaagtacgtggcaatgttcattccaatcagatgcagctttctcctccgtctggtctcctgtttgcaattgcttccctcatctcagtagggaaaaaattgagtgggagtactgagatgtgtgggtttttgccattggacaaagaatgaggttagaagactgcagcttggagtctctctaggttttcaactatttcttcacaatttgaacacttgacggttgtcccttttaatttatttgaagtgctatttttttaaataaaggttcatctgtccatgcagtcctcttggattctctgaatgtagtaactatgaagctatgccaaaggtaggcagaaaatgggcttgggagccagacactccagggatcagtagttcctacccatagtctttgtgtgcttgctaaatggtgtacatttcttgttaaccacgttattaaaacttgatcagcacataagctttcttctgttagatcttttggcagcaaacaaccttccccccaagcctctgaattttgtgggtgtgtggtggtgtgtgtctgtgtgtgcatgtacacacacactttgtctagctcactttaaaagattcatcaaatggaattttaaaaataatctgaaaagaaatagatatttcaggccgggcctggtggttcacgcctgtaatcccagcactttgggaggccgaggtgggtggatcacgaggtcgggagttcgagatcagtctggtcaacatggtgaaacgccatctctactaaaaatataaaaattagcctggcgtggtggcgtgtgcctctagtcccagctacccgggaggctgaggcaggagaatttctggaacccaggaggcggaggttgcagtgagccgagatggcaccactgcaatccagcctaggcaacagaatgagactctgtctcagaaaaaaaaaaaaaaaaaaaaggagaaatagatgtttcaaatatgaacattcttttggcaccaattttcttttttaatttggttgtttctgagatgtatgatcaactgaagatggagctgaaatgggagacgggtggccccaccgtgcccttgaaacagcagagcactcctcagtagagagggagggagccaagagcctgaacatgtggtcgccagcttggaatgttactgacatatgtggcgagggcttagccagaaatatttaaagatgtagtattccggcctgtgagttgtctgggcagggagggggagtcagaaagggtagagagctctcaaataactcatgactctagtgttcctttcacatgtgaacagtgtcactgatgacacattttctaggaccttcgtttgttttgtggacctgcctcagtctcctcagtatcaggcgatcttaagggaagatggagtgtttcaaattggagagaagttcatgggtaggtatcgtcctgtggaattctgaatgcaaggaagtcaaccccagaggccttggtacccccagctttctaaaactactttattacaatttatatgtatatacacatgcacatataaacgtgtgcatttatgtatgtgtgtatagtaccttttttaaaaaaacatttcctccaagctgctaagcaaagggtctcacaggtcgagcacagtgctgagaggatggtgtctgcataatgaagacatggatgaagctgagaccgtgttcaaactcactgaaaacaatgaagttctattccttttttcttcctctccaatgatcttgcagttgatttgtttgttttttaattttttaacatttttttaacgttgaaaaaatgctgcgtctttctttaagccttcccagtaacttcctgccttttttttccccgtgggcttttaagtgaagctgcaggattttatctttcaatctgccctttctacccttgtcctattgaaaggatgccctcttcccttgcttttttggtctagggcctgtttggagctaactaggcttggctgagtccgggcaagaccttcttccgaggcatggacaagccccagagaacatgcagaacattgacctttccattgactgtctttcaagcagccagtgaaatcactaagtggggttcttccatgacatattttgttaatatgggtttcactttttccaagaatagtcccttgttgccacaatgttgatttactttacacaatgacagtatgtattaatttgtaattaaacccatccagattgttttagccttttcccaatggggtgggggagggaagaaggatattaaaataagttttaagaagc

SEQ ID NO: 168596 - DNA, 2253 bp, Artificial Sequence
  derived and/or modified sequence
atgatggaagaactccactcccttgatcccaggaggcaggaactcctggaggcaaggttcaccggcgtcggcgtctccaaggggccactgaacagcgaatcatcaaatcagagcttatgttccgtgggatcgctctccgataaggaggtggagaccccagaaaaaaagcagaatgaccagagaaaccggaagcggaaagccgaaccttacgagacaagccagggcaaagggaccccgagaggacacaaaatcagtgactactttgaattcgccggtggctcagcccctggcaccagccctggcagatccgtgcccccagttgcacggtcttctcctcaacactcactgtcaaaccctcttcctcgccgtgtggaacagcccctgtatgggctggatggctctgccgctaaagaagcgacagaggagcagagtgctctaccaaccttaatgtctgtgatgctggctaagcccagactagacacagaacagctggcgcaaagaggagctggattgtgctttacctttgtgagtgcccagcagaactccccctcctctaccggctctggaaatacggagcacagctgttcgagccaaaagcaaatcagtatccaacatagacaaacacagtcagatctcacaatcgaaaagatcagcgcgctcgaaaactccaaaaactcagatctggagaaaaaggaggggcgtattgatgatctattgcgcgcaaactgcgatttgaggaggcagattgacgaacagcagaagatgctggaaaaatacaaagagcggttgaatagatgcgtgactatgtctaagaaactcttaatagaaaagagcaaacaggagaaaatggcctgccgggacaagagtatgcaggaccgcctgcgcctgggccatttcaccacagtgagacatggagccagttttactgagcaatggacggacggctacgcttttcagaacttgattaagcaacaagaaaggataaattcccagcgcgaagagatcgaacgtcaacggaagatgttagccaagcgcaagcccccagcaatgggtcaggcccctccagcaaccaatgaacagaaacagcggaaaagtaaaaccaacggtgcagagaacgaaaccctcactctggctgagtatcacgagcaggaggagatatttaagttgagactgggccacctcaagaaagaggaggccgagatccaggccgagctagaaagactggagcgcgtcagaaatctccatattcgcgagctaaagcgcatccacaatgaagataacagtcagtttaaggaccaccccacattgaatgatcgttaccttctcctgcacctcttgggtagggggggtttttcagaggtgtacaaagcattcgacctgacagaacagaggtacgtggctgtgaagatccatcagttgaacaagaactggagggacgagaaaaaggaaaactaccataagcatgcgtgccgggagtatcgtatccacaaggaactcgatcacccaaggattgtgaagctctatgattacttttctctcgataccgattcgttttgtacagtgctcgaatattgcgagggtaatgacttggatttttacttaaaacagcataagctcatgagcgagaaggaagctcggagtataataatgcaaatcgttaacgccctgaaatacctgaacgaaatcaagccccctatcattcattacgatctgaaacctggaaacattctactcgttaatgggacagcttgcggcgagattaaaataactgattttggactgagcaagataatggacgacgatagttataattctgtggacggaatggaactcactagtcagggagctggaacttactggtacctgccccctgaatgttttgtggtgggaaaagagcctcccaagattagtaataaagtggacgtgtggtccgtgggtgttattttttaccaatgcctctacggcaggaagccctttggccacaaccagtctcagcaggacatcctgcaggagaatactatcctgaaggccaccgaggtccaattcccaccaaaaccagtcgtgactcctgaggccaaagcatttattagaagatgtttggcctacagaaaagaggaccgaattgatgtgcagcagttagcctgcgatccttacctcctgccacatatacgaaaaagtgtctccacctcgagtcccgcaggggctgcaattgctagtacgagcggtgctagcaacaactctagctctaattag

SEQ ID NO: 168597 - DNA, 2253 bp, Artificial Sequence
  derived and/or modified sequence
atgatggaggagctgcacagcctggaccccagaagacaggagctgctggaggccagattcaccggcgtgggcgtgagcaagggccccctgaacagcgagagcagcaaccagagcctgtgcagcgtgggcagcctgagcgacaaggaggtggagacccccgagaagaagcagaacgaccagagaaacagaaagagaaaggccgagccctacgagaccagccagggcaagggcacccccagaggccacaagatcagcgactacttcgagttcgccggcggcagcgcccccggcaccagccccggcagaagcgtgccccccgtggccagaagcagcccccagcacagcctgagcaaccccctgcccagaagagtggagcagcccctgtacggcctggacggcagcgccgccaaggaggccaccgaggagcagagcgccctgcccaccctgatgagcgtgatgctggccaagcccagactggacaccgagcagctggcccagagaggcgccggcctgtgcttcaccttcgtgagcgcccagcagaacagccccagcagcaccggcagcggcaacaccgagcacagctgcagcagccagaagcagatcagcatccagcacagacagacccagagcgacctgaccatcgagaagatcagcgccctggagaacagcaagaacagcgacctggagaagaaggagggcagaatcgacgacctgctgagagccaactgcgacctgagaagacagatcgacgagcagcagaagatgctggagaagtacaaggagagactgaacagatgcgtgaccatgagcaagaagctgctgatcgagaagagcaagcaggagaagatggcctgcagagacaagagcatgcaggacagactgagactgggccacttcaccaccgtgagacacggcgccagcttcaccgagcagtggaccgacggctacgccttccagaacctgatcaagcagcaggagagaatcaacagccagagagaggagatcgagagacagagaaagatgctggccaagagaaagccccccgccatgggccaggccccccccgccaccaacgagcagaagcagagaaagagcaagaccaacggcgccgagaacgagaccctgaccctggccgagtaccacgagcaggaggagatcttcaagctgagactgggccacctgaagaaggaggaggccgagatccaggccgagctggagagactggagagagtgagaaacctgcacatcagagagctgaagagaatccacaacgaggacaacagccagttcaaggaccaccccaccctgaacgacagatacctgctgctgcacctgctgggcagaggcggcttcagcgaggtgtacaaggccttcgacctgaccgagcagagatacgtggccgtgaagatccaccagctgaacaagaactggagagacgagaagaaggagaactaccacaagcacgcctgcagagagtacagaatccacaaggagctggaccaccccagaatcgtgaagctgtacgactacttcagcctggacaccgacagcttctgcaccgtgctggagtactgcgagggcaacgacctggacttctacctgaagcagcacaagctgatgagcgagaaggaggccagaagcatcatcatgcagatcgtgaacgccctgaagtacctgaacgagatcaagccccccatcatccactacgacctgaagcccggcaacatcctgctggtgaacggcaccgcctgcggcgagatcaagatcaccgacttcggcctgagcaagatcatggacgacgacagctacaacagcgtggacggcatggagctgaccagccagggcgccggcacctactggtacctgccccccgagtgcttcgtggtgggcaaggagccccccaagatcagcaacaaggtggacgtgtggagcgtgggcgtgatcttctaccagtgcctgtacggcagaaagcccttcggccacaaccagagccagcaggacatcctgcaggagaacaccatcctgaaggccaccgaggtgcagttcccccccaagcccgtggtgacccccgaggccaaggccttcatcagaagatgcctggcctacagaaaggaggacagaatcgacgtgcagcagctggcctgcgacccctacctgctgccccacatcagaaagagcgtgagcaccagcagccccgccggcgccgccatcgccagcaccagcggcgccagcaacaacagcagcagcaactag

SEQ ID NO: 168598 - protein, 155 aa, Artificial Sequence
  derived and/or modified sequence
MGRSRSRSPRRERRRSRSTSRERERRRRERSRSRERDRRRSRSRSPHRRRSRSPRRHRSTSPSPSRLKERRDEEKKETKETKSKERQITEEDLEGKTEEEIEMMKLMGFASFDSTKGKKVDGSVNAYAINVSQKRKYRQYMNRKGGFNRPLDFIA

SEQ ID NO: 168599 - DNA, 468 bp, Artificial Sequence
  derived and/or modified sequence
atgggccgctcacgctcaagatccccccgtcgtgagcgtcgtagaagtcgatccacttctagagagagagagaggcgccggcgggaaagaagcagaagtcgcgaacgggacagaaggagaagtcggtccagatctccacacaggaggaggtcccggagccctagacggcacaggtccacctccccttcaccatcacgcctgaaggagaggcgcgatgaggagaagaaggaaaccaaggagacaaaatccaaggagaggcaaattacggaagaagacctggagggaaagaccgaggaagaaatcgagatgatgaagctgatgggctttgccagtttcgacagcaccaaaggtaagaaagtcgacggaagcgtgaacgcttatgcgattaatgtgtcgcagaagcgcaagtaccgccaatatatgaacaggaagggcggcttcaatcggccgcttgattttattgcatag

SEQ ID NO: 168600 - DNA, 468 bp, Artificial Sequence
  derived and/or modified sequence
atggggcgcagccggagtcgttcgccacgcagggagcgacgtcgatctcgcagcacgtcaagagagagagaacggcggaggcgggagcggtcccggtcgagggaacgcgaccggcgcagatcaagatctcggagtccacatcggcggcgcagtcgctcgcccaggcgccatcggtctacctctcccagcccctcccgccttaaagagcgaagggatgaagaaaagaaagaaaccaaagagacaaaaagcaaagaaaggcagatcacagaggaggacttagagggaaagaccgaagaggaaatagaaatgatgaagttgatggggttcgcctccttcgacagcaccaaaggcaagaaagtggatggctccgttaacgcctacgccatcaacgtgtctcagaaaagaaagtataggcagtatatgaaccgcaagggaggcttcaatcggccacttgatttcattgcctag

SEQ ID NO: 168601 - DNA, 468 bp, Artificial Sequence
  derived and/or modified sequence
atgggccgcagccgcagccgcagcccccggcgggagcggcggcgcagccgcagcaccagccgggagcgggagaggagaagaagagagaggagccgcagccgggagcgggacagaagaagaagccgcagccgcagcccccacagaagaagaagccgcagccccaggaggcacaggagcaccagccccagccccagccggctgaaggagaggagagatgaggagaagaaggagaccaaggagaccaagagcaaggagcggcagatcacagaggaggacctggagggcaagacagaggaggagattgagatgatgaagctgatgggctttgccagctttgacagcaccaagggcaagaaggtggatggctctgtgaatgcctatgccatcaacgtgtcccagaagaggaagtaccggcagtacatgaacaggaagggcggcttcaaccggcccctggacttcatcgcctag

SEQ ID NO: 168602 - DNA, 468 bp, Artificial Sequence
  derived and/or modified sequence
atgggccggagccggagccggagcccccggcgggagcggcggcggagcagatcaacttcccgggaacgagaacgtagacgccgggagaggtcccgcagccgcgaacgcgataggaggagaagcaggagccgttcgccccaccgcaggagatcgagaagccctcggcgccacagaagtaccagcccgtcaccatccaggttgaaggagagaagagatgaagaaaaaaaagaaacgaaggagactaaaagtaaagaacggcagatcaccgaggaggatctggaaggaaagacagaggaagaaattgagatgatgaagctgatgggcttcgcatcatttgacagcaccaagggaaaaaaagtcgatggatcagtgaatgcctacgccattaacgtaagtcagaaaaggaaatataggcaatatatgaacagaaagggagggtttaacaggccccttgattttatcgcatag

SEQ ID NO: 168603 - DNA, 468 bp, Artificial Sequence
  derived and/or modified sequence
atgggccggagccggagccggagcccccggcgggagcggcggcggagtcgctccactagcagagagcgcgagcgcaggaggcgggagcgcagtcggtcacgtgaaagggaccgtcgcagatctagatcccgtagcccacacagacggaggtcaagatcaccgcggcgccaccggtcaacgagtccttcaccctctcgcctgaaggaaagacgggacgaagagaaaaaagagacaaaagaaacgaaatcaaaagaaagacagataaccgaagaagacctggagggtaaaacagaggaagagatcgaaatgatgaaacttatgggcttcgcaagcttcgacagcacaaaaggcaaaaaggtggacgggtctgtgaatgcatacgccatcaatgtgtcacagaagcggaagtatcgacagtacatgaacaggaaaggcggatttaatagaccgctagatttcatcgcttag

SEQ ID NO: 168604 - DNA, 1802 bp, Artificial Sequence
  derived and/or modified sequence
gggcctttagttttccttccaagagcccataggaggttttgggtgccttctcaatgctggcatgagaaaatataaagcagatggacagtgaactttggtatattcactccttatgaatgttatgtggaaaagtggaagaacataagctgtttgtctatgctatgtttacaattggtttgctctattttgtgcatgtggacaaaaatgggggaaaaatgaaagctgtgttaggataatgggtatacggctgaattttccaggaatttctataataacaccaaatcgcatgttttaatgcccaccgtgaacaaagaagaccggaaccctcgcaactcgttttgacgttttctggtcggcggtaaaagctcggttcccggccctcccggaagttgttgcacagttgtttccgggaagcgggactccaaatgggtcgcagtcgcagccgctctccacggagggaacgtaggcgttcccggtccacatcccgggagagagaacgcaggcgccgagaaaggtccaggtctcgggagagagatcggagaaggagccgctcgcgatccccgcaccgaagacgctcccgatctccaagacgacatagatccacatctccttccccttctcgactgaaagaaagaagagatgaggaaaagaaagaaacaaaagaaacaaagagcaaagaacggcagattactgaggaagacttagagggcaaaacagaggaagaaatagaaatgatgaagttaatgggatttgcctcctttgactccacaaaaggtaagaaggtggatggctctgtaaatgcctatgccataaatgtctctcagaagaggaagtacaggcagtacatgaatcgaaaaggtggattcaacagacctttggatttcattgcatgagaattgaagtgttgaaggatgattttttttcccctcatcttggtcagagagtggattttgtattttgtatttaacttgcattcaaaaaacaggatctcagttctcctttcttgtaaagtaagaaaatcttatttatgatatatgcagttaacttaccttgcctcaacagaagaaaggttaaatattacatttttttcttttaggaaatatcatttgtggcaggcgtcaaccccattttatttgtccttattcctgtggaagcagtatatgttttcttcctgaatgctcattaggacttcttaaaaaacatgaaagtaatttggaagtaagtttatccaataaagcagtatttctacccttttagatttgataaatatttttattactaaagaatctccccagacattttcttttttttttcacacatagatttaagtatcttgattgttagtagtctaaaaatgggaagaatgaaaaagcataactagatttttctatcttctgtggtcgcccgcccccccccaaaaaaataccatttatggttctctccgcaagtataaaagcattacatgcaaaaaaaagatctcagagaaaacaaaagtaaaagaaaagcagaaaatcacctgttatctactcccagaaataatcaatttcaacattttggtatatgtttttccaggcttctttgggttgatcccacctatgagatcagaatatgtatgcagttctttctttaacccttttttctcctatgtactgtgaacatttaaaaagtacttttaaatattctttggaaacttagcttttagtaactacttggttgtatcataatttattaactaatgttttattggtaaacattggcttgcctcccatgacttgccattataattaaaactgtgactacta

SEQ ID NO: 168605 - DNA, 766 bp, Artificial Sequence
  derived and/or modified sequence
ttccgggaagcgggactccaaatgggtcgcagtcgcagccgctctccacggagggaacgtaggcgttcccggtccacatcccgggagagagaacgcaggcgccgagaaaggtccaggtctcgggagagagatcggagaaggagccgctcgcgatccccgcaccgaagacgctcccgatctccaagacgacatagatccacatctccttccccttctcgactgaaagaaagaagagatgaggaaaagaaagaaacaaaagaaacaaagagcaaagaacggcagattactgaggaagacttagagggcaaaacagaggaagaaatagaaatgatgaagttaatgggatttgcctcctttgactccacaaaaggtaagaaggtggatggctctgtaaatgcctatgccataaatgtctctcagaagaggaagtacaggcagtacatgaatcgaaaaggtggattcaacagacctttggatttcattgcatgagaattgaagtgttgaaggatgattttttttcccctcatcttggtcagagagtggattttgtattttgtatttaacttgcattcaaaaaacaggatctcagttctcctttcttgtaaagaaatatcatttgtggcaggcgtcaaccccattttatttgtccttattcctgtggaagcagtatatgttttcttcctgaatgctcattaggacttcttaaaaaacatgaaagtaatttggaagtaagtttatccaataaagcagtatttctaccctttta

SEQ ID NO: 168606 - DNA, 468 bp, Artificial Sequence
  derived and/or modified sequence
atgggccgaagtcgcagtcgcagcccacgaagagaacggaggcggtccaggtccacttcccgtgaacgggagagacgaaggcgagagaggtctagaagtagggagagggacaggcggcgtagcaggtctaggtccccccatcggcgaagaagccgtagccccagacgtcatcgctctacctcaccatcaccctctaggctgaaggagagaagggacgaagaaaagaaagagactaaagagactaagtctaaggagaggcaaatcaccgaggaggacctagaaggcaagactgaggaggagatcgaaatgatgaagttaatgggtttcgcatccttcgacagtacgaagggcaaaaaggtggatggttcagtgaacgcttatgctatcaacgtatctcaaaaacggaagtaccggcaatatatgaatagaaagggcggattcaatagaccactggattttatcgcctag

SEQ ID NO: 168607 - DNA, 468 bp, Artificial Sequence
  derived and/or modified sequence
atgggcaggtcacggtcaagatctccaagaagggaacggcgacgttccagaagcacgagcagagagagagaacgccgaaggcgggaacgttctcggtccagagaacgtgaccgccgacggtcgcgctctcgctccccccacagaaggagaagccgaagtcctaggaggcatcggtcaacaagtccttccccaagtagactgaaggagcggcgtgatgaggaaaagaaagaaacaaaagaaacaaagagcaaagagaggcaaattaccgaggaagacctggaaggaaaaacagaggaggaaattgagatgatgaaactgatggggtttgcttcattcgattccaccaaaggcaagaaggtggatggatccgtaaatgcctatgcaattaacgtttcccagaagcggaaatatcgccaatacatgaacagaaaaggtggcttcaaccgtcccctagatttcattgcatag

SEQ ID NO: 168608 - DNA, 468 bp, Artificial Sequence
  derived and/or modified sequence
atgggcagaagcagaagcagaagccccagaagagagagaagaagaagcagaagcaccagcagagagagagagagaagaagaagagagagaagcagaagcagagagagagacagaagaagaagcagaagcagaagcccccacagaagaagaagcagaagccccagaagacacagaagcaccagccccagccccagcagactgaaggagagaagagacgaggagaagaaggagaccaaggagaccaagagcaaggagagacagatcaccgaggaggacctggagggcaagaccgaggaggagatcgagatgatgaagctgatgggcttcgccagcttcgacagcaccaagggcaagaaggtggacggcagcgtgaacgcctacgccatcaacgtgagccagaagagaaagtacagacagtacatgaacagaaagggcggcttcaacagacccctggacttcatcgcctag

SEQ ID NO: 168609 - protein, 227 aa, Artificial Sequence
  derived and/or modified sequence
MMAAGAALALALWLLMPPVEVGGAGPPPIQDGEFTFLLPAGRKQCFYQSAPANASLETEYQVIGGAGLDVDFTLESPQGVLLVSESRKADGVHTVEPTEAGDYKLCFDNSFSTISEKLVFFELIFDSLQDDEEVEGWAEAVEPEEMLDVKMEDIKESIETMRTRLERSIQMLTLLRAFEARDRNLQEGNLERVNFWSAVNVAVLLLVAVLQVCTLKRFFQDKRPVPT

SEQ ID NO: 168610 - DNA, 684 bp, Artificial Sequence
  derived and/or modified sequence
atgatggcagcgggggcagcacttgcactggcgttatggctgttaatgcccccagttgaagtggggggtgctggtccaccaccaatccaagatggggagtttacatttctgctccccgccggccgtaagcagtgcttttatcagagtgcacctgccaatgcttcactcgagactgagtatcaggtgattggcggtgcgggcttggacgttgatttcacactggagtccccacagggcgtactccttgttagcgaaagccgaaaagctgacggtgtccacacagttgagcctaccgaggcaggagattacaagctgtgttttgataactcttttagtacgatctcagagaaactcgtgttcttcgagctgatctttgacagtctgcaagacgatgaggaggtcgagggatgggccgaggccgtcgaacccgaagagatgctggacgttaagatggaggacatcaaagaatctatcgaaaccatgcgtacgcgccttgagcgcagcattcagatgttaacacttctaagagccttcgaagccagggaccgtaacttgcaagagggtaatctcgaaagggtaaatttctggtcggccgtgaacgtggcagtcctcctgctcgtggccgttctgcaggtctgcaccctgaagcggttttttcaggacaaacggccggttcctacttag

SEQ ID NO: 168611 - DNA, 684 bp, Artificial Sequence
  derived and/or modified sequence
atgatggccgccggggccgccctggccctggccctgtggctgctgatgcctcctgtggaggtgggcggggccggccccccacccatccaggatggagagttcaccttcctgctgcctgctggcaggaagcagtgcttctaccagagcgccccagccaatgccagcctggagacagagtaccaggtgattggaggagctggcctggatgtggacttcaccctggagagcccccagggcgtgctgctggtgtctgagagcaggaaggcagatggagtgcacacagtggagcccacagaggccggggactacaagctgtgctttgacaacagcttcagcaccatcagcgagaagctggtgttctttgagctgatctttgacagcctgcaggatgatgaggaggtggagggctgggccgaggccgtggagcctgaggagatgctggatgtgaagatggaggacatcaaggagagcattgagaccatgaggacccggctggagaggagcatccagatgctgaccctgctgcgggcctttgaggcccgggacaggaacctgcaggagggcaacctggagcgggtgaacttctggagcgctgtgaatgtggccgtgctgctgctggtggccgtgctgcaggtgtgcaccctgaagcgcttcttccaggacaagaggcctgtgcccacctag

SEQ ID NO: 168612 - DNA, 684 bp, Artificial Sequence
  derived and/or modified sequence
atgatggccgccggcgccgccctggccctggccctgtggctgctgatgcctcctgtggaagtggggggggcgggcccgccacctatccaagatggggaatttacattcctcctgcccgccgggcgtaaacagtgcttctatcaaagcgcgcctgccaatgcctcgctcgaaacggagtaccaggtcatcggtggagcaggacttgacgtggacttcaccctcgagtcgcctcaaggagtcttgctggtcagcgagtctagaaaggccgacggagttcatactgttgagccaaccgaggcaggtgattacaagctatgttttgataattcctttagcactatcagcgagaaattggttttctttgaactcattttcgactcactgcaagatgatgaagaagtggaagggtgggccgaagctgtggagcctgaggaaatgctggacgttaagatggaggatatcaaagagagcatcgagactatgcgaactaggctggagagaagcatccagatgttaacccttcttagagcttttgaagcccgtgacagaaaccttcaggagggtaatctggaaagggttaacttctggtctgccgtaaacgtcgcagtgctgctgctcgtcgctgtccttcaggtgtgcacacttaaacggttctttcaggataagcgccctgtccccacctag

SEQ ID NO: 168613 - DNA, 684 bp, Artificial Sequence
  derived and/or modified sequence
atgatggccgctggtgctgcgttagcattagccttgtggttgctcatgcctccggtggaggtcgggggagcaggtccgccacccatccaagacggagagttcacatttctccttcccgctgggcgaaaacaatgcttctatcagtctgctcctgcaaacgcatctctggagacagaataccaagttatcggcggagcaggtttagatgtggattttactctcgagtcaccccagggcgtgttgctggtaagcgaatcacgcaaagcagatggagtccataccgtcgaacccacagaggccggagactataagctgtgcttcgataattcattctctactattagtgagaaacttgttttttttgaattaatctttgacagcctccaggacgacgaggaggtggaaggatgggccgaggccgtagaaccagaggaaatgctggatgtaaagatggaagatatcaaggagtcgatcgagacaatgcgaacacggcttgaacgctctatccaaatgctcactctcttgcgcgcttttgaggccagggatcgcaatctacaggaaggcaacctggagagggttaatttctggtccgcagtgaatgttgccgtgctcttgctcgttgctgttctgcaagtgtgcacactgaaacggttctttcaggacaagaggcccgttccaacttag

SEQ ID NO: 168614 - DNA, 1356 bp, Artificial Sequence
  derived and/or modified sequence
ctctggttacggacaacatacagaagccactgccaatgagctccgccgagtagcaccggggcagggctagcgcttaaaggagccgcgacccctttgcagaccagagggtgacccggatgatggcggccggcgcggccctagccctggccttgtggctactaatgccaccagtggaggtgggaggggcggggcccccgccaatccaggacggtgagttcacgttcctgttgccggcggggaggaagcagtgtttctaccagtccgcgccggccaacgcaagcctcgagaccgaataccaggtgatcggaggtgctggactggacgtggacttcacgctggagagccctcagggcgtgctgttggtcagcgagtcccgcaaggctgatggggtacacacggtggagccaacggaggccggggactacaagctgtgctttgacaactccttcagcaccatctccgagaagctggtgttctttgaactgatctttgacagcctccaggatgacgaggaggtcgaaggatgggcagaggctgtggagcccgaggagatgctggatgttaaaatggaggacatcaaggagtccattgagaccatgcggacccggctggagcgcagcatccagatgctcacgctactgcgggccttcgaggcacgtgaccgcaacctgcaagagggcaacttggagcgggtcaacttctggtcagctgtcaacgtggcggtgctgctgctggtggctgtgctgcaggtctgcacgctcaagcgcttcttccaggacaagcgcccggtgcccacgtagcccctgccatggaaggaagaacgggacaaaggaggggcagcagggtgtgtgcatatgagacttgggggtccctccccaattttagtttcctgccaaaacgggagtgtgcagtcagggcctgcggtctggccccatgagtctccttccgtcctcagcgggcagggaacacctctggcttgtagaagggacggctcagtggctgcaccgacggtcctggaaatctcacatggtgggcactgcagcgttggaacgtgagcctcggatttcctggcccctctactgtaaatgtgccttagcctaagcctcccatcctgtgttagcgttgcctggtgcggggcagggcctaacaaggaaacctgggccctccaagccaggttgaggtctggtaacagaatgccaggaagggggcctggaagaccacctgccccggcccctctcctgcaggggccccacacaggcatgagggatggcccggccaaagtctaggcagaagcctcctataacaaagggtggtgtggcctgggcattggagtcaataaattatggtcagaaaatc

SEQ ID NO: 168615 - DNA, 684 bp, Artificial Sequence
  derived and/or modified sequence
atgatggccgccggcgccgccctggccctggccctgtggctgctgatgccccccgtggaggtgggcggcgccggccccccccccatccaggacggcgagttcaccttcctgctgcccgccggcagaaagcagtgcttctaccagagcgcccccgccaacgccagcctggagaccgagtaccaggtgatcggcggcgccggcctggacgtggacttcaccctggagagcccccagggcgtgctgctggtgagcgagagcagaaaggccgacggcgtgcacaccgtggagcccaccgaggccggcgactacaagctgtgcttcgacaacagcttcagcaccatcagcgagaagctggtgttcttcgagctgatcttcgacagcctgcaggacgacgaggaggtggagggctgggccgaggccgtggagcccgaggagatgctggacgtgaagatggaggacatcaaggagagcatcgagaccatgagaaccagactggagagaagcatccagatgctgaccctgctgagagccttcgaggccagagacagaaacctgcaggagggcaacctggagagagtgaacttctggagcgccgtgaacgtggccgtgctgctgctggtggccgtgctgcaggtgtgcaccctgaagagattcttccaggacaagagacccgtgcccacctag

SEQ ID NO: 168616 - protein, 372 aa, Artificial Sequence
  derived and/or modified sequence
MSLRCGDAARTLGPRVFGRYFCSPVRPLSSLPDKKKELLQNGPDLQDFVSGDLADRSTWDEYKGNLKRQKGERLRLPPWLKTEIPMGKNYNKLKNTLRNLNLHTVCEEARCPNIGECWGGGEYATATATIMLMGDTCTRGCRFCSVKTARNPPPLDASEPYNTAKAIAEWGLDYVVLTSVDRDDMPDGGAEHIAKTVSYLKERNPKILVECLTPDFRGDLKAIEKVALSGLDVYAHNVETVPELQSKVRDPRANFDQSLRVLKHAKKVQPDVISKTSIMLGLGENDEQVYATMKALREADVDCLTLGQYMQPTRRHLKVEEYITPEKFKYWEKVGNELGFHYTASGPLVRSSYKAGEFFLKNLVAKRKTKDL

SEQ ID NO: 168617 - DNA, 1119 bp, Artificial Sequence
  derived and/or modified sequence
atgtccctacggtgcggggacgccgcccggacactaggcccccgggtcttcgggcgttacttctgtagtcccgtccggcctctttcctcccttcccgacaagaagaaggaactgctccagaatggccccgaccttcaggatttcgtctcaggagatttggccgatcgtagcacctgggacgagtataaaggcaacctgaaaagacagaaaggagagagactgcgactccccccttggctcaaaactgagataccgatgggtaagaactacaataagctaaagaacaccttgcggaaccttaatttgcatactgtgtgtgaggaggcccgatgcccaaatattggggagtgctggggaggaggagaatatgctacagctactgccacaattatgctgatgggagacacctgcacgcggggctgcaggttctgttccgtaaaaactgcaagaaaccctccaccacttgacgcaagcgagccctacaatacagcgaaagcaattgccgagtggggactcgattacgtggtgcttacttcagtggaccgggacgacatgccagatgggggtgctgaacacatcgcaaagacagtaagctatcttaaagaaagaaaccccaaaatcctagtagagtgcctcactcccgacttcagaggagacctgaaagctatagagaaggtcgctctctctgggctggatgtctacgctcacaatgtggaaaccgtgccagagcttcaatcaaaagtcagggatcctagggccaacttcgaccaaagtcttcgcgttctgaagcacgctaaaaaagtccagcccgatgtgattagcaaaactagcatcatgctcggccttggggagaacgatgagcaagtttacgcaacaatgaaggcattaagagaggcagatgtggactgtctgacattgggccaatatatgcagcctactcgaagacatctgaaggtcgaagagtatattacccctgaaaaattcaagtattgggaaaaagtcggaaatgagcttgggtttcattacacggcaagcggaccattggtcagaagctcatacaaagcaggcgagtttttcttgaaaaacctcgtggccaaacgaaagaccaaagacttatag

SEQ ID NO: 168618 - DNA, 1119 bp, Artificial Sequence
  derived and/or modified sequence
atgagcctgcgctgtggagatgctgcccggaccctgggcccccgggtgtttggccgctacttctgcagccctgtgcggcccctgagcagcctgcctgacaagaagaaggagctgctgcagaatggaccagacctgcaggactttgtgtctggggacctggccgacaggagcacctgggatgagtacaagggcaacctgaagaggcagaagggggagcggctgcggctgcccccctggctgaagacagagatccccatgggcaagaactacaacaagctgaagaacaccctgaggaacctgaacctgcacacagtgtgtgaggaggcccgctgccccaacatcggggagtgctggggcggcggggagtatgccacagccacagccaccatcatgctgatgggagacacctgcacccggggctgccgcttctgcagcgtgaagacagccaggaaccccccacccctggatgccagcgagccctacaacacagccaaggccatcgccgagtggggcctggactatgtggtgctgacctctgtggacagagatgacatgccagatggaggagctgagcacatcgccaagacagtgtcctacctgaaggagaggaaccccaagatcctggtggagtgcctgaccccagacttccggggggacctgaaggccatcgagaaggtggccctgagcggcctggatgtgtatgcccacaacgtggagaccgtgcctgagctgcagagcaaggtgcgggacccccgggccaactttgaccagagcctgcgggtgctgaagcacgccaagaaggtgcagccagatgtgatcagcaagaccagcatcatgctgggcctgggggagaatgatgagcaggtgtatgccaccatgaaggccctgcgggaggctgatgtggactgcctgaccctgggccagtacatgcagcccacccggcggcacctgaaggtggaggagtacatcaccccagagaagttcaagtactgggagaaggtgggcaatgagctgggcttccactacacagccagcggccccctggtgcgcagcagctacaaggccggggagttcttcctgaagaacctggtggccaagaggaagaccaaggacctgtag

SEQ ID NO: 168619 - DNA, 1775 bp, Artificial Sequence
  derived and/or modified sequence
agccaatcgtggagcagcttggctgcttgtcataaatggagcgacgtaatttcgacctgtcctttcccgggagttagcgatccctcaacccctgcactgcgctagtcctaaagaggaaatgtctctacgctgcggggatgcagcccgcaccctggggccccgggtatttgggagatatttttgcagcccagtcagaccgttaagctccttgccagataaaaaaaaggaactcctacagaatggaccagaccttcaagattttgtatctggtgatcttgcagacaggagcacctgggatgaatataaaggaaacctaaaacgccagaaaggagaaaggttaagactacctccatggctaaagacagagattcccatggggaaaaattacaataaactgaaaaatactttgcggaatttaaatctccatacagtatgtgaggaagctcgatgtcccaatattggagagtgttggggaggtggagaatatgccaccgccacagccacgatcatgttgatgggtgacacatgtacaagaggttgcagattttgttctgttaagactgcaagaaatcctcctccactggatgccagtgagccctacaatactgcaaaggcaattgcagaatggggtctggattatgttgtcctgacatctgtggatcgagatgatatgcctgatgggggagctgaacacattgcaaagaccgtatcatatttaaaggaaaggaatccaaaaatccttgtggagtgtcttactcctgattttcgaggtgatctcaaagcaatagaaaaagttgctctgtcaggattagatgtgtatgcacataatgtagaaacagtcccggaattacagagtaaggttcgtgatcctcgggccaattttgatcagtccctacgtgtactgaaacatgccaagaaggttcagcctgatgttatttctaaaacatctataatgttgggtttaggcgagaatgatgagcaagtatatgcaacaatgaaagcacttcgtgaggcagatgtagactgcttgactttaggacaatatatgcagccaacaaggcgtcaccttaaggttgaagaatatattactcctgaaaaattcaaatactgggaaaaagtaggaaatgaacttggatttcattatactgcaagtggccctttggtgcgttcttcatataaagcaggtgaatttttcctgaaaaatctagtggctaaaagaaaaacaaaagacctctaaaacttcaacaagaccttcaagatcacagaaatttttaaaatttgattccagttaataacagaggtggtgccagaatgcctggactgcagtggatgtgccccacctctttgcttaaaaaaaaaaatgtcaatagccaggcatagtggctcacgcctgtaatcccagcactttaggaggccaaggcgggtggatcacctgaggtcaggagttcgagaccagcctggccaacatggtgaaatcctgtctccactaaaaacacaaaaattagtcaggcgtggtagtgggtgcctgtaatcccagctactcgggaggctaaggcaggagaatcacttgaacctgggagggggaggttgcagtgagccaagatcgctccattgccctccagcctgggtgacaagagcaaaactccatctcaaataaataaaaaggaaaaaaaagtcaataaactgtacaaatttaattacagtaattcatttggcttttagtgtatcttctttgtcccaattaaacagttgcttgctgtgatgtaatcttaaaa

SEQ ID NO: 168620 - DNA, 1119 bp, Artificial Sequence
  derived and/or modified sequence
atgagcctgcggtgcggcgacgccgcccggaccctgggcccccgggtgttcggacgttatttctgtagtcctgtccggccattaagttccctgccagataaaaagaaggaacttcttcagaacggaccagacttgcaggacttcgtgtctggcgacctggccgatcgctccacttgggacgagtacaaggggaacctgaagcgtcagaagggggagaggttaaggttgccaccttggctgaagacagagattcctatgggcaagaactataacaagcttaagaacactctccggaacttgaatctgcataccgtgtgcgaggaggcaagatgcccaaacataggagagtgctggggcggcggagaatatgctactgctaccgctactattatgttgatgggcgacacatgcactcgaggatgtcgcttctgctccgtcaagacggcaagaaacccgcccccgctggatgcaagtgagccctacaatacagccaaggctatcgccgagtggggtctcgattatgtagtgctgacttctgttgaccgcgacgacatgccagatggtggggccgagcatattgcgaagacagtctcatacttgaaggagcgcaacccgaaaattttggttgaatgcttgacccccgattttaggggagacctgaaggctatcgagaaggtggcactgtccgggctcgatgtctatgcacacaacgtggaaacagtgcctgagctgcagtcaaaggtgagggatcctcgcgcaaacttcgaccagtctctaagggttttaaaacacgctaagaaagtccagcccgacgtcatttcgaaaaccagcattatgctcggtctcggggagaacgacgagcaggtgtatgcaacaatgaaggctcttcgcgaagccgacgtcgattgccttaccctcggacaatatatgcagcccaccagacggcatcttaaggtggaagagtatataactcctgagaaatttaagtattgggagaaggtgggtaatgagctgggtttccactataccgcaagcggtccactcgtgagaagcagttataaagccggtgaattctttcttaagaacctggtggctaagcgcaagacgaaggacctttag

SEQ ID NO: 168621 - DNA, 1119 bp, Artificial Sequence
  derived and/or modified sequence
atgagtcttcgctgcggcgacgcagcacgaaccctcggacctcgggttttcgggcgttatttctgtagccctgtgaggccactgtcttctctccctgacaaaaaaaaagagcttttgcagaacgggcctgatctgcaagatttcgtgtcgggtgatcttgccgaccgatccacgtgggacgagtacaaggggaacctgaaacgtcagaagggggagcggttgcgcttgcctccatggctcaagacggaaatacccatggggaaaaactacaacaaacttaaaaatacgctacgaaacttaaacttgcacaccgtgtgtgaggaagcgcgttgccccaatattggagagtgttggggcggaggcgagtacgccacggcaactgccaccatcatgctgatgggagatacatgtacgaggggctgtagattttgttcagtcaaaaccgctcgcaatccacctccactcgacgcctctgagccctataatacagccaaagcaatcgccgaatggggactcgactacgtcgttctgacttctgttgacagagacgatatgcctgacggcggtgcggaacacatcgccaaaaccgtgtcatatcttaaggaacggaatcctaaaatactggtggagtgtcttacaccggacttccgaggggatctaaaggccattgaaaaggtggctctcagcggcctagatgtttatgcacataacgtcgaaacagtccccgagctgcagtccaaagttcgggaccctcgcgctaactttgatcagtccctccgagtccttaagcacgcaaagaaagttcaacctgatgtgatcagcaagacatctattatgctcggcctgggtgagaatgatgagcaggtgtacgccaccatgaaagctctccgcgaggccgacgtggactgcctgactttgggacaatacatgcagcctacaagacgtcacctgaaagttgaggaatacataacccccgagaagttcaaatactgggaaaaagtgggtaacgagctcggattccattatacagcctctggccctctggtgagatcatcgtacaaagccggagagttttttttgaagaatctcgtggccaagagaaaaaccaaagatctgtag

SEQ ID NO: 168622 - DNA, 1119 bp, Artificial Sequence
  derived and/or modified sequence
atgagcctgagatgcggcgacgccgccagaaccctgggccccagagtgttcggcagatacttctgcagccccgtgagacccctgagcagcctgcccgacaagaagaaggagctgctgcagaacggccccgacctgcaggacttcgtgagcggcgacctggccgacagaagcacctgggacgagtacaagggcaacctgaagagacagaagggcgagagactgagactgcccccctggctgaagaccgagatccccatgggcaagaactacaacaagctgaagaacaccctgagaaacctgaacctgcacaccgtgtgcgaggaggccagatgccccaacatcggcgagtgctggggcggcggcgagtacgccaccgccaccgccaccatcatgctgatgggcgacacctgcaccagaggctgcagattctgcagcgtgaagaccgccagaaaccccccccccctggacgccagcgagccctacaacaccgccaaggccatcgccgagtggggcctggactacgtggtgctgaccagcgtggacagagacgacatgcccgacggcggcgccgagcacatcgccaagaccgtgagctacctgaaggagagaaaccccaagatcctggtggagtgcctgacccccgacttcagaggcgacctgaaggccatcgagaaggtggccctgagcggcctggacgtgtacgcccacaacgtggagaccgtgcccgagctgcagagcaaggtgagagaccccagagccaacttcgaccagagcctgagagtgctgaagcacgccaagaaggtgcagcccgacgtgatcagcaagaccagcatcatgctgggcctgggcgagaacgacgagcaggtgtacgccaccatgaaggccctgagagaggccgacgtggactgcctgaccctgggccagtacatgcagcccaccagaagacacctgaaggtggaggagtacatcacccccgagaagttcaagtactgggagaaggtgggcaacgagctgggcttccactacaccgccagcggccccctggtgagaagcagctacaaggccggcgagttcttcctgaagaacctggtggccaagagaaagaccaaggacctgtag

SEQ ID NO: 168623 - protein, 185 aa, Artificial Sequence
  derived and/or modified sequence
MVKLAAKCILADPAVGKTALAQIFRSDGAHFQKSYTLTTGMDLVVKTVPVPDTGDSVELFIFDSAGKELFSEMLDKLWESPNVLCLVYDVTNEESFNNCSKWLEKARSQAPGISLPGVLVGNKTDLAGRRAVDSAEARAWALGQGLECFETSVKEMENFEAPFHCLAKQFHQLYREKVEVFRALA

SEQ ID NO: 168624 - protein, 129 aa, Artificial Sequence
  derived and/or modified sequence
  misc_feature (1)..(1): Xaa can be any naturally occurring amino acid
XSDGAHFQKSYTLTTGMDLVVKTVPVPDTGDSVELFIFDSAGKELFSEMLDKLWESPNVLCLVYDVTNEESFNNCSKWLEKARSQAPGISLPGVLVGNKTDLAGRRAVDSAEARAWALGQGLECFETSV

SEQ ID NO: 168625 - protein, 116 aa, Artificial Sequence
  derived and/or modified sequence
MVKLAAKCILADPAVGKTALAQIFRSDGAHFQKSYTLTTGMDLVVKTVPVPDTGDSVELFIFDSAGKELFSEMLDKLWESPNVLCLVYDVTNEESFNNCSKWLEKARSQAPGISLP

SEQ ID NO: 168626 - protein, 51 aa, Artificial Sequence
  derived and/or modified sequence
MDLVVKTVPVPDTGDSVELFIFDSAGKELFSEMLDKLWESPNVLCLVYDVT

SEQ ID NO: 168627 - DNA, 558 bp, Artificial Sequence
  derived and/or modified sequence
atggtgaagctggccgccaagtgcatcctggccgaccccgccgtgggcaagaccgccctggcccagatcttcagaagcgacggcgcccacttccagaagagctacaccctgaccaccggcatggacctggtggtgaagaccgtgcccgtgcccgacaccggcgacagcgtggagctgttcatcttcgacagcgccggcaaggagctgttcagcgagatgctggacaagctgtgggagagccccaacgtgctgtgcctggtgtacgacgtgaccaacgaggagagcttcaacaactgcagcaagtggctggagaaggccagaagccaggcccccggcatcagcctgcccggcgtgctggtgggcaacaagaccgacctggccggcagaagagccgtggacagcgccgaggccagagcctgggccctgggccagggcctggagtgcttcgagaccagcgtgaaggagatggagaacttcgaggcccccttccactgcctggccaagcagttccaccagctgtacagagagaaggtggaggtgttcagagccctggcctag

SEQ ID NO: 168628 - DNA, 390 bp, Artificial Sequence
  derived and/or modified sequence
tgaagcgacggcgcccacttccagaagagctacaccctgaccaccggcatggacctggtggtgaagaccgtgcccgtgcccgacaccggcgacagcgtggagctgttcatcttcgacagcgccggcaaggagctgttcagcgagatgctggacaagctgtgggagagccccaacgtgctgtgcctggtgtacgacgtgaccaacgaggagagcttcaacaactgcagcaagtggctggagaaggccagaagccaggcccccggcatcagcctgcccggcgtgctggtgggcaacaagaccgacctggccggcagaagagccgtggacagcgccgaggccagagcctgggccctgggccagggcctggagtgcttcgagaccagcgtgtag

SEQ ID NO: 168629 - DNA, 351 bp, Artificial Sequence
  derived and/or modified sequence
atggtgaagctggccgccaagtgcatcctggccgaccccgccgtgggcaagaccgccctggcccagatcttcagaagcgacggcgcccacttccagaagagctacaccctgaccaccggcatggacctggtggtgaagaccgtgcccgtgcccgacaccggcgacagcgtggagctgttcatcttcgacagcgccggcaaggagctgttcagcgagatgctggacaagctgtgggagagccccaacgtgctgtgcctggtgtacgacgtgaccaacgaggagagcttcaacaactgcagcaagtggctggagaaggccagaagccaggcccccggcatcagcctgccctag

SEQ ID NO: 168630 - DNA, 156 bp, Artificial Sequence
  derived and/or modified sequence
atggacctggtggtgaagaccgtgcccgtgcccgacaccggcgacagcgtggagctgttcatcttcgacagcgccggcaaggagctgttcagcgagatgctggacaagctgtgggagagccccaacgtgctgtgcctggtgtacgacgtgacctag

SEQ ID NO: 168631 - DNA, 438 bp, Artificial Sequence
  derived and/or modified sequence
atggacctggtggtgaagaccgtgcccgtgcccgacaccggcgacagcgtggagctgttcatcttcgacagcgccggcaaggagctgttcagcgagatgctggacaagctgtgggagagccccaacgtgctgtgcctggtgtacgacgtgaccaacgaggagagcttcaacaactgcagcaagtggctggagaaggccagaagccaggcccccggcatcagcctgcccggcgtgctggtgggcaacaagaccgacctggccggcagaagagccgtggacagcgccgaggccagagcctgggccctgggccagggcctggagtgcttcgagaccagcgtgaaggagatggagaacttcgaggcccccttccactgcctggccaagcagttccaccagctgtacagagagaaggtggaggtgttcagagccctggcctag

SEQ ID NO: 168632 - DNA, 558 bp, Artificial Sequence
  derived and/or modified sequence
atggtgaaattagccgctaagtgtatcctggcagatcccgcagtgggcaaaaccgctctggcccaaatctttcgtagtgacggagcccatttccaaaaatcatataccctgacaaccggaatggacctggtggtgaaaactgtacccgtcccagacacaggggatagcgtggagctctttatctttgactcagccggaaaggagctattctctgagatgctcgataagctgtgggagtcgcctaacgtgttgtgtttggtctacgatgtcaccaatgaagaaagtttcaataactgcagtaaatggctcgagaaggcacgatctcaggcacctgggatctcactgcccggcgttcttgtggggaacaaaacagatctcgccgggcgacgcgccgtggatagcgctgaagctcgagcctgggcactgggacagggtctcgaatgtttcgaaacctctgttaaggagatggaaaacttcgaggcccctttccactgtttggccaagcagtttcaccagctttaccgggagaaagtggaagtgttccgggccctggcttag

SEQ ID NO: 168633 - DNA, 390 bp, Artificial Sequence
  derived and/or modified sequence
tgatctgacggcgcccacttccagaagtcatatactcttaccacaggcatggacctggtcgtaaagacagtgccagtgcctgacacgggagactcagtcgaattattcatctttgatagcgccggcaaagaacttttctcagagatgctggataagctttgggaaagccctaatgtgctgtgtcttgtttacgatgttaccaacgaagagtcatttaacaactgttccaaatggctggagaaagcccgctctcaagcccctggtatatcgctcccaggcgtgctggtaggaaataaaacagacctagctggccgcagagcagtggactccgccgaggcgcgggcttgggcactgggccagggccttgagtgcttcgaaaccagcgtctag

SEQ ID NO: 168634 - DNA, 351 bp, Artificial Sequence
  derived and/or modified sequence
atggtgaagctggctgctaagtgtattcttgctgatccagccgttggtaagaccgcattagctcagatattccgatcagatggggcacattttcaaaagtcctacacactaactactgggatggacttagtggtgaagaccgtgcccgtccccgataccggtgactccgtggaactcttcatcttcgactcagcggggaaggagctattttctgagatgcttgacaagctctgggagtcacctaacgtgctctgtttggtctacgacgtgaccaacgaggaatcttttaacaattgctccaaatggctcgagaaggctcgatctcaggcccccggcatctctctgccgtag

SEQ ID NO: 168635 - DNA, 156 bp, Artificial Sequence
  derived and/or modified sequence
atggacctggtggtaaaaacagtgcccgttcctgataccggcgacagtgtcgaattatttattttcgactcggccggaaaagaacttttttctgagatgctagacaaactctgggagtcccccaatgtgttgtgcctagtgtatgacgtgacctag

SEQ ID NO: 168636 - DNA, 438 bp, Artificial Sequence
  derived and/or modified sequence
atggatctggtcgttaaaacagtccccgtgccagacaccggcgacagtgtggagttatttatttttgatagcgccgggaaagaattattctcagagatgttagacaagctgtgggagagtccaaatgtgctgtgtcttgtgtacgacgtgactaatgaagagagcttcaacaactgttcgaaatggctcgagaaagcacgcagtcaggctcccgggattagcttaccaggagtattagtcggaaacaagaccgatctcgccggtagaagagccgtcgattcagccgaagccagagcatgggcattaggtcaaggactggaatgctttgagacatccgtgaaagaaatggagaattttgaggctccttttcattgcctggccaaacagtttcaccagctctatcgtgagaaggtcgaggtctttagagccctggcctag

SEQ ID NO: 168637 - DNA, 558 bp, Artificial Sequence
  derived and/or modified sequence
atggtgaagctggccgccaagtgcatcctggccgaccctgctgtgggcaagacagccctggcccagatcttcagaagtgatggagcccacttccagaagagctacaccctgaccaccggcatggacctggtggtgaagacagtgcctgtgcctgacacaggagacagcgtggagctgttcatctttgacagcgctgggaaggagctgttcagcgagatgctggacaagctgtgggagagccccaacgtgctgtgcctggtgtatgatgtgaccaatgaggagagcttcaacaactgcagcaagtggctggagaaggcccggagccaggcccctggcatcagcctgcccggggtgctggtgggcaacaagacagacctggccggcagaagagctgtggacagcgctgaggcccgggcctgggccctgggccagggcctggagtgctttgagacctctgtgaaggagatggagaactttgaggcccccttccactgcctggccaagcagttccaccagctgtaccgggagaaggtggaggtgttccgggccctggcctag

SEQ ID NO: 168638 - DNA, 390 bp, Artificial Sequence
  derived and/or modified sequence
tgaagtgatggagcccacttccagaagagctacaccctgaccaccggcatggacctggtggtgaagacagtgcctgtgcctgacacaggagacagcgtggagctgttcatctttgacagcgctgggaaggagctgttcagcgagatgctggacaagctgtgggagagccccaacgtgctgtgcctggtgtatgatgtgaccaatgaggagagcttcaacaactgcagcaagtggctggagaaggcccggagccaggcccctggcatcagcctgcccggggtgctggtgggcaacaagacagacctggccggcagaagagctgtggacagcgctgaggcccgggcctgggccctgggccagggcctggagtgctttgagacctctgtgtag

SEQ ID NO: 168639 - DNA, 351 bp, Artificial Sequence
  derived and/or modified sequence
atggtgaagctggccgccaagtgcatcctggccgaccctgctgtgggcaagacagccctggcccagatcttcagaagtgatggagcccacttccagaagagctacaccctgaccaccggcatggacctggtggtgaagacagtgcctgtgcctgacacaggagacagcgtggagctgttcatctttgacagcgctgggaaggagctgttcagcgagatgctggacaagctgtgggagagccccaacgtgctgtgcctggtgtatgatgtgaccaatgaggagagcttcaacaactgcagcaagtggctggagaaggcccggagccaggcccctggcatcagcctgccctag

SEQ ID NO: 168640 - DNA, 156 bp, Artificial Sequence
  derived and/or modified sequence
atggacctggtggtgaagacagtgcctgtgcctgacacaggagacagcgtggagctgttcatctttgacagcgctgggaaggagctgttcagcgagatgctggacaagctgtgggagagccccaacgtgctgtgcctggtgtatgatgtgacctag

SEQ ID NO: 168641 - DNA, 438 bp, Artificial Sequence
  derived and/or modified sequence
atggacctggtggtgaagacagtgcctgtgcctgacacaggagacagcgtggagctgttcatctttgacagcgctgggaaggagctgttcagcgagatgctggacaagctgtgggagagccccaacgtgctgtgcctggtgtatgatgtgaccaatgaggagagcttcaacaactgcagcaagtggctggagaaggcccggagccaggcccctggcatcagcctgcccggggtgctggtgggcaacaagacagacctggccggcagaagagctgtggacagcgctgaggcccgggcctgggccctgggccagggcctggagtgctttgagacctctgtgaaggagatggagaactttgaggcccccttccactgcctggccaagcagttccaccagctgtaccgggagaaggtggaggtgttccgggccctggcctag

SEQ ID NO: 168642 - DNA, 1113 bp, Artificial Sequence
  derived and/or modified sequence
aatcgagggtcagcgaggaggaggaggaggcggggcaggtgggctatggttgcttggagagtgcatccggcccggtacttgtgatcggaggagagccggatcgtccttccttgaaccctctgggtagggctgtgctgaggggctgggcggggagcacaggccgtgtccgctcgcttgcaccttttcagactgccgtgtcaggcctcgagccgggcccacctggagccctcccctgcccacccgcccccagcgcccgatatccgcccccggcccagaagggccgggctcggtcatccccagtcccgtcgcggccactgacccttgagatcagccctcccctccccaccttcccgtcccaggccagcccagggcccgaagcccacccactcgcgtctctagcagccgctcttgtcctctgggtacggctcgcgggagtgttggttaccatggtgaagctggcagccaaatgcatcctggcagacccagcagtgggcaagaccgccctggcacagatcttccgcagtgatggagcccatttccagaaaagctacaccctgacaacaggaatggatttggtggtgaagacagtgccagttcctgacacgggagacagtgtggaactcttcatttttgactctgctggcaaggagctgttttcggaaatgctggataaattgtgggagagtcccaatgtcttatgtctcgtctatgatgtgaccaatgaagaatccttcaacaactgcagcaagtggctggagaaggctcggtcacaggctccaggcatctctctcccaggtgttttagttgggaacaagacagacctggccggcagacgagcagtggactcagctgaggcccgggcatgggcgctgggccagggcctggaatgttttgaaacatccgtgaaagagatggaaaacttcgaagcccctttccactgccttgccaagcagttccaccagctgtaccgggagaaggtggaggttttccgggccctggcatgacgagctggagcagatcgtgctgcacaaccggagaagacagaattacctctgctcttttaatatataatgatggctttaaataaaattaggagaaaatgtcgaagcagca

SEQ ID NO: 168643 - DNA, 660 bp, Artificial Sequence
  derived and/or modified sequence
cagtgatggagcccatttccagaaaagctacaccctgacaacaggaatggatttggtggtgaagacagtgccagttcctgacacgggagacagtgtggaactcttcatttttgactctgctggcaaggagctgttttcggaaatgctggataaattgtgggagagtcccaatgtcttatgtctcgtctatgatgtgaccaatgaagaatccttcaacaactgcagcaagtggctggagaaggctcggtcacaggctccaggcatctctctcccaggtgttttagttgggaacaagacagacctggccggcagacgagcagtggactcagctgaggcccgggcatgggcgctgggccagggcctggaatgttttgaaacatccgtgtgaccatcctgcctacccaaaggaggtccctacaaacaagtgcaagaacaatccgcgctgatcactgccctcccagaaagagatggaaaacttcgaagcccctttccactgccttgccaagcagttccaccagctgtaccgggagaaggtggaggttttccgggccctggcatgacgagctggagcagatcgtgctgcacaaccggagaagacagaattacctctgctcttttaatatataatgatggctttaaataaaattaggagaaaatgtc

SEQ ID NO: 168644 - DNA, 531 bp, Artificial Sequence
  derived and/or modified sequence
ggcggggcaggtgggctatggttgcttggagagtgcatccggcccggtacttgtgatcggaggagagccggatcgtccttccttgaaccctctgggccagcccagggcccgaagcccacccactcgcgtctctagcagccgctcttgtcctctgggtacggctcgcgggagtgttggttaccatggtgaagctggcagccaaatgcatcctggcagacccagcagtgggcaagaccgccctggcacagatcttccgcagtgatggagcccatttccagaaaagctacaccctgacaacaggaatggatttggtggtgaagacagtgccagttcctgacacgggagacagtgtggaactcttcatttttgactctgctggcaaggagctgttttcggaaatgctggataaattgtgggagagtcccaatgtcttatgtctcgtctatgatgtgaccaatgaagaatccttcaacaactgcagcaagtggctggagaaggctcggtcacaggctccaggcatctctctcccag

SEQ ID NO: 168645 - DNA, 558 bp, Artificial Sequence
  derived and/or modified sequence
atggtgaagctggccgccaagtgcatcctggccgaccccgccgtggggaaaacagccctcgcccagatttttcgatctgatggcgcccatttccagaaatcatataccctcactacaggtatggacctcgttgtcaagaccgtgccagtgcctgatacgggcgattccgtggaattgtttatcttcgatagtgctggcaaggagctgttctcagaaatgctggataagctgtgggaaagccccaatgtcctgtgtctggtatatgatgtaacaaacgaggaaagtttcaataactgctctaaatggctagagaaggctcgtagccaggctcccggtatatcccttcctggcgtactggttggaaataagaccgatctggccgggaggcgcgccgtggattcggccgaggctcgtgcctgggcgctgggtcagggtttggaatgttttgaaacctctgtcaaggagatggagaattttgaagccccctttcattgccttgccaagcagtttcaccagttgtatcgagaaaaggtggaagtcttcagggctttggcatag

SEQ ID NO: 168646 - DNA, 390 bp, Artificial Sequence
  derived and/or modified sequence
tgaagcgacggcgcccacttccagaagagctacaccctgaccaccggcatggatctggtggtcaaaacagtaccagtgcctgacaccggcgattctgtggagctcttcattttcgactctgctggcaaggagctcttttcagaaatgttggataagctttgggagtccccaaatgttctgtgtctggtgtacgacgtcacaaacgaagagagcttcaataactgtagcaagtggctggaaaaggccagaagtcaggcccccggaatcagcttgcccggggtcctggtgggtaacaagactgatctcgctggacgtcgagccgtggactccgcagaggcccgggcctgggctctgggccaaggattggagtgtttcgagacaagcgtatag

SEQ ID NO: 168647 - DNA, 351 bp, Artificial Sequence
  derived and/or modified sequence
atggtgaagctggccgccaagtgcatcctggccgaccccgccgtgggaaagacggcactggctcagatattccggagtgacggcgcacattttcagaagtcctatactttgacaaccggtatggatctagtcgtgaagactgtaccggtgccagacacaggcgacagtgttgagcttttcatctttgactcggctggtaaggagctgttctcagaaatgctagacaagctatgggagagccccaatgtgctgtgtctggtgtatgatgtaactaatgaagaaagtttcaacaactgctcaaaatggctggagaaggccaggtcgcaagcgcccggcatctctctgccgtag

SEQ ID NO: 168648 - DNA, 156 bp, Artificial Sequence
  derived and/or modified sequence
atggacctggtggtgaagaccgtgcccgtgcccgacaccggcgacagcgtcgagttgttcatcttcgattccgccggcaaagaattattctctgaaatgcttgacaagctctgggaaagccctaacgtgctctgcctggtttacgacgtgacctag

SEQ ID NO: 168649 - DNA, 438 bp, Artificial Sequence
  derived and/or modified sequence
atggacctggtggtgaagaccgtgcccgtgcccgacaccggcgactcagttgagctgttcattttcgactctgccggaaaagaactattttccgaaatgctagacaagctctgggagtccccgaatgtgttatgtctggtttatgacgtgacgaatgaagagtcctttaacaactgcagcaagtggctggaaaaagccagatcgcaggctcctggcattagcctgcctggagtgctggtcggaaacaaaaccgatttggcaggtcggagggccgtcgactccgcggaggctcgggcatgggcgctggggcaaggtctcgagtgctttgaaacctccgtgaaggagatggaaaacttcgaggccccgtttcattgcttagcgaagcagtttcatcaactttatcgcgagaaagtcgaggtatttcgggctcttgcctag

SEQ ID NO: 168650 - DNA, 558 bp, Artificial Sequence
  derived and/or modified sequence
atggtgaagttggccgctaagtgcattcttgctgatcccgctgttggcaaaacagccctcgcccagatttttcgcagcgatggcgcacattttcaaaagtcatacacccttactacaggtatggatttagtggtgaaaacagtgcctgtacctgacacaggcgattccgtggagctgttcatctttgacagcgccggaaaggagttattcagtgaaatgttggataaactctgggagtctccgaacgtgttatgcctggtctatgatgtgactaatgaggaatccttcaataattgctcgaagtggcttgaaaaagccagatcccaggcacccggaattagcttgccaggagtactcgtaggaaataagacggatctggctggaagaagggccgtcgattctgctgaagctagggcttgggccctcggtcaggggctggaatgcttcgagactagcgtcaaagagatggaaaattttgaggcaccctttcactgcctcgctaagcagtttcaccagctctacagagaaaaggtggaagtgtttcgggcactggcctag

SEQ ID NO: 168651 - DNA, 390 bp, Artificial Sequence
  derived and/or modified sequence
tgatccgacggagctcattttcagaaatcctatacattgacgaccggaatggatctggtggtgaagactgtacctgtgcctgacaccggagattcagttgaattgttcatatttgactctgcaggcaaggagttatttagcgagatgctggacaagctctgggagtccccaaacgtgctttgtcttgtctacgatgtcaccaacgaggagtcattcaataactgttctaaatggctcgagaaggctcgtagccaagcgcctgggatctccctccccggtgtcctggttggcaataaaacagacctggctggccgtagggcggtggactcagcagaggctagagcctgggcactgggccagggtctagagtgcttcgagacgtccgtttag

SEQ ID NO: 168652 - DNA, 351 bp, Artificial Sequence
  derived and/or modified sequence
atggtaaagctcgcggctaaatgcattttagccgaccctgccgtgggaaagaccgcactggctcagatctttcgctcagacggcgcacacttccagaaatcctacacgttgacgacagggatggatctggtggtgaaaacagtcccagttcccgacaccggagactcggttgagctgtttatctttgactcagctgggaaagagctgttctcggaaatgctggacaaactgtgggaaagcccgaacgttctatgcctggtatatgatgtaacaaatgaggagagctttaacaactgtagcaaatggctggaaaaagccagatctcaggccccagggatctcactgccttag

SEQ ID NO: 168653 - DNA, 156 bp, Artificial Sequence
  derived and/or modified sequence
atggacctggtcgttaagaccgtgcctgtacccgatacaggcgactccgtcgagctgtttatcttcgactctgctggaaaggaactattcagtgagatgttggacaagctctgggaatctcctaatgtgctgtgcctcgtgtacgacgtcacctag

SEQ ID NO: 168654 - DNA, 438 bp, Artificial Sequence
  derived and/or modified sequence
atggacctcgttgtaaagacagtccctgtacctgatactggagactcggtcgagttgttcattttcgatagtgcaggaaaggaacttttcagcgagatgctggacaaactctgggagtcccccaatgtcctgtgtcttgtgtacgacgttaccaacgaagagtctttcaataactgtagtaagtggctggagaaggcacgcagtcaggcacctggaatttctcttcctggagttttggtgggcaacaagactgatctggccggtcgccgagctgtagattccgcggaggcaagagcgtgggctctgggccagggcctcgagtgttttgaaacttctgtgaaggagatggagaattttgaagctccttttcactgcctggctaagcaattccaccaactgtacagagaaaaggttgaggtcttcagggcccttgcttag

SEQ ID NO: 168655 - protein, 201 aa, Artificial Sequence
  derived and/or modified sequence
MARDYDHLFKLLIIGDSGVGKSSLLLRFADNTFSGSYITTIGVDFKIRTVEINGEKVKLQIWDTAGQERFRTITSTYYRGTHGVIVVYDVTSAESFVNVKRWLHEINQNCDDVCRILVGNKNDDPERKVVETEDAYKFAGQMGIQLFETSAKENVNVEEMFNCITELVLRAKKDNLAKQQQQQQNDVVKLTKNSKRKKRCC

SEQ ID NO: 168656 - protein, 160 aa, Artificial Sequence
  derived and/or modified sequence
MARDYDHLFKLLIIGDSGVGKSSLLLRFADNTFSGSYITTIGVDFKIRTVEINGEKVKLQIWDTAGQERFRTITSTAETALRSLPQPEAHGGSSGDSLSFVPLFKEFSPCFCIGRCHRHFLPRPPRVPRRCWTSPPFPTGAPSSPAKAPGPGEDAARRAD

SEQ ID NO: 168657 - DNA, 606 bp, Artificial Sequence
  derived and/or modified sequence
atggcccgcgattatgatcacttgttcaaactgttaatcattggtgacagtggggtaggtaaaagcagccttttacttaggttcgctgacaacactttctccggctcatacataacgaccataggcgtcgacttcaaaattcgaaccgttgaaatcaacggagagaaagtaaaactccagatctgggacacggccggtcaggaaaggttccggactataacatccacctattaccgaggcacccacggagtgattgtggtgtatgacgtcacttccgcagagtctttcgtcaatgtcaagcggtggctccatgagatcaatcagaactgtgacgatgtgtgtaggatcctcgtgggcaataaaaatgatgaccccgagcgcaaagtggttgagactgaggacgcatataaattcgcaggccaaatgggcattcaactgttcgaaacgagcgctaaagaaaacgtaaatgtggaagaaatgttcaactgcataaccgagctggtgctgagagcaaaaaaggacaatctcgccaaacagcagcagcagcagcagaacgacgtggtgaagttaactaagaacagtaaacgaaagaaaagatgctgttag

SEQ ID NO: 168658 - DNA, 606 bp, Artificial Sequence
  derived and/or modified sequence
atggcccgggactatgaccacctgttcaagctgctgatcatcggggacagcggcgtgggcaagagcagcctgctgctgcgctttgctgacaacaccttcagcggcagctacatcaccaccatcggcgtggacttcaagatcagaacagtggagatcaatggagagaaggtgaagctgcagatctgggacacagctggccaggagcgcttccgcaccatcaccagcacctactaccggggcacccacggcgtgattgtggtgtatgatgtgaccagcgctgagagctttgtgaatgtgaagcgctggctgcacgagatcaaccagaactgtgatgatgtgtgccgcatcctggtgggcaacaagaatgatgatcctgagaggaaggtggtggagacagaagatgcctacaagtttgctggccagatgggcatccagctgtttgagaccagcgccaaggaaaatgtgaatgtggaggagatgttcaactgcatcacagagctggtgctgcgggccaagaaggacaacctggccaagcagcagcagcagcagcagaatgatgtggtgaagctgaccaagaacagcaagaggaagaagcgctgctgctag

SEQ ID NO: 168659 - DNA, 606 bp, Artificial Sequence
  derived and/or modified sequence
atggcccgggactacgaccacctgttcaagctgctgatcatcggcgattctggagtgggaaaaagcagcttgcttctgcggtttgccgacaacacattttctgggtcgtacataaccacaatcggggtcgatttcaagattcgcacagtggaaatcaacggggagaaggttaagcttcagatttgggacacagctggtcaggaacggttcagaaccatcacttcaacttactacagaggtacccacggagttatcgttgtctatgatgttaccagcgccgagagtttcgtcaatgtgaagcgatggttgcacgagatcaatcagaactgcgatgatgtgtgccggattctcgtcggaaataagaatgatgaccctgagcgaaaggtcgttgagactgaggacgcttacaagtttgcgggccagatgggtatccagcttttcgagacgagtgccaaggagaatgtaaatgtggaggagatgttcaactgcatcaccgagttggttctgcgagcaaagaaggataatctggctaagcagcaacagcaacagcaaaacgacgtggtcaagctgaccaaaaacagcaagaggaagaaaagatgttgttag

SEQ ID NO: 168660 - DNA, 606 bp, Artificial Sequence
  derived and/or modified sequence
atggcccgagattacgatcacctgttcaagttactcatcatcggggatagtggagtggggaagagtagtctgttactcaggtttgctgataacacatttagcggcagttatataaccactatcggggtggatttcaaaatccgcacagtggagatcaatggggagaaggttaaacttcaaatctgggataccgctggacaggagcggtttcgaaccataactagtacatactatcgcggtacacacggcgtcatcgtcgtctatgacgtcaccagtgctgaatcgttcgtgaatgtaaagagatggttgcacgaaatcaaccaaaattgtgacgatgtgtgtcggatcctggttggcaataagaatgacgacccggagcggaaagtggttgagacagaggacgcctataaatttgctgggcagatgggaatccagctgttcgaaacctccgctaaggaaaatgtgaacgtggaagagatgtttaattgtataaccgaactggtgctgagggccaagaaggacaatctagccaaacagcagcaacagcagcagaacgacgttgttaaacttacgaagaattcgaagagaaaaaagcgctgttgctag

SEQ ID NO: 168661 - DNA, 606 bp, Artificial Sequence
  derived and/or modified sequence
atggcaagggactacgaccatctatttaaactgctcatcatcggggattccggtgtcggaaagagctcactgctgctccgttttgctgataatacattttcaggctcttatattacaaccattggagtagacttcaagataaggacagtggagatcaacggcgaaaaagtgaaactccagatatgggacaccgccggccaagaacggttcagaactattacgagtacttattaccgtggcactcatggtgttattgtggtctatgatgtgacatctgccgagagttttgtaaacgtgaagcgctggctgcacgaaataaatcagaattgcgatgatgtgtgtcggattctcgtgggaaacaagaacgacgatccagagagaaaagttgtggagacagaggacgcttataagtttgctggacagatggggattcaattgtttgagacaagtgctaaggaaaatgttaacgtagaagagatgttcaactgtatcaccgaactggtactcagagccaagaaggacaacctggcgaaacagcaacaacagcagcaaaatgacgtggttaaactcacgaagaacagtaagagaaagaagagatgctgttag

SEQ ID NO: 168662 - DNA, 606 bp, Artificial Sequence
  derived and/or modified sequence
atggcaagggactacgaccatctatttaaactgctcatcatcggggattccggtgtcggaaagagctcactgctgctccgttttgctgataatacattttcaggctcttatattacaaccattggagtagacttcaagataaggacagtggagatcaacggcgaaaaagtgaaactccagatatgggacaccgccggccaagaacggttcagaactattacgagtacttattaccgtggcactcatggtgttattgtggtctatgatgtgacatctgccgagagttttgtaaacgtgaagaggtggctgcacgaaatcaaccagaattgtgacgacgtgtgcagaattcttgtgggcaataagaacgatgatcccgaaagaaaggtggtagaaactgaagacgcctataagtttgctggccaaatgggtatacagctgtttgagacatccgcaaaggaaaacgtaaacgtggaagagatgtttaattgcattaccgaacttgtcttgagagcaaaaaaagataacctggccaagcagcaacagcagcaacagaatgacgtggtgaaattgacaaagaatagtaagagaaaaaaacggtgctgttag

SEQ ID NO: 168663 - DNA, 606 bp, Artificial Sequence
  derived and/or modified sequence
atggccagagactacgaccacctgttcaagctgctgatcatcggcgacagcggcgtgggcaagagcagcctgctgctgagattcgccgacaacaccttcagcggcagctacatcaccaccatcggcgtggacttcaagatcagaaccgtggagatcaacggcgagaaggtgaagctgcagatctgggacaccgccggccaggagagattcagaaccatcaccagcacctactacagaggcacccacggcgtgatcgtggtgtacgacgtgaccagcgccgagagcttcgtgaacgtgaagagatggctgcacgagatcaaccagaactgcgacgacgtgtgcagaatcctggtgggcaacaagaacgacgaccccgagagaaaggtggtggagaccgaggacgcctacaagttcgccggccagatgggcatccagctgttcgagaccagcgccaaggagaacgtgaacgtggaggagatgttcaactgcatcaccgagctggtgctgagagccaagaaggacaacctggccaagcagcagcagcagcagcagaacgacgtggtgaagctgaccaagaacagcaagagaaagaagagatgctgctag

SEQ ID NO: 168664 - protein, 489 aa, Artificial Sequence
  derived and/or modified sequence
MTPIVTVLICLRLSLGPRTHVQAGTLPKPTLWAEPGSVITQGSPVTLWCQGILETQEYRLYREKKTAPWITRIPQEIVKKGQFPIPSITWEHTGRYRCFYGSHTAGWSEPSDPLELVVTGAYIKPTLSALPSPVVTSGGNVTLHCVSQVAFGSFILCKEGEDEHPQCLNSQPRTHGWSRAIFSVGPVSPSRRWSYRCYAYDSNSPHVWSLPSDLLELLVLGVSKKPSLSVQPGPIVAPGESLTLQCVSDVSYDRFVLYKEGERDFLQLPGPQPQAGLSQANFTLGPVSRSYGGQYRCSGAYNLSSEWSAPSDPLDILIAGQFRGRPFISVHPGPTVASGENVTLLCQSWGPFHTFLLTKAGAADAPLRLRSIHEYPKYQAEFPMSPVTSAHSGTYRCYGSLSSNPYLLSHPSDSLELMVSGAAETLSPPQNKSDSKAGAANTLSPSQNKTASHPQDYTVENLIRMGIAGLVLVVLGILLFEAQHSQRSL

SEQ ID NO: 168665 - protein, 466 aa, Artificial Sequence
  derived and/or modified sequence
MTPILTVLICLGLSLGPRTHVQAGHLPKPTLWAEPGSVIIQGSPVTLRCQGSLQAEEYHLYRENKSASWVRRIQEPGKNGQFPIPSITWEHAGRYHCQYYSHNHSSEYSDPLELVVTGAYSKPTLSALPSPVVTLGGNVTLQCVSQVAFDGFILCKEGEDEHPQRLNSHSHARGWSWAIFSVGPVSPSRRWSYRCYAYDSNSPYVWSLPSDLLELLVPGVSKKPSLSVQPGPMVAPGESLTLQCVSDVGYDRFVLYKEGERDFLQRPGWQPQAGLSQANFTLGPVSPSHGGQYRCYSAHNLSSEWSAPSDPLDILITGQFYDRPSLSVQPVPTVAPGKNVTLLCQSRGQFHTFLLTKEGAGHPPLHLRSEHQAQQNQAEFRMGPVTSAHVGTYRCYSSLSSNPYLLSLPSDPLELVVSASLGQHPQDYTVENLIRMGVAGLVLVVLGILLFEAQHSQRSLQDAAGR

SEQ ID NO: 168666 - DNA, 1401 bp, Artificial Sequence
  derived and/or modified sequence
atgactccaattttgacagtgctgatatgtctggggcttagcttagggccccgtactcatgtgcaggcagggcacctgcctaagcccactctgtgggccgagcctggctccgtcatcatccagggatcacccgtcaccctgcggtgccaagggtccctccaggcggaagagtaccacctgtaccgggagaacaagagcgcttcctgggttcgacggatccaggagccaggcaagaatggacagttcccaattcctagcattacctgggagcacgccggaaggtaccactgtcagtactattctcacaaccatagcagtgagtattctgatcctctcgaactcgtggtgaccggggcttacagtaagccaactctcagtgctctcccgtctcctgtcgttacgctgggtggtaacgttaccctacagtgcgtgagtcaggtcgcttttgacgggttcattttatgcaaagaaggcgaagacgaacacccacaaagattgaattcccatagtcacgctcgaggatggagctgggccatcttttccgtcggcccagtgagtccatcaaggcgctggtcttatcgctgctatgcctatgacagcaattccccatatgtgtggtctctaccatccgaccttctcgaattgctcgtgccaggagttagcaagaagccttcccttagcgtgcaacctggccctatggtggctcctggagagtctttgaccctgcaatgtgtgagcgatgttggctatgatcgctttgtcctatacaaagagggtgagagagactttctgcaacgtcccggttggcagccccaggccgggcttagtcaagctaacttcacccttggtcctgtgagcccctctcacggcggacagtataggtgttatagcgctcataatctgagcagtgaatggagtgctcctagtgaccctttagatatacttattacaggccaattctatgaccggccttccctgtctgtacaaccggtccccactgttgctccgggaaagaacgtgacactcctctgccagagcagaggccaattccacacctttctgctgaccaaggagggggcaggccacccacctttacatctgagatctgaacaccaagcccagcagaatcaggctgagtttcggatgggccctgtcacttccgcccatgtgggcacttaccgctgttatagctctcttagttctaatccttacttgctgtctctacctagtgatcccctggaactagtcgtgtccgcttccctcgggcaacatccccaggactacacagtcgaaaatctcatccgaatgggtgttgccggactcgtcctggtggtcctgggcatcctgctctttgaagctcagcatagtcagcgttcactgcaagacgccgccggaaggtag

SEQ ID NO: 168667 - DNA, 1401 bp, Artificial Sequence
  derived and/or modified sequence
atgacccccatcctgactgtgctgatctgcctgggcctgagcctgggccccaggacccacgtgcaggccggccacctgcccaagcccaccctgtgggccgagcccggcagcgtcatcatccagggcagccctgtgaccctgcgctgccagggcagcctgcaggccgaggagtaccacctgtaccgggagaacaagagcgcctcctgggtgcggcgcatccaggagcccgggaagaatggccagttccccatccccagcatcacctgggagcacgccggccgctaccactgccagtactacagccacaaccacagcagcgagtacagcgaccccctggagctggtggtgactggagcctacagcaagcccaccctgagcgccctgcccagccctgtggtgaccctgggcggcaatgtgaccctgcagtgtgtgtcccaggtggcctttgatggcttcatcctgtgcaaggagggagaagatgagcacccccagaggctgaacagccacagccacgcccggggctggagctgggccatcttctctgtgggccctgtgagccccagccgccgctggagctaccgctgctacgcctatgacagcaacagcccctacgtgtggagcctgcccagcgacctgctggagctgctggtgcctggggtgtccaagaagcccagcctgtctgtgcagcccggccccatggtggcccctggagagagcctgaccctgcagtgtgtgtctgatgtgggctatgacagatttgtgctgtacaaggagggggagcgggacttcctgcagaggcctggctggcagccccaggccggcctgagccaggccaacttcaccctgggccctgtgagccccagccatggaggccagtaccgctgctacagcgcccacaacctgagcagcgagtggagcgcccccagcgaccccctggacatcctgatcaccggccagttctatgaccggcccagcctgtctgtgcagcctgtgcccaccgtggcccctgggaagaatgtgaccctgctgtgccagagccggggccagttccacaccttcctgctgaccaaggagggcgccggccacccccccctgcacctgcggtctgagcaccaggcccagcagaaccaggccgagttcaggatgggccctgtgaccagcgcccacgtgggcacctaccgctgctacagcagcctgagcagcaacccctacctgctgagcctgcccagcgaccccctggagctggtggtgtctgccagcctgggccagcacccccaggactacacagtggagaacctgatccgcatgggcgtggccggcctggtgctggtggtgctgggcatcctgctgtttgaggcccagcacagccagaggagcctgcaggatgctgctggccgctag

SEQ ID NO: 168668 - DNA, 1702 bp, Artificial Sequence
  derived and/or modified sequence
ccgagtgtccacaccctgtgcgtctctctgtcctgccagcactgagggctcatccatccgcagagcagggcagtgggaggagacgccatgacccccatcctcacggtcctgatctgtctcgggctgagtctgggccccaggacccacgtgcaggcagggcacctccccaagcccaccctctgggctgagccaggctctgtgatcatccagggaagtcctgtgaccctcaggtgtcaggggagccttcaggctgaggagtaccatctatatagggaaaacaaatcagcatcctgggttagacggatacaagagcctgggaagaatggccagttccccatcccatccatcacctgggaacacgcagggcggtatcactgtcagtactacagccacaatcactcatcagagtacagtgaccccctggagctggtggtgacaggagcctacagcaaacccaccctctcagctctgcccagccctgtggtgaccttaggagggaacgtgaccctccagtgtgtctcacaggtggcatttgacggcttcattctgtgtaaggaaggagaagatgaacacccacaacgcctgaactcccattcccatgcccgtgggtggtcctgggccatcttctccgtgggccccgtgagcccgagtcgcaggtggtcgtacaggtgctatgcttatgactcgaactctccctatgtgtggtctctacccagtgatctcctggagctcctggtcccaggtgtttctaagaagccatcactctcagtgcagccaggtcctatggtggcccccggggagagcctgaccctccagtgtgtctctgatgtcggctacgacagatttgttctgtataaggagggagaacgtgacttcctccagcgccctggttggcagccccaggctgggctctcccaggccaacttcaccctgggccctgtgagcccctcccacgggggccagtacagatgctacagtgcacacaacctctcctccgagtggtcggcccccagtgaccccctggacatcctgatcacaggacagttctatgacagaccctctctctcggtgcagccggtccccacagtagccccaggaaagaacgtgaccctgctgtgtcagtcacgggggcagttccacactttccttctgaccaaggagggggcaggccatcccccactgcatctgagatcagagcaccaagctcagcagaaccaggctgaattccgcatgggtcctgtgacctcagcccacgtggggacctacagatgctacagctcactcagctccaacccctacctgctgtctctccccagtgaccccctggagctcgtggtctcagcatccctaggccaacacccccaggattacacagtggagaatctcatccgcatgggtgtggctggcttggtcctggtggtcctcgggattctgctatttgaggctcagcacagccagagaagcctacaagatgcagccgggaggtgaacagcagagaggacaatgcatccttcagcgtggtggagcctcagggacagatctgatgatcccaggaggctctggaggacaatctaggacctacattatctggactgtatgctggtcatttctagagacagcaatcaatatttgagtgtaaggaaactgtctggggtgattcctagaagatcattaaactgtggtacatttttttgtctatgaa

SEQ ID NO: 168669 - DNA, 1401 bp, Artificial Sequence
  derived and/or modified sequence
atgacccccatcctgaccgtgctgatctgcctgggcctgagcctgggcccccggacacacgttcaagccggccacctccctaaacctaccttatgggctgagcccggatccgtgatcattcagggcagccccgttacactgcggtgtcagggttcccttcaagcggaagaatatcacctgtatagagaaaataagtctgcttcttgggtgcggcggatacaggagccaggcaagaacggtcaatttccaattcctagtataacctgggagcatgctggcaggtaccactgtcagtattatagccataaccattcaagtgaatattccgacccactcgagcttgtcgtgactggcgcctactctaaaccaactctcagtgctctgcccagccccgtcgtcacactcggtggaaacgtcactctccaatgcgtgagtcaggtggcttttgatggctttatactgtgcaaggaaggggaggacgaacatccccagcggctgaatagccattcccacgcccggggttggtcttgggccatcttcagcgtgggtcccgtgtccccttcaagacgctggagctaccgatgctacgcttacgacagcaactccccttatgtgtggagcctcccatcagatctacttgagcttctagtgcctggtgtgtcaaagaagccttctttgtcggttcagcctggcccaatggtggcaccgggcgagagccttacgcttcagtgtgtgtccgatgtgggctacgataggtttgtcttgtacaaggagggcgagcgcgatttcctacaacgccctggatggcagccccaagctgggttgagccaggccaactttaccttagggcctgtgtctccttctcacggaggacagtataggtgctatagtgctcataatctaagctccgagtggagtgcaccctcggatcccttagacattctcatcacaggacagttttatgataggccatctctcagcgtgcaaccagtcccaacagtagcacccggcaagaatgtaaccctgctctgccagagtcgggggcagtttcacaccttcctcctcacaaaagagggggctgggcacccacctctgcacctgaggagcgagcatcaggcccagcaaaaccaggcagaatttagaatgggccccgtgacgtccgctcacgtgggcacctaccgctgctattcatcactctctagcaacccctaccttctgtcccttccatcagacccgttggagctggtcgtgtctgccagtttgggccagcatccacaggattatacagtagagaatctgatcagaatgggcgtagcaggcctggtcttagttgttttaggtatcctattattcgaggcccaacacagccagagatcattgcaggatgctgctgggcgctag

SEQ ID NO: 168670 - DNA, 1401 bp, Artificial Sequence
  derived and/or modified sequence
atgacacctattttaaccgtgctgatatgtctgggtctgtcgttgggaccacggacacacgtccaggccggacacctgcctaagcctactctgtgggcagagccaggttccgtaataattcagggttcccccgtgaccctcagatgtcaaggctcactgcaggccgaagagtaccacctgtatcgtgagaataagagcgcttcgtgggtccgcaggatccaggagccaggcaagaatgggcagttccccattccatcaataacttgggagcacgccggacgttatcattgccagtactactctcacaatcactcttcagaatacagcgaccctctcgagctcgtagtcacaggcgcatatagcaaacctacgctctcggcactcccgtccccggtcgtgacactggggggaaacgtcaccttacagtgcgtatcacaggtggcatttgatggcttcatcctttgcaaagaaggtgaagatgagcacccccagagactgaacagccactctcacgctagaggctggtcttgggcaatcttctccgtgggacctgtgtctccttctaggcgctggtcttatcgctgctacgcctacgacagcaactcaccttacgtttggtcactccccagcgatctcctggaacttctggttcccggagtctccaagaagccctctttgagtgtgcagccaggacccatggtagccccaggagaaagcctgactcttcagtgtgtatcagatgtgggatatgatagatttgttctctataaagagggagagcgcgacttcctgcagagacctggatggcaacctcaagccggtctgtcccaggcaaattttacactcggaccagtctctccctctcacggtggtcagtatcggtgctactcagcccataatttgagctccgaatggtcagcaccatctgatccactggacattctcatcactggtcaattctatgataggcctagtttgagtgtgcagcccgtccctacggtcgctccgggaaagaacgtgaccctgctgtgtcagagcaggggccagtttcatacttttctccttacaaaagagggggctggccacccacccctgcacctccggtcagaacaccaggctcagcagaatcaggcagagtttaggatgggccctgtcactagcgctcacgtagggacgtaccgatgttatagctccctgtcgagcaatccctacttgctctccctcccctccgaccccctcgaactcgtcgtctctgccagccttggtcaacaccctcaggattacacagtagaaaaccttatccgcatgggcgtcgccggtttggttctggttgtcctgggtattctgctgttcgaggcccaacattcgcaacgctcgctacaggacgcagctggaaggtag

SEQ ID NO: 168671 - DNA, 1401 bp, Artificial Sequence
  derived and/or modified sequence
atgacccccatcctgaccgtgctgatctgcctgggcctgagcctgggccccagaacccacgtgcaggccggccacctgcccaagcccaccctgtgggccgagcccggcagcgtgatcatccagggcagccccgtgaccctgagatgccagggcagcctgcaggccgaggagtaccacctgtacagagagaacaagagcgccagctgggtgagaagaatccaggagcccggcaagaacggccagttccccatccccagcatcacctgggagcacgccggcagataccactgccagtactacagccacaaccacagcagcgagtacagcgaccccctggagctggtggtgaccggcgcctacagcaagcccaccctgagcgccctgcccagccccgtggtgaccctgggcggcaacgtgaccctgcagtgcgtgagccaggtggccttcgacggcttcatcctgtgcaaggagggcgaggacgagcacccccagagactgaacagccacagccacgccagaggctggagctgggccatcttcagcgtgggccccgtgagccccagcagaagatggagctacagatgctacgcctacgacagcaacagcccctacgtgtggagcctgcccagcgacctgctggagctgctggtgcccggcgtgagcaagaagcccagcctgagcgtgcagcccggccccatggtggcccccggcgagagcctgaccctgcagtgcgtgagcgacgtgggctacgacagattcgtgctgtacaaggagggcgagagagacttcctgcagagacccggctggcagccccaggccggcctgagccaggccaacttcaccctgggccccgtgagccccagccacggcggccagtacagatgctacagcgcccacaacctgagcagcgagtggagcgcccccagcgaccccctggacatcctgatcaccggccagttctacgacagacccagcctgagcgtgcagcccgtgcccaccgtggcccccggcaagaacgtgaccctgctgtgccagagcagaggccagttccacaccttcctgctgaccaaggagggcgccggccacccccccctgcacctgagaagcgagcaccaggcccagcagaaccaggccgagttcagaatgggccccgtgaccagcgcccacgtgggcacctacagatgctacagcagcctgagcagcaacccctacctgctgagcctgcccagcgaccccctggagctggtggtgagcgccagcctgggccagcacccccaggactacaccgtggagaacctgatcagaatgggcgtggccggcctggtgctggtggtgctgggcatcctgctgttcgaggcccagcacagccagagaagcctgcaggacgccgccggcagatag

SEQ ID NO: 168672 - protein, 195 aa, Artificial Sequence
  derived and/or modified sequence
MMAIRELKVCLLGDTGVGKSSIVCRFVQDHFDHNISPTIGASFMTKTVPCGNELHKFLIWDTAGQERFHSLAPMYYRGSAAAVIVYDITKQDSFYTLKKWVKELKEHGPENIVMAIAGNKCDLSDIREVPLKDAKEYAESIGAIVVETSAKNAINIEELFQGISRQIPPLDPHENGNNGTIKVEKPTMQASRRCC

SEQ ID NO: 168673 - protein, 186 aa, Artificial Sequence
  derived and/or modified sequence
CLLNDTGVGKSSIVCRFVQDHFDHNISPTIGASFMTKTVPCGNELHKFLIWDTAGQERFHSLAPMYYRGSAAAVIVYDITKQDSFYTLKKWVKELKEHGPENIVMAIAGNKCDLSDIREVPLKDAKEYAESIGAIVVETSAKNAINIEELFQGISRQIPPLDPHENGNNGTIKVEKPTMQASRRCC

SEQ ID NO: 168674 - DNA, 588 bp, Artificial Sequence
  derived and/or modified sequence
atgatggctattcgggaacttaaagtttgtctgttgggagataccggtgtgggcaaatcaagcatcgtatgcaggttcgttcaggaccactttgaccataatatctccccaactattggtgcctcattcatgaccaagaccgtcccatgcggcaacgagctacacaaattcttgatctgggacacagctggccaagagaggttccattccttggcacctatgtactatcgggggtcagccgcggctgtgatcgtttatgatattacaaagcaggacagcttctacactctgaagaaatgggttaaggagttgaaagaacatgggcccgaaaacattgttatggccatcgccggcaacaagtgcgacctctcagatatacgggaggtcccacttaaggacgccaaagagtacgccgagagcataggcgcaatagtcgtggagactagcgctaagaatgctatcaacatagaggagttgtttcaggggatcagccggcagatccctccactagatccgcacgagaacgggaacaatggtacaatcaaagtagaaaagccaacaatgcaggcatcacggcgctgctgctag

SEQ ID NO: 168675 - DNA, 561 bp, Artificial Sequence
  derived and/or modified sequence
tgcctcttaaatgataccggggtcggcaaatcctccattgtctgccgcttcgtacaggatcatttcgaccacaatatctcgcccaccattggcgcaagttttatgaccaagaccgttccatgtgggaacgaactccataagttccttatctgggacaccgccggacaggaacggtttcacagccttgcacccatgtactatcggggcagcgctgctgccgtgatagtttacgatattaccaaacaggactccttctacacactaaaaaagtgggttaaggagctgaaagaacatgggcctgagaacatcgttatggctatagccggtaacaagtgtgatctcagcgacattagagaagtgcccctgaaagacgcaaaggagtacgcggagtctattggggccattgtggttgagacaagtgcaaagaatgcgatcaacattgaggaactgttccaaggaatctctagacaaattcctccattggatccgcacgagaacggaaataatggaactatcaaagtagagaaacctactatgcaggccagccggcggtgctgctag

SEQ ID NO: 168676 - DNA, 588 bp, Artificial Sequence
  derived and/or modified sequence
atgatggccatccgggagctgaaggtgtgcctgctgggggacacaggagtgggcaagagcagcatcgtgtgccgctttgtgcaggaccactttgaccacaacatcagccccaccatcggggccagcttcatgaccaagacagtgccctgtggaaatgagctgcacaagttcctgatctgggacacagctggccaggagcgcttccacagcctggcccccatgtactaccggggcagcgctgctgctgtgattgtgtatgacatcaccaagcaggacagcttctacaccctgaagaagtgggtgaaggagctgaaggagcacggccctgagaacatcgtgatggccatcgccggcaacaagtgtgacctgagtgacatccgggaggtgcccctgaaggatgccaaggagtatgcagagagcattggagccatcgtggtggagaccagcgccaagaatgccatcaacatcgaggagctgttccagggcatcagccggcagatcccccccctggacccccatgaaaatggaaacaacggcaccatcaaggtggagaagcccaccatgcaggccagccgccgctgctgctag

SEQ ID NO: 168677 - DNA, 561 bp, Artificial Sequence
  derived and/or modified sequence
tgcctgctgaatgacaccggggtgggcaagagcagcatcgtgtgccgctttgtgcaggaccactttgaccacaacatcagccccaccatcggggccagcttcatgaccaagacagtgccctgtggaaatgagctgcacaagttcctgatctgggacacagctggccaggagcgcttccacagcctggcccccatgtactaccggggcagcgctgctgctgtgattgtgtatgacatcaccaagcaggacagcttctacaccctgaagaagtgggtgaaggagctgaaggagcacggcccagaaaatattgtgatggccatcgccggcaacaagtgtgacctgagtgacatccgggaggtgcccctgaaggatgccaaggagtatgcagagagcatcggggccatcgtggtggagaccagcgccaagaatgccatcaacatcgaggagctgttccagggcatcagccggcagatcccccccctggacccccatgaaaatggaaataatggcaccatcaaggtggagaagcccaccatgcaggccagccgccgctgctgctag

SEQ ID NO: 168678 - DNA, 588 bp, Artificial Sequence
  derived and/or modified sequence
atgatggccatccgggagctgaaggtgtgcctgctgggcgacaccggagttggaaagagctctattgtctgcaggtttgtccaggaccacttcgatcataatatcagtccgaccattggcgcatcatttatgactaagaccgttccttgcggtaatgaactccataagttcttaatctgggacacggcggggcaggagcggttccatagccttgccccaatgtattataggggaagcgctgccgctgttatcgtgtatgatataacaaagcaggacagtttttatactctgaagaagtgggtaaaggaacttaaagaacatggtcccgaaaacatagtaatggctatcgcagggaataagtgtgatctctcagatatccgggaggtgccattaaaggatgctaaggaatatgccgaatccataggggcaatagtcgttgagacctctgccaaaaatgcgatcaatatagaggagctgtttcagggaatctcgcggcaaattccgcccctcgatcctcacgaaaacgggaataatggtacgatcaaggtcgagaagccaaccatgcaagcctcacggaggtgttgctag

SEQ ID NO: 168679 - DNA, 561 bp, Artificial Sequence
  derived and/or modified sequence
tgcctgctgaacgacaccggcgtgggcaagagcagcatcgtgtgcagatttgtacaggatcatttcgatcataatattagtcctacaatcggagccagtttcatgactaagacagtcccatgcggaaacgagctccataagttcttgatctgggacaccgcaggtcaagagaggttccactccctggcacctatgtattatcggggatccgcggcggccgttattgtgtacgatatcaccaagcaggattccttctatactctgaagaagtgggtgaaagaactgaaagagcacggtcccgagaacatagtgatggccatcgcagggaataaatgtgatctctctgacatccgcgaggttcccctgaaagacgcgaaagagtacgctgagagcatcggagccatcgtggtggaaaccagtgccaaaaacgctatcaatattgaggagttgttccaaggtatttcccgccagatcccccccttggaccctcacgagaacggtaacaatggaaccattaaagttgaaaagccaaccatgcaggcctcgagaaggtgttgttag

SEQ ID NO: 168680 - DNA, 588 bp, Artificial Sequence
  derived and/or modified sequence
atgatggcgattagggagcttaaggtctgtctccttggagatacaggcgtgggcaagagttcgatagtgtgcaggtttgttcaggaccatttcgatcacaacatatctcctacaataggtgccagctttatgaccaagaccgttccatgtggaaatgagcttcacaaatttttgatctgggacactgctggccaggaacggttccattcactcgctccaatgtattatcggggtagtgcagcggcagtaatcgtgtacgacattacaaaacaggacagtttttacacacttaaaaagtgggttaaagaactcaaagagcacggccctgagaacatcgtgatggctattgccggtaacaaatgcgacctgtctgacatcagagaagtgcctctcaaggacgcaaaggagtatgctgagagtatcggagctattgtggtcgagacctccgccaagaacgccatcaatattgaggagctttttcagggcatttcccgacagattccacctctggatccccatgagaacggcaacaatggcacaataaaagtcgagaaacctacaatgcaggcttcgcgcaggtgttgttag

SEQ ID NO: 168681 - DNA, 561 bp, Artificial Sequence
  derived and/or modified sequence
tgcctccttaatgataccggagtaggtaaatcctctatagtgtgcagattcgttcaggatcatttcgatcacaacatttcccctactataggcgcaagcttcatgacaaaaaccgtcccatgtggaaacgaactgcataaattcctcatctgggacacagccggacaggaacgcttccactcactggcccctatgtattaccgtggctctgcggctgcagtgatcgtgtacgatataacaaaacaggattcgttttacactttaaagaagtgggtcaaggaactcaaggaacacggccctgaaaacatcgtcatggcaatcgctggtaacaagtgtgatctctccgacatccgggaagtgccacttaaagatgctaaggaatacgcggagagtattggagctatcgtagtggagacctcagccaagaatgcaattaacattgaagagctgttccagggaatctcaagacaaattccacccctggacccgcacgagaatggcaacaacggaacgatcaaggtggaaaagcccacaatgcaagcctctaggcgctgctgctag

SEQ ID NO: 168682 - DNA, 3994 bp, Artificial Sequence
  derived and/or modified sequence
ggccggcggccacgtgacccaccgcggcggggccggcggcccagaaatagcagcggcggcggttccgcccgcgggcggcgcgagcgaggggcagaggcgagagacgccggcggggcgcgggcgcggcggccccggaggatgctgctgagccccggcactgcctggctgcgagcacatgatggcgatacgggagctcaaagtgtgccttctcggggacactggggttgggaaatcaagcatcgtgtgtcgatttgtccaggatcactttgaccacaacatcagccctactattggggcatcttttatgaccaaaactgtgccttgtggaaatgaacttcacaagttcctcatctgggacactgctggtcaggaacggtttcattcattggctcccatgtactatcgaggctcagctgcagctgttatcgtgtatgatattaccaagcaggattcattttataccttgaagaaatgggtcaaggagctgaaagaacatggtccagaaaacattgtaatggccatcgctggaaacaagtgcgacctctcagatattagggaggttcccctgaaggatgctaaggaatacgctgaatccataggtgccatcgtggttgagacaagtgcaaaaaatgctattaatatcgaagagctctttcaaggaatcagccgccagatcccacccttggacccccatgaaaatggaaacaatggaacaatcaaagttgagaagccaaccatgcaagccagccgccggtgctgttgacccaagggccgtggtccacggtacttgaagaagccagagcccacatcctgtgcactgctgaaggaccctacgctcggtggcctggcacctcactttgagaagagtgagcacactggctttgcatcctggaagacctgcagggggcggggcaggaaatgtacctgaaaaggattttagaaaaccctgggaaaacccaccacaccaccacaaaatggcctttagtgtatgaaatgcacatggaggggatgtagttgcatttttgctaaaaaaaaaaaaaaacctttaaaaattgttggatgtgtacaaaagtcttactgccttattatgtgtatgggattctaaagtggcattccacttggatttcctgtgctacctatccaaattccagtaactacttcagtgtcattgcctttgttacctaaccaaccttcactgaaaggcaaatttagttcaggaggttagtttttagctagctttggaagtaagcctttatttattactttttggaggaaatcagagaagtgtcaatggaccgtcactcagactgagacttgagttattacagaagccaggaaaagtgtattagaaactgttgtctacaccacttttaattggtgaacaatttttctaagttatggtcatatatacccaaacaaaccaaatcaaactaaattactgcatataattttgggattgggtggcctagtttgaaagagtgatttaagtaatcactatgtaagtggtgagagatgcaggacatacacattattcaagagaccacctgacatgcatctcctccgcaggaatacattcgtcctctcttagagaagtttaacgcacatagtattattttactaagagaatatctcttggtgtcatatctaggggaagagaattaactagaattaaatttaatgtttgaatctaaatcattgggcaaacttctaataataacaattaataataggttacaggaaagccagccagaggaagtgtcagcactttaaaattctagaccccaaaaaactacaaaatcagaaaaagtatttttatgtttctagcttgaggagaagggctttagggctaaccagaggtctgaccctagaatgccaaggaactgagaatgggctccgatgaaaaccttccttttcagattccctgtctgctcaattaaagatgtttgaatccaaaggaagtcaaggaagaaaaagcatggaaaggaagagaactgattcctactgaaaattcaaattctattaccattctaactttcataaaaagttgggatcaagaagcagctgatttcctgccagggcttatattagggggtgattcttaaaggacattaggattggtgctcagaaatggttaatcatgctgtgtgctagccagggccagctggtaccttctttgccatgagcattcaagggacggctaacctttattgacaatctatatcgcaaaagtcaggaaagaggttgtgagctgattggattaaagacctggcacttcagtaactcagcacgcttccacttcactcaacttaagagagttcattgacagtgttaggatgtgaaggctgggaaacacttattttgcttcaagagttccacttggctctcccaaataggtacctcaaaaactgttagcaagcggcatttggatgtcttgacaggggctttgcagggatttttagggttttttccacattgtccacattaatggttggcatgattgtgcttgcaggccaagaaatgatcataccccttgccaaaggtaaaaaaaaaaaaaaaaaaatgagttgaaaattgaagtgacctctttccagctgagttgcaggcttattttgtaacctttcctcatccagttttccctgagaacctgggtttatctctagatagctgttcaggttttttagctgaggggtaagtatcctagctgagagttttgcatctttgggctgggtttgcagtggttgtgttttgcataaaatgtctagtctttgccacagatagtgagctacccactaatgagcccatggttttatttcagaagcacatgagggtgtgaaaccactctgttacctttctgtattgtcttagctattcaagccagtcagaggataatatatatattctcatcagcactcagagtagtcagtgaagagagtagatcacacttgggcacaccaggattcacataaacattgtatcttctctgtggatgctcaggccttgtctacaatgaggctttacaaccttcctttgttttggctcgggattacttcctggctgtctaataattgaaccataaccatgtaatattatgtaaaggcctggaaattactgttgctaaaaaaagtcatgtagtttcatgtagtgtagcatccttggcatcgttttccaaaatttgttccttctcccttttttttttctttcgtgtgtggcatgagtgtgtatctgtgtaaatatgattgtatatgtgttactccgatatgtaatccatttcactggctgagtttggcccctagccatgtgttaatataaagtaggcatggcttcccaatggaaatctctgagaatgacagtggagttgtgcaagcattttacattgccacataattgacttgccattttatggttaaaaacggcacattaggcagttgaatatgacgttaccttgcagactaaaaggttgaaggcccgaaactaacttttagctaacaataagggctgtgccccaatggaaactgagttcattttctgagaaaggtttggatgactgaaatatttcctctacagtcaaggactttggcatgtggtggctgaaactgagcttttttgtgtgggctccagttctcactgttctgcaatgctcatggcaagttgaatggtgagctagcttataaattaaagagctctgaactgtattcagaccgactgggtatctagcttactgttttaacatcattgttgaaaccagaccctgtagtccagtggtgctgccctgttgtgcaaactgctcctttttctcgtgtttttgtaaagagcttccatctgggctggacccagttcttgcacatacaagacaccgctgcagtcagctaggacctttccgccatgtattctattctgtagtaaagcatttccatcaacaatgcctaattgtatctgttatttttggtttaacacacactgattcatactaataaatattttcagttttaccgtt

SEQ ID NO: 168683 - DNA, 825 bp, Artificial Sequence
  derived and/or modified sequence
tgtcttttgaatgacactggggttgggaaatcaagcatcgtgtgtcgatttgtccaggatcactttgaccacaacatcagccctactattggggcatcttttatgaccaaaactgtgccttgtggaaatgaacttcacaagttcctcatctgggacactgctggtcaggaacggtttcattcattggctcccatgtactatcgaggctcagctgcagctgttatcgtgtatgatattaccaagcaggattcattttataccttgaagaaatgggtcaaggagctgaaagaacatggtccagaaaacattgtaatggccatcgctggaaacaagtgcgacctctcagatattagggaggttcccctgaaggatgctaaggaatacgctgaatccataggtgccatcgtggttgagacaagtgcaaaaaatgctattaatatcgaagagctctttcaaggaatcagccgccagatcccacccttggacccccatgaaaatggaaacaatggaacaatcaaagttgagaagccaaccatgcaagccagccgccggtgctgttgacccaagggccgtggtccacggtacttgaagaagccagagcccacatcctgtgcactgctgaaggaccctacgctcggtggcctggcacctcactttgagaagagtgagcacactggctttgcatcctggaagacctgcagggggcggggcaggaaatgtacctgaaaaggattttagaaaaccctgggaaaacccaccacaccaccacaaaatggcctttagtgtatgaaatgcacatggaggggatgtagttgcatttttgct

SEQ ID NO: 168684 - DNA, 588 bp, Artificial Sequence
  derived and/or modified sequence
atgatggccatcagagagctgaaggtgtgcctgctgggcgacaccggcgtgggcaagagcagcatcgtgtgcagattcgtgcaggaccacttcgaccacaacatcagccccaccatcggcgccagcttcatgaccaagaccgtgccctgcggcaacgagctgcacaagttcctgatctgggacaccgccggccaggagagattccacagcctggcccccatgtactacagaggcagcgccgccgccgtgatcgtgtacgacatcaccaagcaggacagcttctacaccctgaagaagtgggtgaaggagctgaaggagcacggccccgagaacatcgtgatggccatcgccggcaacaagtgcgacctgagcgacatcagagaggtgcccctgaaggacgccaaggagtacgccgagagcatcggcgccatcgtggtggagaccagcgccaagaacgccatcaacatcgaggagctgttccagggcatcagcagacagatcccccccctggacccccacgagaacggcaacaacggcaccatcaaggtggagaagcccaccatgcaggccagcagaagatgctgctag

SEQ ID NO: 168685 - DNA, 561 bp, Artificial Sequence
  derived and/or modified sequence
tgcctgctgaacgacaccggcgtgggcaagagcagcatcgtgtgcagattcgtgcaggaccacttcgaccacaacatcagccccaccatcggcgccagcttcatgaccaagaccgtgccctgcggcaacgagctgcacaagttcctgatctgggacaccgccggccaggagagattccacagcctggcccccatgtactacagaggcagcgccgccgccgtgatcgtgtacgacatcaccaagcaggacagcttctacaccctgaagaagtgggtgaaggagctgaaggagcacggccccgagaacatcgtgatggccatcgccggcaacaagtgcgacctgagcgacatcagagaggtgcccctgaaggacgccaaggagtacgccgagagcatcggcgccatcgtggtggagaccagcgccaagaacgccatcaacatcgaggagctgttccagggcatcagcagacagatcccccccctggacccccacgagaacggcaacaacggcaccatcaaggtggagaagcccaccatgcaggccagcagaagatgctgctag

SEQ ID NO: 168686 - protein, 374 aa, Artificial Sequence
  derived and/or modified sequence
MAKERRRAVLELLQRPGNARCADCGAPDPDWASYTLGVFICLSCSGIHRNIPQVSKVKSVRLDAWEEAQVEFMASHGNDAARARFESKVPSFYYRPTPSDCQLLREQWIRAKYERQEFIYPEKQEPYSAGYREGFLWKRGRDNGQFLSRKFVLTEREGALKYFNRNDAKEPKAVMKIEHLNATFQPAKIGHPHGLQVTYLKDNSTRNIFIYHEDGKEIVDWFNALRAARFHYLQVAFPGAGDADLVPKLSRNYLKEGYMEKTGPKQTEGFRKRWFTMDDRRLMYFKDPLDAFARGEVFIGSKESGYTVLHGFPPSTQGHHWPHGITIVTPDRKFLFACETESDQREWVAAFQKAVDRPMLPQEYAVEAHFKHKP

SEQ ID NO: 168687 - protein, 302 aa, Artificial Sequence
  derived and/or modified sequence
MASHGNDAARARFESKVPSFYYRPTPSDCQLLREQWIRAKYERQEFIYPEKQEPYSAGYREGFLWKRGRDNGQFLSRKFVLTEREGALKYFNRNDAKEPKAVMKIEHLNATFQPAKIGHPHGLQVTYLKDNSTRNIFIYHEDGKEIVDWFNALRAARFHYLQVAFPGAGDADLVPKLSRNYLKEGYMEKTGPKQTEGFRKRWFTMDDRRLMYFKDPLDAFARGEVFIGSKESGYTVLHGFPPSTQGHHWPHGITIVTPDRKFLFACETESDQREWVAAFQKAVDRPMLPQEYAVEAHFKHKP

SEQ ID NO: 168688 - protein, 200 aa, Artificial Sequence
  derived and/or modified sequence
MKIEHLNATFQPAKIGHPHGLQVTYLKDNSTRNIFIYHEDGKEIVDWFNALRAARFHYLQVAFPGAGDADLVPKLSRNYLKEGYMEKTGPKQTEGFRKRWFTMDDRRLMYFKDPLDAFARGEVFIGSKESGYTVLHGFPPSTQGHHWPHGITIVTPDRKFLFACETESDQREWVAAFQKAVDRPMLPQEYAVEAHFKHKP

SEQ ID NO: 168689 - DNA, 1125 bp, Artificial Sequence
  derived and/or modified sequence
atggccaaggagagaagaagagccgtgctggagctgctgcagagacccggcaacgccagatgcgccgactgcggcgcccccgaccccgactgggccagctacaccctgggcgtgttcatctgcctgagctgcagcggcatccacagaaacatcccccaggtgagcaaggtgaagagcgtgagactggacgcctgggaggaggcccaggtggagttcatggccagccacggcaacgacgccgccagagccagattcgagagcaaggtgcccagcttctactacagacccacccccagcgactgccagctgctgagagagcagtggatcagagccaagtacgagagacaggagttcatctaccccgagaagcaggagccctacagcgccggctacagagagggcttcctgtggaagagaggcagagacaacggccagttcctgagcagaaagttcgtgctgaccgagagagagggcgccctgaagtacttcaacagaaacgacgccaaggagcccaaggccgtgatgaagatcgagcacctgaacgccaccttccagcccgccaagatcggccacccccacggcctgcaggtgacctacctgaaggacaacagcaccagaaacatcttcatctaccacgaggacggcaaggagatcgtggactggttcaacgccctgagagccgccagattccactacctgcaggtggccttccccggcgccggcgacgccgacctggtgcccaagctgagcagaaactacctgaaggagggctacatggagaagaccggccccaagcagaccgagggcttcagaaagagatggttcaccatggacgacagaagactgatgtacttcaaggaccccctggacgccttcgccagaggcgaggtgttcatcggcagcaaggagagcggctacaccgtgctgcacggcttcccccccagcacccagggccaccactggccccacggcatcaccatcgtgacccccgacagaaagttcctgttcgcctgcgagaccgagagcgaccagagagagtgggtggccgccttccagaaggccgtggacagacccatgctgccccaggagtacgccgtggaggcccacttcaagcacaagccctag

SEQ ID NO: 168690 - DNA, 1125 bp, Artificial Sequence
  derived and/or modified sequence
atggcaaaagaacgccgccgggctgtgctggagctgctgcagaggcccggaaacgctagatgtgcagactgcggcgctccagatcccgattgggctagctataccctgggggtttttatttgtctctcatgcagcggcatccatagaaacatacctcaggtgtccaaggtgaaatccgtcagacttgatgcgtgggaggaggcccaggtcgagttcatggcaagtcatggcaatgacgcagctcgtgcacggttcgaaagcaaggttccctctttttattacaggccgacaccctctgactgtcaattgctgagggagcagtggatccgagccaagtatgaacggcaggaattcatttaccccgaaaagcaagaaccctatagtgcaggctaccgagaagggttcttatggaagaggggtcgggataacggccagttcttgagcaggaaattcgtgctcactgaacgagagggggctctgaagtactttaacagaaacgacgcgaaagagccaaaagctgtaatgaaaatagagcatctaaatgccacgttccagccagccaagattggccacccacacggccttcaggtcacatacctcaaagataatagcacacggaatatattcatataccatgaagacgggaaggaaatcgtggattggttcaatgccctcagagccgccagattccactatcttcaagtggctttccctggtgcaggggatgcggacttggtcccaaagctgagccgcaactaccttaaagagggctacatggagaagacaggacccaaacagactgagggattccggaagcgctggttcactatggacgatagacggctaatgtactttaaggaccccctcgacgcctttgctcgcggggaagttttcatagggtctaaggaatcagggtacactgtgctccacgggtttccccctagcactcaggggcaccactggcctcacggaattactattgtcacacctgacagaaagttcttgttcgcttgcgaaaccgaatccgatcagcgggagtgggtcgccgccttccagaaagcagttgatcgtccaatgctgccccaggagtatgccgtggaggcccattttaaacacaagccttag

SEQ ID NO: 168691 - DNA, 1125 bp, Artificial Sequence
  derived and/or modified sequence
atggccaaggagcggcggcgggctgtgctggagctgctgcagaggcctggaaatgcccgctgtgccgactgtggggccccagaccctgactgggccagctacaccctgggcgtcttcatctgcctgagctgcagcggcatccacaggaacatcccccaggtgtccaaggtgaagtctgtgcggctggatgcctgggaggaggcccaggtggagttcatggccagccacggcaatgatgctgcccgggccaggtttgagagcaaggtgcccagcttctactaccggcccacccccagcgactgccagctgctgcgggagcagtggatccgggccaagtatgagcggcaggagttcatctacccagagaagcaggagccctacagcgctggctaccgggagggcttcctgtggaagaggggccgggacaatggccagttcctgagcaggaagtttgtgctgacagagcgggagggcgccctgaagtacttcaacagaaatgatgccaaggagcccaaggctgtgatgaagattgagcacctgaatgccaccttccagcctgccaagattggccacccccacggcctgcaggtgacctacctgaaggacaacagcaccaggaacatcttcatctaccatgaagatggcaaggagatcgtggactggttcaatgccctgcgggccgcccgcttccactacctgcaggtggccttccctggagctggagatgctgacctggtgcccaagctgagcaggaactacctgaaggagggctacatggagaagacaggccccaagcagacagagggcttcaggaagcgctggttcaccatggatgaccggcggctgatgtacttcaaggaccccctggatgcctttgcccggggggaggtgttcatcggcagcaaggagagcggctacacagtgctgcacggcttcccccccagcacccagggccaccactggccccacggcatcaccatcgtgaccccagacaggaagttcctgtttgcctgtgaaacagaaagtgaccagcgggagtgggtggccgccttccagaaggctgtggaccggcccatgctgccccaggagtatgctgtggaggcccacttcaagcacaagccctag

SEQ ID NO: 168692 - DNA, 1125 bp, Artificial Sequence
  derived and/or modified sequence
atggccaaggagcggcggcgggccgtgctggagctgctgcagcggccaggaaacgccaggtgtgcggattgtggggcccccgaccctgactgggcatcctacacgttaggagtctttatttgcctctcttgctcgggtattcaccgtaacatcccccaggtgtctaaggtgaagtctgtcagactggacgcctgggaggaggcccaggtggagttcatggcgtctcatggcaatgacgccgcccgggcgcgcttcgagtcaaaggtgcctagcttctattacagaccgaccccgtctgactgtcagttgctgagagagcagtggatccgcgccaagtatgaacgccaggagtttatctatccagagaagcaagaaccatactccgccggctacagggaagggttcctgtggaaaaggggacgagataacgggcagtttttgagtcggaaattcgtgttgaccgaacgggagggagcccttaagtacttcaaccggaatgacgccaaagaacctaaggcagttatgaagattgaacatctgaatgccaccttccagcccgccaagattggccatccccatggcctgcaggtgacctacctgaaggacaatagcacgcggaatatcttcatctaccacgaggatggcaaagaaatcgtcgactggttcaatgcacttcgtgcggctcggtttcattacctccaggtggcatttccaggggccggggatgctgatctggtgccaaaactgagtagaaactacctgaaggaagggtatatggaaaaaactggtccaaaacagaccgaaggtttcaggaaacgctggtttacaatggatgatagaagactcatgtactttaaggatccgctggatgcctttgcaagaggcgaagtgtttattggaagcaaggagtccggctatactgtcctgcatgggtttcctccctccacccagggtcatcactggccacacggcattactatcgtgaccccagatcgtaagttcttatttgcttgcgaaacagagtccgaccagagagagtgggtcgcagcattccagaaggcagtggatcgtcccatgttgcctcaggaatacgcagtggaggcgcactttaaacacaagccctag

SEQ ID NO: 168693 - DNA, 2363 bp, Artificial Sequence
  derived and/or modified sequence
ccgggccccgcgccggcactcgctcagcgaccgcggcggagacacgagcggcggcggcggagcccagagggcggcgggaatgcggaaccggcgcgcgggctgaggccgcccgggatggcgcaggggcggcggcggcgggcggcctgcgcggggccctagcgagccgggctgacgctcccggccccggccccggcatcggcatcgcgggcgcatcgcggccatggccaaggagcggcgcagggcggtcctggagctgctgcagcggccggggaacgcgcgctgcgcggactgcggcgccccggatcccgactgggcctcctacactctgggcgtcttcatctgcctgagctgctcgggaatccaccggaatatcccccaggtcagcaaggtgaagtccgtccgcctggacgcctgggaggaggcccaagtggagttcatggcctcccacgggaacgacgccgcgagagccaggtttgagtccaaagtaccctccttctactaccggcccacgccctccgactgccagctccttcgagagcagtggatccgggccaagtacgagcgacaggagttcatctacccggagaagcaggagccctactcggcagggtaccgtgagggttttctctggaagcgtggccgggacaacgggcagtttttgagccggaagtttgtgctgacagaacgagagggtgctctgaagtatttcaacagaaatgatgccaaggagcccaaggccgtgatgaagatcgagcacctgaacgccaccttccagccggccaagatcggccacccccacggcctgcaggtcacctacctgaaggacaacagcacccgtaacatcttcatctaccatgaggacgggaaggagattgtggactggttcaatgcactccgagctgctcgcttccactacctgcaggtggcattcccaggggccggcgacgcagatctggtgccaaagctctccaggaactacctgaaggaaggctacatggagaagacggggcccaagcaaacggaaggcttccggaagcgctggttcaccatggatgaccgcaggctcatgtacttcaaagaccccctggacgccttcgcccgaggggaagtcttcattggcagcaaggagagtggctacacggtgctgcatgggttcccgccgtccacccagggccaccactggccacatggcatcaccatcgtcacgcccgaccgcaagtttctgtttgcctgcgagacggagtccgaccagagggagtgggtggcggccttccagaaggcggtggacaggcccatgctgccccaggagtacgcagtggaggcgcacttcaagcataaaccttagcgagtgcggctggaggaccacggacattggactcactgtggctggacggaggggacccgtggatgggggggctctggcgtcctgaggccacctggccccacctgctcctcagggcagcccggcgcggccaggtagggcccgagcttcagcttccaggatgcttctctggaacctcaaggcaggcagcccaggccctgggcctgatctctaaccccgtcatgctgctgctgaccacacccagccaacctgcccctccctgacccggggccccctttcctccagggcccagtctggctcccgagctcagacacagcccccaggagccgcccaccacggctgtgggaacttccaggcctcagcgcagagccctgcttggggccagcacggtgggcagctgccggccgctggggactgggccctgctcgcatgccgccccgccctccccccacctccacgactatttattgagcgcctgttgtgtgtcacggggctatgagggccgtggggtgtttgggtggattatccacacaggtcccggcccctgcccgggctggagttgccacagcctgtgctcctggtcctcacctggaggggccagcaggctgccgtcccaccacacgtggcctctgcgcccagcacggtgctcgccgacagtggtgtctgaacccttggggacgagggcctgggccgcggtgaggccaccagaggcaggagtggccctgggggtcccgggcactgtcgcgcttgctgcaggcggcccagccgtgtatttatttttcacctatctccttcctgtcaaggcaggccgggctccagggctccccttgcgtggggcatgtaggtgggggaggcgtctgcaggtcacctggggggcccagccctctcccagccttgcctggctgagctgtgttccaggggagccctggacaagccctcataggcagggagggggtttccgaggccaggcatccgccgccccgtgtcgcatcctggaataaaatgtggctctggcatggtt

SEQ ID NO: 168694 - DNA, 1125 bp, Artificial Sequence
  derived and/or modified sequence
atggcaaaagaacgtcgacgtgctgtcctggaactcctgcagaggccgggaaatgcgagatgtgccgactgcggagcccctgatcctgactgggctagctatacactaggggtcttcatctgcctgtcctgttctgggattcaccggaatattccacaggtaagtaaggtcaaaagcgtgcgattggacgcgtgggaggaggctcaggtggagttcatggcatcccacggtaacgacgcggctcgggcacgcttcgaatcaaaggtgccaagcttctactacaggcccacgccaagcgactgtcaactgctgagggaacaatggattcgcgctaaatatgaaaggcaggaattcatataccctgagaaacaagaaccttatagtgccggataccgggagggttttctgtggaagaggggcagggacaatggacagtttctgtctcgcaagtttgtcctgacagaaagggaaggcgctctgaaatacttcaatcgaaacgacgcaaaggagccaaaggctgtgatgaaaatagagcatctgaatgcaacgtttcaacctgcaaaaatcggtcacccccacggtttgcaggtgacctacttaaaggataacagtactcgcaacattttcatatatcatgaggacggcaaggagatcgtagactggttcaatgccttaagggctgcccgttttcattaccttcaggtggcttttccaggggcaggcgacgcggatctggtcccgaagcttagccggaattacctcaaggagggctatatggagaaaactggtcccaaacagaccgagggctttagaaaacggtggttcaccatggatgaccggaggctgatgtactttaaggatcccttggacgccttcgctcggggtgaagtgttcattggctccaaagagtctggttacacagtcctgcatgggttccctccaagtacccaaggtcaccactggcctcacggcattactattgtgaccccagaccggaaattcctcttcgcttgcgagactgaaagtgaccaaagagagtgggtggccgcatttcagaaagcggtggaccggcctatgctcccgcaggaatacgctgtcgaggctcactttaaacacaaaccctag

SEQ ID NO: 168695 - protein, 518 aa, Artificial Sequence
  derived and/or modified sequence
MSCVKLWPSGAPAPLVSIEELENQELVGKGGFGTVFRAQHRKWGYDVAVKIVNSKAISREVKAMASLDNEFVLRLEGVIEKVNWDQDPKPALVTKFMENGSLSGLLQSQCPRPWPLLCRLLKEVVLGMFYLHDQNPVLLHRDLKPSNVLLDPELHVKLADFGLSTFQGGSQSGTGSGEPGGTLGYLAPELFVNVNRKASTASDVYSFGILMWAVLAGREVELPTEPSLVYEAVCNRQNRPSLAELPQAGPETPGLEGLKELMQLCWSSEPKDRPSFQECLPKTDEVFQMVENNMNAAVSTVKDFLSQLRSSNRRFSIPESGQGGTEMDGFRRTIENQHSRNDVMVSEWLNKLNLEEPPSSVPKKCPSLTKRSRAQEEQVPQAWTAGTSSDSMAQPPQTPETSTFRNQMPSPTSTGTPSPGPRGNQGAERQGMNWSCRTPEPNPVTGRPLVNIYNCSGVQVGDNNYLTMQQTTALPTWGLAPSGKGRGLQHPPPVGSQEGPKDPEAWSRPQGWYNHSGK

SEQ ID NO: 168696 - DNA, 1557 bp, Artificial Sequence
  derived and/or modified sequence
atgtcctgcgtgaagctgtggccatctggggcacctgccccactcgtctcaatcgaagaactggaaaatcaagaactcgtgggcaaaggagggtttggaacagttttcagagcccaacatagaaaatggggctatgatgtcgctgttaagattgtgaactcgaaggccattagccgcgaagttaaagccatggcatccctcgacaatgaatttgtgctccgattggagggcgtcatcgaaaaggtgaactgggatcaggacccaaaaccggcccttgtaaccaagtttatggagaatggatccctgagtggcctcctgcaaagccaatgtcctcgaccgtggcctttactttgccggctactgaaggaggtcgtccttggcatgttttacctacatgaccagaaccccgtgctccttcaccgggatctgaagccctcgaacgtgctgcttgaccccgagctccatgttaaactggccgatttcggattaagtacatttcaaggcggcagccagagtggcaccggcagcggtgagcccggcggaacactcggctaccttgcacccgagctgttcgtcaatgtgaatcgtaaagcatcaacagcttccgatgtgtattcttttggcattttgatgtgggcagtcctcgctggccgcgaagtagaattgcctaccgagccttcgctagtatatgaggcggtgtgcaacagacagaatcgtccaagcctggcagagctgcctcaagcaggccccgagacccctggcctcgaggggctgaaggagctgatgcagctctgctggtcttccgagccaaaggatcgaccctctttccaagaatgtcttcctaagactgatgaagtgttccagatggtcgagaataatatgaacgcagccgtttcaaccgtaaaagactttctgtcacagctccgctccagcaaccgtcgtttcagtattccagagtctggccaagggggaacggaaatggacggttttaggcgtactatcgagaatcagcacagccggaatgatgttatggtcagcgaatggctaaataagctcaacctagaggagcctccaagctcagtgccaaaaaaatgtcctagcctaaccaagcgcagccgagcccaggaagagcaggttcctcaggcttggactgcgggcacttcgtcagactctatggcgcagccccctcaaaccccagaaacaagtacctttcggaaccagatgccctctccaacaagtaccggcaccccctctccaggtcccagaggaaaccagggcgcagagcgacagggaatgaattggtcatgccgtacacccgagcctaaccccgtaacgggtcgacccctggttaatatttataattgctccggtgtacaggtgggagacaataattacctgactatgcaacagacgactgccctcccgacctggggcctggctccatcagggaaaggtcggggccttcaacatccccccccggtcgggtcgcaggaggggccaaaggatcctgaggcctggtccagaccacagggctggtacaatcattctggtaaatag

SEQ ID NO: 168697 - DNA, 1557 bp, Artificial Sequence
  derived and/or modified sequence
atgagctgtgtgaagctgtggcccagcggggccccagcccccctggtgtccattgaggagctggagaaccaggagctggtgggcaaaggaggcttcggcaccgtcttccgggcccagcacaggaagtggggctatgatgtggccgtgaagatcgtgaacagcaaggccatcagccgggaggtgaaggccatggccagcctggacaatgaatttgtgctgcggctggagggcgtgattgagaaggtgaactgggaccaggaccccaagccagccctggtgaccaagttcatggagaatggcagcctgagcggcctgctgcagagccagtgcccccggccctggcccctgctgtgccgcctgctgaaggaggtggtgctgggcatgttctacctgcatgaccagaaccctgtgctgctgcaccgggacctgaagcccagcaatgtgctgctggaccctgagctgcacgtgaagctggccgactttggcctgagcaccttccagggcggcagccagagcggcaccggcagcggggagcccggcggcaccctgggctacctggcccctgagctgtttgtgaatgtgaacaggaaggccagcacagccagtgatgtgtacagctttggcatcctgatgtgggccgtgctggccggccgggaggtggagctgcccacagagcccagcctggtgtatgaggccgtgtgcaaccggcagaaccggcccagcctggccgagctgccccaggccggccctgagaccccaggcctggagggcctgaaggagctgatgcagctgtgctggagcagcgagcccaaggaccggcccagcttccaggagtgcctgcccaagacagatgaggtgttccagatggtggagaacaacatgaatgctgctgtgtccacagtgaaggacttcctgagccagctgcggagcagcaacagacgcttcagcatccctgagagcggccagggcggcacagagatggatggcttccggaggaccatcgagaaccagcacagcagaaatgatgtgatggtgtctgagtggctgaacaagctgaacctggaggagccccccagctctgtgcccaagaagtgccccagcctgaccaagaggagccgggcccaggaggagcaggtgccccaggcctggacagctggcaccagcagtgacagcatggcccagcccccccagaccccagagaccagcaccttcaggaaccagatgcccagccccaccagcacaggcacccccagccctggcccccggggcaaccagggcgctgagcggcagggcatgaactggagctgcaggaccccagagcccaaccctgtgacaggccggcccctggtgaacatctacaactgcagcggcgtgcaggtgggggacaacaactacctgaccatgcagcagaccacagccctgcccacctggggcctggcccccagcggcaagggccggggcctgcagcaccccccacctgtgggcagccaggagggccccaaggaccctgaggcctggagccggccccagggctggtacaaccacagcggcaagtag

SEQ ID NO: 168698 - DNA, 1557 bp, Artificial Sequence
  derived and/or modified sequence
atgagctgcgtgaagctgtggcccagcggcgcccccgcccccctggtgagcattgaggaattggagaaccaggaactcgtaggcaagggtggcttcggcacggtcttccgggcacagcatcggaagtgggggtatgatgtcgccgtgaagattgtgaattccaaggcaatctctagggaggtcaaagcaatggcttcacttgacaatgagttcgttcttaggctggagggggtgatcgagaaggtcaactgggaccaggaccccaagccggcacttgtaacgaagttcatggagaatggaagcctctctggacttctccagtcacagtgccccaggccttggccgctgctttgccgtttgctcaaagaagtggtccttggtatgttctatctccacgatcaaaacccagtgttgctccaccgagatctgaagccttccaatgtgctgttagatcccgagctgcatgttaaacttgccgactttggtctgtccacatttcaaggaggctcacagtctggcacaggatcaggtgaacccggaggaaccctaggctatcttgctcccgagctgttcgtgaatgtgaatcgcaaagcaagcactgctagtgatgtttacagctttggaattctcatgtgggctgtacttgctgggcgcgaggtggagctccccactgaaccgtcacttgtgtacgaagccgtctgcaaccgtcaaaacaggcccagtctagccgagctgccgcaagcaggcccagaaactcctggactggaaggtctgaaggagctgatgcaactatgttggagcagcgaacccaaggaccgtcccagttttcaagagtgcctcccgaagacagatgaagtgtttcaaatggtagaaaacaacatgaacgccgccgtaagcactgtgaaggacttccttagtcaactgcggagctctaaccgccggttttcaattcctgagtcggggcagggtggcaccgagatggacggattccgccgaactatcgaaaaccagcattcgcgtaacgatgtaatggtatctgagtggctcaacaaactgaatctggaggagccccctagtagcgtccctaaaaaatgccccagcctgactaaacgaagccgcgctcaggaagaacaggtaccacaagcttggactgctgggacctccagtgactctatggcacaaccacctcagacacccgagacctccactttccgcaatcagatgccctcccccacatcaacaggaaccccctcacctgggccccgcgggaaccagggggcagagaggcagggaatgaactggtcttgcaggactcctgaacctaatccggtcacgggccgccctctagtgaacatatataactgctcgggcgtccaggtgggcgacaacaactatctgacaatgcaacagacgaccgctctgccaacatggggactggcaccgtcggggaaaggccgggggctccagcatcctccccccgtgggatctcaagaggggcctaaggatcccgaagcgtggtcccggccgcaaggttggtataaccacagcggaaaatag

SEQ ID NO: 168699 - DNA, 1557 bp, Artificial Sequence
  derived and/or modified sequence
atgtcatgtgtgaagctgtggccctctggcgctcctgctcccctagtcagtatcgaagaactggagaatcaggaactcgtgggtaagggaggattcggaactgtatttagggcccagcaccgaaaatggggctatgacgtcgctgttaaaatcgttaattctaaggcgatctctagagaagtgaaggcaatggcctccttagacaacgaattcgtcctcaggctggaaggcgttattgaaaaagtgaattgggatcaggaccctaaacctgccctcgtgaccaagttcatggagaatgggtcgctgtcgggcctgctgcagtctcagtgtccaagaccttggcctctgctttgtagacttctgaaagaggtggtgttgggcatgttctacctccacgaccagaaccctgttcttctccatcgcgatctcaagcccagcaatgttctgctggatcccgaactgcacgtgaagctcgccgactttggactgagtaccttccaggggggatcccagagcggtaccgggtctggtgagcccggaggaaccctggggtatctggcccctgagctcttcgtcaatgtgaatcggaaagcaagtactgccagcgacgtctacagctttggcattctcatgtgggccgtgttagctggcagagaagtggaactgcccacagaacctagtctggtgtatgaggccgtgtgtaaccggcaaaaccgcccaagtctggcagagctcccccaggcaggcccagaaacaccagggctggaaggcctgaaggaactgatgcagctctgttggagctctgaacccaaagatcgtccatccttccaggaatgcctgcctaagaccgatgaagtctttcaaatggttgagaacaatatgaatgcagctgtgtccacagtgaaagatttcctgtctcagcttagaagtagcaaccggcgattttctatacccgagagcgggcaaggaggcaccgaaatggatggtttccgtcgtacaatcgagaaccagcactcccgcaacgacgtcatggtctccgaatggctcaacaaactaaaccttgaggaacccccttcctctgtcccgaagaaatgcccatcactgactaaacggagccgggcacaggaagaacaggtaccgcaggcctggaccgccggaacgtcttcagactccatggcgcaacctccacagacccccgaaacgtccacgttccggaaccagatgccttctccgacctcaacaggcacaccctctccaggtccgagagggaaccagggagcagagaggcaaggcatgaactggagctgcaggacccctgaaccaaatcccgtcacgggccgaccgctggtgaacatctataattgttcgggcgtgcaggtaggcgacaacaactatttgacaatgcagcagacgaccgccttaccgacatgggggctggccccaagcggaaagggacgcggactgcaacatccccctccagtagggtcccaggaggggccaaaggatcctgaggcgtggtcacgcccacagggatggtacaaccactctgggaagtag

SEQ ID NO: 168700 - DNA, 1930 bp, Artificial Sequence
  derived and/or modified sequence
accccaggggcgggactgtagaggcgcctataagggaagttgttcagtcaactcggaaaaagggtaacaacccggaaagtagactcaccgtcttggtctagagactgacccctgcacagacagaccccttcccctctctgcgaaaggaccaagccccagaagtcactccatctcctacggctcgcaatttccagaggccccctggcaccttccagcctgatgtcgtgcgtcaagttatggcccagcggtgcccccgcccccttggtgtccatcgaggaactggagaaccaggagctcgtcggcaaaggcgggttcggcacagtgttccgggcgcaacataggaagtggggctacgatgtggcggtcaagatcgtaaactcgaaggcgatatccagggaggtcaaggccatggcaagtctggataacgaattcgtgctgcgcctagaaggggttatcgagaaggtgaactgggaccaagatcccaagccggctctggtgactaaattcatggagaacggctccttgtcggggctgctgcagtcccagtgccctcggccctggccgctcctttgccgcctgctgaaagaagtggtgcttgggatgttttacctgcacgaccagaacccggtgctcctgcaccgggacctcaagccatccaacgtcctgctggacccagagctgcacgtcaagctggcagattttggcctgtccacatttcagggaggctcacagtcagggacagggtccggggagccagggggcaccctgggctacttggccccagaactgtttgttaacgtaaaccggaaggcctccacagccagtgacgtctacagcttcgggatcctaatgtgggcagtgcttgctggaagagaagttgagttgccaaccgaaccatcactcgtgtacgaagcagtgtgcaacaggcagaaccggccttcattggctgagctgccccaagccgggcctgagactcccggcttagaaggactgaaggagctaatgcagctctgctggagcagtgagcccaaggacagaccctccttccaggaatgcctaccaaaaactgatgaagtcttccagatggtggagaacaatatgaatgctgctgtctccacggtaaaggatttcctgtctcagctcaggagcagcaataggagattttctatcccagagtcaggccaaggagggacagaaatggatggctttaggagaaccatagaaaaccagcactctcgtaatgatgtcatggtttctgagtggctaaacaaactgaatctagaggagcctcccagctctgttcctaaaaaatgcccgagccttaccaagaggagcagggcacaagaggagcaggttccacaagcctggacagcaggcacatcttcagattcgatggcccaacctccccagactccagagacctcaactttcagaaaccagatgcccagccctacctcaactggaacaccaagtcctggaccccgagggaatcagggggctgagagacaaggcatgaactggtcctgcaggaccccggagccaaatccagtaacagggcgaccgctcgttaacatatacaactgctctggggtgcaagttggagacaacaactacttgactatgcaacagacaactgccttgcccacatggggcttggcaccttcgggcaaggggaggggcttgcagcaccccccaccagtaggttcgcaagaaggccctaaagatcctgaagcctggagcaggccacagggttggtataatcatagcgggaaataaagcaccttccaagcttgcctccaagagttacgagttaaggaagagtgccaccccttgaggcccctgacttccttctagggcagtctggcctgcccacaaactgactttgtgacctgtcccccaggagtcaataaacatgatggaatgctagtca

SEQ ID NO: 168701 - DNA, 1557 bp, Artificial Sequence
  derived and/or modified sequence
atgagctgcgtgaagctgtggcccagcggcgcccccgcccccctggtgagcatcgaggagctggagaaccaggagctggtgggcaagggcggcttcggcaccgtgttcagagcccagcacagaaagtggggctacgacgtggccgtgaagatcgtgaacagcaaggccatcagcagagaggtgaaggccatggccagcctggacaacgagttcgtgctgagactggagggcgtgatcgagaaggtgaactgggaccaggaccccaagcccgccctggtgaccaagttcatggagaacggcagcctgagcggcctgctgcagagccagtgccccagaccctggcccctgctgtgcagactgctgaaggaggtggtgctgggcatgttctacctgcacgaccagaaccccgtgctgctgcacagagacctgaagcccagcaacgtgctgctggaccccgagctgcacgtgaagctggccgacttcggcctgagcaccttccagggcggcagccagagcggcaccggcagcggcgagcccggcggcaccctgggctacctggcccccgagctgttcgtgaacgtgaacagaaaggccagcaccgccagcgacgtgtacagcttcggcatcctgatgtgggccgtgctggccggcagagaggtggagctgcccaccgagcccagcctggtgtacgaggccgtgtgcaacagacagaacagacccagcctggccgagctgccccaggccggccccgagacccccggcctggagggcctgaaggagctgatgcagctgtgctggagcagcgagcccaaggacagacccagcttccaggagtgcctgcccaagaccgacgaggtgttccagatggtggagaacaacatgaacgccgccgtgagcaccgtgaaggacttcctgagccagctgagaagcagcaacagaagattcagcatccccgagagcggccagggcggcaccgagatggacggcttcagaagaaccatcgagaaccagcacagcagaaacgacgtgatggtgagcgagtggctgaacaagctgaacctggaggagccccccagcagcgtgcccaagaagtgccccagcctgaccaagagaagcagagcccaggaggagcaggtgccccaggcctggaccgccggcaccagcagcgacagcatggcccagcccccccagacccccgagaccagcaccttcagaaaccagatgcccagccccaccagcaccggcacccccagccccggccccagaggcaaccagggcgccgagagacagggcatgaactggagctgcagaacccccgagcccaaccccgtgaccggcagacccctggtgaacatctacaactgcagcggcgtgcaggtgggcgacaacaactacctgaccatgcagcagaccaccgccctgcccacctggggcctggcccccagcggcaagggcagaggcctgcagcaccccccccccgtgggcagccaggagggccccaaggaccccgaggcctggagcagaccccagggctggtacaaccacagcggcaagtag

SEQ ID NO: 168702 - protein, 477 aa, Artificial Sequence
  derived and/or modified sequence
ACLFLIPKLYRSVIEDVIEGVRNLFAEEGIEEQVLKDLKQLWETKVLQSKATEDFFRNSIQSPLFTLQLPHSLHQTLQSSTASLVIPAGRTLPSFTTAELGTSNSSANFTFPGYPIHVPAGVTLQTVSGHLYKVNVPIMVTETSGRAGILQHPIQQVFQQLGQPSVIQTSVPQLNPWSLQATTEKSQRIETVLQQPAILPSGPVDRKHLENATSDILVSPGNEHKIVPEALLCHQESSHYISLPGVVFSPQVSQTNSNVESVLSGSASMAQNLHDESLSTSPHGALHQHVTDIQLHILKNRMYGCDSVKQPRNIEEPSNIPVSEKDSNSQVDLSIRVTDDDIGEIIQVDGSGDTSSNEEIGSTRDADENEFLGNIDGGDLKVPEEEADSISNEDSATNSSDNEDPQVNIVEEDPLNSGDDVSEQDVPDLFDTDNVIVCQYDKIHRSKNKWKFYLKDGVMCFGGRDYVFAKAIGDAEW

SEQ ID NO: 168703 - protein, 478 aa, Artificial Sequence
  derived and/or modified sequence
MACLNPVPKLYRSVIEDVIEGVRNLFAEEGIEEQVLKDLKQLWETKVLQSKATEDFFRNSIQSPLFTLQLPHSLHQTLQSSTASLVIPAGRTLPSFTTAELGTSNSSANFTFPGYPIHVPAGVTLQTVSGHLYKVNVPIMVTETSGRAGILQHPIQQVFQQLGQPSVIQTSVPQLNPWSLQATTEKSQRIETVLQQPAILPSGPVDRKHLENATSDILVSPGNEHKIVPEALLCHQESSHYISLPGVVFSPQVSQTNSNVESVLSGSASMAQNLHDESLSTSPHGALHQHVTDIQLHILKNRMYGCDSVKQPRNIEEPSNIPVSEKDSNSQVDLSIRVTDDDIGEIIQVDGSGDTSSNEEIGSTRDADENEFLGNIDGGDLKVPEEEADSISNEDSATNSSDNEDPQVNIVEEDPLNSGDDVSEQDVPDLFDTDNVIVCQYDKIHRSKNKWKFYLKDGVMCFGGRDYVFAKAIGDAEW

SEQ ID NO: 168704 - DNA, 1434 bp, Artificial Sequence
  derived and/or modified sequence
gcctgcctgttcctgatccccaagctgtacagaagcgtgatcgaggacgtgatcgagggcgtgagaaacctgttcgccgaggagggcatcgaggagcaggtgctgaaggacctgaagcagctgtgggagaccaaggtgctgcagagcaaggccaccgaggacttcttcagaaacagcatccagagccccctgttcaccctgcagctgccccacagcctgcaccagaccctgcagagcagcaccgccagcctggtgatccccgccggcagaaccctgcccagcttcaccaccgccgagctgggcaccagcaacagcagcgccaacttcaccttccccggctaccccatccacgtgcccgccggcgtgaccctgcagaccgtgagcggccacctgtacaaggtgaacgtgcccatcatggtgaccgagaccagcggcagagccggcatcctgcagcaccccatccagcaggtgttccagcagctgggccagcccagcgtgatccagaccagcgtgccccagctgaacccctggagcctgcaggccaccaccgagaagagccagagaatcgagaccgtgctgcagcagcccgccatcctgcccagcggccccgtggacagaaagcacctggagaacgccaccagcgacatcctggtgagccccggcaacgagcacaagatcgtgcccgaggccctgctgtgccaccaggagagcagccactacatcagcctgcccggcgtggtgttcagcccccaggtgagccagaccaacagcaacgtggagagcgtgctgagcggcagcgccagcatggcccagaacctgcacgacgagagcctgagcaccagcccccacggcgccctgcaccagcacgtgaccgacatccagctgcacatcctgaagaacagaatgtacggctgcgacagcgtgaagcagcccagaaacatcgaggagcccagcaacatccccgtgagcgagaaggacagcaacagccaggtggacctgagcatcagagtgaccgacgacgacatcggcgagatcatccaggtggacggcagcggcgacaccagcagcaacgaggagatcggcagcaccagagacgccgacgagaacgagttcctgggcaacatcgacggcggcgacctgaaggtgcccgaggaggaggccgacagcatcagcaacgaggacagcgccaccaacagcagcgacaacgaggacccccaggtgaacatcgtggaggaggaccccctgaacagcggcgacgacgtgagcgagcaggacgtgcccgacctgttcgacaccgacaacgtgatcgtgtgccagtacgacaagatccacagaagcaagaacaagtggaagttctacctgaaggacggcgtgatgtgcttcggcggcagagactacgtgttcgccaaggccatcggcgacgccgagtggtag

SEQ ID NO: 168705 - DNA, 1434 bp, Artificial Sequence
  derived and/or modified sequence
gcctgcctattcctaatccctaagctgtaccgttccgttattgaggacgttattgaaggtgtacgcaatttgttcgctgaagagggcatagaggagcaggtcctgaaggatctcaagcaattgtgggagaccaaggtactgcagtccaaggcaactgaggacttttttcgcaatagtattcaaagcccgctttttaccctgcaactgcctcattctctgcaccaaacgctacaaagtagcacagcatccctggtgatccctgctggccggacgctgccttcctttaccactgcagaactggggacgtcaaattcatcggccaacttcaccttccctgggtacccgatacacgttccagccggggttacactccagaccgtctcaggccatctgtacaaagtgaacgtgccaatcatggtaaccgaaacatccggcagagctggaatactccaacatcctatccagcaggtctttcagcagctgggtcagccctccgtcattcagacttccgtgccccaactgaacccctggtcacttcaggcgaccaccgagaaatctcagcggattgaaacggtgctgcagcagccagccatactgccctccggccccgtcgatagaaagcatttggagaacgccacgtcagacattttggtgtccccaggcaacgagcacaaaattgttccagaagcactcctatgtcaccaggaatcctcgcattatatttctctgcccggggtcgttttttcccctcaggttagccaaactaatagcaatgtggaaagcgtgctgtcaggcagcgctagtatggcacagaatctgcacgacgagagcctgtctacctctccacacggcgcgttgcatcagcacgtcactgacatccaactgcacatcctgaaaaaccgcatgtatggatgcgatagtgtcaagcagcccagaaacattgaggagccctctaacataccggtttctgagaaggatagtaacagccaggtcgacttgagcatcagggtaacagatgacgacattggtgagataatccaggtggacgggtctggtgacacgtctagcaacgaagagatcggctccacccgggatgctgacgaaaacgagtttttgggcaacatcgatggcggagatttaaaagtgccagaggaagaagccgactcaattagtaatgaggacagtgccacaaacagcagcgacaatgaggacccacaagtaaacattgttgaggaggacccactgaattctggggacgatgtgtcagagcaggacgtaccagatttatttgatacagacaacgtgatcgtatgccagtatgataagattcaccggtcaaaaaataagtggaagttttaccttaaggacggagtgatgtgcttcgggggtagagattacgtgttcgctaaagctattggtgatgcggagtggtag

SEQ ID NO: 168706 - DNA, 1434 bp, Artificial Sequence
  derived and/or modified sequence
gcctgcctcttcctgatccccaagctgtacagatctgtgattgaagatgtgattgagggcgtgaggaacctgtttgctgaggagggcatcgaggagcaggtgctgaaggacctgaagcagctgtgggagaccaaggtgctgcagagcaaggccacagaggacttcttcagaaattccatccagagccccctcttcaccctgcagctgccccacagcctgcaccagaccctgcagagcagcacagccagcctggtgatcccagctggccgcaccctgcccagcttcaccacagctgagctgggcaccagcaacagcagcgccaacttcaccttccctggctaccccatccacgtgcctgctggggtgaccctgcagacagtgtctggccacctgtacaaggtgaatgtgcccatcatggtgacagagaccagcggccgggccggcatcctgcagcaccccatccagcaggtgttccagcagctgggccagcccagcgtcatccagacctctgtgccccagctgaacccctggagcctgcaggccaccacagagaagagccagagaattgaaacagtgctgcagcagcctgccatcctgcccagcggccctgtggacaggaagcacctggagaatgccaccagtgacatcctggtgtccccaggaaatgagcacaagatcgtgcctgaggccctgctgtgccaccaggagagcagccactacatcagcctgcccggggtggtgttcagcccccaggtgtcccagaccaacagcaatgtggagagcgtgctgagcggcagcgcctccatggcccagaacctgcatgatgagagcctgagcaccagcccccatggagccctgcaccagcacgtgacagacatccagctgcacatcctgaagaacaggatgtatggctgtgacagcgtgaagcagcccaggaacatcgaggagcccagcaacatccctgtgtctgagaaggacagcaacagccaggtggacctgagcatccgggtgacagatgatgacatcggggagatcatccaggtggatggcagcggggacaccagcagcaatgaggagatcggcagcaccagagatgctgatgaaaatgagttcctgggcaacattgatggaggagacctgaaggtgcctgaggaggaggccgacagcatcagcaatgaagattctgccaccaacagcagtgacaatgaagacccccaggtgaacatcgtggaggaggaccccctgaacagcggagatgatgtgtctgagcaggatgtgcctgacctgtttgacacagacaacgtcatcgtgtgccagtatgacaagatccacaggagcaagaacaagtggaagttctacctgaaggatggagtgatgtgctttggaggccgggactatgtgtttgccaaggccatcggagatgctgagtggtag

SEQ ID NO: 168707 - DNA, 1434 bp, Artificial Sequence
  derived and/or modified sequence
gcctgcctgttcctgatccccaagctgtaccggagcgtgatcgaggatgtgatcgagggtgtgaggaacctgtttgcagaggaggggattgaagagcaggtgctcaaggatctcaagcagttgtgggagaccaaggtgctgcagagtaaggcgactgaggatttctttagaaacagcatccagtcccctctgttcaccctgcaacttcctcatagcctccaccagaccctgcagtcttccactgccagcctcgttattccagccgggcggactctgcccagcttcacgaccgctgagcttggcactagcaatagctccgctaactttaccttccccggttaccccatccacgtacccgcgggcgtgactctccaaactgtctctgggcacctttacaaagttaacgtccctattatggtgaccgaaacaagcggccgggccggaatactacaacatccaatacagcaggtgttccaacagttaggacagccctctgttattcagacatctgttcctcagttaaacccctggtctctgcaagccactactgagaagtcccagagaatcgagaccgtcctgcagcagccggcgatcctcccctcaggcccagtggacagaaagcacctggaaaacgcgacgagtgacatattggtttcgccagggaatgaacataaaatcgttccggaagccctcctgtgccaccaggagtctagccactacatttctcttccaggggtggttttttcaccacaggtcagtcagaccaacagtaatgtggaaagtgtcctttccggaagtgccagcatggcccaaaacttacacgacgagtccttgtctacctccccccatggggcactgcaccagcacgtcacagacattcagctccatatcttgaagaatcggatgtatgggtgcgattctgtcaaacagcctaggaatattgaagagccctcgaacatcccagttagcgagaaggactctaatagccaagtggatctgtccatccgagttacagacgatgatattggggaaattatccaggtggacgggagtggcgataccagcagcaatgaagagatcggctctacgagggacgccgatgagaatgaattcctaggcaatatagacgggggcgatctaaaggtgcctgaagaggaagcagactccattagcaacgaagattctgccacaaattcctctgacaatgaggacccgcaagtgaacatcgtagaggaggatccactcaactccggcgatgatgtcagcgaacaggatgtgcctgatctgttcgacactgacaacgtcattgtatgtcaatatgataagatccaccggagtaagaataaatggaagttttatctgaaggatggcgtgatgtgttttggcggacgggattatgttttcgccaaagcaattggcgacgccgaatggtag

SEQ ID NO: 168708 - DNA, 1434 bp, Artificial Sequence
  derived and/or modified sequence
gcatgtctttttctgatccctaaactctacagaagtgtaatcgaggatgtgattgagggcgtgaggaatctgttcgctgaagaggggattgaggagcaggtgctaaaagatctgaaacagctgtgggagactaaggtgctgcagtcaaaggccacagaagacttcttcagaaatagcattcagagccccctgttcacattgcagctgccccactcccttcaccagactctccaatcttctaccgcatctctagtgatcccggctgggagaacactgccttcattcactacggccgaattagggaccagtaatagctcagccaattttacattcccaggataccctatccacgtgcccgcaggcgtaacactccagacagtcagcggccacttatacaaggtgaatgttccaataatggtcaccgaaacctccggccgtgccggtattcttcaacacccaattcagcaggtcttccagcagctgggacagccaagcgtcatccagacctccgtgccgcagttgaacccatggagcctccaagccaccactgagaagagccagaggatagagacagtgctccagcaacctgccattctacctagcggtccagtggatcggaaacaccttgagaacgccacctctgacattctggtatcacctggcaatgagcataagattgtgcctgaagctcttctctgtcaccaagaaagtagccactacatctcgctccccggagtggtattcagcccccaggtgagccagacaaatagtaatgtggaaagtgtcttgagcggatccgccagcatggcgcagaacctgcacgacgagagcctcagcaccagtccccacggtgccctccaccagcacgtgacagatatacagctccatattttgaaaaaccggatgtacgggtgcgactcggtcaaacagcccaggaacatcgaggagccatctaatatacctgtgtcagagaaggattctaatagtcaggtggacttgtctattagagtgacagatgatgacattggggagatcatacaggtcgatggctctggagatacatcatccaatgaggagataggctctactagagacgccgacgagaatgagttcctgggtaacattgacggcggtgacctgaaggtgcccgaggaagaggccgattcaatctccaatgaggattccgcaactaactcttcggacaatgaggatccacaggtgaatatagtcgaagaggatcccctcaatagcggagatgacgtgagcgagcaggatgtgcccgacctgtttgacaccgacaacgttattgtttgccagtatgataagatccaccgctccaagaataagtggaaattttaccttaaggacggggtaatgtgttttggaggacgcgactatgttttcgccaaagctataggggatgcagaatggtag

SEQ ID NO: 168709 - DNA, 1595 bp, Artificial Sequence
  derived and/or modified sequence
gcctgtctgtttcttatacctaaactctacagatctgtaattgaagatgtaattgaaggagttcggaatctatttgctgaagaaggtatagaggaacaagttttaaaagacttgaagcagctctgggaaaccaaggttttgcagtctaaagcaacagaagacttcttcagaaatagcatccaatcacctctgtttactcttcagttgccgcacagcttgcaccaaacattgcaatcgtcaacagcatcattagttattcctgctggtagaactcttccaagttttaccacagcagaactgggcacttcaaactccagtgcaaactttacttttcctggttatcccattcatgtaccagcaggtgtgacactacagactgtatctggtcacctttataaagtcaatgtaccaattatggtgacagagacttctggaagagcaggtattcttcagcatccaattcagcaagtatttcaacagcttggccagccttcagtaatacaaactagtgttccacaattgaatccatggtctcttcaagcaactactgaaaaatcacagagaattgaaaccgtgctacagcaacccgcaattctaccttctgggccagtagataggaaacacttagaaaatgccaccagtgatatacttgtatctcctggaaatgagcataaaatcgtgcctgaagctttgttgtgtcatcaggaaagttctcactatatcagtcttccaggtgttgtattttctccacaggtctctcaaacaaattctaatgtggagtcagtgctcagtggttcagctagcatggctcaaaatctgcatgatgagtccctctccacaagccctcatggggctctccaccagcacgtgactgatattcagcttcatattcttaaaaataggatgtatggatgtgattctgtaaagcaaccaagaaatatagaggaacccagcaacatacctgtatcagagaaggattctaattctcaggtggatttaagcattcgggttactgatgatgatattggtgaaataattcaagtagatggaagcggtgatacatcttccaatgaagaaataggaagtacaagagatgcagatgagaatgaatttctagggaatattgacgggggagatctgaaggtacctgaagaagaagctgacagtatttcaaatgaggattcagccacaaacagtagtgataatgaagaccctcaagtaaacattgtagaagaggaccctttaaattctggagatgatgttagtgaacaggatgtgccagacctgtttgacacggataatgttattgtctgtcagtatgataagattcatcgaagcaagaacaaatggaaattctatttgaaagatggtgttatgtgttttggagggagagactatgtatttgcaaaagccattggtgatgcagagtggtaaaccttgtgagctcagtacatctattttgtgaacatcagttggattatattgcatattgtgaattcatttttattttgaatatagtccagcacagagctgttcaaatttttagttcactgtatggaatttaataaaattataattcagatgcagatacaatt

SEQ ID NO: 168710 - DNA, 1437 bp, Artificial Sequence
  derived and/or modified sequence
atggcatgcttaaatcccgttcccaaattgtacaggagtgttattgaagatgtgatcgaaggggtaagaaacctgttcgccgaggagggaattgaggagcaggtgttaaaggacctgaaacagctatgggaaaccaaggtcctgcagtccaaggccaccgaggacttttttcgcaacagtatacagtcaccattgtttaccctccaacttccccactctctccatcagacccttcagagctccacggcttccctagtgatccccgcggggcgcacactcccaagctttaccactgctgagctcggcaccagcaattccagtgcaaatttcacattcccgggctatccaatccatgtaccagctggcgtcacactccagacagtgagcggccacttatacaaggtaaatgttcctatcatggtaaccgaaacaagcggccgcgccgggatactccaacatccaatccagcaagtcttccagcagctgggtcagccatcagtgattcagaccagcgtgccgcagctgaacccttggagccttcaggccaccaccgaaaagagccagcggatagaaaccgttctccagcagcctgccatccttcctagcggacccgtggatcggaagcatctcgagaatgccacatccgacatcctggtcagtccaggaaatgaacataagattgtccctgaagcgctactctgccaccaagagtcttcccattacattagtctgcctggggtcgtattctccccccaagtgagccaaactaactctaatgtggagtcggtactaagcggctccgcctccatggctcagaacctccacgacgagtctttgagcacctcgccacacggggccctccaccaacacgttacagatattcagctccacattctgaagaataggatgtatggctgtgactctgtgaaacagcctcgcaatattgaagagccttctaatattccagtctcagagaaagactcaaactcccaggtggatcttagtatacgggtaaccgacgatgacattggcgaaattatccaggtcgatggcagcggtgacactagctctaatgaagaaatcgggtccacaagagacgccgatgagaatgaatttttgggaaatatcgacggcggcgatctcaaagtgccagaggaagaagccgatagcattagcaatgaagattctgctaccaactcatccgataacgaagaccctcaagtgaacatcgtggaagaggacccactgaacagcggggacgatgtaagtgaacaggacgtgcctgacctctttgatacggacaatgtgattgtatgccagtatgataagatccacaggtccaagaataagtggaagttctacctcaaggatggagtgatgtgtttcggcgggcgagactacgtctttgccaaggccatcggcgacgccgaatggtag

SEQ ID NO: 168711 - DNA, 1639 bp, Artificial Sequence
  derived and/or modified sequence
gcgcaggcgcaaagggccaggtgctggaggtgctgtcatggcctgcctcaacccggtgcctaaactctacagatctgtaattgaagatgtaattgaaggagttcggaatctatttgctgaagaaggtatagaggaacaagttttaaaagacttgaagcagctctgggaaaccaaggttttgcagtctaaagcaacagaagacttcttcagaaatagcatccaatcacctctgtttactcttcagttgccgcacagcttgcaccaaacattgcaatcgtcaacagcatcattagttattcctgctggtagaactcttccaagttttaccacagcagaactgggcacttcaaactccagtgcaaactttacttttcctggttatcccattcatgtaccagcaggtgtgacactacagactgtatctggtcacctttataaagtcaatgtaccaattatggtgacagagacttctggaagagcaggtattcttcagcatccaattcagcaagtatttcaacagcttggccagccttcagtaatacaaactagtgttccacaattgaatccatggtctcttcaagcaactactgaaaaatcacagagaattgaaaccgtgctacagcaacccgcaattctaccttctgggccagtagataggaaacacttagaaaatgccaccagtgatatacttgtatctcctggaaatgagcataaaatcgtgcctgaagctttgttgtgtcatcaggaaagttctcactatatcagtcttccaggtgttgtattttctccacaggtctctcaaacaaattctaatgtggagtcagtgctcagtggttcagctagcatggctcaaaatctgcatgatgagtccctctccacaagccctcatggggctctccaccagcacgtgactgatattcagcttcatattcttaaaaataggatgtatggatgtgattctgtaaagcaaccaagaaatatagaggaacccagcaacatacctgtatcagagaaggattctaattctcaggtggatttaagcattcgggttactgatgatgatattggtgaaataattcaagtagatggaagcggtgatacatcttccaatgaagaaataggaagtacaagagatgcagatgagaatgaatttctagggaatattgacgggggagatctgaaggtacctgaagaagaagctgacagtatttcaaatgaggattcagccacaaacagtagtgataatgaagaccctcaagtaaacattgtagaagaggaccctttaaattctggagatgatgttagtgaacaggatgtgccagacctgtttgacacggataatgttattgtctgtcagtatgataagattcatcgaagcaagaacaaatggaaattctatttgaaagatggtgttatgtgttttggagggagagactatgtatttgcaaaagccattggtgatgcagagtggtaaaccttgtgagctcagtacatctattttgtgaacatcagttggattatattgcatattgtgaattcatttttattttgaatatagtccagcacagagctgttcaaatttttagttcactgtatggaatttaataaaattataattcagatgcagatacaattacac

SEQ ID NO: 168712 - DNA, 1437 bp, Artificial Sequence
  derived and/or modified sequence
atggcctgcctgaaccctgtgcccaagctgtacagatctgtgattgaagatgtgattgaaggagtgaggaacctgtttgctgaggagggcatcgaggagcaggtgctgaaggacctgaagcagctgtgggagaccaaggtgctgcagagcaaggccacagaggacttcttcaggaacagcatccagagccccctcttcaccctgcagctgccccacagcctgcaccagaccctgcagagcagcacagccagcctggtgatcccagctggccgcaccctgcccagcttcaccacagctgagctgggcaccagcaacagcagcgccaacttcaccttccctggctaccccatccacgtgcctgctggggtgaccctgcagacagtgtctggccacctgtacaaggtgaatgtgcccatcatggtgacagagaccagcggccgggccggcatcctgcagcaccccatccagcaggtgttccagcagctgggccagcccagcgtcatccagacctctgtgccccagctgaacccctggagcctgcaggccaccacagagaagagccagagaattgagaccgtgctgcagcagcctgccatcctgcccagcggccctgtggacaggaagcacctggagaatgccaccagtgacatcctggtgtccccaggaaatgagcacaagatcgtgcctgaggccctgctgtgccaccaggagagcagccactacatcagcctgcccggggtggtgttcagcccccaggtgtcccagaccaacagcaatgtggagagcgtgctgagcggcagcgcctccatggcccagaacctgcatgatgagagcctgagcaccagcccccacggggccctgcaccagcacgtgacagacatccagctgcacatcctgaagaacaggatgtatggctgtgacagcgtgaagcagcccagaaatattgaggagcccagcaacatccctgtgtctgagaaggacagcaacagccaggtggacctgagcatccgggtgacagatgatgacattggagagatcatccaggtggatggcagcggggacaccagcagcaatgaggagatcggcagcaccagagatgctgatgaaaatgagttcctgggcaacattgatggaggagacctgaaggtgcctgaggaggaggccgacagcatcagcaatgaagacagcgccaccaacagcagtgacaatgaagacccccaggtgaacatcgtggaggaggaccccctgaacagcggagatgatgtgtctgagcaggatgtgcctgacctgtttgacacagacaacgtgattgtgtgccagtatgacaagatccacaggagcaagaacaagtggaagttctacctgaaggatggagtgatgtgcttcggcggccgggactatgtgtttgccaaggccatcggagatgctgagtggtag

SEQ ID NO: 168713 - DNA, 1437 bp, Artificial Sequence
  derived and/or modified sequence
atggcctgcctgaaccccgtgcccaagctgtaccggagcgtgatcgaagacgtaatcgagggagtcagaaatctgtttgcagaggaggggatcgaagagcaggtgctgaaagatctgaagcagctctgggagactaaggtactccagagtaaagccacagaggacttcttccggaactcaatccagagtcctctctttacgctacaactcccacactcccttcaccaaacactgcagagttccaccgctagtctggtgattcccgcaggtcggaccctgccaagttttacaaccgcagagctgggaacctccaattcttctgccaatttcacctttcccgggtatcccatccatgtgcctgccggggtaactctgcagaccgtgtctggccacctgtacaaggtaaatgtgccgattatggtgactgagacatccggtcgagcaggcatcttgcaacatccaattcagcaggtctttcagcaactggggcagccttcggtgattcaaactagcgtgcctcagctgaatccctggtctttgcaagcaactacggagaaaagccagaggatcgaaacggtacttcagcagcccgccatcctgccctcaggcccagtggatcgtaaacatttagagaacgccacttcagacatacttgtgtcacccggcaacgaacataaaattgtcccagaggctctgttatgccatcaggaatcatcacactacatctcattgcccggggtcgtgttcagtcctcaggtctctcagactaactccaatgtggagtccgtgctctcagggagcgcctctatggcccagaatttgcatgatgagtcactgtccacttcccctcacggcgctctgcatcagcatgtcacggatattcaattacacattctaaagaacaggatgtacggatgcgatagcgtaaagcagcccaggaatatcgaggaaccatcgaatattcccgtgagtgagaaagattctaacagccaggtagacttgagcatccgtgtcaccgacgacgatatcggcgagattatacaagtggacggctctggcgacacgtcctctaatgaggaaatcggcagcactagggacgcggacgaaaacgagtttctcgggaacatcgatggaggagacctcaaagtgcctgaggaagaagctgacagtatttccaacgaagatagcgctactaactccagcgataatgaggacccacaagtaaacatcgtggaagaagacccgcttaatagtggggacgatgtttccgagcaggatgtgcccgacttatttgacactgacaatgtgatcgtatgccagtatgacaagatacacagatcaaagaacaaatggaaattttacttaaaagatggggtgatgtgttttggcggccgggactacgtctttgctaaggccatcggggatgcagagtggtag

SEQ ID NO: 168714 - DNA, 1437 bp, Artificial Sequence
  derived and/or modified sequence
atggcatgcctgaatcccgtaccaaaattgtatcgatcagttatcgaagacgtgatcgagggtgtcagaaacctgtttgccgaggaggggatagaagaacaagtgcttaaggatctaaagcagttgtgggagaccaaagtcttgcagagtaaggcgactgaagatttcttccggaacagcattcagagccccctgtttacactccagctaccccatagtctgcatcaaactctgcagagttctacagcttccctggtgattccagctggccgaacactcccaagctttacgacagctgagctcggaaccagcaacagttccgctaactttacattcccagggtaccccatacacgtgcccgcaggagtgaccctccaaaccgttagcggccatctgtacaaggtgaatgtgcccattatggtaacggaaacttcgggcagagcgggtatccttcagcaccccattcagcaagtgttccagcaattggggcaaccttccgtcatccagacgagcgtgccacagctgaatccttggagcttgcaggccacgacagagaagtcccagcgcatagaaaccgtgctgcaacaacccgctatacttccaagtggtccagttgaccgaaagcacttggagaatgcaacctcagatatacttgtatctcctgggaacgaacacaagattgtgccagaggccctgctttgccatcaggaaagctcacactacatttccctgcccggagtggttttttcaccccaggtaagtcagacaaatagcaacgtggagtcagtactgtccggctccgcttctatggcacagaatctccacgatgaatctctgtctaccagcccgcacggcgctctgcaccaacacgtgacggatatccagctgcatatccttaaaaacagaatgtacggctgcgacagcgtgaagcagccccgaaacattgaagaaccttcaaacatacccgtgtccgagaaggatagcaattcgcaggtcgacctcagtattcgcgtgactgatgatgacattggcgaaattattcaggtggatggatccggggatacatcctctaatgaagagattggtagcacgagggacgccgatgaaaacgaattcctggggaacatcgacggcggagatctcaaggtccccgaggaggaggcggattccattagcaatgaggatagcgctacaaacagttctgacaacgaagatccccaagtcaatattgtagaggaagatccgctcaactctggtgatgatgtgtctgagcaggacgtacccgacctcttcgatacagataatgttatagtgtgccagtacgataagatacacaggtctaaaaataaatggaagttctacctgaaggacggtgtgatgtgcttcggcggaagggactacgtgttcgctaaggcaatcggtgacgctgagtggtag

SEQ ID NO: 168715 - DNA, 1437 bp, Artificial Sequence
  derived and/or modified sequence
atggcctgcctgaaccccgtgcccaagctgtacagaagcgtgatcgaggacgtgatcgagggcgtgagaaacctgttcgccgaggagggcatcgaggagcaggtgctgaaggacctgaagcagctgtgggagaccaaggtgctgcagagcaaggccaccgaggacttcttcagaaacagcatccagagccccctgttcaccctgcagctgccccacagcctgcaccagaccctgcagagcagcaccgccagcctggtgatccccgccggcagaaccctgcccagcttcaccaccgccgagctgggcaccagcaacagcagcgccaacttcaccttccccggctaccccatccacgtgcccgccggcgtgaccctgcagaccgtgagcggccacctgtacaaggtgaacgtgcccatcatggtgaccgagaccagcggcagagccggcatcctgcagcaccccatccagcaggtgttccagcagctgggccagcccagcgtgatccagaccagcgtgccccagctgaacccctggagcctgcaggccaccaccgagaagagccagagaatcgagaccgtgctgcagcagcccgccatcctgcccagcggccccgtggacagaaagcacctggagaacgccaccagcgacatcctggtgagccccggcaacgagcacaagatcgtgcccgaggccctgctgtgccaccaggagagcagccactacatcagcctgcccggcgtggtgttcagcccccaggtgagccagaccaacagcaacgtggagagcgtgctgagcggcagcgccagcatggcccagaacctgcacgacgagagcctgagcaccagcccccacggcgccctgcaccagcacgtgaccgacatccagctgcacatcctgaagaacagaatgtacggctgcgacagcgtgaagcagcccagaaacatcgaggagcccagcaacatccccgtgagcgagaaggacagcaacagccaggtggacctgagcatcagagtgaccgacgacgacatcggcgagatcatccaggtggacggcagcggcgacaccagcagcaacgaggagatcggcagcaccagagacgccgacgagaacgagttcctgggcaacatcgacggcggcgacctgaaggtgcccgaggaggaggccgacagcatcagcaacgaggacagcgccaccaacagcagcgacaacgaggacccccaggtgaacatcgtggaggaggaccccctgaacagcggcgacgacgtgagcgagcaggacgtgcccgacctgttcgacaccgacaacgtgatcgtgtgccagtacgacaagatccacagaagcaagaacaagtggaagttctacctgaaggacggcgtgatgtgcttcggcggcagagactacgtgttcgccaaggccatcggcgacgccgagtggtag

SEQ ID NO: 168716 - protein, 533 aa, Artificial Sequence
  derived and/or modified sequence
MATSLHEGPTNQLDLLIRAVEASVHSSNAHCTDKTIEAAEALLHMESPTCLRDSRSPVEVFVPPCVSTPEFIHAAMRPDVITETVVEVSTEESEPMDTSPIPTSPDSHEPMKKKKVGRKPKTQQSPISNGSPELGIKKKPREGKGNTTYLWEFLLDLLQDKNTCPRYIKWTQREKGIFKLVDSKAVSKLWGKHKNKPDMNYETMGRALRYYYQRGILAKVEGQRLVYQFKDMPKNIVVIDDDKSETCNEDLAGTTDEKSLERVSLSAESLLKAASSVRSGKNSSPINCSRAEKGVARVVNITSPGHDASSRSPTTTASVSATAAPRTVRVAMQVPVVMTSLGQKISTVAVQSVNAGAPLITSTSPTTATSPKVVIQTIPTVMPASTENGDKITMQPAKIITIPATQLAQCQLQTKSNLTGSGSINIVGTPLAVRALTPVSIAHGTPVMRLSMPTQQASGQTPPRVISAVIKGPEVKSEAVAKKQEHDVKTLQLVEEKPADGNKTVTHVVVVSAPSAIALPVTMKTEGLVTCEK

SEQ ID NO: 168717 - DNA, 3171 bp, Artificial Sequence
  derived and/or modified sequence
gttgccagctgcggcggccgccacagccacagccgccgccgccgccgccgccgcccctgcccctgccgcccctgcccctgccgttaggtggtggggtttctcagcccggcggcgggaggcgggccggcctcggcttcctgtcggaggacgcgcaaggatccgggcgtcggagtgtgtgcgagtgcgtgagtgtgtgtcggtcgcacggcgtgtgtctccggccgcgggttccgcctcctcccctgccgccgctgctcacggtgtaagtcaatgtgaagcagcagctccagccccgggataaacatggcgacgtctctgcatgagggacccacgaaccagctggatctgctcatccgggccgtggaagcatcagttcacagcagtaatgcacactgtacagataagacaattgaagctgctgaagccctgcttcatatggaatctcctacctgcttgagggattcaagaagtcctgtggaagtgtttgttcctccttgtgtatcaactccagaattcatccatgctgctatgaggccagatgtcattacagaaactgtagtggaggtgtcaactgaagagtctgaacccatggatacctctcctattccaacatcaccagatagccatgaaccaatgaaaaagaaaaaagttggccgtaaaccaaagacccagcaatcaccaatttccaatgggtctcctgagttaggtataaagaagaaaccaagagaaggaaaaggaaacacaacctatttgtgggagtttcttttagatctacttcaagataaaaatacttgtcccaggtatattaaatggactcagagagaaaaaggcatattcaagctggtggattcaaaggctgtctctaagctttggggaaagcataagaacaaaccagacatgaactatgaaaccatgggacgagctttgagatactactaccaaaggggaattcttgcaaaggttgaaggacagaggcttgtatatcagttcaaggatatgccgaaaaacatagtggtcatagatgatgacaaaagtgaaacctgtaatgaagatttagcaggaactactgatgaaaaatcattagaacgagtgtcactgtctgcagaaagtctcctgaaagcagcatcctctgttcgcagtggaaaaaattcatcccctataaactgctccagagcagagaagggtgtagctagagttgtgaatatcacttcccctgggcacgatgcttcatccaggtctcctactaccactgcatctgtgtcagcaacagcagctccaaggacagttcgtgtggcaatgcaggtacctgttgtaatgacatcattgggtcagaaaatttcaactgtggcagttcagtcagttaatgcaggtgcaccattaataaccagcactagtccaacaacagcgacctctccaaaggtagtcattcagacaatccctactgtgatgccagcttctactgaaaatggagacaaaatcaccatgcagcctgccaaaattattaccatcccagctacacagcttgcacagtgtcaactgcagacaaagtcaaatctgactggatcaggaagcattaacattgttggaaccccattggctgtgagagcacttacccctgtttcaatagcccatggtacacctgtaatgagactatcaatgcctactcagcaggcatctggccagactcctcctcgagttatcagtgcagtcataaaggggccagaggttaaatcggaagcagtggcaaaaaagcaagaacatgatgtgaaaactttgcagctagtagaagaaaaaccagcagatggaaataagacagtgacccacgtagtggttgtcagtgcgccttcagctattgcccttcctgtaactatgaaaacagaaggactagtgacatgtgagaaataaaatagcagctccaccatggacttcaggctgttagtggcagtactgacataaacatttgcaagggaagtcatcaagaaaagtcaaagaagactttaaaacatttttaatgcatatacaaaaacaatcagacttactggaaataaattacctatcccatgtttcagtgggaaatgaactacatattgagatgctgacagaaaactgcctcttacagtaggaaacaactgaacccatcaataagaaaaaggatcgaaagggaccaagcagctcactacgatatcaagttacactaagacttggaacactaacattctgtaagaggttatatagttttcagtgggaggggttgggatgggtaatctcattgttacatatagcaatttttgatgcattttatatgcataccagcaattattactgtgttcgcacagttctcacttaactggtgctatgtgaagactctgctaatataggtattttagaatgtgaattgaagaatggatcccaaaaacttcagaaagaggatagcaaaaaaagatctagtgcgattttatatatatatatatatatatatacatacatatatatatatcatatagcttaagctgatttaaaacaaaggccttagactaattttcgattttctttcttgaaataagctaatggcttgtttgtgtaaagcttttttattaaaagaaaaattttaaaaatcttgtacctagcacagtattgttatagaatatacatgtaacattttatatggtagtttaagtctgtcagtttcttaattgtggacaaattaacagttggctctggccttttgctgtaacatgcctgtgtcactcacttagccttggcatttgtgcagacataccattttcagttctgctgtcacttggaagttcaggctcagcatgaatttttggcaggtagctctaatacctggagttttctttgtttttttttcttttttttagttgaagtttatgagggaaataccagtgttcagttttgaactataatagtttgtatattcaacatttgaagtatattctattttgttgtactcttgtttcaaagtgtattcaagtaggttttctgaaatatagaaatgaaatttatcttctgttttggtctctggtgatattttaaacaatatttaaaagtcagtatagaagtgttttagttaggaagtgataaaacatctctcttctccttcccaactactgcatgaagaaattctacttccattatattaatatttgg

SEQ ID NO: 168718 - DNA, 1602 bp, Artificial Sequence
  derived and/or modified sequence
atggccaccagcctgcacgagggccccaccaaccagctggacctgctgatcagagccgtggaggccagcgtgcacagcagcaacgcccactgcaccgacaagaccatcgaggccgccgaggccctgctgcacatggagagccccacctgcctgagagacagcagaagccccgtggaggtgttcgtgcccccctgcgtgagcacccccgagttcatccacgccgccatgagacccgacgtgatcaccgagaccgtggtggaggtgagcaccgaggagagcgagcccatggacaccagccccatccccaccagccccgacagccacgagcccatgaagaagaagaaggtgggcagaaagcccaagacccagcagagccccatcagcaacggcagccccgagctgggcatcaagaagaagcccagagagggcaagggcaacaccacctacctgtgggagttcctgctggacctgctgcaggacaagaacacctgccccagatacatcaagtggacccagagagagaagggcatcttcaagctggtggacagcaaggccgtgagcaagctgtggggcaagcacaagaacaagcccgacatgaactacgagaccatgggcagagccctgagatactactaccagagaggcatcctggccaaggtggagggccagagactggtgtaccagttcaaggacatgcccaagaacatcgtggtgatcgacgacgacaagagcgagacctgcaacgaggacctggccggcaccaccgacgagaagagcctggagagagtgagcctgagcgccgagagcctgctgaaggccgccagcagcgtgagaagcggcaagaacagcagccccatcaactgcagcagagccgagaagggcgtggccagagtggtgaacatcaccagccccggccacgacgccagcagcagaagccccaccaccaccgccagcgtgagcgccaccgccgcccccagaaccgtgagagtggccatgcaggtgcccgtggtgatgaccagcctgggccagaagatcagcaccgtggccgtgcagagcgtgaacgccggcgcccccctgatcaccagcaccagccccaccaccgccaccagccccaaggtggtgatccagaccatccccaccgtgatgcccgccagcaccgagaacggcgacaagatcaccatgcagcccgccaagatcatcaccatccccgccacccagctggcccagtgccagctgcagaccaagagcaacctgaccggcagcggcagcatcaacatcgtgggcacccccctggccgtgagagccctgacccccgtgagcatcgcccacggcacccccgtgatgagactgagcatgcccacccagcaggccagcggccagaccccccccagagtgatcagcgccgtgatcaagggccccgaggtgaagagcgaggccgtggccaagaagcaggagcacgacgtgaagaccctgcagctggtggaggagaagcccgccgacggcaacaagaccgtgacccacgtggtggtggtgagcgcccccagcgccatcgccctgcccgtgaccatgaagaccgagggcctggtgacctgcgagaagtag

SEQ ID NO: 168719 - DNA, 1602 bp, Artificial Sequence
  derived and/or modified sequence
atggcaaccagcctgcacgagggaccaaccaatcagttagacctgctgattcgggctgtcgaagccagcgtgcactcatcaaacgcacactgtacggataagactatcgaggccgcagaagcactgctgcacatggaatctcctacatgtctgagagactccagatctcccgtggaggtattcgtgccaccctgcgtgagcactcctgaattcatacatgcagcaatgcggcccgacgtgataaccgaaactgttgtggaggtgtctacagaggaatctgagcctatggacacgtcccctatccctacgtctccggatagtcatgagccgatgaagaagaagaaggtcggtcggaaacctaaaacccaacagtcccccatctcaaatgggagtccggaactaggcattaaaaagaaacccagggaagggaaaggaaacacgacttacctctgggaatttctgcttgatctactgcaagataaaaatacctgtcccagatatataaagtggacccagagagagaaaggaattttcaaactggtggattcaaaggcggtgagcaaactgtggggtaagcacaaaaataaacccgatatgaactatgagacaatggggcgggcccttcggtattactaccaaaggggtatcctggcaaaagtggaaggacagcggctcgtataccaattcaaagacatgcccaaaaacatcgtggtaatcgatgacgacaagtctgaaacctgcaacgaggacttggccggcacaactgacgagaagagtttggaacgcgtgtcgcttagcgccgagtcgttgctaaaggctgcgtcgagcgtgcggagcggcaagaactcttcccccatcaattgctcccgtgccgagaagggcgtagccagggtggttaacatcactagtcccgggcacgatgcaagctcacgaagtccgacaacaaccgctagcgtgtccgctaccgccgctccacggacagtccgcgttgccatgcaagtccccgtcgtgatgacgtcactcggccagaaaatttccaccgtcgcagttcagagtgtgaatgccggcgctcccctgattacatccacatcccctaccaccgcaacctcccctaaggtagtgattcagaccatacctactgttatgcctgctagcactgagaacggggacaaaatcaccatgcagcccgccaagatcattacgatcccagccactcagttggctcagtgtcagctgcagacaaagtccaacctaacaggaagcggctccattaatattgtgggcacaccactcgccgtgcgggccctaacccccgtgagtattgcacacggaacgccagtgatgcggctgagcatgcccacgcagcaggcctccggccaaacccctcctcgagtgatatctgccgttattaaaggacctgaggtgaaatctgaagcggtggctaaaaaacaggagcacgatgtgaaaaccctgcagcttgtggaggagaagcccgccgacggcaataagacggtgacccatgtggtggtggtgtctgctccctctgccatcgctctgcccgtcacaatgaaaacggagggccttgttacgtgcgaaaagtag

SEQ ID NO: 168720 - DNA, 3174 bp, Artificial Sequence
  derived and/or modified sequence
cgcgttgccagctgcggcggccgccacagccacagccgccgccgccgccgccgccgcccctgcccctgccgcccctgcccctgccgttaggtggtggggtttctcagcccggcggcgggaggcgggccggcctcggcttcctgtcggaggacgcgcaaggatccgggcgtcggagtgtgtgcgagtgcgtgagtgtgtgtcggtcgcacggcgtgtgtctccggccgcgggttccgcctcctcccctgccgccgctgctcacggtgtaagtcaatgtgaagcagcagctccagccccgggataaacatggcgacgtctctgcatgagggacccacgaaccagctggatctgctcattcgggccgtggaagcatcagttcacagcagtaatgcacactgtacagataagacaattgaagctgctgaagccctgcttcatatggaatctcctacctgcttgagggattcaagaagtcctgtggaagtgtttgttcctccttgtgtatcaactccagaattcatccatgctgctatgaggccagatgtcattacagaaactgtagtggaggtgtcaactgaagagtctgaacccatggatacctctcctattccaacatcaccagatagccatgaaccaatgaaaaagaaaaaagttggccgtaaaccaaagacccagcaatcaccaatttccaatgggtctcctgagttaggtataaagaagaaaccaagagaaggaaaaggaaacacaacctatttgtgggagtttcttttagatctacttcaagataaaaatacttgtcccaggtatattaaatggactcagagagaaaaaggcatattcaagctggtggattcaaaggctgtctctaagctttggggaaagcataagaacaaaccagacatgaactatgaaaccatgggacgagctttgagatactactaccaaaggggaattcttgcaaaggttgaaggacagaggcttgtatatcagttcaaggatatgccgaaaaacatagtggtcatagatgatgacaaaagtgaaacctgtaatgaagatttagcaggaactactgatgaaaaatcattagaacgagtgtcactgtctgcagaaagtctcctgaaagcagcatcctctgttcgcagtggaaaaaattcatcccctataaactgctccagagcagagaagggtgtagctagagttgtgaatatcacttcccctgggcacgatgcttcatccaggtctcctactaccactgcatctgtgtcagcaacagcagctccaaggacagttcgtgtggcaatgcaggtacctgttgtaatgacatcattgggtcagaaaatttcaactgtggcagttcagtcagttaatgcaggtgcaccattaataaccagcactagtccaacaacagcgacctctccaaaggtagtcattcagacaatccctactgtgatgccagcttctactgaaaatggagacaaaatcaccatgcagcctgccaaaattattaccatcccagctacacagcttgcacagtgtcaactgcagacaaagtcaaatctgactggatcaggaagcattaacattgttggaaccccattggctgtgagagcacttacccctgtttcaatagcccatggtacacctgtaatgagactatcaatgcctactcagcaggcatctggccagactcctcctcgagttatcagtgcagtcataaaggggccagaggttaaatcggaagcagtggcaaaaaagcaagaacatgatgtgaaaactttgcagctagtagaagaaaaaccagcagatggaaataagacagtgacccacgtagtggttgtcagtgcgccttcagctattgcccttcctgtaactatgaaaacagaaggactagtgacatgtgagaaataaaatagcagctccaccatggacttcaggctgttagtggcagtactgacataaacatttgcaagggaagtcatcaagaaaagtcaaagaagactttaaaacatttttaatgcatatacaaaaacaatcagacttactggaaataaattacctatcccatgtttcagtgggaaatgaactacatattgagatgctgacagaaaactgcctcttacagtaggaaacaactgaacccatcaataagaaaaaggatcgaaagggaccaagcagctcactacgatatcaagttacactaagacttggaacactaacattctgtaagaggttatatagttttcagtgggaggggttgggatgggtaatctcattgttacatatagcaatttttgatgcattttatatgcataccagcaattattactgtgttcgcacagttctcacttaactggtgctatgtgaagactctgctaatataggtattttagaatgtgaattgaagaatggatcccaaaaacttcagaaagaggatagcaaaaaaagatctagtgcgattttatatatatatatatatatatatacatacatatatatatatcatatagcttaagctgatttaaaacaaaggccttagactaattttcgattttctttcttgaaataagctaatggcttgtttgtgtaaagcttttttattaaaagaaaaattttaaaaatcttgtacctagcacagtattgttatagaatatacatgtaacattttatatggtagtttaagtctgtcagtttcttaattgtggacaaattaacagttggctctggccttttgctgtaacatgcctgtgtcactcacttagccttggcatttgtgcagacataccattttcagttctgctgtcacttggaagttcaggctcagcatgaatttttggcaggtagctctaatacctggagttttctttgtttttttttcttttttttagttgaagtttatgagggaaataccagtgttcagttttgaactataatagtttgtatattcaacatttgaagtatattctattttgttgtactcttgtttcaaagtgtattcaagtaggttttctgaaatatagaaatgaaatttatcttctgttttggtctctggtgatattttaaacaatatttaaaagtcagtatagaagtgttttagttaggaagtgataaaacatctctcttctccttcccaactactgcatgaagaaattctacttccattatattaatatttgg

SEQ ID NO: 168721 - DNA, 1602 bp, Artificial Sequence
  derived and/or modified sequence
atggccaccagcctgcacgagggccccaccaaccagctggacctgctgatccgggctgtggaggcctctgtgcacagcagcaatgcccactgcacagacaagaccatcgaggccgctgaggccctgctgcacatggagagccccacctgcctgcgggacagccgcagccctgtggaggtgtttgtgcccccctgtgtgtccaccccagagttcatccacgccgccatgaggccagatgtgatcacagagaccgtggtggaggtgtccacagaggagagcgagcccatggacaccagccccatccccaccagcccagacagccatgagcccatgaagaagaagaaggtgggcaggaagcccaagacccagcagagccccatcagcaatggcagccctgagctgggcatcaagaagaagccccgggagggcaagggcaacaccacctacctgtgggagttcctgctggacctgctgcaggacaagaacacctgcccccgctacatcaagtggacccagcgggagaagggcatcttcaagctggtggacagcaaggctgtgtccaagctgtggggcaagcacaagaacaagccagacatgaactatgagaccatgggccgggccctgcgctactactaccagaggggcatcctggccaaggtggagggccagaggctggtgtaccagttcaaggacatgcccaagaacatcgtggtgattgatgatgacaagtctgagacctgcaatgaagacctggccggcaccacagatgagaagagcctggagcgggtgtccctgtctgctgagagcctgctgaaggccgccagctctgtgcgcagcggcaagaacagcagccccatcaactgcagcagagctgagaagggcgtggcccgggtggtgaacatcaccagccctggccatgatgccagcagccgcagccccaccaccacagcctctgtgtctgccacagctgcccccaggacagtgcgggtggccatgcaggtgcctgtggtgatgaccagcctgggccagaagatcagcacagtggccgtgcagagcgtgaatgctggggcccccctcatcaccagcaccagccccaccacagccaccagccccaaggtggtgatccagaccatccccaccgtgatgcctgccagcacagaaaatggagacaagatcaccatgcagcctgccaagatcatcaccatcccagccacccagctggcccagtgccagctgcagaccaagagcaacctgactggaagtggcagcatcaacatcgtgggcacccccctggccgtgcgggccctgacccctgtgtccatcgcccacggcacccctgtgatgaggctgtccatgcccacccagcaggccagcggccagaccccacccagggtcatctctgctgtgatcaagggccctgaggtgaagtctgaggccgtggccaagaagcaggagcatgatgtgaagaccctgcagctggtggaggagaagccagcagatggcaacaagacagtgacccacgtggtggtggtgtctgcccccagcgccatcgccctgcctgtgaccatgaagacagagggcctggtgacctgtgagaagtag

SEQ ID NO: 168722 - DNA, 1602 bp, Artificial Sequence
  derived and/or modified sequence
atggccaccagcctgcacgagggccccaccaaccagctggacctgctgatccgcgccgtcgaggcaagtgttcacagctcaaatgctcattgtactgacaagacgatagaggccgccgaagctctactgcacatggaaagtcccacatgtctccgggacagcagatctccagtggaagtattcgtgcccccatgtgtgtctacccctgagtttattcacgctgcgatgcgtccagatgtcattaccgagacggttgtggaggtgtcaaccgaggagtccgaaccgatggacacctctccaattccaacctctcctgatagccacgagcccatgaagaaaaagaaggttggtagaaagccgaagacgcagcagtcacctatatccaatggcagtccagaactcggtatcaaaaaaaagcctagagaaggaaaagggaatacgacctacctgtgggagtttttgcttgatcttctccaggataagaacacatgtcctcgatacataaaatggactcagcgcgagaaagggatctttaagctggtggattccaaagcagtctccaagctgtggggaaaacacaaaaacaagcccgacatgaactatgaaacgatgggccgagctctacgatactactatcagcgtggaatccttgctaaggtggagggtcagagactggtctaccaatttaaggacatgccaaaaaacattgttgtgatcgacgacgataagagcgagacgtgtaatgaagacctagccgggaccactgatgaaaagagtcttgagcgagtttctctgagtgcagaatccctcctgaaagctgcatcttctgttagatccggcaaaaacagctcgcccattaactgttctcgcgccgagaagggggtggctagggtggtgaacatcactagccccggacatgatgcatcttccagatcccctactacaaccgccagtgttagcgctaccgcagctcctagaaccgttagggtggcaatgcaggtccctgtggtgatgacctcactggggcagaaaatctctacggtggccgtacagtccgtcaacgcgggagcaccactcattacgtctacaagccccactactgcaacttccccaaaagtcgtaatccagaccattccaacggtcatgccagcttctactgaaaacggcgataagatcaccatgcagcctgctaagattatcactatccctgccactcaactggcccagtgtcagctccagacaaagagcaacctgacaggctctgggtccattaatatcgtgggcacaccattggcagtgcgagcactgaccccagttagcattgcccacgggacacccgtcatgcgactaagtatgcctacacaacaagcctccggccaaactcctcccagagttattagcgctgtgatcaaagggccagaagtcaagtctgaggcagtcgccaagaaacaggaacatgacgtcaagactctacagttggttgaagaaaaacctgccgacggaaataaaaccgtgacccacgttgtcgtggtctcagctccttctgccatcgctctgccagtgaccatgaagaccgagggcctcgttacctgcgaaaaatag

SEQ ID NO: 168723 - DNA, 1602 bp, Artificial Sequence
  derived and/or modified sequence
atggccacatcacttcacgagggaccaactaaccaactagacttgttgatcagagcagtggaggctagcgtgcacagcagtaatgctcattgcaccgacaagaccatcgaggccgctgaggctctgctgcatatggaaagccctacgtgtttaagggattctcgctcaccagttgaggtgttcgtccctccctgcgtatcaacaccagaatttatacatgctgcaatgcggcctgacgtgataactgaaaccgttgtggaggtgtcgactgaagaatccgagcctatggacacctcccctatacctacgagcccagacagtcatgagccgatgaaaaagaaaaaagtcgggagaaagcctaagacccagcagagcccaattagtaacggaagccccgagctggggataaaaaaaaaaccacgggagggtaaaggaaacactacgtacctttgggaatttctgctggaccttcttcaggacaaaaatacttgcccgcgatacataaaatggacccagagggagaagggtatttttaagttggtggattctaaggccgtgagcaaactttgggggaagcacaagaataagcccgatatgaactatgagacaatgggacgggctcttagatattattaccagcggggtattttggctaaagttgaagggcagcgtcttgtataccagttcaaagacatgcctaaaaacatcgttgttattgatgacgacaagtccgagacatgtaacgaagacttagccggtaccacggacgaaaagtccctggagcgggtgagtctgagcgccgaatccctgctaaaggcggcttcctccgtgcgtagtgggaagaacagtagtcccatcaactgttccagagctgaaaaaggcgtcgcaagagtggtaaacattacctctccaggccacgatgcctcaagccgtagcccgacaacgacagcgagcgtgtcagctacagctgccccacggaccgtaagggtggccatgcaggtgcccgtggtcatgacatctctgggccagaagattagtaccgttgccgtccagtccgtgaatgccggagcccctctgataacatccacctcccccacaactgctacatctcctaaggtagtgatccagacgatcccgaccgttatgccggcttcgaccgagaatggggacaaaattactatgcagccagcaaagattatcactatacctgcgacacagctggcccaatgtcaactgcagaccaagtcaaatctgaccggttccggaagcattaacatcgtgggaacaccccttgcagttcgcgctttgaccccagtaagtatagcccacggcacgcccgtcatgaggctgtctatgcctacgcagcaggcatccggccagactcctcctcgggtgatctccgccgtgatcaagggacccgaggtcaaatctgaagcagtcgcgaagaagcaagaacatgatgtgaagacactgcagctggttgaagagaagcctgccgacgggaacaaaacagttacccacgtggtggtggtgtccgccccatctgctattgcactacctgtgacaatgaagacagaggggctggttacatgtgaaaagtag

SEQ ID NO: 168724 - protein, 311 aa, Artificial Sequence
  derived and/or modified sequence
MLTKPLQGPPAPPGTPTPPPGGKDREAFEAEYRLGPLLGKGGFGTVFAGHRLTDRLQVAIKVIPRNRVLGWSPLSDSVTCPLEVALLWKVGAGGGHPGVIRLLDWFETQEGFMLVLERPLPAQDLFDYITEKGPLGEGPSRCFFGQVVAAIQHCHSRGVVHRDIKDENILIDLRRGCAKLIDFGSGALLHDEPYTDFDGTRVYSPPEWISRHQYHALPATVWSLGILLYDMVCGDIPFERDQEILEAELHFPAHVSPDCCALIRRCLAPKPSSRPSLEEILLDPWMQTPAEDVPLNPSKGGPAPLAWSLLP

SEQ ID NO: 168725 - protein, 145 aa, Artificial Sequence
  derived and/or modified sequence
MLVLERPLPAQDLFDYITEKGPLGEGPSRCFFGQVVAAIQHCHSRGVVHRDIKDENILIDLRRGCAKLIDFGSGALLHDEPYTDFDGTRVYSPPEWISRHQYHALPATVWSLGILLYDMVCGDIPFERDQEILEAELHFPAHVSP

SEQ ID NO: 168726 - DNA, 936 bp, Artificial Sequence
  derived and/or modified sequence
atgctgacaaagcctttgcagggcccccctgcccctccagggactccaactccaccccctggcggaaaggacagagaagccttcgaggcagaatataggttgggccccttgcttggcaagggcggattcggcaccgtgttcgctgggcatcgcctcaccgaccggctgcaagttgctataaaggtgatcccccggaatcgggtcctgggttggagcccattaagtgacagcgttacttgtccgctggaggtggccctcctttggaaggtgggcgctgggggaggtcatcctggggtgattcgcctcttagattggttcgaaacccaggaaggctttatgctggtattggaacgccccttgcccgcccaagacctatttgactacattacagagaaaggccctttgggggaggggccctcccggtgtttctttggccaggtggtcgcagccatacagcactgccacagcaggggagtcgtgcatcgggacatcaaagacgaaaacatcctgatcgatctgagacgtggttgcgctaaacttatcgacttcggatccggtgcattgttacatgacgaaccttacacagacttcgacggaactcgagtgtactctcctcctgaatggatttcgaggcatcaatatcatgctctgcctgccacagtttggagtctgggaatcctcttatatgacatggtgtgtggggatatacctttcgaacgcgaccaggagattctcgaagcggagttacatttcccagcccatgtctcacctgattgctgcgccttgatccgccggtgcctggctccgaaaccgagtagcagaccctcactggaggagattttgcttgacccctggatgcaaacgcccgcagaggacgtacccctgaacccgagtaaaggcgggccggctcccctcgcctggagcctccttccttag

SEQ ID NO: 168727 - DNA, 438 bp, Artificial Sequence
  derived and/or modified sequence
atgttggtcttagagcgccctctccccgcccaggacctgttcgactacatcacggaaaaaggaccccttggggagggccccagcagatgcttcttcggacaggtggtagctgctattcaacactgccacagccggggagtcgtccacagagatattaaggacgaaaacatcctgatcgatctccgtagaggttgcgccaaactgattgactttgggtccggggctttgcttcatgatgagccgtatacagatttcgacggtacacgagtctatagcccaccggaatggatcagtcgccaccaatatcacgccctccccgctacagtttggagccttgggattttactgtacgatatggtatgtggcgatatcccctttgaaagggaccaggagatccttgaggcagaactgcactttcctgcccacgtgtccccatag

SEQ ID NO: 168728 - DNA, 936 bp, Artificial Sequence
  derived and/or modified sequence
atgctgaccaagcccctgcagggccccccagcccctcctggcacccccaccccacctcctgggggcaaggaccgggaggcctttgaggccgagtaccgcctgggccccctgctgggcaagggcggctttggaacagtgtttgctggccaccggctgacagaccggctgcaggtggccatcaaggtgatccccaggaacagagtgctgggctggagccccctgagtgacagcgtgacctgccccctggaggtggccctgctgtggaaggtgggcgctgggggcggccaccctggggtcatccggctgctggactggtttgagacccaggagggcttcatgctggtgctggagcggcccctgcctgcccaggacctgtttgactacatcacagagaagggccccctgggggagggccccagccgctgcttcttcggccaggtggtggccgccatccagcactgccacagccggggcgtggtgcaccgggacatcaaggatgagaacatcctgattgacctgcggcggggctgtgccaagctgattgactttggaagtggggccctgctgcatgatgagccctacacagactttgatggcaccagggtgtacagccccccagagtggatcagccgccaccagtaccacgccctgcctgccaccgtgtggagcctgggcatcctgctgtatgacatggtgtgtggggacatcccctttgagcgggaccaggagatcctggaggccgagctgcacttccctgcccacgtgtccccagactgctgtgccctgatccgccgctgcctggcccccaagcccagcagccggcccagcctggaggagatcctgctggacccctggatgcagaccccagcagaagatgtgcccctgaaccccagcaaaggaggccctgcccccctggcctggagcctgctgccctag

SEQ ID NO: 168729 - DNA, 438 bp, Artificial Sequence
  derived and/or modified sequence
atgctggtgctggagcggcccctgcctgcccaggacctgtttgactacatcacagagaagggccccctgggggagggccccagccgctgcttcttcggccaggtggtggccgccatccagcactgccacagccggggcgtggtgcaccgggacatcaaggatgagaacatcctgattgacctgcggcggggctgtgccaagctgattgactttggaagtggggccctgctgcatgatgagccctacacagactttgatggcaccagggtgtacagccccccagagtggatcagccgccaccagtaccacgccctgcctgccaccgtgtggagcctgggcatcctgctgtatgacatggtgtgtggggacatcccctttgagcgggaccaggagatcctggaggccgagctgcacttccctgcccacgtgagcccctag

SEQ ID NO: 168730 - DNA, 936 bp, Artificial Sequence
  derived and/or modified sequence
atgctgaccaagcccctgcagggcccccccgccccccccggcaccccaactcctcctcccgggggtaaggatcgagaggcattcgaggccgagtatcggcttggtccattgctgggcaagggaggcttcgggactgtgttcgcaggtcacaggttaaccgacagactgcaggtagcgatcaaagtgattccgcgcaatcgagtgctcggttggtcaccgttgtctgattcggtgacctgccccttggaagttgcactgctttggaaggtaggcgccggcggtggacatcccggtgttattcgactcctggactggttcgaaactcaagagggcttcatgctggtcctggaacgccctttacctgcacaagatctgtttgattacatcactgaaaaaggtcccttaggcgaaggcccatcaaggtgcttctttggacaggtagttgctgccattcagcactgtcacagtcggggcgtcgtccacagggacataaaggatgaaaatatcctcatcgacctgcgtagggggtgcgctaagttgattgacttcggaagcggcgcactccttcacgacgagccttataccgattttgacggcactcgcgtctacagcccgcccgaatggatttcacgccaccagtaccatgccctgccggccactgtgtggtcccttggaattctgttgtacgacatggtttgcggcgacatcccatttgagagagaccaggagatcctcgaggccgaattacatttccctgcccatgttagcccggactgctgtgctctcattaggcgttgcctcgcccccaaaccatccagtcgaccttcactcgaggagatcctgttggacccctggatgcagaccccagcagaggatgtgcctctcaaccccagtaaaggtggacccgccccactggcttggtcccttcttccttag

SEQ ID NO: 168731 - DNA, 438 bp, Artificial Sequence
  derived and/or modified sequence
atgctggtgctggagcggcccctgcccgcccaggacctgttcgactatattacggagaagggccccctcggagagggcccctcaagatgcttcttcggtcaggtcgtcgcggccatccagcattgccattcacgaggagtggtgcacagggatattaaggacgagaacatcctgatagacttgcgtcgtggctgcgccaagctcatcgacttcggctcaggcgccctgctccacgatgaaccctacactgatttcgacggcacgcgtgtatactctccccctgagtggatcagtcggcaccaatatcacgcactgcccgccacagtgtggtcgctgggtattctgctctacgatatggtgtgtggagatattccttttgagagggaccaggagatccttgaagcggagttgcatttcccggcccacgtgagtccttag

SEQ ID NO: 168732 - DNA, 2075 bp, Artificial Sequence
  derived and/or modified sequence
agtagcattggggctggcgcgcgcggcgaatctcaacgctgcgccgtctgcgggcgcttccgggccaccagtttctctgctttccaccctggcgccccccagccctggctccccagctgcgctgccccgggcgtccacgccctgcgggcttagcgggttcagtgggctcaatctgcgcagcgccacctccatgttgaccaagcctctacaggggcctcccgcgccccccgggacccccacgccgccgccaggaggcaaggatcgggaagcgttcgaggccgagtatcgactcggccccctcctgggtaaggggggctttggcaccgtcttcgcaggacaccgcctcacagatcgactccaggtggccatcaaagtgattccccggaatcgtgtgctgggctggtcccccttgtcagactcagtcacatgcccactcgaagtcgcactgctatggaaagtgggtgcaggtggtgggcaccctggcgtgatccgcctgcttgactggtttgagacacaggagggcttcatgctggtcctcgagcggcctttgcccgcccaggatctctttgactatatcacagagaagggcccactgggtgaaggcccaagccgctgcttctttggccaagtagtggcagccatccagcactgccattcccgtggagttgtccatcgtgacatcaaggatgagaacatcctgatagacctacgccgtggctgtgccaaactcattgattttggttctggtgccctgcttcatgatgaaccctacactgactttgatgggacaagggtgtacagccccccagagtggatctctcgacaccagtaccatgcactcccggccactgtctggtcactgggcatcctcctctatgacatggtgtgtggggacattccctttgagagggaccaggagattctggaagctgagctccacttcccagcccatgtctccccagactgctgtgccctaatccgccggtgcctggcccccaaaccttcttcccgaccctcactggaagagatcctgctggacccctggatgcaaacaccagccgaggatgtacccctcaacccctccaaaggaggccctgcccctttggcctggtccttgctaccctaagcctggcctggcctggcctggcccccaatggtcagaagagccatcccatggccatgtcacagggatagatggacatttgttgacttggttttacaggtcattaccagtcattaaagtccagtattactaaggtaagggattgaggatcaggggttagaagacataaaccaagtctgcccagttcccttcccaatcctacaaaggagccttcctcccagaacctgtggtccctgattctggagggggaacttcttgcttctcattttgctaaggaagtttattttggtgaagttgttcccattctgagccccgggactcttattctgatgatgtgtcaccccacattggcacctcctactaccaccacacaaacttagttcatatgctcttacttgggcaagggtgctttccttccaataccccagtagcttttattttagtaaagggaccctttcccctagcctagggtcccatattgggtcaagctgcttacctgcctcagcccaggattctttattctgggggaggtaatgccctgttgttaccccaaggcttcttttttttttttttttttttgggtgaggggaccctactctgttatcccaagtgctcttattctggtgagaagaaccttacttccataatttgggaaggaatggaagatggacaccaccggacaccaccagacactaggatgggatggatggttttttgggggatgggctaggggaaataaggcttgctgtttgttctcctggggcgctccctccaacttttgcagattcttgcaacctcctcctgagccgggattgtccaattactaaaatgtaaataatcacgtattgtggggaggggagttccaagtgtgccctcctctcttctcctgcctggattatttaaaaagccatgtgtggaaacccactatttaataaaagtaatagaatcagaa

SEQ ID NO: 168733 - DNA, 892 bp, Artificial Sequence
  derived and/or modified sequence
ttgaactcttgggctcaagcaatccacccacatcagcctcccaaagtgctgggattgcagggatgagccactgtgcctggccgaacttctttcgtttattcaaatgtttattgatctacgacatgcgagatttgtgcaggctctttgctggtttcaccctctcaatcgctgtgtgagtttgtgtctttagggaaagtgaggcccaggaagggaagtgagttgcttagcgacacactgtcaggaaaaggggccctgagttgagcttaggtaaaaagcctcagagctgttgccctgacatctgtcttttttctctccctgcttcccaccccacctgtgcccccagtcagactcagtcacatgcccactcgaagtcgcactgctatggaaagtgggtgcaggtggtgggcaccctggcgtgatccgcctgcttgactggtttgagacacaggagggcttcatgctggtcctcgagcggcctttgcccgcccaggatctctttgactatatcacagagaagggcccactgggtgaaggcccaagccgctgcttctttggccaagtagtggcagccatccagcactgccattcccgtggagttgtccatcgtgacatcaaggatgagaacatcctgatagacctacgccgtggctgtgccaaactcattgattttggttctggtgccctgcttcatgatgaaccctacactgactttgatgggacaagggtgtacagccccccagagtggatctctcgacaccagtaccatgcactcccggccactgtctggtcactgggcatcctcctctatgacatggtgtgtggggacattccctttgagagggaccaggagattctggaagctgagctccacttcccagcccatgtctcccca

SEQ ID NO: 168734 - DNA, 936 bp, Artificial Sequence
  derived and/or modified sequence
atgctgaccaaacccctgcagggcccacccgcaccgccaggaaccccgactccccctcctggcggaaaagaccgcgaagcatttgaggctgaataccgacttggccctcttctgggtaaaggagggtttggtacggtttttgcaggccaccgattaaccgacaggctacaagtggcgatcaaggtgatccccagaaatagggtacttgggtggagtccactgagcgacagtgtgacatgccccttggaagtcgcactgctgtggaaggtgggcgcaggcggaggacaccccggagtgatacggttgctcgattggtttgaaacacaagaagggtttatgctggtcttggagcggccactgcctgcgcaggatctgttcgattatatcaccgagaaggggcctttaggcgagggaccttctaggtgcttctttggtcaagttgtcgcagcgatccaacactgccacagtaggggagtggtgcatagggatataaaagatgaaaacatattgattgacctgcgcagggggtgtgctaaattgatagacttcggaagcggagctctgctgcacgacgagccctataccgattttgatggcacacgagtttatagtccacccgagtggatttccaggcaccagtatcatgccttacccgctaccgtgtggtccctcggcatcctcctttatgacatggtctgcggtgacatcccatttgaacgcgatcaggaaatcctggaggcagaactgcatttcccagcacacgtaagtcccgattgttgtgccctgataaggcgttgtctcgccccaaagccctcttctcggccatcgctggaggagatattgcttgatccctggatgcagactccagccgaggatgtgccattgaatccctcaaaggggggacccgctccattagcttggtctctattgccttag

SEQ ID NO: 168735 - DNA, 438 bp, Artificial Sequence
  derived and/or modified sequence
atgttggttctggagagaccgctgccagctcaggacttgtttgactatatcactgagaagggcccactgggagaaggccctagcaggtgtttttttggacaggttgtggccgctatccaacactgtcatagcaggggcgtcgtccacagagacatcaaggatgaaaatatcctcatcgatctgcgacggggatgtgcaaagctcattgacttcggctccggcgctctactgcacgatgagccttacaccgactttgacggcaccagggtatatagtcctcccgaatggatttccaggcaccagtaccatgctctccccgctactgtttggtcccttgggattctcctttatgacatggtgtgcggcgacatccccttcgagcgcgatcaggagattctcgaggcagaactccacttccctgctcacgtgagtccatag

SEQ ID NO: 168736 - DNA, 936 bp, Artificial Sequence
  derived and/or modified sequence
atgctgaccaagcccctgcagggcccccccgccccccccggcacccccacccccccccccggcggcaaggacagagaggccttcgaggccgagtacagactgggccccctgctgggcaagggcggcttcggcaccgtgttcgccggccacagactgaccgacagactgcaggtggccatcaaggtgatccccagaaacagagtgctgggctggagccccctgagcgacagcgtgacctgccccctggaggtggccctgctgtggaaggtgggcgccggcggcggccaccccggcgtgatcagactgctggactggttcgagacccaggagggcttcatgctggtgctggagagacccctgcccgcccaggacctgttcgactacatcaccgagaagggccccctgggcgagggccccagcagatgcttcttcggccaggtggtggccgccatccagcactgccacagcagaggcgtggtgcacagagacatcaaggacgagaacatcctgatcgacctgagaagaggctgcgccaagctgatcgacttcggcagcggcgccctgctgcacgacgagccctacaccgacttcgacggcaccagagtgtacagcccccccgagtggatcagcagacaccagtaccacgccctgcccgccaccgtgtggagcctgggcatcctgctgtacgacatggtgtgcggcgacatccccttcgagagagaccaggagatcctggaggccgagctgcacttccccgcccacgtgagccccgactgctgcgccctgatcagaagatgcctggcccccaagcccagcagcagacccagcctggaggagatcctgctggacccctggatgcagacccccgccgaggacgtgcccctgaaccccagcaagggcggccccgcccccctggcctggagcctgctgccctag

SEQ ID NO: 168737 - DNA, 438 bp, Artificial Sequence
  derived and/or modified sequence
atgctggtgctggagagacccctgcccgcccaggacctgttcgactacatcaccgagaagggccccctgggcgagggccccagcagatgcttcttcggccaggtggtggccgccatccagcactgccacagcagaggcgtggtgcacagagacatcaaggacgagaacatcctgatcgacctgagaagaggctgcgccaagctgatcgacttcggcagcggcgccctgctgcacgacgagccctacaccgacttcgacggcaccagagtgtacagcccccccgagtggatcagcagacaccagtaccacgccctgcccgccaccgtgtggagcctgggcatcctgctgtacgacatggtgtgcggcgacatccccttcgagagagaccaggagatcctggaggccgagctgcacttccccgcccacgtgagcccctag

SEQ ID NO: 168738 - protein, 415 aa, Artificial Sequence
  derived and/or modified sequence
MQMSYAIRCAFYQLLLAALMLVAMLQLLYLSLLSGLHGQEEQDQYFEFFPPSPRSVDQVKAQLRTALASGGVLDASGDYRVYRGLLKTTMDPNDVILATHASVDNLLHLSGLLERWEGPLSVSVFAATKEEAQLATVLAYALSSHCPDMRARVAMHLVCPSRYEAAVPDPREPGEFALLRSCQEVFDKLARVAQPGINYALGTNVSYPNNLLRNLAREGANYALVIDVDMVPSEGLWRGLREMLDQSNQWGGTALVVPAFEIRRARRMPMNKNELVQLYQVGEVRPFYYGLCTPCQAPTNYSRWVNLPEESLLRPAYVVPWQDPWEPFYVAGGKVPTFDERFRQYGFNRISQACELHVAGFDFEVLNEGFLVHKGFKEALKFHPQKEAENQHNKILYRQFKQELKAKYPNSPRRC

SEQ ID NO: 168739 - protein, 186 aa, Artificial Sequence
  derived and/or modified sequence
MVPSEGLWRGLREMLDQSNQWGGTALVVPAFEIRRARRMPMNKNELVQLYQVGEVRPFYYGLCTPCQAPTNYSRWVNLPEESLLRPAYVVPWQDPWEPFYVAGGKVPTFDERFRQYGFNRISQACELHVAGFDFEVLNEGFLVHKGFKEALKFHPQKEAENQHNKILYRQFKQELKAKYPNSPRRC

SEQ ID NO: 168740 - DNA, 1248 bp, Artificial Sequence
  derived and/or modified sequence
atgcagatgagctacgccatcagatgcgccttctaccagctgctgctggccgccctgatgctggtggccatgctgcagctgctgtacctgagcctgctgagcggcctgcacggccaggaggagcaggaccagtacttcgagttcttcccccccagccccagaagcgtggaccaggtgaaggcccagctgagaaccgccctggccagcggcggcgtgctggacgccagcggcgactacagagtgtacagaggcctgctgaagaccaccatggaccccaacgacgtgatcctggccacccacgccagcgtggacaacctgctgcacctgagcggcctgctggagagatgggagggccccctgagcgtgagcgtgttcgccgccaccaaggaggaggcccagctggccaccgtgctggcctacgccctgagcagccactgccccgacatgagagccagagtggccatgcacctggtgtgccccagcagatacgaggccgccgtgcccgaccccagagagcccggcgagttcgccctgctgagaagctgccaggaggtgttcgacaagctggccagagtggcccagcccggcatcaactacgccctgggcaccaacgtgagctaccccaacaacctgctgagaaacctggccagagagggcgccaactacgccctggtgatcgacgtggacatggtgcccagcgagggcctgtggagaggcctgagagagatgctggaccagagcaaccagtggggcggcaccgccctggtggtgcccgccttcgagatcagaagagccagaagaatgcccatgaacaagaacgagctggtgcagctgtaccaggtgggcgaggtgagacccttctactacggcctgtgcaccccctgccaggcccccaccaactacagcagatgggtgaacctgcccgaggagagcctgctgagacccgcctacgtggtgccctggcaggacccctgggagcccttctacgtggccggcggcaaggtgcccaccttcgacgagagattcagacagtacggcttcaacagaatcagccaggcctgcgagctgcacgtggccggcttcgacttcgaggtgctgaacgagggcttcctggtgcacaagggcttcaaggaggccctgaagttccacccccagaaggaggccgagaaccagcacaacaagatcctgtacagacagttcaagcaggagctgaaggccaagtaccccaacagccccagaagatgctag

SEQ ID NO: 168741 - DNA, 561 bp, Artificial Sequence
  derived and/or modified sequence
atggtgcccagcgagggcctgtggagaggcctgagagagatgctggaccagagcaaccagtggggcggcaccgccctggtggtgcccgccttcgagatcagaagagccagaagaatgcccatgaacaagaacgagctggtgcagctgtaccaggtgggcgaggtgagacccttctactacggcctgtgcaccccctgccaggcccccaccaactacagcagatgggtgaacctgcccgaggagagcctgctgagacccgcctacgtggtgccctggcaggacccctgggagcccttctacgtggccggcggcaaggtgcccaccttcgacgagagattcagacagtacggcttcaacagaatcagccaggcctgcgagctgcacgtggccggcttcgacttcgaggtgctgaacgagggcttcctggtgcacaagggcttcaaggaggccctgaagttccacccccagaaggaggccgagaaccagcacaacaagatcctgtacagacagttcaagcaggagctgaaggccaagtaccccaacagccccagaagatgctag

SEQ ID NO: 168742 - DNA, 1248 bp, Artificial Sequence
  derived and/or modified sequence
atgcaaatgtcttatgctattcggtgcgccttctaccagctactgctggctgcccttatgcttgtcgctatgctgcagctgctctacctgtctctactctctggattgcacggacaagaggaacaggaccagtatttcgaattttttccccctagcccgagaagcgttgatcaggtcaaagcccaactcagaaccgctttagctagcgggggcgtgctcgatgcatccggtgattatagagtttataggggcttgttgaaaactacgatggacccaaacgacgtgattctcgccacgcatgcgtctgtggataatctgttgcacctttccggtctgctggaaaggtgggaagggcctctatctgtttccgtcttcgccgccaccaaggaggaggcacaattggcgactgttctggcttatgcattgagtagccactgccctgatatgagggcccgagtggcgatgcatctggtgtgcccctctcgttacgaggccgcagtgcccgacccccgagaaccaggagaattcgctctgctgcgctcctgtcaggaagtgttcgataaactggctcgagtggcccagcctggcatcaactatgctctcgggacgaatgttagttatccgaataacctgctccgaaacctggcacgggaaggggcaaattacgctttggtcattgatgtggatatggtgccctcagaaggcctttggagagggctgcgagagatgctcgatcagtcaaaccagtggggagggactgcactggtggttccggcgtttgaaatcaggagggccagacgaatgccgatgaataagaacgagctcgtgcagctgtatcaagtcggagaggtccgccccttttactatggcctgtgcaccccttgtcaagccccaaccaattattccaggtgggttaatttgcctgaagagtccttgctacgacctgcgtacgttgttccttggcaggatccttgggagccattctacgtcgccggcggcaaggtaccaacttttgacgaacggttcaggcagtatggttttaatcgcatcagtcaggcctgcgaactgcatgttgctggttttgacttcgaagtactcaatgagggctttctcgtgcacaagggcttcaaagaggcactgaaatttcaccctcagaaagaggcagagaatcagcataataagatcctgtaccggcagttcaagcaagagctaaaggccaaataccccaactctcctcgcagatgctag

SEQ ID NO: 168743 - DNA, 561 bp, Artificial Sequence
  derived and/or modified sequence
atggtgccatcagaagggttgtggcgcggactcagagagatgctggatcagtcaaaccaatggggcggtaccgctttagttgtccccgccttcgaaatcagaagagcacgccggatgccgatgaataagaatgagctggttcagctctatcaggtgggtgaggtgagacccttttactatgggctgtgcacaccctgccaagccccaacaaattacagccgatgggtcaacctgccagaggaaagcttgttaagacccgcatatgtggtaccttggcaagacccctgggagccattctacgttgctggaggaaaggtccctacctttgacgaaagattccgccagtatgggtttaacaggatctctcaggcttgtgaactgcatgttgcgggctttgattttgaggtcttaaacgagggcttcctcgtgcacaagggatttaaagaagcactgaagtttcatcctcagaaggaggctgagaaccaacacaataaaattctgtaccgccagttcaaacaagaacttaaggctaaatatcccaacagccccagaagatgctag

SEQ ID NO: 168744 - DNA, 1248 bp, Artificial Sequence
  derived and/or modified sequence
atgcagatgtcctatgccatccgctgtgccttctaccagctgctgctggccgccctgatgctggtggccatgctgcagctgctgtacctgagcctgctgagcggcctgcacggccaggaggagcaggaccagtactttgagttcttcccccccagccccaggtctgtggaccaggtgaaggcccagctgaggacagccctggccagcggaggagtgctggatgccagcggggactacagagtgtaccggggcctgctgaagaccaccatggaccccaatgatgtgatcctggccacccacgcctctgtggacaacctgctgcacctgagcggcctgctggagcgctgggagggccccctgtctgtgtctgtgtttgctgccaccaaggaggaggcccagctggccaccgtgctggcctatgccctgagcagccactgcccagacatgagggcccgggtggccatgcacctggtgtgccccagccgctatgaagctgctgtgcctgacccccgggagcctggagaatttgccctgctgcggagctgccaggaggtgtttgacaagctggcccgggtggcccagcccggcatcaactatgccctgggcaccaacgtgtcctaccccaacaacctgctgaggaacctggcccgggagggcgccaactatgccctggtgattgatgtggacatggtgcccagcgagggcctgtggaggggcctgcgggagatgctggaccagagcaaccagtggggcggcacagccctggtggtgcctgcctttgagatcagaagagcccggaggatgcccatgaacaagaatgagctggtgcagctgtaccaggtgggggaggtgcggcccttctactacggcctgtgcaccccctgccaggcccccaccaactacagccgctgggtgaacctgcctgaggagagcctgctgcggcctgcctacgtggtgccctggcaggacccctgggagcccttctacgtggccggcggcaaggtgcccacctttgatgagcgcttccggcagtatggcttcaaccgcatcagccaggcctgtgagctgcacgtggccggctttgattttgaggtgctgaatgaaggcttcctggtgcacaagggcttcaaggaggccctgaagttccacccccagaaggaggccgagaaccagcacaacaagatcctgtaccggcagttcaagcaggagctgaaggccaagtaccccaacagcccccggcgctgctag

SEQ ID NO: 168745 - DNA, 561 bp, Artificial Sequence
  derived and/or modified sequence
atggtgcccagcgagggcctgtggaggggcctgcgggagatgctggaccagagcaaccagtggggcggcacagccctggtggtgcctgcctttgagatccggcgggcccggaggatgcccatgaacaagaatgagctggtgcagctgtaccaggtgggggaggtgcggcccttctactacggcctgtgcaccccctgccaggcccccaccaactacagccgctgggtgaacctgcctgaggagagcctgctgcggcctgcctacgtggtgccctggcaggacccctgggagcccttctacgtggccggcggcaaggtgcccacctttgatgagcgcttccggcagtatggcttcaaccgcatcagccaggcctgtgagctgcacgtggccggctttgattttgaggtgctgaatgaaggcttcctggtgcacaagggcttcaaggaggccctgaagttccacccccagaaggaggccgagaaccagcacaacaagatcctgtaccggcagttcaagcaggagctgaaggccaagtaccccaacagcccccggcgctgctag

SEQ ID NO: 168746 - DNA, 1248 bp, Artificial Sequence
  derived and/or modified sequence
atgcagatgagctacgccatccggtgcgccttctaccagctgctgttggcagcactgatgctggttgcaatgctgcaacttctttacctcagcctgctaagcggcctgcacggccaggaagaacaggatcagtattttgagttcttccctccttccccgcgcagcgttgaccaggtcaaagcccagctccggaccgccctggccagcggaggagtgttagacgcgagcggtgactacagagtttatcggggcctactgaaaacaactatggatcctaacgacgtgattttagctacccatgctagcgtggacaatctcctccacctgagcggtcttctggagcgatgggaagggcctctatccgtgtccgtgtttgcggctaccaaagaggaggcacaacttgcgaccgtactcgcctatgcattgagcagccattgcccggatatgagagctcgggtagctatgcacctggtgtgcccttccaggtatgaggcagcagtccctgacccccgagaaccaggggaatttgccctactgcgcagctgccaggaagtctttgataagctggcaagggtcgctcaaccaggtataaactacgcccttgggaccaacgtgagctaccccaacaacctgctgagaaaccttgctagggagggggccaactatgccctcgttattgacgttgacatggttccaagtgaaggcctatggagaggcctgcgggagatgctggatcagtccaaccagtggggcggtacagccctggtcgttcccgcttttgaaattaggcgcgcccggcgaatgccaatgaataagaatgagctcgtccaactgtaccaagtgggggaagtacggcctttctactacggattgtgtacaccttgtcaggcccccacgaattatagccggtgggtgaacttgcctgaggagagcttgcttcggcctgcctatgttgtgccatggcaggacccctgggaacctttctacgtggctgggggtaaggtacccacgttcgacgagagatttcgacaatacggcttcaaccgtatcagtcaggcctgcgagctccacgtggctggctttgacttcgaagtcctcaacgaaggctttctagtgcataaaggttttaaggaggcgctgaagttccaccctcagaaagaagcggagaatcagcacaacaagatcctgtatagacaatttaaacaagagcttaaggcgaagtaccctaactcccctcgacgttgttag

SEQ ID NO: 168747 - DNA, 561 bp, Artificial Sequence
  derived and/or modified sequence
atggtgcccagcgagggcctgtggcggggcctgcgggagatgctggatcagtcaaatcagtgggggggtacggccctggtcgttcctgccttcgagatcagacgagctcgcaggatgccgatgaacaaaaatgagcttgttcagctgtatcaggtgggagaagtgcgccctttctactatggcctttgcacgccctgtcaagcgcctactaactatagccgttgggtcaatctccctgaagagtcgctactgcgtccagcctatgttgtgccttggcaggatccatgggagcctttctatgtcgccggaggcaaagtgccgacgtttgatgaaagatttagacaatatggcttcaacagaatttcgcaggcctgcgagctccacgttgccggatttgatttcgaagttctgaacgagggttttctcgtacataaaggttttaaggaggctctgaaattccacccacagaaagaggcagagaaccagcataacaagattctgtacaggcagttcaaacaagaactcaaggccaagtaccctaattcacccagaagatgctag

SEQ ID NO: 168748 - DNA, 1248 bp, Artificial Sequence
  derived and/or modified sequence
atgcagatgtcctatgctatccggtgtgccttttaccagttgctactggctgctcttatgcttgtggctatgctgcagctgctgtacctttccttgctgtcagggctgcatggtcaggaagagcaggaccagtacttcgagttttttcccccatctccgagaagtgtggaccaggtcaaggcacaactgaggactgccctagcaagtggcggtgtgcttgacgcctcaggagattatagagtgtacaggggcctgctcaaaactactatggatcctaacgatgtgatcctcgcgacacacgcctcagtcgacaacctgctgcatttatccgggctgctggaacgctgggaagggccactgtctgttagcgtgtttgccgctaccaaagaggaagcacagctggccaccgtgctcgcttacgcattgtcatcccactgtccagacatgcgggctcgcgttgccatgcacctggtgtgccccagcaggtacgaggctgcagtgccagaccccagagagccgggtgaattcgctctcctgcggtcttgtcaggaggtctttgataagcttgctcgggttgcccagcccggtatcaactacgccctcggcacaaatgtcagctaccctaacaacctgttgcggaacctggctagagagggcgcaaattacgccctggtcattgatgtcgacatggtccctagtgagggcttatggcggggactccgggagatgctggatcagagcaatcagtggggtggaacggcattggttgtcccagccttcgaaatccgtagggcacgaagaatgcctatgaataaaaacgagctggtccagctgtaccaagtgggagaagtgcgcccattttattacggcctctgtacgccatgccaggcccctacaaattacagccgttgggtgaatctcccagaggagagtctcctgaggcccgcttacgtcgtaccatggcaggacccatgggagcctttctacgtggccggagggaaggtcccgacctttgacgaacgattcagacaatacgggttcaatcggatctcgcaggcttgtgaactgcatgtggccggatttgattttgaggtgcttaatgagggctttctggtgcataaaggatttaaggaagccctgaagttccatccccaaaaggaagcagagaaccagcataataagatcctttaccgacaattcaagcaggaactaaaagcgaagtatcctaactccccacgcaggtgttag

SEQ ID NO: 168749 - DNA, 561 bp, Artificial Sequence
  derived and/or modified sequence
atggtcccatccgagggcctgtggcggggtttaagggagatgctggaccaatccaatcaatggggtggaactgcattggttgtgcccgcattcgagattcgccgagcaagacgaatgcccatgaacaaaaatgaactcgttcagctctatcaagtaggcgaggtgaggcctttttactacggattgtgcaccccttgtcaagctcccacaaattacagtcgctgggtgaatttgcccgaggagtccctgctcagaccagcttacgtggtgccatggcaggatccctgggaaccattttatgtcgccggtgggaaggttccaacgtttgacgaacgattccgtcagtatggttttaaccgtatctctcaggcctgcgagctgcacgttgcagggttcgacttcgaggtactcaacgaggggtttctggtccataaggggtttaaggaggctttgaaatttcacccgcagaaggaagctgaaaaccagcacaataagatcctgtacaggcagttcaagcaggagctaaaagcgaagtatcctaattctccacgcagatgctag

SEQ ID NO: 168750 - DNA, 2072 bp, Artificial Sequence
  derived and/or modified sequence
gggcggcgggcggggcggcgctcggggctcggctggcctcggctcgcctcggctgcgctcggcaggctgcggtaaatccgggcttgcggccgctggcgtagtctgtggccgggtggtcgttgctgcgcgccccgagccccgagagccatgcagatgtcctacgccatccggtgcgccttctaccagctgctgctggccgcgctcatgctggtggcgatgctgcagctgctctacctgtcgctgctgtccggactgcacgggcaggaggagcaagaccaatattttgagttctttcccccgtccccacggtccgtggaccaggtcaaggcgcagctccgcaccgcgctggcctctggaggcgtcctggacgctagcggcgattaccgcgtctacaggggcctgctgaagaccaccatggaccccaacgatgtgatcctggccacgcacgccagcgtggacaacctgctgcacctgtcgggtctgctggagcgctgggagggcccgctgtccgtgtcggtgttcgcggccaccaaggaggaggcgcagctggccacggtgctggcctacgcgctgagcagccactgccccgacatgcgcgccagggtcgccatgcacctcgtgtgcccctcgcgttacgaggcagccgtgcccgacccccgggagccgggggagtttgccctgctgcggtcctgccaggaggtctttgacaagctagccagggtggcccagcccgggattaattatgcgctgggcaccaatgtctcctaccccaataacctgctgaggaatctggctcgtgagggggccaactatgccctggtgatcgatgtggacatggtgcccagcgaggggctgtggagaggcctgcgggaaatgctggatcagagcaaccagtggggaggcaccgcgctggtggtgcctgccttcgaaatccgaagagcccgccgcatgcccatgaacaaaaacgagctggtgcagctctaccaggttggcgaggtgcggcccttctattatgggttgtgcaccccctgccaggcacccaccaactattcccgctgggtcaacctgccggaagagagcttgctgcggcccgcctacgtggtaccttggcaggacccctgggagccattctacgtggcaggaggcaaggtgcccaccttcgacgagcgctttcggcagtacggcttcaaccgaatcagccaggcctgcgagctgcatgtggcggggtttgattttgaggtcctgaacgaaggtttcttggttcataagggcttcaaagaagcgttgaagttccatccccaaaaggaggctgaaaatcagcacaataagatcctatatcgccagttcaaacaggagttgaaggccaagtaccccaactctccccgacgctgctgagcccttccctcccctaatctgagaagtcagcctcttggctcctcaggccaccatttaggcctgactggggtaagaaatgtcgctccactttacagaggtagctgtggtgttgaaacactggacttggatatggggtgctgggatcgattcctagctttaccactaactagctgtgtggccttgagtaaatcccgttacctctctgagcctcggttaccctgtctgtaaaaagggaggtgagaatacctacctcacggaactgttgggaggctcagatgagatgctatatgtgaaaacattctgtaagcttcgtacaaatgtgaagtattaatattatcgcagtattattgttgttattattattgttattattaacaatcttgggtgggtagtaggagagcaaaaagtatgaatgggatggagctaagaagtctgaatacttaatgaaatggactttttggaaagaaatcagatgaaggcataaaatttagttcttagctcttgaacagaagcctaaaattcctggttctctcagggcttcgccttcaagggttctggaggagggaagggtctgcaggttccatgggtgacagcctgagatctgtcccttcaacgggctgggctgggtatgtgcctaccgatgacaatgtgtaaataaatgcgtgttcacacccaca

SEQ ID NO: 168751 - DNA, 1416 bp, Artificial Sequence
  derived and/or modified sequence
agtctgtggccgggtggtcgttgctgcgcgccccgagccccgagagccatgcagatgtcctacgccatccggtgcgccttctaccagctgctgctggccgcgctcatgctggtggcgatgctgcagctgctctacctgtcgctgctgtccggactgcacgggcaggaggagcaagaccaatattttgagttctttcccccgtccccacggtccgtggaccaggtcaaggcgcagctccgcaccgcgctggcctctggaggcgtcctggacgctagcggcgattaccgcgtctacaggggcctgctgaagaccaccatggaccccaacgatgtgatcctggccacgcacgccagcgtggacaacctgctgcacctgtcgggtctgctggagcgctgggagggcccgctgtccgtgtcggtgttcgcggccaccaaggaggaggcgcagctggccacggtgctggcctacgcgctgagcagccgggggagtttgccctgctgcggtcctgccaggaggtctttgacaagctagccagggtggcccagcccgggattaattatgcgctgggcaccaatgtctcctaccccaataacctgctgaggaatctggctcgtgagggggccaactatgccctggtgatcgatgtggacatggtgcccagcgaggggctgtggagaggcctgcgggaaatgctggatcagagcaaccagtggggaggcaccgcgctggtggtgcctgccttcgaaatccgaagagcccgccgcatgcccatgaacaaaaacgagctggtgcagctctaccaggttggcgaggtgcggcccttctattatgggttgtgcaccccctgccaggcacccaccaactattcccgctgggtcaacctgccggaagagagcttgctgcggcccgcctacgtggtaccttggcaggacccctgggagccattctacgtggcaggaggcaaggtgcccaccttcgacgagcgctttcggcagtacggcttcaaccgaatcagccaggcctgcgagctgcatgtggcggggtttgattttgaggtcctgaacgaaggtttcttggttcataagggcttcaaagaagcgttgaagttccatccccaaaaggaggctgaaaatcagcacaataagatcctatatcgccagttcaaacaggagttgaaggccaagtaccccaactctccccgacgctgctgagcccttccctcccctaatctgagaagtcagcctcttggctcctcaggccaccatttaggcctgactggggtaagaaatgtcgctccactttacagaggtagctgtggtgttgaaacactggacttggatatggggtgctgggatcgattcctagctttaccactaactagctgtgtggccttgagtaaatcccgttacctctctg

SEQ ID NO: 168752 - protein, 345 aa, Artificial Sequence
  derived and/or modified sequence
MPRIDADLKLDFKDVLLRPKRSSLKSRAEVDLERTFTFRNSKQTYSGIPIIVANMDTVGTFEMAAVMSQHSMFTAIHKHYSLDDWKLFATNHPECLQNVAVSSGSGQNDLEKMTSILEAVPQVKFICLDVANGYSEHFVEFVKLVRAKFPEHTIMAGNVVTGEMVEELILSGADIIKVGVGPGSVCTTRTKTGVGYPQLSAVIECADSAHGLKGHIISDGGCTCPGDVAKAFGAGADFVMLGGMFSGHTECAGEVFERNGRKLKLFYGMSSDTAMNKHAGGVAEYRASEGKTVEVPYKGDVENTILDILGGLRSTCTYVGAAKLKELSRRATFIRVTQQHNTVFS

SEQ ID NO: 168753 - DNA, 1038 bp, Artificial Sequence
  derived and/or modified sequence
atgccccggattgacgcggacttgaagctcgatttcaaagatgtgcttctgcggcccaagagatcttccttgaaaagccgggctgaggtggatttggaacgtacatttacattcaggaactccaagcagacttatagcggaatccccatcattgtggccaacatggataccgttgggacattcgaaatggcagctgtgatgagccagcacagcatgtttaccgccattcacaagcactatagccttgacgattggaaactcttcgctacgaatcaccccgagtgcctccaaaacgtcgccgtgtcctccggatccggtcagaatgatttggaaaaaatgacttccattctcgaagcagtgccgcaggtcaagtttatatgtctggatgtggctaacggatattcagagcactttgttgagtttgtgaaactcgtcagagcaaaattccccgagcacaccatcatggctgggaacgtcgttacgggtgaaatggtggaggaattgatcttatctggggcagacatcattaaagtaggtgttggccctggttcggtttgcactactcggactaagactggcgtcggttatccacagttaagcgccgttatcgaatgcgcggacagtgcacacgggctcaaaggccatattatatctgacggtggatgcacttgtcccggcgacgtggctaaagctttcggagccggggccgactttgtgatgctgggcgggatgttttcagggcataccgaatgtgccggtgaagtttttgaacgaaatggacgcaaactaaagctgttttatgggatgtcctccgacacagctatgaataaacacgctgggggcgtggcagaataccgggccagtgaaggtaagacagttgaagtaccctacaaaggcgacgtggaaaacacaatactggatattctcggagggcttcgatctacgtgtacatatgtgggcgccgctaagttgaaagagcttagtaggcgggccacatttatcagggtcacacagcagcacaacacagtattcagctag

SEQ ID NO: 168754 - DNA, 1515 bp, Artificial Sequence
  derived and/or modified sequence
ccggcccacgccagctcccggccgcggcacagcagccccggcgctccccgcgccgccccgcgcaggcgcccccgccccgccgtcgccgccgccgcagccaggagccgctgcaccatgccccgcatagatgcggacctcaagctcgacttcaaggatgtcctgctccgacctaagcggagcagcctcaagagccgagccgaggtggatcttgaacgcaccttcacgtttcgaaattcaaagcagacctactcagggattcccatcatcgtggccaacatggacactgtgggcacgtttgagatggcagccgtgatgtcacagcactccatgtttacagcaattcataagcattactccctggatgactggaagctctttgccacaaatcacccagaatgcctgcagaatgtagccgtgagttcaggcagtgggcagaatgatctggaaaagatgaccagcatcctggaagctgtgccacaggttaagtttatttgcctggatgtggccaatgggtattcagaacattttgtggaattcgtgaaacttgtccgtgccaaatttcctgaacacaccattatggcagggaacgtggtgacaggagaaatggtagaagagcttattctttccggagcagatatcatcaaagtgggagttggaccaggttctgtgtgcaccacccgcaccaagacgggagtggggtacccccagctgagtgccgtcattgagtgtgccgactctgcccatggcctgaagggccacatcatctctgatggaggctgtacgtgtccaggggatgtcgccaaagcctttggagctggagcagattttgtcatgctgggaggaatgttttcgggtcatacggagtgtgctggagaagtgtttgagaggaacggacggaagctcaagctcttctacgggatgagctctgacaccgccatgaacaagcacgcaggaggagttgctgagtacagagcctctgagggtaagactgtggaagttccttacaaaggagatgtggaaaacactatcctggatattctcgggggactgaggtccacgtgcacctacgtgggggccgccaaactcaaggagctcagcaggagggcaacattcatccgggtgacccagcagcacaacaccgtgttcagctaaccctggggacaaagcagcgtctggctcgagtggaagcgtccaaacctgcttttcccatctccccccaagtctgttccgtcagagcttctggctgctcctgaatggtggaatgctgtgtcctctcttctgtctcctgctgcctggaggcttcggggctctcccgcctgccttctcggggcccagacgcaaggcaccgattgggccaacatcagagccctgctgcccagaactcataacctcattgttcaaaccaacacttgcacctttctctttttctctttctctctccctttctttgtttttctttcttttttaaaagaagatggtttcactttaatataatgctattatcttaagacttaa

SEQ ID NO: 168755 - DNA, 1038 bp, Artificial Sequence
  derived and/or modified sequence
atgcccagaattgatgctgacctgaagctggacttcaaggatgtgctgctgcggcccaagaggagcagcctgaagagcagagctgaggtggacctggagaggaccttcaccttcaggaacagcaagcagacctacagcggcatccccatcatcgtggccaacatggacacagtgggcacctttgagatggctgctgtgatgagccagcacagcatgttcaccgccatccacaagcactacagcctggatgactggaagctgtttgccaccaaccaccctgagtgcctgcagaatgtggccgtgagcagcggcagcggccagaatgacctggagaagatgaccagcatcctggaggccgtgccccaggtgaagttcatctgcctggatgtggccaacggctacagcgagcactttgtggagtttgtgaagctggtgcgggccaagtttcctgagcacaccatcatggctggaaatgtggtgactggagagatggtggaggagctgatcctgtctggagctgacatcatcaaggtgggcgtgggccctggctctgtgtgcaccaccaggaccaagacaggagtgggctacccccagctgtctgctgtgattgaatgtgccgacagcgcccacggcctgaagggccacatcatcagtgatggcggctgcacctgccctggagatgtggccaaggccttcggggccggggctgactttgtgatgctgggcggcatgttcagcggccacacagaatgtgccggggaggtgtttgaaagaaatggaaggaagctgaagctgttctacggcatgagcagtgacacagccatgaacaagcatgctggaggagtggccgagtaccgggccagcgagggcaagacagtggaggtgccctacaagggagatgtggagaacaccatcctggacatcctgggcggcctgcggagcacctgcacctacgtgggcgccgccaagctgaaggagctgagcagaagagccaccttcatccgggtgacccagcagcacaacacagtgttctcctag

SEQ ID NO: 168756 - DNA, 1038 bp, Artificial Sequence
  derived and/or modified sequence
atgccccggatcgacgccgacctgaagctggacttcaaggacgtgctcctgcgtccaaaacgctcctctctgaagagccgcgctgaggtagatttggaacgtacatttacatttcgaaattccaagcagacttatagtggcattcccattatagtcgctaacatggacaccgtgggcaccttcgaaatggccgcggtaatgagccagcactccatgttcacagctattcacaaacactacagcctagatgactggaaactgtttgctacaaatcaccccgaatgcctgcagaacgttgccgttagctccgggagcggacagaatgacctggagaagatgacctcaattctggaggccgtgccacaggttaagtttatctgtttggacgttgcaaatgggtattccgagcatttcgtggaattcgtaaaactggtgagggccaagttcccggaacataccattatggccggcaatgtggtgaccggggaaatggtggaggagctcatcctgtctggagcagacatcataaaagtgggtgttgggcccgggtccgtgtgcacaactcgtacaaagactggcgttgggtacccccagttaagcgccgtgatcgaatgcgccgatagcgctcatggcctgaaaggccacattatcagtgatggggggtgcacctgcccaggtgatgtggcaaaggctttcggggcaggggccgattttgtgatgctcgggggtatgtttagtgggcatacagaatgcgcaggcgaggtatttgagcgcaacggacggaagctgaaactcttttatggaatgtcttcagacactgccatgaataaacacgccggaggcgtggctgagtaccgtgcatcggaaggcaagaccgttgaagtgccttataaaggggacgtcgagaatacgatactggacatcctgggggggctgagaagcacatgcacctatgtgggagccgccaaattgaaagaactgagccgtagagccacttttatacgtgtgactcagcagcacaacactgtcttctcttag

SEQ ID NO: 168757 - DNA, 1038 bp, Artificial Sequence
  derived and/or modified sequence
atgcctaggatcgacgccgacctgaagctggatttcaaggacgtactgctgcggccaaagcgatcgtctctcaagtcacgcgcagaggttgacctggaaaggacctttacctttcggaattccaaacagacatactccggcatccctattattgtggcgaatatggatacagtgggtaccttcgagatggccgcagttatgagccaacactccatgttcactgctatccacaagcattactcgctagacgattggaaactatttgccacaaaccacccagaatgcctccagaacgtggcagtcagcagcgggtctgggcagaacgatttagaaaagatgaccagtatcctagaggctgtgccccaagtaaagttcatttgcttggatgtggccaatggctactctgaacactttgttgagttcgttaaactggttagggctaagttcccagagcatacaattatggctggcaatgttgtgaccggcgagatggtggaagaacttatcctgtccggagcagatattattaaagtaggcgtgggacctggcagcgtttgtactacgaggaccaagacgggcgtaggctatccgcaactttccgcagtgatagagtgtgccgatagcgcccacgggctgaaaggtcatattatcagtgatggcggttgcacatgtccgggagacgtcgctaaggcgttcggtgctggagccgacttcgttatgctgggtgggatgttcagtggccacacggagtgcgcaggagaagtattcgagcggaacggacgtaaattgaagctcttctacggcatgtcttcagatacagccatgaataaacacgcaggtggggtcgcagagtacagggcgagcgaaggcaaaacagtcgaggtaccctacaagggagacgtcgaaaatactattcttgatatcttggggggactcaggtctacctgtacatatgtgggggctgccaaactgaaggagttgtctagaagagcaacttttatccgggtaactcagcaacataatactgtgttttcttag

SEQ ID NO: 168758 - DNA, 1038 bp, Artificial Sequence
  derived and/or modified sequence
atgcccagaatcgacgccgacctgaagctggacttcaaggacgtgctgctgagacccaagagaagcagcctgaagagcagagccgaggtggacctggagagaaccttcaccttcagaaacagcaagcagacctacagcggcatccccatcatcgtggccaacatggacaccgtgggcaccttcgagatggccgccgtgatgagccagcacagcatgttcaccgccatccacaagcactacagcctggacgactggaagctgttcgccaccaaccaccccgagtgcctgcagaacgtggccgtgagcagcggcagcggccagaacgacctggagaagatgaccagcatcctggaggccgtgccccaggtgaagttcatctgcctggacgtggccaacggctacagcgagcacttcgtggagttcgtgaagctggtgagagccaagttccccgagcacaccatcatggccggcaacgtggtgaccggcgagatggtggaggagctgatcctgagcggcgccgacatcatcaaggtgggcgtgggccccggcagcgtgtgcaccaccagaaccaagaccggcgtgggctacccccagctgagcgccgtgatcgagtgcgccgacagcgcccacggcctgaagggccacatcatcagcgacggcggctgcacctgccccggcgacgtggccaaggccttcggcgccggcgccgacttcgtgatgctgggcggcatgttcagcggccacaccgagtgcgccggcgaggtgttcgagagaaacggcagaaagctgaagctgttctacggcatgagcagcgacaccgccatgaacaagcacgccggcggcgtggccgagtacagagccagcgagggcaagaccgtggaggtgccctacaagggcgacgtggagaacaccatcctggacatcctgggcggcctgagaagcacctgcacctacgtgggcgccgccaagctgaaggagctgagcagaagagccaccttcatcagagtgacccagcagcacaacaccgtgttcagctag

SEQ ID NO: 168759 - protein, 225 aa, Artificial Sequence
  derived and/or modified sequence
MEELTAFVSKSFDQKSKDGNGGGGGGGGKKDSITYREVLESGLARSRELGTSDSSLQDITEGGGHCPVHLFKDHVDNDKEKLKEFGTARVAEGIYECKEKREDVKSEDEDGQTKLKQRRSRTNFTLEQLNELERLFDETHYPDAFMREELSQRLGLSEARVQVWFQNRRAKCRKQENQMHKGVILGTANHLDACRVAPYVNMGALRMPFQQMEFCSCRPGWSIMA

SEQ ID NO: 168760 - DNA, 1951 bp, Artificial Sequence
  derived and/or modified sequence
cgcctgcttttgcccgggtcctgagaacaggggctccccacactttttttttttttggttttgttttatttcgtttccgcgcgtctctttctactgcaaacagaaatgggagggtggacaggcgggtaggagcggatcagacgcccaggacgcagcagcccgagtccgcacagggtttgcgggaggtggtgaccgcgctggggacgccaggacgcgaatgaacctccggggcgcgctcggggcctgcgctcagagcttggaaaactggagtttgcttttcctccggccacggagagaacgcgggtaacctgtgtggggggctcgggcgcctgcgcccccctcctgcgcgcgcgctctcccttccaaaaatgggatctttcccccttcgcaccaaggtgtacggacgccaaacagtgatgaaatgagaagaaagccaattgccggcctggggggtgggggagacacagcgtctctgcgtgcgtccgccgcggagcccggagaccagtaattgcaccagacaggcagcgcatggggggctgggcgaggtcgccgcgtataaatagtgagatttccaatggaaaggcgtaaataacagcgctggtgatccacccgcgcgcacgggccgtcctctccgcgcggggagacgcgcgcatccaccagccccggctgctcgccagccccggccccagccatggaagagctcacggcttttgtatccaagtcttttgaccagaaaagcaaggacggtaacggcggaggcggaggcggcggaggtaagaaggattccattacgtaccgggaagttttggagagcggactggcgcgctcccgggagctggggacgtcggattccagcctccaggacatcacggagggcggcggccactgcccggtgcatttgttcaaggaccacgtagacaatgacaaggagaaactgaaagaattcggcaccgcgagagtggcagaagggatttatgaatgcaaagagaagcgcgaggacgtgaagtcggaggacgaggacgggcagaccaagctgaaacagaggcgcagccgcaccaacttcacgctggagcagctgaacgagctcgagcgactcttcgacgagacccattaccccgacgccttcatgcgcgaggagctcagccagcgcctggggctctccgaggcgcgcgtgcaggtttggttccagaaccggagagccaagtgccgcaaacaagagaatcagatgcataaaggcgtcatcttgggcacagccaaccacctagacgcctgccgagtggcaccctacgtcaacatgggagccttacggatgcctttccaacagatggagttttgctcttgtcgcccgggctggagtataatggcatgatctcgactcactgcaacctccgcctcccgagttcaagcgattctcctgcctcagcctcccgagtagctgggattacaggtgcccaccaccatgtcaagataatgtttgtattttcagtagagatggggtttgaccatgttggccaggctggtctcgaactcctgacctcaggtgatccacccgccttagcctcccaaagtgctgggatgacaggcgtgagcccctgcgcccggcctttgtaactttatttttaattttttttttttttttaagaaagacagagtcttgctctgtcacccaggctggagcacactggtgcgatcatagctcactgcagcctcaaactcctgggctcaagcaatcctcccacctcagcctcctgagtagctgggactacaggcacccaccaccacacccagctaatttttttgatttttactagagacgggatcttgctttgctgctgaggctggtcttgagctcctgagctccaaagatcctctcacctccacctcccaaagtgttagaattacaagcatgaaccactgcccgtggtctccaaaaaaaggactgttacgtgga

SEQ ID NO: 168761 - DNA, 375 bp, Artificial Sequence
  derived and/or modified sequence
atggtgcgggccacccggggctactgggaggccaagggcaagtggcagacatggttgcgctttcgcaagaagagctcgaagtgtagggaggctcgcacttttccttcattcaaattcctcaaagggtctcagagctccttcagcagcctattacagatgcctcttcagagtttcacagcagctcatacctatagacggagaaatagtccaagccagaaagatgatcgcgcactgggggctggcgtgcccctagtactggccgagagtttagacgcatgtgaggtcaagcccgatctgggtaaagcagccctttggactctgttagcagtcccccatacccagctgggatttttacgaaaacagcacaggctgtag

SEQ ID NO: 168762 - DNA, 678 bp, Artificial Sequence
  derived and/or modified sequence
atggaggaactcaccgcatttgtgagcaagtcgttcgaccagaagtccaaggacggaaatggcggcggaggtggtggaggaggtaagaaggatagcattacataccgggaggtgttagaatcaggcctcgcaaggagtagagagctggggactagcgacagctccctccaggacataacagagggtggtggccattgtccagttcacttatttaaagaccacgtggacaacgataaggagaagctcaaggagtttggtaccgccagggttgcggaggggatttacgagtgtaaggaaaagagggaggacgtgaaatctgaggatgaggatggtcagacaaaattgaaacagcgtaggagcagaacaaactttactctggagcagctcaacgaactggaacggctgttcgacgaaacccactatcctgacgcattcatgagagaagagctgagccaaaggctcggcctgtcagaggcgcgagtgcaggtttggtttcagaaccggcgcgcgaagtgtagaaaacaggagaatcaaatgcacaagggggtcatactcgggactgctaatcatttggatgcttgccgggtggccccatacgtgaacatgggtgctctccgaatgccattccagcagatggagttttgtagctgccgaccaggctggagcattatggcatag

SEQ ID NO: 168763 - DNA, 678 bp, Artificial Sequence
  derived and/or modified sequence
atggaggagttgaccgcctttgtttcaaagtcctttgatcagaagtctaaggacggaaacggcgggggcggtggcggcgggggaaagaaagactctataacctatcgcgaggtcctggaaagcggactagcccgcagcagagagctcggaacttccgattcctccctccaagacatcacagagggtgggggccactgcccagtccatcttttcaaagatcatgtagataacgataaggagaagctaaaggaattcggcaccgctcgcgttgccgaggggatctacgagtgtaaagaaaagcgcgaagacgtgaagtctgaagacgaggacggccagacgaagcttaagcaacggcggagtcgaacaaacttcacccttgaacagttaaacgagcttgaacgactgtttgatgagacacactatcctgacgctttcatgcgtgaggagttgagccaacgcttgggtctgagcgaggcgagggttcaggtatggtttcaaaaccgacgtgccaaatgccggaagcaggaaaaccagatgcataagggcgtaatcctgggaacagcgaaccacctcgacgcttgcagagtcgcaccatatgtcaatatgggtgcgctgcgaatgcccttccagcagatggagttttgctcctgcaggcccggatggtctataatggcctag

SEQ ID NO: 168764 - DNA, 678 bp, Artificial Sequence
  derived and/or modified sequence
atggaggagctgacagcctttgtgtccaagagctttgaccagaagagcaaggatggaaatggaggcggcggcggcggcggcggcaagaaggacagcatcacctaccgggaggtgctggagagcggcctggcccggagccgggagctgggcaccagtgacagcagcctgcaggacatcacagagggcggcggccactgccctgtgcacctgttcaaggaccacgtggacaatgacaaggagaagctgaaggagtttggaacagcccgggtggccgagggcatctatgagtgcaaggagaagcgggaggatgtgaagtcagaagatgaagatggccagaccaagctgaagcagaggaggagcaggaccaacttcaccctggagcagctgaatgagctggagcggctgtttgatgagacccactacccagatgccttcatgagggaggagctgagccagaggctgggcctgtctgaggcccgggtgcaggtgtggttccagaacagaagagccaagtgcaggaagcaggagaaccagatgcacaagggcgtcatcctgggcacagccaaccacctggatgcctgccgggtggccccctacgtgaacatgggcgccctgaggatgcccttccagcagatggagttctgcagctgcaggcctggctggagcatcatggcctag

SEQ ID NO: 168765 - DNA, 678 bp, Artificial Sequence
  derived and/or modified sequence
atggaggagctgaccgccttcgtgagcaagagcttcgaccagaagagcaaggatgggaacgggggtggcggcggaggaggggggaaaaaggatagcatcacctacagagaagtcctcgagagtggcctggcacgcagtagggaattgggtaccagtgactcctccctccaggacattacggaggggggaggccactgccctgtccatctgtttaaggaccatgtcgacaacgataaggagaagctgaaggaattcggcaccgccagagtggcggagggaatatacgagtgtaaggaaaagagagaagatgtgaaaagcgaggacgaggacgggcaaaccaagctaaaacagcgaaggagcagaaccaacttcacacttgaacagttgaacgaactcgagaggctttttgatgagacgcactaccctgatgccttcatgagagaagagctgtctcaacgcctggggctaagtgaggcccgcgtacaggtatggttccagaacagacgggctaagtgtagaaagcaggaaaaccaaatgcacaagggcgtaatcctggggaccgccaatcatctggatgcttgtcgtgtagccccctacgtgaatatgggggctctgcggatgcctttccagcaaatggagttttgcagttgccggcctggctggtcaattatggcctag

SEQ ID NO: 168766 - DNA, 678 bp, Artificial Sequence
  derived and/or modified sequence
atggaggagctgaccgccttcgtgagcaagagcttcgaccagaagagcaaggatgggaacggggggggtggaggtggcggaggaaaaaaagattcaattacctaccgggaggtattagaatctggattagcaaggagccgtgagctgggcacttcagatagctccctccaggacatcactgaagggggtggccactgccccgtgcacctgtttaaagaccatgtggacaatgacaaggaaaagcttaaggagttcgggaccgctcgcgtcgccgaaggcatatacgagtgtaaagaaaagcgagaggatgtgaaatctgaagatgaagatggccagactaagctgaagcaacggaggtcccggaccaatttcacattggagcagttgaacgagctcgagcgactattcgatgaaacacattatccggatgcctttatgagggaggaattgtctcagcgcctggggctgagtgaggctagggttcaggtgtggtttcagaacagacgggccaaatgtcgcaagcaggaaaaccagatgcacaagggcgtgatcctgggcaccgcaaatcatctggacgcttgtcgggtcgctccttacgtaaatatgggggccctgcggatgcctttccagcagatggagttttgctcttgtcgcccaggctggtctatcatggcatag

SEQ ID NO: 168767 - DNA, 678 bp, Artificial Sequence
  derived and/or modified sequence
atggaggaattgacagcttttgtgagtaaatcctttgaccaaaagagtaaagatgggaatggagggggtggcggaggtggaggcaagaaggactccatcacataccgggaggtgttagagagcggtttagccagatctagagagctgggaacttctgacagctcattgcaggacattacagaaggcggaggtcattgccccgtccatctgttcaaggatcacgtcgacaatgacaaggaaaaactgaaggaattcgggaccgccagggtggctgaaggcatttatgagtgcaaggagaaacgggaggatgtgaaatcagaggatgaggacggccagactaaacttaaacaacgtagaagcagaaccaattttactctcgagcaactcaacgagttagaaaggcttttcgatgagacacactaccccgatgcttttatgcgggaggaattatcacagagattgggtttatctgaagcccgagtgcaggtatggtttcaaaacagacgggcaaaatgtagaaaacaggaaaaccaaatgcacaagggagtaatactgggtacagcaaaccatttggacgcctgccgagttgcaccgtatgtgaatatgggtgccctgagaatgccattccagcagatggaattttgctcttgtaggcctgggtggagtatcatggcttag

SEQ ID NO: 168768 - DNA, 678 bp, Artificial Sequence
  derived and/or modified sequence
atggaggagctaactgcgttcgtatcaaagtcctttgaccaaaagagcaaagatggaaacggcggaggtggcggtggcggtggcaaaaaagacagcataacataccgggaagtgctggagtccggtcttgctcgatctcgggagctgggcacgagtgatagtagcctgcaagatattaccgaaggaggtggccattgccccgtacacttattcaaggaccacgtggacaacgacaaagagaagctcaaagaatttggaaccgcccgagtcgcagagggcatctacgagtgcaaagaaaagagggaggacgtgaagtcagaagacgaagacggacaaacaaaacttaagcaacggcgttcaaggacaaacttcactttggagcagctgaatgagttagaaaggctgttcgacgagactcattaccctgacgcgttcatgcgggaggagctgtcacagcgacttgggctctccgaggcaagagttcaggtttggttccagaataggagagccaagtgccgcaagcaggaaaaccagatgcataagggggtgattttaggtacagccaaccacctggatgcatgtcgagttgctccatacgttaacatgggcgcactgcgaatgccctttcagcagatggaattctgctcctgccggccaggctggtctatcatggcttag

SEQ ID NO: 168769 - DNA, 1351 bp, Artificial Sequence
  derived and/or modified sequence
gtgatccacccgcgcgcacgggccgtcctctccgcgcggggagacgcgcgcatccaccagccccggctgctcgccagccccggccccagccatggaagagctcacggcttttgtatccaagtcttttgaccagaaaagcaaggacggtaacggcggaggcggaggcggcggaggtaagaaggattccattacgtaccgggaagttttggagagcggactggcgcgctcccgggagctggggacgtcggattccagcctccaggacatcacggagggcggcggccactgcccggtgcatttgttcaaggaccacgtagacaatgacaaggagaaactgaaagaattcggcaccgcgagagtggcagaagggatttatgaatgcaaagagaagcgcgaggacgtgaagtcggaggacgaggacgggcagaccaagctgaaacagaggcgcagccgcaccaacttcacgctggagcagctgaacgagctcgagcgactcttcgacgagacccattaccccgacgccttcatgcgcgaggagctcagccagcgcctggggctctccgaggcgcgcgtgcaggtttggttccagaaccggagagccaagtgccgcaaacaagagaatcagatgcataaaggcgtcatcttgggcacagccaaccacctagacgcctgccgagtggcaccctacgtcaacatgggagccttacggatgcctttccaacagatggagttttgctcttgtcgcccgggctggagtataatggcatgatctcgactcactgcaacctccgcctcccgagttcaagcgattctcctgcctcagcctcccgagtagctgggattacaggtgcccaccaccatgtcaagataatgtttgtattttcagtagagatggggtttgaccatgttggccaggctggtctcgaactcctgacctcaggtgatccacccgccttagcctcccaaagtgctgggatgacaggcgtgagcccctgcgcccggcctttgtaactttatttttaattttttttttttttttaagaaagacagagtcttgctctgtcacccaggctggagcacactggtgcgatcatagctcactgcagcctcaaactcctgggctcaagcaatcctcccacctcagcctcctgagtagctgggactacaggcacccaccaccacacccagctaatttttttgatttttactagagacgggatcttgctttgctgctgaggctggtcttgagctcctgagctccaaagatcctctcacctccacctcccaaagtgttagaattacaagcatgaaccactgcccgtggtctccaaaaaaaggactgttacgtgga

SEQ ID NO: 168770 - DNA, 678 bp, Artificial Sequence
  derived and/or modified sequence
atggaggagctgaccgccttcgtgagcaagagcttcgaccagaagagcaaggacggcaacggcggcggcggcggcggcggcggcaagaaggacagcatcacctacagagaggtgctggagagcggcctggccagaagcagagagctgggcaccagcgacagcagcctgcaggacatcaccgagggcggcggccactgccccgtgcacctgttcaaggaccacgtggacaacgacaaggagaagctgaaggagttcggcaccgccagagtggccgagggcatctacgagtgcaaggagaagagagaggacgtgaagagcgaggacgaggacggccagaccaagctgaagcagagaagaagcagaaccaacttcaccctggagcagctgaacgagctggagagactgttcgacgagacccactaccccgacgccttcatgagagaggagctgagccagagactgggcctgagcgaggccagagtgcaggtgtggttccagaacagaagagccaagtgcagaaagcaggagaaccagatgcacaagggcgtgatcctgggcaccgccaaccacctggacgcctgcagagtggccccctacgtgaacatgggcgccctgagaatgcccttccagcagatggagttctgcagctgcagacccggctggagcatcatggcctag

SEQ ID NO: 168771 - protein, 331 aa, Artificial Sequence
  derived and/or modified sequence
MEELTAFVSKSFDQKVKEKKEAITYREVLESGPLRGAKEPTGCTEAGRDDRSSPAVRAAGGGGGGGGGGGGGGGGGGVGGGGAGGGAGGGRSPVRELDMGAAERSREPGSPRLTEVSPELKDRKEDAKGMEDEGQTKIKQRRSRTNFTLEQLNELERLFDETHYPDAFMREELSQRLGLSEARVQVWFQNRRAKCRKQENQLHKGVLIGAASQFEACRVAPYVNVGALRMPFQQDSHCNVTPLSFQVQAQLQLDSAVAHAHHHLHPHLAAHAPYMMFPAPPFGLPLATLAADSASAASVVAAAAAAKTTSKNSSIADLRLKAKKHAAALGL

SEQ ID NO: 168772 - DNA, 996 bp, Artificial Sequence
  derived and/or modified sequence
atggaggaattgaccgcattcgtgtcaaaatcctttgaccaaaaagttaaagagaagaaggaggccatcacttaccgtgaagtgctggagagcggccccctgcgaggcgcgaaggaaccaactggatgtaccgaagccggacgcgacgatcgcagtagcccagcggtgagagccgcgggcggcggcggcgggggaggcggcggcggcggcggtgggggggggggaggaggggtgggcggagggggagcaggcggtggtgcgggcggagggaggtcccctgttcgcgaactggatatgggtgcagcggagcggagcagggagcccggctctccacgcctgacggaggtcagcccggagctgaaggacagaaaggaggacgctaagggaatggaagatgaagggcagaccaagatcaaacaacgcagatcccgaaccaattttaccctcgaacagctgaacgagctggaaaggctattcgacgagacccattatcccgatgcctttatgcgcgaggagctgtcccagcggctcggccttagtgaggccagagtacaggtctggtttcagaatcggcgggcaaagtgccgtaaacaggagaaccaacttcataagggagtactcatcggcgctgcctcacaattcgaggcctgccgcgtggccccgtatgtgaacgtgggcgcactccgcatgccctttcagcaggattctcattgcaatgtgacgcccttaagctttcaggtacaagcgcagctgcagctggacagcgcagtggcacacgctcaccaccatttacacccacacctggcagctcacgcaccttatatgatgttccccgcaccgcccttcggactgcccctggcaactttggccgccgattcggcctcagctgcctccgtagtagcagctgcggcggcagctaaaacaacatccaagaattcctcaatcgcagacctgcgcctcaaggcaaagaaacatgcagcagcgcttgggctgtag

SEQ ID NO: 168773 - DNA, 996 bp, Artificial Sequence
  derived and/or modified sequence
atggaggagctgacagcctttgtgtccaagagctttgaccagaaggtgaaggagaagaaggaggccatcacctaccgggaggtgctggagagcggccccctgcggggggccaaggagcccaccggctgcacagaggccggcagagatgacaggagcagccctgctgtgcgggctgctgggggcggcggcggcggcggcggcggcggcggcggcggcggcggcggcggcggcgtgggcggcggcggggccggcggcggggccggcggcggccgcagccctgtgcgggagctggacatgggcgctgctgagaggagccgggagcccggcagcccccggctgacagaggtgtccccagagctgaaggacagaaaagaagatgccaagggcatggaggatgagggccagaccaagatcaagcagaggaggagcaggaccaacttcaccctggagcagctgaatgagctggagcggctgtttgatgagacccactacccagatgccttcatgagggaggagctgagccagaggctgggcctgtctgaggcccgggtgcaggtgtggttccagaacagaagagccaagtgcaggaagcaggagaaccagctgcacaagggcgtgctgattggagctgccagccagtttgaggcctgccgggtggccccctacgtgaatgtgggcgccctgaggatgcccttccagcaggacagccactgcaatgtgacccccctgtccttccaggtgcaggcccagctgcagctggacagcgctgtggcccacgcccaccaccacctgcacccccacctggccgcccacgccccctacatgatgtttcctgccccacccttcggcctgcccctggccaccctggccgctgacagcgccagcgctgcctctgtggtggccgctgctgctgctgccaagaccaccagcaagaacagcagcattgctgacctgcggctgaaggccaagaagcacgccgccgccctgggcctgtag

SEQ ID NO: 168774 - DNA, 996 bp, Artificial Sequence
  derived and/or modified sequence
atggaggagctgaccgccttcgtgagcaagagcttcgaccagaaggtaaaggagaagaaggaggcaattacgtaccgcgaggttctggagtctggccccctacgaggggccaaggagccaaccggttgcaccgaagccggtagggacgacagaagttcacccgccgttagagcagcgggcggtggagggggagggggtggtggtggtggcggaggtggcggggggggcggagtgggcggaggcggggccggtggcggggccggaggcgggcggtcaccggtgcgggaactcgatatgggggcggctgagcggagtagagaaccaggttcccctagactgacagaggtatctcctgagctgaaggacagaaaagaggatgcaaagggcatggaagacgagggacagactaaaattaagcagcgcagaagccgcacgaatttcaccctcgaacagctgaacgaactggagcgtctgttcgatgagacgcactatccagacgcgtttatgcgggaagagctttcacaacgtcttggcctcagcgaagctcgggtacaggtctggtttcagaaccggagagcaaagtgtcgcaaacaagagaaccagcttcataagggcgtactaataggggcggcctcccagtttgaggcctgtcgggtggctccgtatgtgaacgtgggagccctgaggatgccattccagcaggattcacattgcaatgttacacctctgagctttcaggtccaggcccagcttcagcttgattctgcagtggcgcatgcccatcatcatctgcacccacatcttgccgctcacgcaccctatatgatgttccccgccccgcctttcgggctgcccttagctaccctagcagcagatagtgcttctgccgcatcggtggtggcggctgccgctgctgccaagaccacatctaaaaatagttctatagccgacttgaggctgaaggcgaagaagcatgctgcagcactggggctgtag

SEQ ID NO: 168775 - DNA, 996 bp, Artificial Sequence
  derived and/or modified sequence
atggaggaactcactgccttcgtgagcaaaagctttgatcagaaagtcaaggagaagaaggaggccatcacctacagagaggtgttagagtcaggccctctgcggggtgcgaaggagccaaccggatgcacagaagcaggtcgcgatgatcgttcgtcacctgccgtgagggccgctgggggaggcggagggggaggaggcggaggaggaggcggagggggaggaggcggtgtcggtggtggaggggctggcggtggcgctggtgggggacggagtccagtcagggaactggacatgggagctgctgagaggagtcgcgaacctggcagtcctcgtttgaccgaagtgtcccccgaacttaaggatcggaaagaggatgcaaaagggatggaagacgagggccagactaaaattaagcagagaaggagtcgaacgaatttcacactggagcagctgaatgaactcgaacgattgttcgatgaaacacactatcccgacgcctttatgagagaggaactctcacagcggctggggctgtcggaagcacgtgtgcaggtgtggttccagaaccgcagagctaaatgtaggaagcaggagaaccaactgcacaaaggagtgctgatcggcgcagcttcacaatttgaggcctgtagagtagcaccctacgtgaacgtgggggcactgcgtatgccttttcaacaagacagtcactgtaatgttactccactgtccttccaggtccaggcacagctgcaactcgattcggctgtcgcacatgctcaccatcatttacacccccacctagccgcacatgcgccatacatgatgttccccgcaccgccttttgggctccctctggccaccctcgctgctgatagcgcaagcgccgcaagcgtggttgccgctgctgctgccgctaagaccacatctaaaaacagcagtattgccgacctccggttgaaggcaaagaaacacgcggcagcactgggtttatag

SEQ ID NO: 168776 - DNA, 2422 bp, Artificial Sequence
  derived and/or modified sequence
ccgagttgcgaggggaggtaatttactcaaaacaagaggccgccgttaggaagtataaatagtgggacttcaagcgcagcgtcgctatcagatctgaactctccgcaggaagaattgtcaaagatcttaacattgaacaagcgcgctccggcagggaagcatcagttcccatttccctccggcagcccccgccccttctcttctcctcctcctcctccctctcctcttcacccttctccccctcttcctcttcttcctcctcctcctcttcttacttctttttctccttctacttctcctcctctttcttctttcttctcctctttttcttcttctttctcctcctccctctcctcccccacctcctgtcccattgatgtgttattattgggggggctggagcagtaaaaaaagaagaaggaaaaaaagagcggggctctgctggcagaggttgagcgccgggctgacgtgcggcggcgatggaagaacttacggcgttcgtctccaagtcttttgaccagaaagtgaaggagaagaaggaggcgatcacgtaccgggaggtgctggagagcgggccgctgcgcggggccaaggagccgaccggctgcaccgaggcgggccgcgacgaccgcagcagcccggcagtccgggcggccggcggaggcggcggcggaggaggcggaggcggcggcggaggaggcggaggaggtgtaggaggaggaggagcaggcggaggagctggaggagggcgctctcccgtccgggagctggacatgggcgccgccgagagaagcagggagccgggcagcccgcgactgacggaggtgtccccggagctgaaagatcgcaaagaggatgcgaaagggatggaggacgaaggccagaccaaaatcaagcagaggcgaagtcggaccaatttcaccctggaacaactcaatgagctggagaggctttttgacgagacccactatcccgacgccttcatgcgagaggaactgagccagcgactgggcctgtcggaggcccgagtgcaggtttggtttcaaaatcgaagagctaaatgtagaaaacaagaaaatcaactccataaaggtgttctcataggggccgccagccagtttgaagcttgtagagtcgcaccttatgtcaacgtaggtgctttaaggatgccatttcagcaggatagtcattgcaacgtgacgcccttgtcctttcaggttcaggcgcagctgcagctggacagcgctgtggcgcacgcgcaccaccacctgcatccgcacctggccgcgcacgcgccctacatgatgttcccagcaccgcccttcggactgccgctcgccacgctggccgcggattcggcttccgccgcctcggtagtggcggccgcagcagccgccaagaccaccagcaagaactccagcatcgccgatctcagactgaaagccaaaaagcacgccgcagccctgggtctgtgacgccaacgccagcaccaatgtcgcgcctgtcccgcggcactcagcctgcacgccctccgcgccccgctgcttctccgttacccctttgagacctcgggagccggccctcttcccgcctcactgaccatccctcgtcccctatcgcatcttggactcggaaagccagactccacgcaggaccagggatctcacgaggcacgcaggctccgtggctcctgcccgttttcctactcgagggcctagaattgggttttgtaggagcgggtttgggggagtctggagagagactggacaggggagtgctggaaccgcggagtttggctcaccgcaaagctgcaacgatggactcttgcatagaaaaaaaaatcttgttaacaatgaaaaaatgagcaaacaaaaaaatcgaaagacaaacgggagagaaaaagaggaagggaacttatttcttaactgctatttggcagaagctgaaattggagaaccaaggagcaaaaacaaattttaaaattaaagtattttatacatttaaaaatatggaaaaacaacccagacgattctcgagagactggggggagttaccaacttaaatgtgtgtttttaaaaatgcgctaagaaggcaaagcagaaagaagaggtatacttatttaaaaaactaagatgaaaaaagtgcgcagctgggaagttcacaggttttgaaactgacctttttctgcgaagttcacgttaacacgagaaatttgatgagagaggcgggcctccttttacgttgaatcagatgctttgagtttaaacccaccatgtatggaagagcaagaaaagagaaaatattaaaacgaggagagagaaaaataatattaacacaaaaaaatgccacagacaatgatttctctgagaaattattatggcaaaactgtctggactgctgacagtaaattccggtttgcatg

SEQ ID NO: 168777 - DNA, 996 bp, Artificial Sequence
  derived and/or modified sequence
atggaggagctgaccgccttcgtgagcaagagcttcgaccagaaggtgaaggagaagaaggaggccatcacctacagagaggtgctggagagcggccccctgagaggcgccaaggagcccaccggctgcaccgaggccggcagagacgacagaagcagccccgccgtgagagccgccggcggcggcggcggcggcggcggcggcggcggcggcggcggcggcggcggcggcgtgggcggcggcggcgccggcggcggcgccggcggcggcagaagccccgtgagagagctggacatgggcgccgccgagagaagcagagagcccggcagccccagactgaccgaggtgagccccgagctgaaggacagaaaggaggacgccaagggcatggaggacgagggccagaccaagatcaagcagagaagaagcagaaccaacttcaccctggagcagctgaacgagctggagagactgttcgacgagacccactaccccgacgccttcatgagagaggagctgagccagagactgggcctgagcgaggccagagtgcaggtgtggttccagaacagaagagccaagtgcagaaagcaggagaaccagctgcacaagggcgtgctgatcggcgccgccagccagttcgaggcctgcagagtggccccctacgtgaacgtgggcgccctgagaatgcccttccagcaggacagccactgcaacgtgacccccctgagcttccaggtgcaggcccagctgcagctggacagcgccgtggcccacgcccaccaccacctgcacccccacctggccgcccacgccccctacatgatgttccccgccccccccttcggcctgcccctggccaccctggccgccgacagcgccagcgccgccagcgtggtggccgccgccgccgccgccaagaccaccagcaagaacagcagcatcgccgacctgagactgaaggccaagaagcacgccgccgccctgggcctgtag

SEQ ID NO: 168778 - protein, 3703 aa, Artificial Sequence
  derived and/or modified sequence
MEGCDSPVVSGKDNGCGIPQHQQWTELNSTHLPDKPSSMEQSTGESHGPLDSLRAPFNERLAESTASAGPPSEPASKEVTCNECSASFASLQTYMEHHCPSARPPPPLREESASDTGEEGDEESDVENLAGEIVYQPDGSAYIVESLSQLTQGGGACGSGSGSGPLPSLFLNSLPGAGGKQGDPSCAAPVYPQIINTFHIASSFGKWFEGPDQAFPNTSALAGLSPVLHSFRVFDVRHKSNKDYLNSDGSAKSSCVSKDVPNNVDLSKFDGFVLYGKRKPILMCFLCKLSFGYVRSFVTHAVHDHRMTLSEDERKILSNKNISAIIQGIGKDKEPLVSFLEPKNKNFQHPLVSTANLIGPGHSFYGKFSGIRMEGEEALPAGSAAGPEQPQAGLLTPSTLLNLGGLTSSVLKTPITSVPLGPLASSPTKSSEGKDSGAAEGEKQEVGDGDCFSEKVEPAEEEAEEEEEEEEAEEEEEEEEEEEEEEEDEGCKGLFPSELDEELEDRPHEEPGAAAGSSSKKDLALSNQSISNSPLMPNVLQTLSRGTASTSSNSASSFVVFDGANRRNRLSFNSEGVRANVAEGGRRLDFADESANKDNATAPEPNESTEGDDGGFVPHHQHAGSLCELGVGECPSGSGVECPKCDTVLGSSRSLGGHMTMMHSRNSCKTLKCPKCNWHYKYQQTLEAHMKEKHPEPGGSCVYCKSGQPHPRLARGESYTCGYKPFRCEVCNYSTTTKGNLSIHMQSDKHLNNMQNLQNGGGEQVFSHTAGAAAAAVAAAAAAANISSSCGAPSPTKPKTKPTWRCEVCDYETNVARNLRIHMTSEKHMHNMMLLQQNMTQIQHNRHLGLGSLPSPAEAELYQYYLAQNMNLPNLKMDSAASDAQFMMSGFQLDPAGPMAAMTPALVGGEIPLDMRLGGGQLVSEELMNLGESFIQTNDPSLKLFQCAVCNKFTTDNLDMLGLHMNVERSLSEDEWKAVMGDSYQCKLCRYNTQLKANFQLHCKTDKHVQKYQLVAHIKEGGKANEWRLKCVAIGNPVHLKCNACDYYTNSLEKLRLHTVNSRHEASLKLYKHLQQHESGVEGESCYYHCVLCNYSTKAKLNLIQHVRSMKHQRSESLRKLQRLQKGLPEEDEDLGQIFTIRRCPSTDPEEAIEDVEGPSETAADPEELAKDQEGGASSSQAEKELTDSPATSKRISFPGSSESPLSSKRPKTAEEIKPEQMYQCPYCKYSNADVNRLRVHAMTQHSVQPMLRCPLCQDMLNNKIHLQLHLTHLHSVAPDCVEKLIMTVTTPEMVMPSSMFLPAAVPDRDGNSNLEEAGKQPETSEDLGKNILPSASTEQSGDLKPSPADPGSVREDSGFICWKKGCNQVFKTSAALQTHFNEVHAKRPQLPVSDRHVYKYRCNQCSLAFKTIEKLQLHSQYHVIRAATMCCLCQRSFRTFQALKKHLETSHLELSEADIQQLYGGLLANGDLLAMGDPTLAEDHTIIVEEDKEEESDLEDKQSPTGSDSGSVQEDSGSEPKRALPFRKGPNFTMEKFLDPSRPYKCTVCKESFTQKNILLVHYNSVSHLHKLKRALQESATGQPEPTSSPDNKPFKCNTCNVAYSQSSTLEIHMRSVLHQTKARAAKLEAASGSSNGTGNSSSISLSSSTPSPVSTSGSNTFTTSNPSSAGIAPSSNLLSQVPTESVGMPPLGNPIGANIASPSEPKEANRKKLADMIASRQQQQQQQQQQQQQQQQQQQAQTLAQAQAQVQAHLQQELQQQAALIQSQLFNPTLLPHFPMTTETLLQLQQQQHLLFPFYIPSAEFQLNPEVSLPVTSGALTLTGTGPGLLEDLKAQVQVPQQSHQQILPQQQQNQLSIAQSHSALLQPSQHPEKKNKLVIKEKEKESQRERDSAEGGEGNTGPKETLPDALKAKEKKELAPGGGSEPSMLPPRIASDARGNATKALLENFGFELVIQYNENKQKVQKKNGKTDQGENLEKLECDSCGKLFSNILILKSHQEHVHQNYFPFKQLERFAKQYRDHYDKLYPLRPQTPEPPPPPPPPPPPPLPAAPPQPASTPAIPASAPPITSPTIAPAQPSVPLTQLSMPMELPIFSPLMMQTMPLQTLPAQLPPQLGPVEPLPADLAQLYQHQLNPTLLQQQNKRPRTRITDDQLRVLRQYFDINNSPSEEQIKEMADKSGLPQKVIKHWFRNTLFKERQRNKDSPYNFSNPPITSLEELKIDSRPPSPEPPKQEYWGSKRSSRTRFTDYQLRVLQDFFDANAYPKDDEFEQLSNLLNLPTRVIVVWFQNARQKARKNYENQGEGKDGERRELTNDRYIRTSNLNYQCKKCSLVFQRIFDLIKHQKKLCYKDEDEEGQDDSQNEDSMDAMEILTPTSSSCSTPMPSQAYSAPAPSANNTASSAFLQLTAEAEELATFNSKTEAGDEKPKLAEAPSAQPNQTQEKQGQPKPELQQQEQPEQKTNTPQQKLPQLVSLPSLPQPPPQAPPPQCPLPQSSPSPSQLSHLPLKPLHTSTPQQLANLPPQLIPYQCDQCKLAFPSFEHWQEHQQLHFLSAQNQFIHPQFLDRSLDMPFMLFDPSNPLLASQLLSGAIPQIPASSATSPSTPTSTMNTLKRKLEEKASASPGENDSGTGGEEPQRDKRLRTTITPEQLEILYQKYLLDSNPTRKMLDHIAHEVGLKKRVVQVWFQNTRARERKGQFRAVGPAQAHRRCPFCRALFKAKTALEAHIRSRHWHEAKRAGYNLTLSAMLLDCDGGLQMKGDIFDGTSFSHLPPSSSDGQGVPLSPVSKTMELSPRTLLSPSSIKVEGIEDFESPSMSSVNLNFDQTKLDNDDCSSVNTAITDTTTGDEGNADNDSATGIATETKSSSAPNEGLTKAAMMAMSEYEDRLSSGLVSPAPSFYSKEYDNEGTVDYSETSSLADPCSPSPGASGSAGKSGDSGDRPGQKRFRTQMTNLQLKVLKSCFNDYRTPTMLECEVLGNDIGLPKRVVQVWFQNARAKEKKSKLSMAKHFGINQTSYEGPKTECTLCGIKYSARLSVRDHIFSQQHISKVKDTIGSQLDKEKEYFDPATVRQLMAQQELDRIKKANEVLGLAAQQQGMFDNTPLQALNLPTAYPALQGIPPVLLPGLNSPSLPGFTPSNTALTSPKPNLMGLPSTTVPSPGLPTSGLPNKPSSASLSSPTPAQATMAMGPQQPPQQQQQQQQPQVQQPPPPPAAQPPPTPQLPLQQQQQRKDKDSEKVKEKEKAHKGKGEPLPVPKKEKGEAPTATAATISAPLPTMEYAVDPAQLQALQAALTSDPTALLTSQFLPYFVPGFSPYYAPQIPGALQSGYLQPMYGMEGLFPYSPALSQALMGLSPGSLLQQYQQYQQSLQEAIQQQQQRQLQQQQQQKVQQQQPKASQTPVPPGAPSPDKDPAKESPKPEEQKNTPREVSPLLPKLPEEPEAESKSADSLYDPFIVPKVQYKLVCRKCQAGFSDEEAARSHLKSLCFFGQSVVNLQEMVLHVPTGGGGGGSGGGGGGGGGGGGGGSYHCLACESALCGEEALSQHLESALHKHRTITRAARNAKEHPSLLPHSACFPDPSTASTSQSAAHSNDSPPPPSAAAPSSASPHASRKSWPQVVSRASAAKPPSFPPLSSSSTVTSSSCSTSGVQPSMPTDDYSEESDTDLSQKSDGPASPVEGPKDPSCPKDSGLTSVGTDTFRL

SEQ ID NO: 168779 - DNA, 16064 bp, Artificial Sequence
  derived and/or modified sequence
ccgcgcgtccctgtgcgtccccgggtccctgcgggcgggcgggcgcggtcgccgccgagcaacccggcctgcgcccggcacgactgtagatgtcaggctttgcccggggagccgagcggcagcggggctgtgagtttcaaattaaccttccgctttgttgctgtgtaatgtggatccccgaaggccccccgccccgcccgccccccttccccgggcggtgcgcgctgcaaactgcgagttgggcttcatttacataaagcgattccgggcgggcggcggcagaggaggaggcggcggcggcgggcaggccggggacccggacgccagcgccgcgccccgtgggtgaatccccgccgcgtcccggggacctccctccggggacgggccgaccgccagccctgccgccaccatgagctcccctcccctgtctccgggccccctgctcctgaccagagccacctccgagtcctggggccagcgggaggtggggagcatgccgcctggggtgggtgagctcggggctcgggtgccactggaatttcccgttgttgcgcatggcggcgcggcccccggacctgcaagtgccgcctccctccggaggtgcgcggaggcttggtgtgccaggtccgagcctccgtactgggtgcaatgaaagctccacgcaggccttaccatggaaggctgtgactcgcccgtcgtctcggggaaggacaatgggtgcggtatccctcagcaccagcaatggactgaactcaacagcacccacctccctgacaaacccagtagcatggagcagtccacaggcgagagccacgggcccttggacagcctgagggcccccttcaatgagcgcctcgcggagagcaccgcgtcggccgggcccccctccgagcccgccagcaaggaggtcacctgcaacgaatgttcggcctcctttgccagcctccagacctacatggagcaccactgccccagcgcgcgccccccgccacccctgagagaggagagcgccagcgacaccggtgaggagggggacgaggagagtgacgtggagaacctggccggggagatcgtctaccagccggacggctccgcgtacattgtggagagcctgagccagctgacccagggcgggggcgcctgtgggagtggcagtggcagtgggcctctcccctcgcttttcctgaactctctccctggcgcggggggcaagcaaggggacccttcgtgtgctgcacccgtgtacccgcagatcatcaacactttccacatagcctcatccttcgggaaatggtttgagggcccagaccaggctttcccgaatacctcagccctggcggggctcagccccgtcctgcacagcttccgcgtgtttgacgtgcgacacaaaagcaacaaggattacctgaacagcgacggttctgccaaaagctcctgcgtatccaaagatgttcccaacaatgtggacctgtccaaattcgatggctttgtgctctatggcaagaggaagcccatcctgatgtgtttcttgtgcaaactctcctttgggtacgtccgttcgtttgtgacccacgcggtgcatgaccatcgaatgaccctgagcgaagacgagcggaaaattcttagcaataagaacatctccgctatcatccaagggatcggcaaagacaaggaaccccttgtaagttttctggaaccaaaaaacaaaaactttcaacaccctttagtttccacagctaacctcataggccccggacacagtttttatggtaaatttagtggcattcgaatggaaggggaggaagctctcccagcgggctccgccgctggccccgagcagccccaggctggtctcttgacccccagcaccctgttgaaccttggcgggctcaccagctcggtactgaagacccccattacctcagtccccctggggcctctggcttccagtcctaccaaatcctcagagggcaaggactctggggcggcagaaggagagaagcaggaagtgggcgacggggattgcttctctgagaaggtagagccagccgaagaggaggcggaggaggaagaggaggaggaagaggcggaggaggaggaggaagaagaggaggaggaagaagaggaggaggaagacgagggttgcaaaggactctttccaagcgagttggatgaggaactggaggacaggccccatgaggagcctggggccgcagcaggtagtagcagcaaaaaggaccttgctctctcaaaccaaagcatttctaactcccccttaatgcctaacgtgctccagaccctgtcgaggggcacagcttctactagttctaattctgcttcttcctttgttgtctttgatggtgcgaacaggaggaatcgtttaagctttaacagtgagggcgtcagggccaatgtggcagagggcggcaggaggctggacttcgctgacgaaagtgccaataaagacaatgccacagcaccagaaccaaatgaaagcacagagggtgacgatgggggcttcgttccccatcaccagcacgctggctccctctgcgagcttggggttggggagtgcccctcggggagtggcgtggagtgccccaaatgcgacacggtcctgggctcctcccgctcgctgggcggccacatgaccatgatgcattctcgtaactcgtgtaagacactcaagtgccccaagtgcaactggcactataagtaccagcagaccctggaggcacacatgaaggagaagcacccggagccggggggctcctgtgtctactgcaaaagcgggcagccccacccccggctggcacgaggcgagagctacacgtgtggttacaagcctttccgctgcgaggtgtgtaactactccacaactaccaaaggcaacctcagtattcatatgcagtctgacaagcatctcaacaacatgcagaacctgcagaatggagggggggagcaggtcttcagccacactgccggggcggcggcggcggcggtggctgcggcggcggcggcagccaatatcagtagctcctgcggggccccctcgccgaccaaaccaaaaaccaaacccacctggcggtgcgaggtgtgtgattatgagaccaacgtggccaggaacctccgcattcacatgaccagtgagaagcacatgcataacatgatgttactgcaacagaacatgacccagatccaacacaaccgccacctgggcctcggcagcctgccctcacccgccgaggccgagctctaccaatactacctggcccagaacatgaacctgcccaacctgaagatggacagtgctgcctcggacgcccagttcatgatgagcggattccagctggatcccgccgggcccatggccgccatgacgcctgctctagtgggcggtgagatccccctagacatgcggctcgggggcgggcagctggtgtcagaggagctgatgaacctgggcgagagcttcatccagaccaacgacccgtcgctgaagctcttccagtgcgccgtctgcaacaagttcacgacggacaacctggacatgctgggcctgcacatgaacgtggagcgcagcctgtcggaggacgagtggaaggcggtgatgggggactcataccagtgcaagctctgccgctacaacacccagctcaaggccaacttccagctgcactgcaagacagacaagcacgtgcagaagtaccagctggtggcccacatcaaggagggcggcaaggccaacgagtggaggctcaagtgtgtggccatcggcaaccccgtgcacctcaagtgcaacgcctgtgactactacaccaacagcctggagaagctgcggctgcacacggtcaactccaggcacgaggccagcctgaagttgtacaagcacctgcagcagcatgagagtggtgtagaaggtgagagctgctactaccactgcgttctgtgcaactactccaccaaggccaagctcaacctcatccagcatgtgcgctccatgaagcaccagcgaagcgagagcctgcgaaagctgcagcggctgcagaagggccttccagaggaggacgaggacctggggcagatcttcaccatccgcaggtgcccctccacggacccagaagaagccattgaagatgttgaaggacccagtgaaacagctgctgatccagaggagcttgctaaggaccaagagggcggagcatcgtccagccaagcagagaaggagctgacagattctcctgcaacctccaaacgcatctccttcccaggtagctcagagtctcccctctcttcgaagcgaccaaaaacagctgaggagatcaaaccggagcagatgtaccagtgtccctactgcaagtacagtaatgccgatgtcaaccggctccgggtgcatgccatgacgcagcactcggtgcaacccatgcttcgctgccccctgtgccaggacatgctcaacaacaagatccacctccagctgcacctcacccacctccacagcgtggcacctgactgcgtggagaagctcattatgacggtgaccacccctgagatggtgatgccaagcagcatgttcctcccagcagctgttccagatcgagatgggaattccaatttggaagaggcaggaaagcagcctgaaacctcagaggatctgggaaagaacatcttgccatccgcaagcacagagcaaagcggagatttgaaaccatcccctgctgacccaggctctgtgagagaagactcaggcttcatctgctggaagaaggggtgcaaccaggttttcaaaacttctgctgcccttcagacgcattttaatgaagtgcatgccaagaggcctcagctgccggtgtcagatcgccatgtgtacaagtaccgctgtaatcagtgtagcctggccttcaagaccattgaaaagttgcagctccattctcagtaccatgtgatcagagctgccaccatgtgctgtctttgtcagcgcagtttccgaactttccaggctctgaagaagcaccttgagacaagccacctggagctgagtgaggctgacatccaacagctttatggtggcctgctggccaatggggacctcctggcaatgggagaccccactctggcagaggaccataccataattgttgaggaagacaaggaggaagagagtgacttggaagataaacagagcccaacgggcagtgactctgggtcagtacaagaagactcgggctcagagccaaagagagctctgcctttcagaaaaggtcccaattttactatggaaaagttcctagacccttctcgcccttacaagtgtaccgtctgcaaggaatctttcactcaaaagaatatcctgctagtacactacaattctgtctcccacctgcataagttaaagagagcccttcaagaatcagcaaccggtcagccagaacccaccagcagcccagacaacaaaccttttaagtgtaacacttgtaatgtggcctacagccagagttccactctggagatccatatgaggtctgtgttacatcaaaccaaggcccgggcagccaagctggaggctgcaagtggcagcagcaatgggactgggaacagcagcagtatttccttgagctcctccacgccaagtcctgtgagcaccagtggcagtaacacctttaccacctccaatccaagcagtgctggcattgctccaagctctaacttactaagccaagtgcccactgagagtgtagggatgccacccctggggaatcctattggtgccaacattgcttccccttcagagcccaaagaggccaatcggaagaaactggcagatatgattgcatccaggcagcagcaacaacagcagcagcaacagcaacaacaacaacaacaacaacaacaacaagcacaaacgctggcccaggcccaggctcaagttcaagctcacctgcagcaggagctgcagcaacaggctgccctgatccagtctcagctgtttaaccccaccctccttcctcacttccccatgacaactgagaccctgctgcaactacagcagcagcagcacctcctcttccctttctacatccccagtgctgagttccagcttaaccccgaggtgagcttgccagtgaccagtggggcactgacactgactgggacaggcccaggcctgctggaagatctgaaggctcaggttcaggtcccacagcagagccatcagcagatcttgccgcagcagcagcagaaccaactctctatagcccagagtcactctgccctccttcagccaagccagcaccccgaaaagaagaacaaattggtcatcaaagaaaaggaaaaagaaagccagagagagagggacagcgccgaggggggagagggcaacaccggtccgaaggaaacactgccagatgccttgaaggccaaagagaagaaagagttggcaccagggggtggttctgagccttccatgctccctccacgcattgcttcagatgccagagggaacgccaccaaggccctgctggagaactttggctttgagttggtcatccagtataatgagaacaagcagaaggtgcagaaaaagaatgggaagactgaccagggagagaacctggaaaagctcgagtgtgactcctgcggcaagttgttttccaacatcttgattttaaagagtcatcaagagcacgttcatcagaattactttcctttcaaacagctcgagaggtttgccaaacagtacagagaccactacgataaactgtacccactgaggccccagaccccagagccaccaccacctccccctccaccccctccacccccacttccggcagcgccgcctcagccggcgtccacaccagccatccccgcatcagccccacccatcacctcacctacaattgcaccggcccagccatcagtgccgctcacccagctctccatgccgatggagctgcccatcttctcgccgctgatgatgcagacgatgccgctgcagaccttgccggctcagctacccccgcagctgggacctgtggagcctctgcctgcggacctggcccaactctaccagcatcagctcaatccaaccctgctccagcagcagaacaagaggcctcgcaccaggatcacagatgatcagctccgagtcttgcggcaatattttgacattaacaactcccccagtgaagagcaaataaaagagatggcagacaagtccgggttgccccagaaagtgatcaagcactggttcaggaacactctcttcaaagagaggcagcgtaacaaggactccccttacaacttcagtaatcctcctatcaccagcctggaggagctcaagattgactcccggcccccttcgccggaacctccaaagcaggagtactggggaagcaagaggtcttcaagaacaaggtttacggactaccagctgagggtcttacaggacttcttcgatgccaatgcttacccaaaggatgatgaatttgagcaactctctaatttactgaaccttccaacccgagtgatagtggtgtggtttcagaatgcccgacagaaggccaggaagaattatgagaatcagggagagggcaaagatggagagcggcgtgagcttacaaatgatagatacattcgaacaagcaacttgaactaccagtgcaaaaaatgtagcctggtgtttcagcgcatctttgatctcatcaagcaccagaagaagctgtgttacaaggatgaggatgaggaggggcaggacgacagccaaaatgaggattccatggatgccatggaaatcctgacgcctaccagctcatcctgcagtaccccgatgccctcacaggcttacagcgccccagcaccatcagccaataatacagcttcctccgctttcttgcagcttacagcggaggctgaggaactggccaccttcaattcaaaaacagaggcaggcgatgagaaaccaaagctggcggaagctcccagtgcacagccaaaccaaacccaagaaaagcaaggacaaccaaagccagagctgcagcagcaagagcagcccgagcagaagaccaacactccccagcagaagctcccccagctggtgtccctgccttcgttgccacagcctcctccacaagcgccccctccacagtgccccttaccccagtcgagccccagtccttcccagctctcccacctgcccctcaagcccctccacacatcaactcctcaacagctcgcaaacctacctcctcagctaatcccctaccagtgtgaccagtgtaagttggcatttccgtcatttgagcactggcaggagcatcagcagctccacttcctgagcgcgcagaaccagttcatccacccccagtttttggacaggtccctggatatgcctttcatgctctttgatcccagtaacccactcctggccagccagctgctctctggggccatacctcagattccagcaagctcagccacttctccttcaactccaacctccacaatgaacactctcaagaggaagctggaggaaaaggccagtgcaagccctggcgaaaacgacagtgggacaggaggagaagagcctcagagagacaagcgtttgagaacaaccatcacaccggaacaactagaaattctctaccagaagtatctactggattccaatccgactcgaaagatgttggatcacattgcacacgaggtgggcttgaagaaacgtgtggtacaagtctggtttcagaacacccgagctcgggaaaggaaaggacagttccgggctgtaggcccagcgcaggcccacaggagatgccctttttgcagagcgctcttcaaagccaagactgctcttgaggctcatatccggtcccgtcactggcatgaagccaagagagctggctacaacctaactctgtctgcgatgctcttagactgtgatgggggactccagatgaaaggagatatttttgacggaactagcttttcccacctacccccaagcagtagtgatggtcagggtgtccccctctcacctgtgagtaaaaccatggaattgtcacccagaactcttctaagcccttcctccattaaggtggaagggattgaagactttgaaagcccctccatgtcctcagttaatctaaactttgaccaaactaagctggacaacgatgactgttcctctgtcaacacagcaatcacagataccacaactggagacgagggcaacgcagataacgacagtgcaacgggaatagcaactgaaaccaaatcctcttctgcacccaacgaagggttgaccaaagcggccatgatggcaatgtctgagtatgaagatcggttgtcatctggtctggtcagcccggccccgagcttttatagcaaggaatatgacaatgaaggtacagtggactacagtgaaacctcaagccttgcagatccctgctccccgagtcctggtgcgagtggatctgcaggcaaatctggtgacagcggagatcggcctgggcagaaacgttttcgcactcaaatgaccaatctgcagctgaaggtcctcaagtcatgctttaatgactacaggacacccactatgctagaatgtgaggtcctgggcaatgacattggactgccaaagagagtcgttcaggtctggttccagaatgcccgggcaaaagaaaagaagtccaagttaagcatggccaagcattttggtataaaccaaacgagttatgagggacccaaaacagagtgcactttgtgtggcatcaagtacagcgctcggctgtctgtacgtgaccatatcttttcccaacagcatatctccaaagttaaagacaccattggaagccagctggacaaggagaaagaatactttgacccagccaccgtacgtcagttgatggctcaacaagagttggaccggattaaaaaggccaacgaggtccttggactggcagctcagcagcaagggatgtttgacaacacccctcttcaggcccttaaccttcctacagcatatccagcgctccagggcattcctcctgtgttgctcccgggcctcaacagcccctccttgccaggctttactccatccaacacagctttaacgtctcctaagccgaacttgatgggtctgcccagcacaactgttccttcccctggcctccccacttctggattaccaaataaaccgtcctcagcgtcgctgagctccccaaccccagcacaagccacgatggcgatgggccctcagcaacccccccagcagcagcagcagcagcagcaaccacaggtgcagcagcctcccccgccgccagcagcccagccgccacccacaccacagctcccactgcaacagcagcagcaacgcaaggacaaagacagtgagaaagtaaaggagaaggaaaaggcacacaaagggaaaggggaacccctgcctgtccccaagaaggagaaaggagaggcccccacggcaactgcagccacgatctcagccccgctgcccaccatggagtatgcggtagaccctgcacagctgcaggccctgcaggccgcgttgacttcggaccccacagcattgctcacaagccagttccttccttactttgtaccaggcttttctccttattatgctccccagatccctggcgccctgcagagcgggtacctgcagcctatgtatggcatggaaggcctgttcccctacagccctgcactgtcgcaggccctgatggggctgtccccaggctccctactgcagcagtaccagcaataccagcagagtctgcaggaggcaattcagcagcagcagcagcggcaactacagcagcagcagcagcaaaaagtgcagcagcagcagcccaaagcaagccaaaccccagtcccccccggggctccttccccagacaaagaccctgccaaagaatcccccaaaccagaagaacagaaaaacaccccccgtgaggtgtcccccctcctgccgaaactccctgaagagccagaagcagaaagcaaaagtgcggactccctctacgaccccttcattgttccaaaggtgcagtacaagttggtctgccgcaagtgccaggcgggcttcagcgacgaggaggcagcgaggagccacctgaagtccctctgcttcttcggccagtctgtggtgaacctgcaagagatggtgcttcacgtccccaccggcggcggcggcggtggcagtggcggcggcggcggcggtggcggcggcggcggcggcggcggctcgtaccactgcctggcgtgcgagagcgcgctctgtggggaggaagctctgagtcaacatctcgagtcggccttgcacaaacacagaacaatcacgagagcagcaagaaacgccaaagagcaccctagtttattacctcactctgcctgcttccccgatcctagcaccgcatctacctcgcagtctgccgctcactcaaacgacagcccccctcccccgtcggccgccgccccctcctccgcttccccccacgcctccaggaagtcttggccgcaagtggtctcccgggcttcggcagcgaagcccccttcttttcctcctctctcctcatcttcaacggttacctcaagttcatgcagcacctcaggggttcagccctcgatgccaacagacgactattcggaggagtctgacacggatctcagccaaaagtccgacggaccggcgagcccggtggagggtcccaaagaccccagctgccccaaggacagtggtctgaccagtgtaggaacggacaccttcagattgtaagctttgaagatgaacaatacaaacaaatgaatttaaatacaaaaattaataacaaaccaatttcaaaaatagactaactgcaattccaaagcttctaaccaaaaaacaaaaaaaaaaaaaaaaagaaaaaaaagaaaaagcgtgggttgttttcccatatacctatctatgccggtgattttacattcttgtctttttcttttcttttaatattaaaaaaaaaaaaaaagccctaaccctgttacattgtgtccttttgaaggtactattggtctgggaaacagaagtccgcagggcctccctaatgtctttggagcttaaaccccttgtatatttgccccttttcaataaacgccccacgctgatagcacagaggagcccggcatgcactgtatgggaaagcagtccaccttgttacagttttaaatttcttgctatcttagcattcagataccaatggcttgctaaaagaaaaaaagaaatgtaatgtctttttattctcaggtcaatcgctcacactttgttttcagaatcattgttttatatattattgttttttcagtttttttttttttttttgttccagaaaagattttttgttttgttaacttaaaaatgggcagaaagtattcaagaaaaacaatgtgaactgctttagctttctggggatttttaaggatagcttttctgctgaagccaatttcaaggggaaaagttaagcactcccactttcaaaaaaaaaaaaaaataataacccacacacacaaagagtgttgaggacttgtagcttaaaaaaaataagttttaaaaactgactttctgtatttatgatagatatgaccatttttggtgttgagtagattgttgcattggaaatgaactgaagcagtatggtagatttaaaaggaaaaaaaaaaaaaaaccttttgtgtacatttagctttttgtatggtccagctgacagctcctcatttgatgttgtcttgttcattcctagcagatgatagattgcaatccgttgattcgcctaagcttttctccccttgtcccttaattccactttctctttcttgtcccttaattccactttctctttccttctcccacctcccgtcctataatctcccacttaaggtagctgccttcatttcttagagggagctgcagaattattttataaaactaaagaaagaatttcaagggattctaggggtcattaggatcctcacagattatttttggttggggagttgaaactttttaaaggcatataattctagttacctgtgtctgttagctttgtgcatttattttttatttatccttcttttggcttttttttctttgtaccccttcttttcctccttgtttggtaggagcttcaaatattctttttttttctatactaaaggatttgtttccatttgtgtaattggctgtgtacttttcttttctaaaaaaagtttttggttagggatttggtttttggttttgtgtttgttttttctttcctctctcagaaaaaaaaatttcatgctttaaataaaatccaaagacacaccctttcactgctgatgcagaaaaaagggaaagggttcttgttacttgagaatttgtttctgatttaaacaaacaagacttagtttaataaaagaaagagaaaaacaaaagattcccaggttgttatgtgcttcttctgcaagcagagaggcaaatgttaatgacaattccatataccaaaagacacattttttacttcaaagttttgtccttgtgttaggcagtctgagcagcgagtgatccagagcgcagccaacaaagcagcagatagcagtgtacagaaagcaaaaaaggaactgtatgtgaggcacttgtttctgttaatatccatattcctgttaacacacaccctttctcatgtaaaaagaaaaataaataaatggtctgaactttgaaaactttgtgctgctaaaacatagattttggagacaaataaatagatgctttgctgtttcactttcatagctaaacatcaacagaaaccatctccccttgcccccaaagtgtgaaatccttcttcccttcgttttcttccttatgtttcaaaagggaactttgaagactgtgaatacaggttccattggtcacctttcgggcttctttccccagtgctgaagccactcatcgactttgcaaaagactggagcattccaagatctgaaaatggattttttttctttttttcttttttagccgggactattttatttttatgaatttgtttttagtttaatgaaatagtagatcctgaaatgttgtacatatttctaactaggctgatgcacagtgcaaattccttttttaattgttttttttaagtagaaatactaaagaaagaataccatctaactattcataccagtatccagttgtagcataaggtgtcaaaagcaagtacgcaaaacatttactgttttaacaagctatttccttttaacaagaaatcttgtatttcttcctgtgtttgagatgaacatttttaaattttaaagttgtacagttttttgttttccattattttatcttgtttgtaactctatgaaatatatatatatatattttttgccatttaactgttgtatgttactctgtgtctgtaccatatagaaaaaaaattgtttttgtttttggttctctatgtgatatcagttaacaatgtaacactagctttacctgtcaaattctgctaggtcttctctgaaaacgttgtttttaaaaatgatattgcttggtaatagtgcaatttctatccttttccctcccccctcaacttttaagttcttttctttataattttgctgccccctccctgatggtttgggtttttgtttttgtttttgtttttttttttcatggagctactatgccatcctccctctgtgaggcagagtgactgtcagtgttttgttatgccatgccttgagctgtgggtgtttggcgacaataaggtggttgaatagattggctgagcacacttccacccacctagtgttctcagaggggttatgtgattgtttcaacctggagtgggttgcacccttaatgctttcctctgcaactaaaccgcccacatatatgttcattgaaaaaagtaagaataattctcagcactaacccagaagtagcaaagcagtcagtgatggtgaacattagaggtcaaacatgagttagatgtttgtgggctgacagccatcgtggctatgaccagtactatttacaaagcatgaattcactacaatgctcaactgtttgtttagctttatctcacttggggaatttattcctgtctgctgcattgtaggtagctgggtaggatatatttccacttgctttttaaattagttcttcacctccattgacactcgttttttggttttctccctatagtgtgggttggtgctagacaccagtctgacccacagaatgggagttatttcatccatctttcctccatccttccaaaaaccacatatctacacaaggaaaaatttaatacatctaggaattttttttttaattacaagctatttaaagagatgaatgtggccaaagttttacacaattgaaaataaagtaaaacagacggcatgtgtttaaacctgagtttatcaggcatggcaggaagttgcaggagagagaggcagtgacccaagccagtgcacttgatgttcatggacatatattttttttaaataataaattaaaacattttaaatagaagcataaattgagttgtttgttggcgctgagatactgcccactgtgaaacaaagctttgactagttttttgtttgtttactttcttcaggggggaggggggcaagtttgggtaggaaagaaagcataaatgaacgtgaccctgaggtgaagaggtatatgaacagcctttgcaatgtacaaaaagaaaaaaaaacaaaaaacaacaaaaaaaatagagcaagtgaaaccaaaaatgatgttcttggtgtttttctataatgtagtcttgttagcttttttgttactgtaacaatgctgatctcgaactgtaccaaaatacatggagactaacaaacagaaccacatggaactttcaaactgaaaaaaaaatttgtcacaaaaactttgttgtcatagttaagttgattgtagatggtaattgaatatactcctttgaaaatatttcatcaagtatgtttcctgctcattgtgatacattaaaaaaaaaatatgagcaaaa

SEQ ID NO: 168780 - DNA, 11112 bp, Artificial Sequence
  derived and/or modified sequence
atggagggctgcgacagccccgtggtgagcggcaaggacaacggctgcggcatcccccagcaccagcagtggaccgagctgaacagcacccacctgcccgacaagcccagcagcatggagcagagcaccggcgagagccacggccccctggacagcctgagagcccccttcaacgagagactggccgagagcaccgccagcgccggcccccccagcgagcccgccagcaaggaggtgacctgcaacgagtgcagcgccagcttcgccagcctgcagacctacatggagcaccactgccccagcgccagaccccccccccccctgagagaggagagcgccagcgacaccggcgaggagggcgacgaggagagcgacgtggagaacctggccggcgagatcgtgtaccagcccgacggcagcgcctacatcgtggagagcctgagccagctgacccagggcggcggcgcctgcggcagcggcagcggcagcggccccctgcccagcctgttcctgaacagcctgcccggcgccggcggcaagcagggcgaccccagctgcgccgcccccgtgtacccccagatcatcaacaccttccacatcgccagcagcttcggcaagtggttcgagggccccgaccaggccttccccaacaccagcgccctggccggcctgagccccgtgctgcacagcttcagagtgttcgacgtgagacacaagagcaacaaggactacctgaacagcgacggcagcgccaagagcagctgcgtgagcaaggacgtgcccaacaacgtggacctgagcaagttcgacggcttcgtgctgtacggcaagagaaagcccatcctgatgtgcttcctgtgcaagctgagcttcggctacgtgagaagcttcgtgacccacgccgtgcacgaccacagaatgaccctgagcgaggacgagagaaagatcctgagcaacaagaacatcagcgccatcatccagggcatcggcaaggacaaggagcccctggtgagcttcctggagcccaagaacaagaacttccagcaccccctggtgagcaccgccaacctgatcggccccggccacagcttctacggcaagttcagcggcatcagaatggagggcgaggaggccctgcccgccggcagcgccgccggccccgagcagccccaggccggcctgctgacccccagcaccctgctgaacctgggcggcctgaccagcagcgtgctgaagacccccatcaccagcgtgcccctgggccccctggccagcagccccaccaagagcagcgagggcaaggacagcggcgccgccgagggcgagaagcaggaggtgggcgacggcgactgcttcagcgagaaggtggagcccgccgaggaggaggccgaggaggaggaggaggaggaggaggccgaggaggaggaggaggaggaggaggaggaggaggaggaggaggaggacgagggctgcaagggcctgttccccagcgagctggacgaggagctggaggacagaccccacgaggagcccggcgccgccgccggcagcagcagcaagaaggacctggccctgagcaaccagagcatcagcaacagccccctgatgcccaacgtgctgcagaccctgagcagaggcaccgccagcaccagcagcaacagcgccagcagcttcgtggtgttcgacggcgccaacagaagaaacagactgagcttcaacagcgagggcgtgagagccaacgtggccgagggcggcagaagactggacttcgccgacgagagcgccaacaaggacaacgccaccgcccccgagcccaacgagagcaccgagggcgacgacggcggcttcgtgccccaccaccagcacgccggcagcctgtgcgagctgggcgtgggcgagtgccccagcggcagcggcgtggagtgccccaagtgcgacaccgtgctgggcagcagcagaagcctgggcggccacatgaccatgatgcacagcagaaacagctgcaagaccctgaagtgccccaagtgcaactggcactacaagtaccagcagaccctggaggcccacatgaaggagaagcaccccgagcccggcggcagctgcgtgtactgcaagagcggccagccccaccccagactggccagaggcgagagctacacctgcggctacaagcccttcagatgcgaggtgtgcaactacagcaccaccaccaagggcaacctgagcatccacatgcagagcgacaagcacctgaacaacatgcagaacctgcagaacggcggcggcgagcaggtgttcagccacaccgccggcgccgccgccgccgccgtggccgccgccgccgccgccgccaacatcagcagcagctgcggcgcccccagccccaccaagcccaagaccaagcccacctggagatgcgaggtgtgcgactacgagaccaacgtggccagaaacctgagaatccacatgaccagcgagaagcacatgcacaacatgatgctgctgcagcagaacatgacccagatccagcacaacagacacctgggcctgggcagcctgcccagccccgccgaggccgagctgtaccagtactacctggcccagaacatgaacctgcccaacctgaagatggacagcgccgccagcgacgcccagttcatgatgagcggcttccagctggaccccgccggccccatggccgccatgacccccgccctggtgggcggcgagatccccctggacatgagactgggcggcggccagctggtgagcgaggagctgatgaacctgggcgagagcttcatccagaccaacgaccccagcctgaagctgttccagtgcgccgtgtgcaacaagttcaccaccgacaacctggacatgctgggcctgcacatgaacgtggagagaagcctgagcgaggacgagtggaaggccgtgatgggcgacagctaccagtgcaagctgtgcagatacaacacccagctgaaggccaacttccagctgcactgcaagaccgacaagcacgtgcagaagtaccagctggtggcccacatcaaggagggcggcaaggccaacgagtggagactgaagtgcgtggccatcggcaaccccgtgcacctgaagtgcaacgcctgcgactactacaccaacagcctggagaagctgagactgcacaccgtgaacagcagacacgaggccagcctgaagctgtacaagcacctgcagcagcacgagagcggcgtggagggcgagagctgctactaccactgcgtgctgtgcaactacagcaccaaggccaagctgaacctgatccagcacgtgagaagcatgaagcaccagagaagcgagagcctgagaaagctgcagagactgcagaagggcctgcccgaggaggacgaggacctgggccagatcttcaccatcagaagatgccccagcaccgaccccgaggaggccatcgaggacgtggagggccccagcgagaccgccgccgaccccgaggagctggccaaggaccaggagggcggcgccagcagcagccaggccgagaaggagctgaccgacagccccgccaccagcaagagaatcagcttccccggcagcagcgagagccccctgagcagcaagagacccaagaccgccgaggagatcaagcccgagcagatgtaccagtgcccctactgcaagtacagcaacgccgacgtgaacagactgagagtgcacgccatgacccagcacagcgtgcagcccatgctgagatgccccctgtgccaggacatgctgaacaacaagatccacctgcagctgcacctgacccacctgcacagcgtggcccccgactgcgtggagaagctgatcatgaccgtgaccacccccgagatggtgatgcccagcagcatgttcctgcccgccgccgtgcccgacagagacggcaacagcaacctggaggaggccggcaagcagcccgagaccagcgaggacctgggcaagaacatcctgcccagcgccagcaccgagcagagcggcgacctgaagcccagccccgccgaccccggcagcgtgagagaggacagcggcttcatctgctggaagaagggctgcaaccaggtgttcaagaccagcgccgccctgcagacccacttcaacgaggtgcacgccaagagaccccagctgcccgtgagcgacagacacgtgtacaagtacagatgcaaccagtgcagcctggccttcaagaccatcgagaagctgcagctgcacagccagtaccacgtgatcagagccgccaccatgtgctgcctgtgccagagaagcttcagaaccttccaggccctgaagaagcacctggagaccagccacctggagctgagcgaggccgacatccagcagctgtacggcggcctgctggccaacggcgacctgctggccatgggcgaccccaccctggccgaggaccacaccatcatcgtggaggaggacaaggaggaggagagcgacctggaggacaagcagagccccaccggcagcgacagcggcagcgtgcaggaggacagcggcagcgagcccaagagagccctgcccttcagaaagggccccaacttcaccatggagaagttcctggaccccagcagaccctacaagtgcaccgtgtgcaaggagagcttcacccagaagaacatcctgctggtgcactacaacagcgtgagccacctgcacaagctgaagagagccctgcaggagagcgccaccggccagcccgagcccaccagcagccccgacaacaagcccttcaagtgcaacacctgcaacgtggcctacagccagagcagcaccctggagatccacatgagaagcgtgctgcaccagaccaaggccagagccgccaagctggaggccgccagcggcagcagcaacggcaccggcaacagcagcagcatcagcctgagcagcagcacccccagccccgtgagcaccagcggcagcaacaccttcaccaccagcaaccccagcagcgccggcatcgcccccagcagcaacctgctgagccaggtgcccaccgagagcgtgggcatgccccccctgggcaaccccatcggcgccaacatcgccagccccagcgagcccaaggaggccaacagaaagaagctggccgacatgatcgccagcagacagcagcagcagcagcagcagcagcagcagcagcagcagcagcagcagcagcagcaggcccagaccctggcccaggcccaggcccaggtgcaggcccacctgcagcaggagctgcagcagcaggccgccctgatccagagccagctgttcaaccccaccctgctgccccacttccccatgaccaccgagaccctgctgcagctgcagcagcagcagcacctgctgttccccttctacatccccagcgccgagttccagctgaaccccgaggtgagcctgcccgtgaccagcggcgccctgaccctgaccggcaccggccccggcctgctggaggacctgaaggcccaggtgcaggtgccccagcagagccaccagcagatcctgccccagcagcagcagaaccagctgagcatcgcccagagccacagcgccctgctgcagcccagccagcaccccgagaagaagaacaagctggtgatcaaggagaaggagaaggagagccagagagagagagacagcgccgagggcggcgagggcaacaccggccccaaggagaccctgcccgacgccctgaaggccaaggagaagaaggagctggcccccggcggcggcagcgagcccagcatgctgccccccagaatcgccagcgacgccagaggcaacgccaccaaggccctgctggagaacttcggcttcgagctggtgatccagtacaacgagaacaagcagaaggtgcagaagaagaacggcaagaccgaccagggcgagaacctggagaagctggagtgcgacagctgcggcaagctgttcagcaacatcctgatcctgaagagccaccaggagcacgtgcaccagaactacttccccttcaagcagctggagagattcgccaagcagtacagagaccactacgacaagctgtaccccctgagaccccagacccccgagccccccccccccccccccccccccccccccccccccctgcccgccgcccccccccagcccgccagcacccccgccatccccgccagcgccccccccatcaccagccccaccatcgcccccgcccagcccagcgtgcccctgacccagctgagcatgcccatggagctgcccatcttcagccccctgatgatgcagaccatgcccctgcagaccctgcccgcccagctgcccccccagctgggccccgtggagcccctgcccgccgacctggcccagctgtaccagcaccagctgaaccccaccctgctgcagcagcagaacaagagacccagaaccagaatcaccgacgaccagctgagagtgctgagacagtacttcgacatcaacaacagccccagcgaggagcagatcaaggagatggccgacaagagcggcctgccccagaaggtgatcaagcactggttcagaaacaccctgttcaaggagagacagagaaacaaggacagcccctacaacttcagcaacccccccatcaccagcctggaggagctgaagatcgacagcagaccccccagccccgagccccccaagcaggagtactggggcagcaagagaagcagcagaaccagattcaccgactaccagctgagagtgctgcaggacttcttcgacgccaacgcctaccccaaggacgacgagttcgagcagctgagcaacctgctgaacctgcccaccagagtgatcgtggtgtggttccagaacgccagacagaaggccagaaagaactacgagaaccagggcgagggcaaggacggcgagagaagagagctgaccaacgacagatacatcagaaccagcaacctgaactaccagtgcaagaagtgcagcctggtgttccagagaatcttcgacctgatcaagcaccagaagaagctgtgctacaaggacgaggacgaggagggccaggacgacagccagaacgaggacagcatggacgccatggagatcctgacccccaccagcagcagctgcagcacccccatgcccagccaggcctacagcgcccccgcccccagcgccaacaacaccgccagcagcgccttcctgcagctgaccgccgaggccgaggagctggccaccttcaacagcaagaccgaggccggcgacgagaagcccaagctggccgaggcccccagcgcccagcccaaccagacccaggagaagcagggccagcccaagcccgagctgcagcagcaggagcagcccgagcagaagaccaacaccccccagcagaagctgccccagctggtgagcctgcccagcctgccccagccccccccccaggccccccccccccagtgccccctgccccagagcagccccagccccagccagctgagccacctgcccctgaagcccctgcacaccagcaccccccagcagctggccaacctgcccccccagctgatcccctaccagtgcgaccagtgcaagctggccttccccagcttcgagcactggcaggagcaccagcagctgcacttcctgagcgcccagaaccagttcatccacccccagttcctggacagaagcctggacatgcccttcatgctgttcgaccccagcaaccccctgctggccagccagctgctgagcggcgccatcccccagatccccgccagcagcgccaccagccccagcacccccaccagcaccatgaacaccctgaagagaaagctggaggagaaggccagcgccagccccggcgagaacgacagcggcaccggcggcgaggagccccagagagacaagagactgagaaccaccatcacccccgagcagctggagatcctgtaccagaagtacctgctggacagcaaccccaccagaaagatgctggaccacatcgcccacgaggtgggcctgaagaagagagtggtgcaggtgtggttccagaacaccagagccagagagagaaagggccagttcagagccgtgggccccgcccaggcccacagaagatgccccttctgcagagccctgttcaaggccaagaccgccctggaggcccacatcagaagcagacactggcacgaggccaagagagccggctacaacctgaccctgagcgccatgctgctggactgcgacggcggcctgcagatgaagggcgacatcttcgacggcaccagcttcagccacctgccccccagcagcagcgacggccagggcgtgcccctgagccccgtgagcaagaccatggagctgagccccagaaccctgctgagccccagcagcatcaaggtggagggcatcgaggacttcgagagccccagcatgagcagcgtgaacctgaacttcgaccagaccaagctggacaacgacgactgcagcagcgtgaacaccgccatcaccgacaccaccaccggcgacgagggcaacgccgacaacgacagcgccaccggcatcgccaccgagaccaagagcagcagcgcccccaacgagggcctgaccaaggccgccatgatggccatgagcgagtacgaggacagactgagcagcggcctggtgagccccgcccccagcttctacagcaaggagtacgacaacgagggcaccgtggactacagcgagaccagcagcctggccgacccctgcagccccagccccggcgccagcggcagcgccggcaagagcggcgacagcggcgacagacccggccagaagagattcagaacccagatgaccaacctgcagctgaaggtgctgaagagctgcttcaacgactacagaacccccaccatgctggagtgcgaggtgctgggcaacgacatcggcctgcccaagagagtggtgcaggtgtggttccagaacgccagagccaaggagaagaagagcaagctgagcatggccaagcacttcggcatcaaccagaccagctacgagggccccaagaccgagtgcaccctgtgcggcatcaagtacagcgccagactgagcgtgagagaccacatcttcagccagcagcacatcagcaaggtgaaggacaccatcggcagccagctggacaaggagaaggagtacttcgaccccgccaccgtgagacagctgatggcccagcaggagctggacagaatcaagaaggccaacgaggtgctgggcctggccgcccagcagcagggcatgttcgacaacacccccctgcaggccctgaacctgcccaccgcctaccccgccctgcagggcatcccccccgtgctgctgcccggcctgaacagccccagcctgcccggcttcacccccagcaacaccgccctgaccagccccaagcccaacctgatgggcctgcccagcaccaccgtgcccagccccggcctgcccaccagcggcctgcccaacaagcccagcagcgccagcctgagcagccccacccccgcccaggccaccatggccatgggcccccagcagcccccccagcagcagcagcagcagcagcagccccaggtgcagcagcccccccccccccccgccgcccagcccccccccaccccccagctgcccctgcagcagcagcagcagagaaaggacaaggacagcgagaaggtgaaggagaaggagaaggcccacaagggcaagggcgagcccctgcccgtgcccaagaaggagaagggcgaggcccccaccgccaccgccgccaccatcagcgcccccctgcccaccatggagtacgccgtggaccccgcccagctgcaggccctgcaggccgccctgaccagcgaccccaccgccctgctgaccagccagttcctgccctacttcgtgcccggcttcagcccctactacgccccccagatccccggcgccctgcagagcggctacctgcagcccatgtacggcatggagggcctgttcccctacagccccgccctgagccaggccctgatgggcctgagccccggcagcctgctgcagcagtaccagcagtaccagcagagcctgcaggaggccatccagcagcagcagcagagacagctgcagcagcagcagcagcagaaggtgcagcagcagcagcccaaggccagccagacccccgtgccccccggcgcccccagccccgacaaggaccccgccaaggagagccccaagcccgaggagcagaagaacacccccagagaggtgagccccctgctgcccaagctgcccgaggagcccgaggccgagagcaagagcgccgacagcctgtacgaccccttcatcgtgcccaaggtgcagtacaagctggtgtgcagaaagtgccaggccggcttcagcgacgaggaggccgccagaagccacctgaagagcctgtgcttcttcggccagagcgtggtgaacctgcaggagatggtgctgcacgtgcccaccggcggcggcggcggcggcagcggcggcggcggcggcggcggcggcggcggcggcggcggcggcagctaccactgcctggcctgcgagagcgccctgtgcggcgaggaggccctgagccagcacctggagagcgccctgcacaagcacagaaccatcaccagagccgccagaaacgccaaggagcaccccagcctgctgccccacagcgcctgcttccccgaccccagcaccgccagcaccagccagagcgccgcccacagcaacgacagcccccccccccccagcgccgccgcccccagcagcgccagcccccacgccagcagaaagagctggccccaggtggtgagcagagccagcgccgccaagccccccagcttcccccccctgagcagcagcagcaccgtgaccagcagcagctgcagcaccagcggcgtgcagcccagcatgcccaccgacgactacagcgaggagagcgacaccgacctgagccagaagagcgacggccccgccagccccgtggagggccccaaggaccccagctgccccaaggacagcggcctgaccagcgtgggcaccgacaccttcagactgtag

SEQ ID NO: 168781 - DNA, 11112 bp, Artificial Sequence
  derived and/or modified sequence
atggagggatgtgactcgcctgtggtgagcggcaaagacaacggctgtgggattcctcagcaccaacaatggaccgagctgaactccacccaccttccagataagccttcttctatggaacagtcgacaggggaatctcacggccccctcgactcactcagagctccgttcaatgaacggttggccgagagcactgcatcagctgggcctccaagcgagcctgcatccaaggaggtgacatgcaatgagtgctctgcgtccttcgctagcttgcagacctatatggaacaccactgcccatccgcccgccctcctcctccactcagggaagagagtgcttctgacaccggtgaggagggcgatgaagaatccgacgtggaaaacctggcaggagagatagtctaccagccggacgggtcggcctatatcgttgaatcactgagccagctcactcagggcggaggagcgtgcggttccggctcgggcagcggtcctctgcctagcttatttctgaatagcctgcccggggctggaggcaagcagggcgaccctagctgtgctgctcccgtttacccgcagattatcaatacatttcacatcgccagctcatttgggaaatggttcgagggtcctgatcaggccttccctaatacatcggctctcgcgggcctgtccccggtcctgcactctttcagggtgttcgacgtccgacataagagtaacaaagattatctcaactccgatggatccgcaaagtcgtcctgcgtctccaaggatgttccaaataacgtcgacctgtcaaagtttgatggcttcgtactgtatgggaagaggaagcctatacttatgtgtttcctctgtaagctttcctttgggtacgtgaggtcttttgttacgcatgccgttcacgatcaccgtatgacactaagtgaagatgagcgaaagatactaagtaacaaaaacatctcagctattatacagggcatcggcaaggataaagaaccactggtcagctttttagaacccaagaataagaacttccagcacccactcgttagtactgctaacctgattggcccaggtcatagcttttatggcaagttttcaggcatacgaatggagggtgaagaggccctccctgccgggtccgctgctggtcccgagcagcctcaggcaggtctgctgacgccatcaaccctgctcaacctcggcggcctgacgtctagtgtgcttaaaactccaataacgtctgttcccctggggccactggcctcatcccccacaaaaagttccgagggcaaggactcgggggctgcagagggggaaaagcaggaggtgggcgatggtgactgtttcagcgagaaggtggaacctgctgaggaagaggccgaagaagaagaggaagaggaagaggctgaggaagaagaggaagaggaggaggaagaggaagaggaggaggaggacgaggggtgtaaagggctttttccaagcgagcttgacgaagaattagaggatagaccccatgaggagcccggcgccgcagccggtagcagctcaaaaaaagatctcgctctctctaatcagagcatttcaaactcccccttaatgccaaacgtgctgcaaactcttagtagagggaccgccagcacatcctccaactctgcctcttcttttgtggtgttcgatggcgctaatcgcaggaacaggctctcatttaacagcgaaggcgtaagagctaacgtggctgaagggggccgccggctggactttgccgacgagtctgcaaataaagataatgcgaccgctcccgaaccaaatgagtctacagagggagatgacggagggtttgtgcctcaccatcagcatgccggatctctctgcgagctcggcgtcggagagtgcccctctgggtctggcgtggagtgccctaaatgtgacaccgtgctgggttcaagtcgcagtcttggcggacacatgaccatgatgcactcacgcaactcgtgtaaaactctgaaatgcccaaagtgcaactggcattacaaataccagcaaacactggaagcacacatgaaagagaaacacccagagccggggggatcatgcgtgtactgtaaaagtgggcaaccacatccccgactggcccgtggagagtcctacacctgtggttataaaccatttcgttgtgaggtgtgtaattacagtaccaccaccaagggtaacttgagcatccatatgcagagtgataagcatctgaacaacatgcagaacctgcagaacggtggcggggagcaggtattttcacataccgccggcgccgctgccgctgccgtggcagctgctgccgctgcagccaatataagttccagctgtggagctcccagccccacaaagccaaaaactaagccgacatggaggtgtgaagtctgtgactatgagaccaacgtcgcccgaaacctcaggatccacatgacatcagaaaaacatatgcataatatgatgctgcttcagcagaatatgactcaaattcagcacaaccgtcacttgggactgggaagtttgccgtccccagcagaggccgagctctaccagtactatctggctcaaaatatgaatcttcctaatcttaagatggacagtgctgcttccgatgcccagtttatgatgtcaggcttccaactagaccccgctggaccaatggctgccatgacacccgcactagtgggcggagagatacctttggacatgcgtctgggcggggggcaactcgtctctgaggaactgatgaatctgggggagagcttcattcaaactaacgatccatctcttaagctgttccagtgcgcagtgtgtaacaaatttaccactgacaacctggacatgctaggactgcatatgaacgtagagagatctctatcagaggacgaatggaaggccgtcatgggcgatagttatcagtgcaaactgtgtcgttacaacacccagctcaaggcaaacttccagctccattgtaagacagacaaacacgtccagaagtaccagctggtagctcacatcaaggagggcggcaaggccaacgagtggcgcctgaaatgtgtcgcgattgggaatccagtccacctgaagtgcaacgcgtgtgattactacacaaactcactagagaaactcaggcttcatacagtgaattccagacacgaggcctcgctgaagttgtacaaacacctgcaacagcacgaatcaggcgtggaaggagagtcatgctactaccactgtgttctgtgtaactactctaccaaagcgaaactgaacctgatacagcacgtccgcagcatgaagcatcaacggtccgagagcctgagaaagctccagaggcttcagaaaggcctgcccgaggaggatgaggatctggggcagatttttactattcgccgctgtccttctacagatcccgaggaagccattgaggacgtcgaggggccaagcgagacagctgccgaccctgaggaattggctaaagaccaggaaggtggtgccagcagtagccaggcggaaaaagagctcaccgattctccggcgacctcaaagagaatttctttccctggaagctctgaatcacccctatcctccaaacgtcctaagaccgctgaggagattaaacctgagcagatgtaccagtgtccatactgcaaatacagcaacgcagatgtgaataggctgagggtgcacgctatgactcagcactctgtccagcctatgctcagatgccctctgtgccaagacatgctgaacaataaaatccatctccaacttcatctgactcacctgcatagcgtcgcaccagattgcgtagaaaaactcattatgacagtcactacacccgagatggtgatgcccagctcgatgttcttgccagcagcagttccagacagagacggcaatagtaatctcgaagaggcagggaaacagcctgagacatcagaagatctgggcaaaaacatactccctagcgcatccacagagcagtccggcgatctgaagcccagtcccgcagaccccggatccgtcagggaggattcaggctttatctgctggaaaaaggggtgcaaccaagtgtttaagacctctgctgcattgcaaactcattttaacgaggtccacgccaaacgaccccaactgccggtttctgacaggcatgtgtataaatacaggtgcaaccagtgttcactagcatttaaaacgatcgagaagctacagctgcacagccaataccatgtcattagagccgcaaccatgtgttgtctctgccaaaggagttttcgcaccttccaggccctgaagaaacatctcgaaacctcccacttagaactgagtgaggcagatatacagcagctttatggggggctgctggctaacggcgatctacttgcgatgggagatcccacgttggccgaggaccataccattatcgtggaggaagacaaggaggaggagtcagatctggaagacaagcagtcacccaccggcagtgactccggttccgtacaggaggactccggatctgaacccaagagagctctaccattccgaaaaggtccaaattttactatggaaaaatttttggacccatcccgaccttacaagtgtacagtctgtaaagaatcttttactcagaagaatattctcctggttcattataatagtgtctcccacctgcacaaactgaaaagggccctacaagagtctgccactgggcagccagaaccgaccagttcaccggataataagccctttaaatgcaatacatgtaatgtggcatacagtcagagcagtacactggaaattcatatgagaagtgtgctgcatcagaccaaggcgagggcagccaaactagaggctgcctctggcagttcaaatggcacaggaaacagcagttccataagtctgtcttcttctacccctagtccagttagcacaagtggcagcaacacgttcacgactagcaatcccagttctgcaggcatagccccaagctctaacctcctatcccaagttcccaccgaaagtgtcgggatgcctcccctgggcaatcctattggcgccaatattgctagtcccagcgagcccaaggaggcaaatcgcaaaaaacttgcggatatgatcgcttcccgccagcagcagcagcaacagcagcagcagcagcagcagcagcagcaacagcaacaacaggctcaaacactggcccaggctcaggcccaggtacaagctcatctccagcaagagctgcagcagcaggcagcattaattcagtcccaactgttcaatcccacattattaccccattttcccatgacaactgaaaccttactccaactccagcaacagcagcatctcctgtttcccttctacatccctagcgcggagttccagttgaacccggaagtgagtttgccagtcacaagcggcgcgctgaccctaaccggcaccggcccgggactgctcgaggaccttaaggctcaggtgcaggtccctcagcagagccaccagcagattttgccacagcagcaacagaaccagctgtcaattgcccagtcacattccgcccttttacagccttcccagcaccccgaaaagaaaaacaagcttgtcatcaaggagaaagagaaagaaagccagagggagagggatagtgccgagggaggcgaggggaatacgggccctaaagagacactgcccgatgcgttgaaggcgaaagaaaagaaagagctggcaccaggtggaggctccgaacctagcatgttgccccctcgaatagcctctgatgcaaggggaaatgcaaccaaagccctcctggagaactttggtttcgaactcgtcatccagtataatgagaataaacaaaaggtccaaaaaaaaaacggcaaaacagatcagggcgagaacctcgaaaaactggaatgtgactcctgcggtaaactcttcagtaacatattgattctgaaaagccatcaggagcacgtgcaccagaactacttcccgtttaagcagctagagcggttcgctaaacagtatcgagatcattatgacaagttatatcctctgcgcccacaaacgccagagcctccacctccaccgcccccccctccacccccccctctgcccgccgcacccccccagccagcttctacccctgctataccggcctcagccccacctataacaagcccaaccattgctcctgcccaaccatcagttccactgacacagctgagcatgcctatggagttgcctatcttcagcccgctcatgatgcagacaatgcccctgcagacactacctgcccaactgccccctcaactgggtccagtcgaacctctgccagctgatttagctcagctataccaacaccagctaaaccctaccctcctgcaacagcagaacaagcggccacggactaggataactgacgaccagctcagagtattacgccagtattttgatattaacaactcacctagtgaggagcagatcaaagagatggctgataagagtggtttgccccaaaaagtaattaagcattggttcagaaatacgttgttcaaggagaggcagagaaataaagactccccctacaacttcagcaaccccccaattacaagtctggaggagcttaaaattgactcccgtccaccatctcccgaacctcccaaacaggagtactggggcagcaaacggtcatcacggacccgcttcaccgattatcaactcagggtgctgcaggacttcttcgacgctaacgcttatccaaaggacgacgagttcgaacaactgagtaacctattaaatttgccaacccgcgttatcgttgtctggttccaaaacgcccgccagaaagcccggaaaaactacgagaaccaaggagagggtaaagacggcgagcgcagagagctgactaacgacaggtacattaggactagcaatttgaattaccagtgcaagaagtgctcattagtgtttcagcggatcttcgatctcatcaaacatcagaaaaagttgtgctataaggatgaagatgaggagggacaggatgattctcaaaatgaggatagcatggacgccatggaaatcctcacacccactagctcttcttgttccacaccgatgccatcccaggcgtactctgcccccgctccatcggctaataacacggcctcatcagccttcctgcagctcacggctgaggcggaagagttggccacttttaattccaagaccgaggccggtgatgaaaagccaaagctggcagaagctccctccgctcagccgaatcagactcaagagaagcaggggcagccaaaacctgagctgcagcagcaggagcagcctgagcagaaaactaataccccccagcagaagctacctcagctggtttccctgcccagcctgccgcagcccccgcctcaagcaccgcctccccagtgcccccttccacaaagctctccaagtccatctcagttgtcgcatctacccctgaaacccctccatacaagtacgccgcagcagctggctaatctgcctccccagcttatcccataccagtgcgatcagtgtaagctggcatttccgtcttttgaacattggcaagagcatcaacagcttcatttcctgagtgcccaaaatcaatttatccacccgcagttcctggaccggtctctagatatgcctttcatgctgttcgacccctcaaatcctcttttggcatcacagttactgagtggcgccatccctcagattcccgcctcctctgctacatctccctctaccccaacatctactatgaacacacttaaaaggaaactcgaagagaaagcgagtgcgagccccggggagaatgattcagggaccggtggggaggagccacaaagagataagcgcctcaggacaacaatcacccctgagcaactcgagatcctataccagaaatatttactggattcaaacccaacaaggaaaatgctggatcacattgcgcatgaggtggggctcaagaaacgggtcgttcaggtttggttccagaacactcgcgcaagggaaaggaaggggcaattccgagccgtcggtcccgcacaggcccaccgtcgatgccccttttgtcgcgccctattcaaggccaagaccgcgctggaggcgcatatcagaagccggcactggcatgaggcgaagagggccggatacaatctgacactaagcgctatgcttctggattgtgacggtgggctccagatgaaaggagatatctttgacggcacgagtttctctcatctccctccaagttccagcgacggccagggagttcctctgtcccccgtctcgaaaaccatggaattaagtcctcgcacactgctgtcccccagctcaatcaaggtcgaaggcattgaagactttgagagtccctctatgtccagtgtgaaccttaatttcgatcagacaaagttagacaacgacgactgttctagtgtgaataccgctattacagatactaccacgggcgacgaaggcaatgccgataacgacagcgccacaggcattgccacggagacaaagtcctcatctgcacctaatgaaggacttactaaagcagctatgatggccatgtcagagtatgaggaccggctctctagcggcttggtcagtccggccccatccttctattcaaaggagtatgacaatgaagggactgtagattactccgagacatcaagcttggctgacccttgttctccctcacctggcgccagtggaagcgccggtaaatccggagactctggtgataggcctggccagaaaagatttaggacacagatgaccaacctccagctcaaggtgctcaaaagctgctttaatgattaccgcacccccaccatgcttgagtgcgaggtattagggaacgatattgggctcccaaaacgggtcgtgcaggtgtggttccaaaacgcaagggcgaaagagaagaaaagcaagctatcaatggcaaaacatttcggcattaaccaaacaagttatgaaggtccaaaaacagaatgcaccctctgtggtattaaatattccgccaggctgagcgtcagagaccacatcttctcccaacagcacatcagcaaggttaaggatactattggaagtcagttggacaaagaaaaagagtacttcgacccagctaccgtgcggcagcttatggcacaacaggaacttgatcgaataaaaaaggcaaatgaagtcctcggtcttgcagcacagcagcagggaatgttcgataacacgcccctgcaggctttgaatctcccgaccgcttaccctgcattacagggcattccaccagtcttgctgcctggcctgaattcaccttccctgcctgggtttacacctagcaataccgccctgacaagtcccaaacctaatctgatggggctgccatcaaccaccgtacctagcccaggacttccaacctctggcctgccaaataaaccctcaagtgcctctctgagttctccaacccccgcccaggctaccatggcgatggggccccagcagccgccgcagcagcagcaacagcagcagcaacctcaggtccagcagcccccccctcctccagccgcccagcctccccccaccccacaacttcctttgcagcagcagcaacaaaggaaagacaaggattcagagaaggtcaaagagaaggaaaaagcgcataagggtaagggggagccgctgcccgtacccaaaaaagaaaaaggcgaagcccctaccgcaacagccgccactatctcagctccgctgcccactatggaatatgccgttgacccggcccagctacaggctctccaagccgctctcacaagcgatcccaccgcactgctgacctctcagtttcttccatacttcgttcctggattttccccttactatgctccacagatcccaggcgcactacagagtggatacctgcagcctatgtacggaatggaggggctgtttccctactccccagccttaagtcaggcgttgatgggactctcacctggttcattattacagcagtatcagcagtatcagcagtctctgcaggaggccattcagcagcagcagcaacgccagctgcagcaacagcagcagcagaaagtccagcagcagcaacctaaagcctctcagaccccagtccctccaggagcaccgagccccgataaagatccagcaaaggaatcccccaaacccgaggaacaaaaaaatacccctcgagaggtgtcccccctcctgcccaagctgccagaggaaccggaggctgagtccaaatcggcagacagcctgtacgatcctttcatagtgcccaaggtgcagtacaagctcgtttgtcgaaagtgccaagcaggctttagtgacgaggaagcagcccgaagccatttaaagagtctctgttttttcgggcagtccgtcgtgaacctccaagagatggtcctacatgtgcccacaggtgggggcggcggtggctcagggggtggcggggggggcggaggtgggggtggcggaggtggatcataccattgcctggcttgcgaatctgctctgtgcggcgaagaggcgcttagccagcacctggaaagtgcacttcataagcatcggacgattaccagagctgcaaggaacgctaaggagcatccttctctgctgccgcacagcgcctgcttcccggacccatctacggctagcacctcccagtcagccgcgcattcaaatgattcacccccacccccctctgccgccgcacccagttccgcctccccacatgcttcacgcaaaagctggcctcaggtggtatcaagagcctcagcggcaaagccaccaagcttcccacctctgtcttccagctccacagtcacatccagcagctgttccactagcggtgtccagcccagcatgcccactgatgattattcagaggaatctgatacagatctgtcacagaagtccgacggacccgcttcccctgttgagggccctaaggatccatcctgtccaaaggattctggcctgacctctgtgggcactgacacttttcgtctgtag

SEQ ID NO: 168782 - DNA, 11112 bp, Artificial Sequence
  derived and/or modified sequence
atggagggctgtgacagccctgtggtgtctgggaaggacaatggctgcggcatcccccagcaccagcagtggacagagctgaacagcacccacctgcctgacaagcccagctccatggagcagagcactggagagagccacggccccctggacagcctgcgggcccccttcaatgaaaggctggccgagagcacagccagcgctggcccccccagcgagcccgccagcaaggaggtgacctgcaatgaatgttctgccagctttgccagcctgcagacctacatggagcaccactgccccagcgcccggcccccaccacccctgcgggaggagagcgccagtgacaccggggaggagggagatgaggagagtgatgtggagaacctggccggggagatcgtgtaccagccagatggcagcgcctacatcgtggagagcctgagccagctgacccagggcggcggggcctgtggcagcggcagcggcagcggccccctgcccagcctcttcctgaacagcctgcctggagctgggggcaagcagggcgaccccagctgtgccgcccctgtgtacccccagatcatcaacaccttccacatcgccagcagctttgggaagtggtttgagggccctgaccaggccttccccaacaccagcgccctggccggcctgagccctgtgctgcacagcttccgggtgtttgatgtgcgccacaagagcaacaaggactacctgaacagtgatggcagcgccaagagcagctgtgtgtccaaggatgtgcccaacaacgtggacctgagcaagtttgatggctttgtgctgtatggcaagaggaagcccatcctgatgtgcttcctgtgcaagctgagctttggctacgtgcgcagctttgtgacccatgctgtgcatgaccacaggatgaccctgtctgaagatgagaggaagatcctgagcaacaagaacatcagcgccatcatccagggcatcggcaaggacaaggagcccctggtgtccttcctggagcccaagaacaagaacttccagcaccccctggtgtccacagccaacctgattggccctggccacagcttctacggcaagttcagcggcatccgcatggagggggaggaggccctgcctgctggcagcgctgctggccctgagcagccccaggccggcctgctgacccccagcaccctgctgaacctgggcggcctgaccagctctgtgctgaagacccccatcacctctgtgcccctgggccccctggccagcagccccaccaagagcagcgagggcaaggacagcggggctgctgagggggagaagcaggaggtgggagatggagactgcttcagcgagaaggtggagcctgctgaggaggaggccgaggaggaggaggaggaggaggaggccgaggaggaggaggaggaggaggaggaggaggaggaggaggaggaggatgagggctgcaagggcctcttccccagcgagctggatgaggagctggaggaccggccccatgaggagcctggagctgctgctggcagcagcagcaagaaggacctggccctgagcaaccagagcatcagcaacagccccctgatgcccaacgtgctgcagaccctgagccggggcacagccagcaccagcagcaacagcgccagcagctttgtggtgtttgatggagccaacagaagaaaccggctgtccttcaacagcgagggcgtgcgggccaacgtggccgagggcggccggcggctggactttgctgatgagagcgccaacaaggacaatgccacagcccctgagcccaatgaaagcacagaaggagatgatggcggctttgtgccccaccaccagcacgccggcagcctgtgtgagctgggcgtgggagaatgtcccagcggcagcggcgtggagtgccccaagtgtgacacagtgctgggcagcagccgcagcctgggcggccacatgaccatgatgcacagcaggaacagctgcaagaccctgaagtgccccaagtgcaactggcactacaagtaccagcagaccctggaggcccacatgaaggagaagcaccctgagcccggcggcagctgtgtgtactgcaagagcggccagccccacccccggctggcccggggggagagctacacctgtggctacaagcccttccgctgtgaggtgtgcaactacagcaccaccaccaagggcaacctgagcatccacatgcagagcgacaagcacctgaacaacatgcagaacctgcagaatggaggaggagagcaggtgttcagccacacagctggagctgctgctgctgctgtggccgctgctgctgctgctgccaacatcagcagcagctgtggggcccccagccccaccaagcccaagaccaagcccacctggaggtgtgaggtgtgtgactatgagaccaacgtggccaggaacctgcgcatccacatgaccagcgagaagcacatgcacaacatgatgctgctgcagcagaacatgacccagatccagcacaacagacacctgggcctgggcagcctgcccagccctgctgaggccgagctgtaccagtactacctggcccagaacatgaacctgcccaacctgaagatggattctgctgccagtgatgcccagttcatgatgagcggcttccagctggaccctgctggccccatggccgccatgaccccagccctggtgggcggggagatccccctggacatgaggctgggcggcggccagctggtgtctgaggagctgatgaacctgggggagagcttcatccagaccaatgaccccagcctgaagctgttccagtgtgctgtgtgcaacaagttcaccacagacaacctggacatgctgggcctgcacatgaatgtggagaggagcctgtctgaagatgagtggaaggctgtgatgggagacagctaccagtgcaagctgtgccgctacaacacccagctgaaggccaacttccagctgcactgcaagacagacaagcacgtgcagaagtaccagctggtggcccacatcaaggagggcggcaaggccaatgagtggaggctgaagtgtgtggccatcggcaaccctgtgcacctgaagtgcaatgcctgtgactactacaccaacagcctggagaagctgcggctgcacacagtgaacagcagacatgaggccagcctgaagctgtacaagcacctgcagcagcatgaaagtggagtggagggggagagctgctactaccactgtgtgctgtgcaactacagcaccaaggccaagctgaacctgatccagcacgtgcgctccatgaagcaccagaggtctgagagcctgaggaagctgcagaggctgcagaagggcctgcctgaagaagatgaggacctgggccagatcttcaccatccgccgctgccccagcacagatcctgaggaggccattgaagatgtggagggccccagcgagacagctgctgaccctgaggagctggccaaggaccaggagggcggggccagcagcagccaggccgagaaggagctgacagacagccctgccaccagcaagaggatctccttccctggcagcagcgagagccccctgagcagcaagaggcccaagacagctgaggagatcaagccagagcagatgtaccagtgcccctactgcaagtacagcaatgctgatgtgaaccggctgcgggtgcacgccatgacccagcacagcgtgcagcccatgctgcgctgccccctgtgccaggacatgctgaacaacaagatccacctgcagctgcacctgacccacctgcacagcgtggccccagactgtgtggagaagctgatcatgacagtgaccaccccagagatggtgatgcccagctccatgttcctgcctgctgctgtgcctgacagagatggcaacagcaacctggaggaggccggcaagcagcctgagaccagcgaggacctgggcaagaacatcctgcccagcgccagcacagagcagagcggggacctgaagcccagccctgctgaccccggctctgtgcgggaggacagcggcttcatctgctggaagaagggctgcaaccaggtgttcaagaccagcgctgccctgcagacccacttcaatgaggtgcacgccaagaggccccagctgcctgtgtctgacagacatgtgtacaagtaccgctgcaaccagtgcagcctggccttcaagaccatcgagaagctgcagctgcacagccagtaccacgtgatccgggccgccaccatgtgctgcctgtgccagaggagcttccgcaccttccaggccctgaagaagcacctggagaccagccacctggagctgtctgaggccgacatccagcagctgtatggaggcctgctggccaacggggacctgctggccatgggagaccccaccctggccgaggaccacaccatcatcgtggaggaggacaaggaggaggagagtgacctggaggacaagcagagccccaccggcagtgacagcggctctgtgcaggaggacagcggcagcgagcccaagagggccctgcccttcaggaagggccccaacttcaccatggagaagttcctggaccccagccggccctacaagtgcaccgtgtgcaaggagagcttcacccagaagaacatcctgctggtgcactacaacagcgtgagccacctgcacaagctgaagagggccctgcaggagagcgccaccggccagcctgagcccaccagcagcccagacaacaagcccttcaagtgcaacacctgcaatgtggcctacagccagagcagcaccctggagatccacatgaggtctgtgctgcaccagaccaaggcccgggccgccaagctggaggccgccagcggcagcagcaatggaactggaaacagcagcagcatcagcctgagcagcagcacccccagccctgtgtccaccagcggcagcaacaccttcaccaccagcaaccccagcagcgctggcatcgcccccagcagcaacctgctgagccaggtgcccacagaatctgtgggcatgccacccctgggcaaccccatcggggccaacatcgccagccccagcgagcccaaggaggccaacaggaagaagctggccgacatgattgccagccggcagcagcagcagcagcagcagcagcagcagcagcagcagcagcagcagcagcagcaggcccagaccctggcccaggcccaggcccaggtgcaggcccacctgcagcaggagctgcagcagcaggccgccctgatccagagccagctgttcaaccccaccctgctgccccacttccccatgaccacagagaccctgctgcagctgcagcagcagcagcacctgctcttccccttctacatccccagcgctgagttccagctgaaccctgaggtgtccctgcctgtgaccagcggggccctgaccctgactggaactggacctggcctgctggaggacctgaaggcccaggtgcaggtgccccagcagagccaccagcagatcctgccccagcagcagcagaaccagctgagcatcgcccagagccacagcgccctgctgcagcccagccagcaccctgagaagaagaacaagctggtgatcaaggagaaggagaaggagagccagcgggagcgggacagcgctgagggcggggagggcaacacaggccccaaggagaccctgcctgatgccctgaaggccaaggagaagaaggagctggcccctgggggcggcagcgagcccagcatgctgcccccacgcatcgccagtgatgcccggggaaatgccaccaaggccctgctggagaactttggatttgagctggtgatccagtacaatgaaaacaagcagaaggtgcagaagaagaatggcaagacagaccagggcgagaacctggagaagctggagtgtgacagctgtgggaagctgttcagcaacatcctgatcctgaagagccaccaggagcacgtgcaccagaactacttccccttcaagcagctggagagatttgccaagcagtacagagaccactatgacaagctgtaccccctgcggccccagaccccagagcccccacctcctcctcctcctcctcctcctccacccctgcctgctgccccaccccagcctgccagcaccccagccatcccagccagcgccccacccatcaccagccccaccatcgccccagcccagcccagcgtgcccctgacccagctgtccatgcccatggagctgcccatcttcagccccctgatgatgcagaccatgcccctgcagaccctgcctgcccagctgcccccccagctgggccctgtggagcccctgcctgctgacctggcccagctgtaccagcaccagctgaaccccaccctgctgcagcagcagaacaagaggcccaggacccgcatcacagatgaccagctgcgggtgctgcggcagtactttgacatcaacaacagccccagcgaggagcagatcaaggagatggctgacaagagcggcctgccccagaaggtgatcaagcactggttcaggaacaccctcttcaaggagcggcagaggaacaaggacagcccctacaacttcagcaacccccccatcaccagcctggaggagctgaagattgacagccggccccccagccctgagccccccaagcaggagtactggggcagcaagaggagcagcaggacccgcttcacagactaccagctgcgggtgctgcaggacttctttgatgccaatgcctaccccaaggatgatgaatttgagcagctgagcaacctgctgaacctgcccaccagggtcatcgtggtgtggttccagaatgcccggcagaaggccaggaagaactatgagaaccagggcgagggcaaggatggagagcggcgggagctgaccaatgaccgctacatccgcaccagcaacctgaactaccagtgcaagaagtgcagcctggtgttccagaggatctttgacctgatcaagcaccagaagaagctgtgctacaaggatgaagatgaggagggccaggatgacagccagaatgaagacagcatggatgccatggagatcctgacccccaccagcagcagctgcagcacccccatgcccagccaggcctacagcgccccagcccccagcgccaacaacacagccagcagcgccttcctgcagctgacagctgaggccgaggagctggccaccttcaacagcaagacagaagctggagatgagaagcccaagctggccgaggcccccagcgcccagcccaaccagacccaggagaagcagggccagcccaagccagagctgcagcagcaggagcagcctgagcagaagaccaacaccccccagcagaagctgccccagctggtgtccctgcccagcctgccccagcccccaccccaggcccccccaccccagtgccccctgccccagagcagccccagccccagccagctgagccacctgcccctgaagcccctgcacaccagcaccccccagcagctggccaacctgcccccccagctgatcccctaccagtgtgaccagtgcaagctggccttccccagctttgagcactggcaggagcaccagcagctgcacttcctgagcgcccagaaccagttcatccacccccagttcctggacaggagcctggacatgcccttcatgctgtttgaccccagcaaccccctgctggccagccagctgctgagcggggccatcccccagatcccagccagcagcgccaccagccccagcacccccaccagcaccatgaacaccctgaagaggaagctggaggagaaggccagcgccagccctggagaaaatgattctggaactggaggagaggagccccagagggacaagaggctgcggaccaccatcaccccagagcagctggagatcctgtaccagaagtacctgctggacagcaaccccaccaggaagatgctggaccacatcgcccacgaggtgggcctgaagaagagggtggtgcaggtgtggttccagaacacccgggcccgggagaggaagggccagttccgggctgtgggccctgcccaggcccaccggcgctgccccttctgccgggccctcttcaaggccaagacagccctggaggcccacatccgcagccgccactggcatgaggccaagagagctggctacaacctgaccctgagcgccatgctgctggactgtgatggcggcctgcagatgaagggggacatctttgatggcaccagcttcagccacctgccccccagcagcagtgatggccagggcgtgcccctgagccctgtgtccaagaccatggagctgagccccaggaccctgctgagccccagcagcatcaaggtggagggcattgaagattttgagagccccagcatgagctctgtgaacctgaactttgaccagaccaagctggacaatgatgactgcagctctgtgaacacagccatcacagacaccaccactggagatgagggcaatgctgacaatgattctgccactggaattgccacagagaccaagagcagcagcgccccaaatgaaggcctgaccaaggccgccatgatggccatgtctgaatatgaagatcggctgagcagcggcctggtgtccccagcccccagcttctacagcaaggagtatgacaatgaaggaacagtggactacagcgagaccagcagcctggccgacccctgcagccccagccctggggccagcggcagcgctgggaagagcggggacagcggggaccggcccggccagaagcgcttccgcacccagatgaccaacctgcagctgaaggtgctgaagagctgcttcaatgactaccgcacccccaccatgctggagtgtgaggtgctgggcaatgacatcggcctgcccaagagggtggtgcaggtgtggttccagaatgcccgggccaaggagaagaagagcaagctgtccatggccaagcacttcggcatcaaccagaccagctatgagggccccaagacagaatgtaccctgtgtggcatcaagtacagcgcccggctgtctgtgcgggaccacatcttcagccagcagcacatcagcaaggtgaaggacaccatcggcagccagctggacaaggagaaggagtactttgatcctgccaccgtgcggcagctgatggcccagcaggagctggaccgcatcaagaaggccaatgaggtgctgggcctggccgcccagcagcagggcatgtttgacaacacccccctgcaggccctgaacctgcccacagcctacccagccctgcagggcatcccccctgtgctgctgcccggcctgaacagccccagcctgcccggcttcacccccagcaacacagccctgaccagccccaagcccaacctgatgggcctgcccagcaccaccgtgcccagccctggcctgcccaccagcggcctgcccaacaagcccagcagcgccagcctgagcagccccaccccagcccaggccaccatggccatgggcccccagcagcccccccagcagcagcagcagcagcagcagccccaggtgcagcagcccccacctcctcctgctgcccagcccccacccaccccccagctgcccctgcagcagcagcagcagaggaaggacaaggacagcgagaaggtgaaggagaaggagaaggcccacaagggcaagggggagcccctgcctgtgcccaagaaggagaagggggaggcccccacagccacagctgccaccatcagcgcccccctgcccaccatggagtatgctgtggaccctgcccagctgcaggccctgcaggccgccctgaccagtgaccccacagccctgctgaccagccagttcctgccctactttgtgcccggcttcagcccctactatgccccccagatccctggggccctgcagagcggctacctgcagcccatgtatggcatggagggcctcttcccctacagccctgccctgagccaggccctgatgggcctgagccctggcagcctgctgcagcagtaccagcagtaccagcagagcctgcaggaggccatccagcagcagcagcagaggcagctgcagcagcagcagcagcagaaggtgcagcagcagcagcccaaggccagccagacccctgtgcccccaggggcccccagcccagacaaggaccctgccaaggagagccccaagccagaggagcagaagaacaccccccgggaggtgagccccctgctgcccaagctgcctgaggagcctgaggccgagagcaagtctgctgacagcctgtatgaccccttcatcgtgcccaaggtgcagtacaagctggtgtgcaggaagtgccaggccggcttcagtgatgaggaggccgcccggagccacctgaagagcctgtgcttcttcggccagagcgtggtgaacctgcaggagatggtgctgcacgtgcccaccggcggcggcggcggcggcagcggcggcggcggcggcggcggcggcggcggcggcggcggcggcagctaccactgcctggcctgtgagagcgccctgtgtggggaggaggccctgagccagcacctggagagcgccctgcacaagcacaggaccatcaccagggctgccagaaatgccaaggagcaccccagcctgctgccccacagcgcctgcttcccagaccccagcacagccagcaccagccagagcgctgcccacagcaatgacagccccccacctccttctgctgctgcccccagcagcgccagcccccacgccagcaggaagtcctggccccaggtggtgtcccgggccagcgctgccaagcccccatccttcccccccctgagcagcagcagcacagtgaccagcagcagctgcagcaccagcggcgtgcagcccagcatgcccacagatgactacagcgaggagagtgacacagacctgagccagaagagtgatggccctgccagccctgtggagggccccaaggaccccagctgccccaaggacagcggcctgacctctgtgggcacagacaccttccggctgtag

SEQ ID NO: 168783 - DNA, 11112 bp, Artificial Sequence
  derived and/or modified sequence
atggagggctgcgacagccccgtggtgagcggcaaggacaacggctgtggaatacctcagcaccagcagtggacagagctcaattcaacccacctgcccgataaaccctcaagtatggagcagagtactggagagtctcatggaccgcttgatagtctgagggcaccatttaatgagaggctggcagaaagtacagcgtccgccggacccccatcagaacccgcatccaaagaggtgacttgtaacgaatgttccgcgtcttttgcttcgttgcagacgtacatggaacaccactgccctagcgcacggccgcccccgcctctgcgcgaagagtccgcttctgacaccggggaggagggggatgaggaaagcgacgtcgagaacctggctggggagattgtataccagcccgacggaagtgcctacatcgtggagagcctaagtcagctgacacagggaggcggagcttgtggcagtggtagtggatctggccccctgcctagcttgttcctgaacagtctgccgggggcaggtgggaaacagggcgacccgtcatgcgccgctcctgtctatccccaaattattaacacgtttcacatcgcttcctcctttggtaaatggtttgagggacccgaccaggcattccctaatacttcagcactggcagggttgtctcctgtcctgcatagttttcgtgtgttcgatgtacgccacaagagtaacaaggactaccttaattctgatggcagcgcgaagtccagctgcgtgagcaaggatgtacccaacaacgtggatttgagtaagtttgacgggtttgtgctctatgggaaacgcaaaccgatactgatgtgcttcttgtgtaaactctctttcggctatgtccgcagtttcgtaactcacgctgtccatgaccatcggatgacattgagtgaggatgaacgaaagattctgtctaacaaaaatatctccgcgattatccaaggcattggaaaagataaggagcccctcgttagcttcctcgaaccaaaaaacaaaaattttcagcatcccttagtgtctacagcaaacctcatagggcctggccattcattctatgggaagttttcagggattcgcatggaaggtgaggaagctctgccagctggcagcgccgctgggccggaacagccccaggcaggcttgcttactccatcaacgctcctcaatctcggtggtcttactagttctgttctaaagaccccaattacatcggtgccactcgggccccttgccagcagtcccactaagagctcagaaggaaaagacagcggcgcagccgaaggggagaaacaggaggtcggagacggcgattgtttctccgaaaaagtcgaacccgcagaagaggaggcggaggaggaggaggaagaagaagaagctgaggaggaggaggaggaggaggaggaagaagaggaagaagaggaagacgaaggctgcaagggcctcttcccaagcgagctggatgaagagctagaggataggcctcacgaagagccgggggccgccgccggctcgtcttctaaaaaggatctggctttgtccaaccagtccattagcaacagtccgctgatgcctaacgttctacagaccctgtcaagaggcacggccagtaccagctccaattccgcttcgtcctttgttgtttttgatggagctaaccgcagaaaccggctcagcttcaactcagagggggtacgagccaacgtggctgagggcggccgacggctcgacttcgctgatgagagtgctaacaaggacaacgcaacggccccggagccgaatgagtccacggaaggagatgatgggggttttgtccctcatcaccaacatgctgggtctctctgcgaacttggggtgggtgaatgcccatccggcagcggagtggaatgcccaaagtgcgacacagtgctgggttcatcacggagcctggggggccacatgactatgatgcactcccggaacagctgcaagactctcaaatgtcccaagtgcaactggcactataagtatcagcagacacttgaagctcacatgaaggagaaacatcctgagcctggcggcagttgcgtttattgtaagagcggccagcctcatccaaggctggcacgcggtgagagctatacatgcggctacaaaccctttagatgtgaagtttgtaattacagcactaccacgaaaggcaatctttccattcacatgcaatcagataaacatctcaataacatgcagaatttgcaaaatgggggaggggagcaggttttttctcacactgcaggcgcagccgcagccgccgttgcagctgccgccgccgccgctaatatctcctcaagttgtggtgcccccagccctacaaaacccaagactaagccaacatggcgctgtgaggtgtgcgattatgagacaaatgtggctagaaacctcagaatccatatgacttcagaaaagcacatgcacaacatgatgctcttacaacaaaacatgacccagatccagcataaccgccacctcgggttgggcagcctgccctcacccgcggaggctgaattgtaccagtactatctcgcacaaaacatgaatctacccaatctgaagatggactccgccgcttcagatgcacaattcatgatgtccgggtttcagctcgacccggctggacctatggctgccatgacaccagctctggtgggcggcgagattccacttgatatgcggttggggggcggccagctcgtgtccgaggagctgatgaacctaggtgaatcctttatccagactaacgaccctagccttaaactcttccagtgcgccgtatgcaacaagttcaccactgataacctggacatgctcggactccatatgaatgtggaacgctccctatcagaagacgagtggaaggcagtgatgggcgacagttaccagtgcaagctatgtagatacaatacacaattgaaggccaacttccagcttcattgcaagactgacaagcacgtgcagaaataccaactggtcgcccatattaaagagggaggcaaagctaacgaatggcgactgaagtgcgttgccattggcaatccagttcacctgaagtgtaacgcctgcgactactataccaactcattggaaaaactgcgcctgcacaccgttaactctcggcatgaagcatccctgaaactttataaacacctgcagcagcatgagagtggtgtcgaaggcgagagctgttactaccactgtgtcctgtgtaactactctacaaaagcaaagcttaacctgattcagcatgtcagaagcatgaaacaccagagaagcgagagcttaagaaagttacagcgactgcagaaggggctgcctgaagaagatgaggacttgggccagatcttcacgatccgccgctgtccatcgacggatcccgaggaggctattgaggacgtggagggccctagcgagacggctgccgacccggaggaactggctaaggaccaggaggggggagccagctcctctcaagccgaaaaggaattaacagactcacccgccacctccaagcgaatttcatttccaggatcctcggagtcacctctgtcttccaagcggccaaagaccgccgaggagatcaagcccgagcaaatgtatcagtgcccctattgcaagtactccaatgcagacgtcaatagattgagggtgcatgccatgactcagcatagcgtgcagccaatgctacgctgcccactctgccaggacatgctaaataataaaatccatctccagctccatctgacacacttgcacagcgtggctcccgattgcgtggaaaagcttattatgaccgtgacaactcccgaaatggtcatgccttcttcgatgtttctgccggctgccgtgcccgatcgggatggaaattccaacctagaggaggccggcaagcagcctgagacgagcgaggacttggggaaaaacatcctaccctcagcatctaccgaacagtcaggagacctgaagccctcgccggcagaccctggatccgttcgcgaggattccggtttcatatgctggaagaagggctgcaaccaagtttttaagaccagtgctgcgctccagacccacttcaatgaggtgcatgcgaaaaggccgcagctccccgtgagtgatcgccacgtctacaagtatcgctgcaatcaatgctcactcgctttcaagaccattgaaaagctgcagcttcacagccaataccacgtcattcgcgctgccacgatgtgctgtctgtgtcagcgcagctttaggacgtttcaggcgctcaaaaaacatctggagacctcacacctcgagttgtccgaagccgatatccagcaattgtacggcggcctgctggctaacggagacctactggctatgggtgaccctacactagctgaagatcacaccatcatcgtggaggaggataaagaagaagagtccgatctcgaggataaacagagtccaacaggttctgacagtggttccgttcaggaggactcgggttcagagcctaagcgggcactcccctttcggaaaggaccgaattttaccatggaaaagtttctggatcccagccggccttataagtgcacagtatgcaaggagagcttcacccagaagaacatcttgttggttcactacaactccgtctcacatttacataaactgaaacgggctctgcaagaatctgccactggccagcccgagccaactagctcacctgacaacaaaccgttcaagtgtaacacctgcaacgttgcatatagccagagtagcaccctggaaatccacatgcggagcgtccttcaccaaacaaaggcacgggctgctaagctcgaggcagcctctggatcaagcaacgggacagggaactcgtcatctatatccctgtcctcttccacccctagccccgtgagcacatcagggtccaatacgttcacaacctcaaaccccagctccgccgggattgcgccgtcatctaatctcctttcccaagtgccaaccgaaagcgttgggatgcccccactaggtaacccgataggcgccaatatagcctctccttctgaaccaaaagaggcaaatcgaaaaaagctggcagacatgattgcctctcggcaacagcagcagcagcaacagcagcagcagcagcagcagcagcagcagcagcagcaagcccagactctggctcaggcccaggcacaagtgcaggcacatttacagcaggaactgcaacaacaggcagccctgattcagtcccagctgttcaaccccacgctgctgcctcattttccaatgacgaccgaaaccctgctgcagttgcagcaacaacagcaccttttgttccccttctacattccatccgctgaattccagctgaaccccgaagtttcgttgccggtgactagtggagcacttacgcttacgggcacaggacctgggcttctggaagatctgaaagctcaagtgcaagttcctcaacagtcacatcaacagattctgcctcagcagcagcagaaccaactctctatcgcacagagtcattccgctcttcttcagccgagccagcacccagagaaaaagaataaactggtgataaaagaaaaggaaaaagagtcgcagcgggaaagagattccgccgagggaggagagggaaacactggcccaaaggagacactgcctgatgccctcaaggctaaggagaagaaggaacttgcccctggtggtggatccgagccctctatgctgccaccacgcatcgcctccgatgctcggggaaacgctaccaaggcccttttggagaattttggattcgaactggttatacagtataatgagaacaagcagaaagtgcagaagaagaacggcaagacggaccagggcgagaacctcgaaaaactggagtgtgactcgtgtggtaagctgttcagtaacatacttattttgaagagccaccaagaacacgtacaccaaaactatttcccttttaagcagctggagcggttcgctaaacagtacagggatcattatgacaaactgtatccgctgaggccgcagacgccggaaccaccgcctccccctccccctcccccccctccccctctgcccgcagctccaccacagcccgcgtccactcccgccatcccggcttccgccccacccataacttcgcctaccattgctccagcccagccatccgtgccacttacgcagttgtctatgccaatggaactgcccatattctcccccctgatgatgcagacgatgccgctccagactcttcccgctcaactgcctcctcagctcgggcctgtggaacccttaccagccgatctggcccagctctaccagcaccagctcaaccccactttgctccagcagcaaaacaagcgccctcgcacacggataacagatgatcaactgagggtcttacggcagtatttcgacatcaacaattctcccagcgaagaacagatcaaagagatggccgacaaaagcggtctgccgcaaaaggttatcaagcactggtttcggaataccttgtttaaagagcggcagcggaataaggattccccctataatttttcgaacccccccattaccagcctggaagaactgaaaatagactcaaggccgccatctcccgaacctcccaagcaagagtattggggatcaaagcgatcctccaggacgagattcaccgactaccagcttcgagtccttcaggatttcttcgatgccaacgcctatcccaaggacgatgaattcgaacagctgtcaaacctgctgaacctccctacacgagttatagtggtgtggttccagaatgcccggcaaaaggctcggaaaaattacgagaatcagggcgaaggtaaggatggggagcggagagagcttacgaatgatcggtatatcagaacatcaaatttgaactatcaatgtaaaaaatgtagcctcgttttccagcggatattcgatctcatcaagcatcagaaaaaactgtgttataaggatgaagacgaggagggccaggatgactcgcagaatgaggactctatggatgcaatggaaatcttgaccccgaccagctctagctgctccaccccgatgcctagccaggcttattctgcgccagctccgtcagccaataatacagcctccagcgcttttttgcaattgaccgctgaggcagaagagttggcaacgttcaattctaaaaccgaggccggcgacgagaagcccaagttagccgaagccccttccgcacaacccaatcagacacaggaaaagcagggccagccaaagcccgaactgcaacagcaagagcaaccagaacaaaaaacaaatacccctcagcagaaattgccccaactggtgtctctaccttccctgccacagcccccaccgcaggcgccaccaccacagtgccccctcccacagagcagtccatcaccttctcagctcagccacctgcccttaaagccgcttcacacctccacacctcagcagctcgccaacctgcctccgcagctcatcccataccaatgcgatcagtgcaagctggctttcccttcatttgaacactggcaggagcaccaacaactgcacttcctgtccgcccagaatcagttcatccacccccagtttcttgatcggagcctggacatgcccttcatgctcttcgaccccagtaaccccctgcttgcgagccagttattgtcaggtgctatcccccaaattcctgccagtagcgccaccagtccgagcacaccaacctccaccatgaataccctgaagaggaagttagaagagaaagcaagcgctagccccggagagaacgacagcgggacggggggcgaagagcctcagagggataagcgtctgaggaccacaatcacccccgagcagctagagatcctgtaccaaaaatacctgctggactcaaacccaacacggaaaatgcttgatcacattgcccatgaagtgggccttaaaaagagagtggtgcaagtgtggtttcagaacactagagcgagagaaagaaaaggccagtttagagccgtgggtcccgcccaagcccatcgcagatgtccgttttgtcgggcactttttaaagcaaaaacagccttggaggctcacatacgctccaggcactggcacgaagctaagagggcagggtacaatttgaccctgtctgccatgctgctcgactgcgatgggggcctccagatgaagggggatatttttgacggcacaagcttctcacatttgcccccaagttcgtcggacggccaaggcgtaccccttagtccagtgtccaaaacgatggaactctcaccacggacactcttgagtcctagttctatcaaagtcgaaggcatcgaggattttgaaagcccatccatgtcttccgtgaatctgaactttgatcagacaaagctggataatgacgactgcagttctgtgaacactgctattacagacacgacgacaggcgatgagggaaacgctgataatgattcagcaacaggtatcgcaactgaaactaaaagtagttcagctccaaacgagggcctcaccaaagccgctatgatggctatgtctgaatacgaggatagattaagcagtggtctcgtatcaccagcgccatctttctacagcaaggaatacgataacgagggcaccgtggactattctgagacgtcttctttggccgacccctgtagccctagcccaggagcgagtggcagtgcaggcaagagcggggacagcggagatcgccccggccagaaaaggttccgaacacaaatgactaatctgcaattgaaagtgcttaaaagctgctttaacgactaccgcacccccacaatgcttgagtgcgaggtcctcggcaacgacattggtctccccaagcgggtggttcaagtttggtttcagaatgccagggcgaaggagaagaaatctaaactgtccatggccaaacacttcggaatcaaccagacttcttacgagggcccaaagactgaatgcacactgtgcggcattaagtacagtgcacgcttgtcagtacgagatcatatctttagccaacagcacatttccaaagtgaaagatacaatcgggtcccagctggataaggagaaagagtattttgacccagcgactgtgcggcagttaatggcccagcaggaactagacagaatcaaaaaagctaacgaggtcctgggtttggcagcccagcagcagggtatgtttgacaacacacccctacaggctcttaatctcccaaccgcctaccccgcccttcaaggcataccccctgttcttctcccaggcctgaactcaccatcactccctgggttcacacccagcaacaccgccctgaccagtcctaagcccaacctcatgggtctgcctagtaccacagtcccgtcaccggggctccctacgtcaggcctacctaacaagcccagcagcgcatctctatcttcgccaacacccgctcaggctaccatggctatgggcccccagcagcccccacagcaacagcaacaacagcagcagccccaggtgcagcagccgcccccacccccagcagcccagcccccacccacacctcaactacctctgcagcagcagcaacaaagaaaggacaaggattccgagaaggtcaaagagaaggaaaaagcacataagggaaagggcgaaccgctgcccgtgccaaaaaaagagaagggcgaggcgcctaccgccactgccgcgaccatatctgcacctcttcctacgatggagtacgccgtggacccagctcagctgcaggcactgcaggctgccctgaccagtgaccctaccgcacttttgacctcccaattccttccatatttcgtgcccggcttctcaccctactacgccccgcagatcccaggggcactgcaaagtggatatctccaaccaatgtacgggatggagggcctgttcccctactccccagcactctcccaagccctaatgggactctcccctggctcgttacttcagcagtaccagcagtaccagcagagtcttcaggaagcaatccagcaacagcaacaacgccaactgcagcagcagcaacagcagaaggttcaacagcagcagcctaaagctagccagactccggttccccctggagcaccctcacccgataaggacccggctaaggagtcccccaagcctgaagaacaaaaaaacaccccgcgcgaggtgtctcctctactacctaagttgccagaagaacctgaggctgagtctaagagtgccgacagcttgtatgatcccttcattgttcctaaagtgcagtataaactggtgtgtagaaagtgccaggccggattttctgatgaagaggctgcccgcagtcacctcaaatctttgtgcttttttggccagtcagtagtcaacttacaggagatggtgcttcacgttcctactgggggagggggggggggttctggagggggaggcggcggcgggggtgggggcggtggtggaggttcataccactgtctggcctgtgagagcgctctttgcggcgaagaagccctcagtcaacatctggaatcagcgctccataaacaccgtacaataaccagagcagcacgaaatgccaaagagcacccttctttgttgccacatagtgcgtgcttcccggatcctagtaccgcctccacaagccagtccgcggcacattccaacgactccccgccaccacctagtgcagccgccccttcttctgcctccccccacgcatcaagaaaaagttggccacaagtagtgagcagggcctccgccgccaagcctccgtccttcccacctctgtctagttcatcgacagttacctcatcttcttgtagcacttcgggtgtccagccaagtatgcctacagatgactatagcgaagagagcgacacggacttaagccagaaatctgatggccccgcatccccagttgaaggccccaaggacccctcatgccccaaagactcgggtcttacctcagtcgggaccgacacatttcgcctgtag

SEQ ID NO: 168784 - DNA, 11112 bp, Artificial Sequence
  derived and/or modified sequence
atggagggctgtgatagtcctgtagtgtcaggcaaagataatggttgcggcatcccccagcaccagcagtggacagagctcaacagcacacatctgcccgataaaccctcatcaatggaacagtcaaccggtgagagccacggtcctttggatagcctccgcgcaccatttaatgaacgcctggctgaaagtaccgcttctgctggtcccccttccgagcccgcaagcaaagaagtgacctgtaacgaatgcagtgcctcatttgcctccctgcagacttacatggaacaccattgtcctagtgctcgcccaccccctcccctgcgggaagagagcgcaagtgacacaggagaagagggggacgaagagtcggatgtcgaaaaccttgccggagagattgtttatcagcccgacggctctgcctacatcgtggaatctctgtctcaactgacccagggcggtggggcatgtggatctggctccggctcaggccctctcccatccctcttcctgaactcccttcctggagccggaggcaagcagggcgatccatcttgcgctgcccctgtctacccacaaattattaatactttccatatcgcaagcagcttcgggaaatggttcgaagggccagatcaggccttcccaaacacgtcagccctggcgggactgtctcccgtgctgcactcattcagagtctttgatgttcggcacaagtcaaataaagactatctcaatagcgacggaagtgcaaaatcatcctgcgtgtccaaagacgtgccgaacaatgtcgacttaagcaagtttgatggatttgtcctgtacggaaagaggaaaccaatattaatgtgcttcctatgtaagctcagcttcgggtatgttagaagctttgtgacacacgccgtgcacgatcatcgcatgaccttaagcgaagatgaaaggaaaattctgtccaacaaaaatataagcgctatcatacaggggattggaaaagataaagagcctctggtgtcttttctggagcctaagaataagaactttcagcacccactcgtctccaccgctaatttgatcggccctgggcacagcttttacggaaagttttctggcatcagaatggaaggagaagaggctctgccagcgggatctgccgcagggcctgaacagccccaggcaggactcctcacgccctccacactgctgaatcttggaggcctaacttcatctgttctgaagacccctatcacctcagttccactgggacctctggctagctcccctaccaaatcatcggagggcaaagattctggcgctgccgaaggcgagaaacaagaggtgggagatggtgattgcttttctgagaaggttgagcctgcagaggaagaagctgaagaggaggaagaggaagaggaagcggaggaggaggaggaggaggaagaagaggaagaagaggaagaagaagatgaaggatgtaagggattattcccctcagagttggacgaagagctggaggacaggccccacgaagagcctggtgccgctgcaggatcgtcaagtaaaaaagatctcgctctttctaaccagtccatatcgaacagcccgctcatgccaaatgtcttgcagacactgtcgcgcggtactgctagcaccagttccaattccgcctcgtcctttgtagtgttcgatggcgcaaaccggaggaatcgacttagttttaattctgaaggcgtgcgagctaacgtggccgaggggggtcgccgactggacttcgcggacgagagtgctaacaaagataacgcgactgcaccggagcccaatgagagtacagaaggagatgatggaggttttgtgcctcaccatcagcacgccggaagtctctgcgagttgggcgtgggtgagtgtccctccggatccggcgtggaatgtcccaagtgcgacacagtcctcggctcatctcggagcctcgggggtcacatgactatgatgcactcaagaaacagctgtaagaccttgaaatgtccaaagtgtaactggcactataagtatcagcaaacgttagaggcccacatgaaggagaaacaccctgaaccagggggtagttgtgtgtactgcaaatctggtcagcctcatcccaggctggccagaggagaatcatacacctgcggttataaaccctttagatgcgaagtctgcaactactcaactactactaagggcaacctgagcattcacatgcaatcggataagcaccttaacaacatgcagaacctgcagaacggaggaggcgaacaagtattttcacataccgcaggcgcagccgcagctgcagttgccgctgccgctgctgctgctaacatttctagcagttgcggggcaccttccccaaccaagcccaagactaagcctacttggcgatgtgaggtgtgtgattacgagacgaatgttgcacgaaacctgcgtatccatatgacctcagagaagcatatgcacaatatgatgctcctccagcagaatatgacgcaaattcagcacaatcggcacctcggcctcggatcattgccctcgcccgcagaagcggagctctaccagtactatctggcacagaatatgaatctgccaaacctgaaaatggactctgccgcatccgacgcccaattcatgatgagtggctttcagttggatccagccggacccatggccgctatgacaccagctctggttggtggcgagatcccattggatatgaggctgggcggaggccaactcgtgagcgaggaactgatgaacctcggcgaatcctttattcaaacgaacgacccatctctgaagctgtttcagtgcgcggtttgcaacaagtttaccactgacaacctggatatgctcggcctgcatatgaatgtagaacggagccttagtgaagatgagtggaaggcagtgatgggcgactcttatcaatgcaaactctgccgctacaacacacagttgaaagccaatttccagcttcattgtaaaaccgataagcatgtgcagaagtatcagcttgtcgcccacattaaggaggggggaaaagcaaacgagtggcgcctgaaatgcgtggctattggcaaccccgttcacctcaaatgcaacgcttgtgattactacacaaactctctggagaagctccgcctccataccgtgaatagccggcatgaagcaagtttgaaattgtataaacatctccagcagcacgagagcggcgttgaaggggagtcctgttattaccactgtgtgctctgtaactacagcaccaaggccaaactgaaccttatccagcacgtgagatccatgaagcatcagcggagtgaatcactccgaaagctgcagagactgcaaaaggggctgcccgaggaagatgaagacctcggtcagattttcaccatcagaagatgcccatccaccgatccagaggaggccatcgaggatgtggaaggcccttccgaaaccgccgcagatcccgaagagttggctaaggaccaggagggcggtgcatccagcagccaggcagaaaaagagctgactgacagcccagccaccagcaaacggatttctttcccaggatcaagcgagtctccactttcttcgaagcggcctaaaacagcagaagaaattaaaccggaacaaatgtatcagtgcccctactgcaaatactccaatgcagacgtcaaccgcctacgggttcatgctatgactcagcactccgtccaaccaatgctgcgctgtccactctgtcaggacatgctgaacaataagatccacctgcagctacatctgacacacctgcatagcgtagcccctgactgcgtggagaagttaattatgactgtcacaacaccagaaatggtaatgccatcttctatgttccttccagcagccgtacctgacagagatggcaattccaacttagaggaagccggtaaacaacccgaaactagcgaggatctgggcaagaatatcctgccttctgcctctactgagcagagcggcgatctcaaaccgagcccagccgaccctgggtctgtgcgagaggatagcggattcatctgttggaagaagggatgtaatcaggtgttcaaaacaagcgccgcacttcaaacacatttcaacgaggtccatgcaaaacgcccacagttgcccgtgtcagatcgacacgtgtataagtacagatgcaatcagtgctccctagcttttaagaccatagagaaactgcaacttcacagtcagtatcacgtgatcagggccgcaacaatgtgctgtctttgccaacggtccttccggacctttcaggctctaaaaaagcatctggaaacttctcaccttgagctctccgaagcggacatacagcagctctatgggggtctacttgcaaatggcgacctgctggcaatgggggatccgactctggcagaggaccacaccatcatcgtggaggaggataaggaggaggagtctgatctcgaagataaacagagtccgaccggatcggattcagggagcgtccaggaggatagtgggtcagagcccaagagagccctgccatttcgcaagggccctaactttactatggagaagttccttgatccctcccgaccttataagtgcaccgtgtgtaaggaatcgttcacccagaagaacattctgttggttcactacaactcggtgtcccaccttcacaagctcaagagagctctccaggaatccgccaccggccagcctgaaccaacgagctcacccgacaacaagccttttaagtgcaacacctgtaatgttgcttactctcagtcatccaccttggagatccatatgaggtctgtcctgcatcagaccaaggcccgagcggcaaaactggaggctgcctccgggtccagcaacggaacgggtaacagctctagcattagtctgtccagctcgaccccatcaccggtgagtaccagtgggagcaacacatttactacgtccaatccctctagcgcaggcatcgccccttcctcgaacttactgtcccaagtacccaccgagtccgttgggatgcctcctttaggaaaccctataggcgcaaacatcgcttcaccaagcgaacccaaggaggctaatagaaagaagctcgcagatatgatcgctagccggcaacagcagcaacagcaacagcaacagcaacagcagcaacagcagcagcagcagcaagcccagaccctggctcaggctcaagcgcaggttcaagctcatctgcagcaggagctgcagcagcaggcggctttaatccagagccagcttttcaacccgacactgttacctcactttcccatgaccacagagacactgctgcagctccagcaacagcagcacctgttgtttcccttttatatcccgagtgctgaatttcagctcaaccctgaggtgtccctgcctgtgacctccggcgcacttacgctcaccggtacaggacccggtctccttgaggacctgaaggcacaggtgcaggtaccacagcaaagccaccagcaaattctcccccagcagcagcaaaaccagctaagcatcgcgcagagccattccgccctgttgcagccgagccaacatcccgaaaagaaaaataaacttgttataaaagagaaggagaaagaatctcagagggagagagacagcgcggaaggaggcgaggggaacacgggccctaaggagaccctgcctgatgcgttaaaggcaaaggagaaaaaggagcttgcccctgggggtggtagcgaaccttccatgctgccccctcgcatagcttccgacgcacgtgggaatgctaccaaggctcttctcgagaacttcggattcgaactcgtcatacagtataatgagaataagcaaaaggtgcagaaaaaaaatggcaagacagaccagggcgaaaacctcgagaagctcgaatgcgactcctgtgggaagctttttagtaacattctgattctgaagtcgcaccaagaacacgtacaccaaaactacttcccctttaaacaactggagcgattcgccaaacaatacagggatcactacgacaagctctatcctctccggccacagacccctgagcccccaccaccccctcctccgcctcccccacctcctctgcctgctgctccccctcagcccgcatccactcctgctattcctgctagcgcaccacctattacaagccctaccatcgctcctgctcagccttctgtaccgctgactcagctctctatgccaatggagctgcctatctttagtcccctgatgatgcagacaatgcccctgcaaacactgccagcccagttgccaccccaactgggtccggtagagccgcttcccgctgatctggctcagctgtatcaacatcaacttaacccgaccctgctccagcagcagaacaagcgccctcgcactcgtatcaccgacgaccagttacgggtactcaggcagtattttgacataaataacagcccttcagaggagcagattaaggagatggcggacaaatccgggctcccccagaaagtgataaagcattggttccggaacaccttatttaaagaacggcaacgcaacaaggatagtccttataactttagcaatccgcctatcaccagcctcgaggaactgaagattgatagtagacccccatccccagagccaccgaaacaggaatattggggttccaaacgatcatctaggactagatttacggactaccaactgcgcgtgctgcaagatttctttgacgctaatgcctatcccaaggatgatgagtttgagcagcttagcaacttgttgaacctgccgaccagagtcatcgtggtctggttccagaacgccagacagaaggctcgcaagaattacgaaaatcagggtgagggtaaagatggcgaaagacgcgagctcactaacgatcggtacatcaggacttccaacttgaactaccagtgcaaaaaatgtagcctcgtcttccagagaattttcgatctcatcaaacaccagaagaagctctgctacaaggacgaagatgaggaggggcaggacgattcacagaacgaggatagtatggacgcaatggaaattctcacccctacttccagctcttgcagcaccccaatgccgtcccaggcatactccgctcccgctccaagcgccaataatacagcatccagcgctttcctacaattaactgcggaagccgaagaactcgctacgtttaattctaagacggaagcaggtgacgaaaagcctaaactcgccgaagccccttcagcacaacccaaccagacccaagagaagcaggggcaacccaagccagagctccagcaacaggaacagcccgaacagaagactaatacacctcaacagaaacttccgcagctagtgagcttacctagcctgcctcaaccccctccccaggcgccaccgccacagtgccctctgcctcagagcagccctagtcccagtcagctgagtcatctcccgcttaagcccctccacacatctacgccacagcaactggccaacctccctcctcagttgatcccctaccagtgcgaccagtgcaagcttgcttttcctagctttgagcactggcaggaacatcagcagctgcacttcttatctgctcaaaatcagtttattcacccgcagtttctggatcgctcattggacatgcccttcatgctctttgacccaagcaacccactcttagcatcccagctcctgtctggggctatccctcagattcctgctagctccgccacttccccaagcacacctacatctaccatgaacacacttaagcgcaaactggaggaaaaggcttcagcaagccctggagagaatgattctggcacgggcggtgaagagccccagcgggacaagcggctcaggaccaccattacacccgaacaactggaaatactgtaccagaaatatcttttagactccaatcccacgcggaagatgttggatcatatagctcacgaagtgggcctgaagaagcgcgtggtacaggtctggttccagaatacccgcgcacgggaacggaagggccagtttcgcgctgtagggccagctcaggctcataggcgctgtcctttttgccgagcactgttcaaagcaaaaacagctctggaggcacacatccgcagccgccattggcatgaggccaagagggccggatataatttaactttatctgcgatgctccttgactgtgacggcggtttacaaatgaagggagacatatttgacggaacgagcttctcacatctgccgccatcaagttccgacggccaaggagtgcccctttcacccgtctccaagaccatggaactgtcccctcggaccctgctctccccatcgagtattaaggtagaaggcatcgaagactttgagagcccatctatgtcatccgtgaatctcaacttcgaccagaccaagttggataatgatgattgttcgagtgtaaacaccgccatcaccgatactacaaccggggatgagggtaacgcagacaatgactccgctaccggcatcgctactgagaccaagtcatcttccgccccaaatgagggtctcacaaaggccgctatgatggcgatgagcgagtacgaagacagactgtccagcggccttgtttcgcccgctccgtccttttacagtaaagaatacgataacgagggcactgtcgactattcagaaacatcaagcctcgccgacccatgctcaccttcacctggagcttcggggtccgcaggcaagtctggcgatagtggcgatcgtcccggacagaagaggttccgaacccagatgacgaatctacaactcaaggtgctcaaatcttgcttcaacgattatagaactcccacaatgctagaatgcgaagtgcttggtaacgacatagggctccctaaaagagtcgtgcaggtctggttccagaatgcgagagccaaggagaaaaagtcaaagctgagtatggcgaaacatttcggcataaaccagacgtcctacgaaggccctaagacagagtgcacactttgcggcatcaaatatagtgcacgtctgtctgtgcgggaccatatcttctctcagcagcatatctcaaaggtgaaggacactattggtagtcagcttgataaggaaaaagagtattttgatcctgccacagtgaggcagctgatggctcagcaagagctcgaccgcataaaaaaggccaatgaagtgctcgggctggccgctcagcagcagggaatgttcgacaataccccactccaggcactcaacttgcctaccgcctatcccgctctccaaggtatccctcccgttttgcttcctggattgaacagtcccagtctgccagggtttacccccagtaataccgccttaacttccccaaaaccaaacttaatgggccttccctccactactgtaccatcaccgggattgccaacttccggcttgccaaataagcccagctctgcgagtttaagctccccaacgcctgctcaggccaccatggccatgggaccacagcagccgccacagcagcagcagcagcagcagcagcctcaggtccagcagccacctcctccgcctgcagctcaaccaccccctaccccccagctccctttacagcaacagcaacagcggaaggacaaagatagtgaaaaagtgaaagaaaaggaaaaagcacataagggcaagggcgagcctctaccagtcccaaaaaaggagaagggagaagctccgacagccacagccgctacaatcagcgctcctctccccactatggagtacgccgtagacccagcacaactacaggctctgcaagcggcactgacttcagatccaactgctttgctcacctcccagtttcttccctattttgtgcccggattttcaccttactacgcgcctcagatccctggagccctgcagtcggggtacctccagcctatgtatgggatggaagggttgttcccctactcgcctgccctgagtcaggcactcatgggactaagccctggatcactcctgcagcaataccagcagtaccagcagtcccttcaggaggccatccagcagcaacagcaacggcagctccaacaacagcaacagcagaaggttcagcagcagcaaccaaaagccagccagaccccggtccctccaggtgctccatcacccgacaaagaccccgcaaaggagagtccaaagccggaggaacaaaaaaacactcctcgcgaagttagccctctgttgcctaagcttcctgaagagcccgaggcggaaagcaagagcgctgatagcctgtatgacccattcatcgtgcctaaagtacagtataaacttgtgtgcaggaaatgtcaggctggtttctcggatgaggaggccgcacggagccaccttaaaagtctttgttttttcggacagtccgtggtcaacttacaggaaatggtattacatgtgcctacaggcggaggcggaggtggaagcgggggtggcggtggcggagggggtggtggtggcggtggtggctcctatcattgcctcgcatgtgaaagtgctctgtgtggtgaggaagccctgagccagcatctggagtccgctctgcataaacacaggacaatcacccgcgcagccaggaatgccaaggagcaccccagcctcctcccacactcggcatgctttcccgacccgtctacggcttccacttcccagtctgccgcacacagcaatgattctcctccacctccatctgccgctgcgccttcttctgcaagcccgcatgcttccagaaagagttggcctcaggtggtatctagggcgtctgcggctaagcctccctctttccctcctctgagttcgtctagcactgtgacaagtagctcttgttcaacctccggggtgcagccttcaatgccaacagacgattattccgaagagtccgacacagatcttagtcaaaagtccgacgggcctgcctctccagtggagggtccaaaggatccaagctgtcctaaggactccgggcttactagtgtgggcacagatacatttcgactgtag

SEQ ID NO: 168785 - DNA, 9671 bp, Artificial Sequence
  derived and/or modified sequence
aatttaaagtggtctctattcgaagtctctgctctttcacttaaacctttactctaagctgtccccctccactaatgcccccattctttggagatgctcttttcctagttaatttaaacattgctgcgtttgcttagagagagagagagagagagagagagagagagagagagaaaggggaaaataataagaaagaaaagagaagggggggaagaagaaaggaaaaaaaaaatcttaaaaagattcttagccaggttcctattgttgctcctatgcattccacttctcggtgtgtgtgtgcgtgtgtgtgtgtgtgtgtgtgtgtgcgcgcgctcgtgtgtgtgtcgtgtgtgtgtgtgtgtgtgtttttaatacatgcataaacttttggagcctctctccctcttctaggctcttctcccatcctctcttcctgctctccttgccctgctcatcactttcccctgtttttttttttttttcctcccttcctcccctctgcctccctccacctcccccttttcttttttgctgaatcttattgatccagaaggtggctaattagcccttcccgtcgtgcctgggtaatgaagcacatgcgcactgaattaatcacagccattttttgcaggaaactaattagcagaataaagatccaaagacttttttttcttttcactcatcagctcccacttccagcgcgtcccctccgaccgctgcagccgccaccgccgccgcctcctcctcctcctcctcccggccgcagccgccgccgccgcctgctttgcatcccaattacagcctagagccgctgccgccgccgccgccgcttctcttccgtggcccctgcccgctccgggggctgtaaactccccgccaaccatgctgctcggcggcagcggcggcggcggctccggctccccggctgcggccgcctcccgccccgggctccgccgagcgcgctccagctccgccgccgccgccgccgccgccgccgccgccagcagcgcgtcctccgccgccgccgacccccgccagccgccgctgctgccttgatgggctccgcggcccgagcgcctcttttcgggattaaaagcgccgccagctcccgccgccgccgccgtcgccagcagcgccgctgcagccgccgccgccggagaagcaaccgctgggcggtgagatccccctagacatgcggctcgggggcgggcagctggtgtcagaggagctgatgaacctgggcgagagcttcatccagaccaacgacccgtcgctgaagctcttccagtgcgccgtctgcaacaagttcacgacggacaacctggacatgctgggcctgcacatgaacgtggagcgcagcctgtcggaggacgagtggaaggcggtgatgggggactcataccagtgcaagctctgccgctacaacacccagctcaaggccaacttccagctgcactgcaagacagacaagcacgtgcagaagtaccagctggtggcccacatcaaggagggcggcaaggccaacgagtggaggctcaagtgtgtggccatcggcaaccccgtgcacctcaagtgcaacgcctgtgactactacaccaacagcctggagaagctgcggctgcacacggtcaactccaggcacgaggccagcctgaagttgtacaagcacctgcagcagcatgagagtggtgtagaaggtgagagctgctactaccactgcgttctgtgcaactactccaccaaggccaagctcaacctcatccagcatgtgcgctccatgaagcaccagcgaagcgagagcctgcgaaagctgcagcggctgcagaagggccttccagaggaggacgaggacctggggcagatcttcaccatccgcaggtgcccctccacggacccagaagaagccattgaagatgttgaaggacccagtgaaacagctgctgatccagaggagcttgctaaggaccaagagggcggagcatcgtccagccaagcagagaaggagctgacagattctcctgcaacctccaaacgcatctccttcccaggtagctcagagtctcccctctcttcgaagcgaccaaaaacagctgaggagatcaaaccggagcagatgtaccagtgtccctactgcaagtacagtaatgccgatgtcaaccggctccgggtgcatgccatgacgcagcactcggtgcaacccatgcttcgctgccccctgtgccaggacatgctcaacaacaagatccacctccagctgcacctcacccacctccacagcgtggcacctgactgcgtggagaagctcattatgacggtgaccacccctgagatggtgatgccaagcagcatgttcctcccagcagctgttccagatcgagatgggaattccaatttggaagaggcaggaaagcagcctgaaacctcagaggatctgggaaagaacatcttgccatccgcaagcacagagcaaagcggagatttgaaaccatcccctgctgacccaggctctgtgagagaagactcaggcttcatctgctggaagaaggggtgcaaccaggttttcaaaacttctgctgcccttcagacgcattttaatgaagtgcatgccaagaggcctcagctgccggtgtcagatcgccatgtgtacaagtaccgctgtaatcagtgtagcctggccttcaagaccattgaaaagttgcagctccattctcagtaccatgtgatcagagctgccaccatgtgctgtctttgtcagcgcagtttccgaactttccaggctctgaagaagcaccttgagacaagccacctggagctgagtgaggctgacatccaacagctttatggtggcctgctggccaatggggacctcctggcaatgggagaccccactctggcagaggaccataccataattgttgaggaagacaaggaggaagagagtgacttggaagataaacagagcccaacgggcagtgactctgggtcagtacaagaagactcgggctcagagccaaagagagctctgcctttcagaaaaggtcccaattttactatggaaaagttcctagacccttctcgcccttacaagtgtaccgtctgcaaggaatctttcactcaaaagaatatcctgctagtacactacaattctgtctcccacctgcataagttaaagagagcccttcaagaatcagcaaccggtcagccagaacccaccagcagcccagacaacaaaccttttaagtgtaacacttgtaatgtggcctacagccagagttccactctggagatccatatgaggtctgtgttacatcaaaccaaggcccgggcagccaagctggaggctgcaagtggcagcagcaatgggactgggaacagcagcagtatttccttgagctcctccacgccaagtcctgtgagcaccagtggcagtaacacctttaccacctccaatccaagcagtgctggcattgctccaagctctaacttactaagccaagtgcccactgagagtgtagggatgccacccctggggaatcctattggtgccaacattgcttccccttcagagcccaaagaggccaatcggaagaaactggcagatatgattgcatccaggcagcagcaacaacagcagcagcaacagcaacaacaacaacaacaacaacaacaacaagcacaaacgctggcccaggcccaggctcaagttcaagctcacctgcagcaggagctgcagcaacaggctgccctgatccagtctcagctgtttaaccccaccctccttcctcacttccccatgacaactgagaccctgctgcaactacagcagcagcagcacctcctcttccctttctacatccccagtgctgagttccagcttaaccccgaggtgagcttgccagtgaccagtggggcactgacactgactgggacaggcccaggcctgctggaagatctgaaggctcaggttcaggtcccacagcagagccatcagcagatcttgccgcagcagcagcagaaccaactctctatagcccagagtcactctgccctccttcagccaagccagcaccccgaaaagaagaacaaattggtcatcaaagaaaaggaaaaagaaagccagagagagagggacagcgccgaggggggagagggcaacaccggtccgaaggaaacactgccagatgccttgaaggccaaagagaagaaagagttggcaccagggggtggttctgagccttccatgctccctccacgcattgcttcagatgccagagggaacgccaccaaggccctgctggagaactttggctttgagttggtcatccagtataatgagaacaagcagaaggtgcagaaaaagaatgggaagactgaccagggagagaacctggaaaagctcgagtgtgactcctgcggcaagttgttttccaacatcttgattttaaagagtcatcaagagcacgttcatcagaattactttcctttcaaacagctcgagaggtttgccaaacagtacagagaccactacgataaactgtacccactgaggccccagaccccagagccaccaccacctccccctccaccccctccacccccacttccggcagcgccgcctcagccggcgtccacaccagccatccccgcatcagccccacccatcacctcacctacaattgcaccggcccagccatcagtgccgctcacccagctctccatgccgatggagctgcccatcttctcgccgctgatgatgcagacgatgccgctgcagaccttgccggctcagctacccccgcagctgggacctgtggagcctctgcctgcggacctggcccaactctaccagcatcagctcaatccaaccctgctccagcagcagaacaagaggcctcgcaccaggatcacagatgatcagctccgagtcttgcggcaatattttgacattaacaactcccccagtgaagagcaaataaaagagatggcagacaagtccgggttgccccagaaagtgatcaagcactggttcaggaacactctcttcaaagagaggcagcgtaacaaggactccccttacaacttcagtaatcctcctatcaccagcctggaggagctcaagattgactcccggcccccttcgccggaacctccaaagcaggagtactggggaagcaagaggtcttcaagaacaaggtttacggactaccagctgagggtcttacaggacttcttcgatgccaatgcttacccaaaggatgatgaatttgagcaactctctaatttactgaaccttccaacccgagtgatagtggtgtggtttcagaatgcccgacagaaggccaggaagaattatgagaatcagggagagggcaaagatggagagcggcgtgagcttacaaatgatagatacattcgaacaagcaacttgaactaccagtgcaaaaaatgtagcctggtgtttcagcgcatctttgatctcatcaagcaccagaagaagctgtgttacaaggatgaggatgaggaggggcaggacgacagccaaaatgaggattccatggatgccatggaaatcctgacgcctaccagctcatcctgcagtaccccgatgccctcacaggcttacagcgccccagcaccatcagccaataatacagcttcctccgctttcttgcagcttacagcggaggctgaggaactggccaccttcaattcaaaaacagaggcaggcgatgagaaaccaaagctggcggaagctcccagtgcacagccaaaccaaacccaagaaaagcaaggacaaccaaagccagagctgcagcagcaagagcagcccgagcagaagaccaacactccccagcagaagctcccccagctggtgtccctgccttcgttgccacagcctcctccacaagcgccccctccacagtgccccttaccccagtcgagccccagtccttcccagctctcccacctgcccctcaagcccctccacacatcaactcctcaacagctcgcaaacctacctcctcagctaatcccctaccagtgtgaccagtgtaagttggcatttccgtcatttgagcactggcaggagcatcagcagctccacttcctgagcgcgcagaaccagttcatccacccccagtttttggacaggtccctggatatgcctttcatgctctttgatcccagtaacccactcctggccagccagctgctctctggggccatacctcagattccagcaagctcagccacttctccttcaactccaacctccacaatgaacactctcaagaggaagctggaggaaaaggccagtgcaagccctggcgaaaacgacagtgggacaggaggagaagagcctcagagagacaagcgtttgagaacaaccatcacaccggaacaactagaaattctctaccagaagtatctactggattccaatccgactcgaaagatgttggatcacattgcacacgaggtgggcttgaagaaacgtgtggtacaagtctggtttcagaacacccgagctcgggaaaggaaaggacagttccgggctgtaggcccagcgcaggcccacaggagatgccctttttgcagagcgctcttcaaagccaagactgctcttgaggctcatatccggtcccgtcactggcatgaagccaagagagctggctacaacctaactctgtctgcgatgctcttagactgtgatgggggactccagatgaaaggagatatttttgacggaactagcttttcccacctacccccaagcagtagtgatggtcagggtgtccccctctcacctgtgagtaaaaccatggaattgtcacccagaactcttctaagcccttcctccattaaggtggaagggattgaagactttgaaagcccctccatgtcctcagttaatctaaactttgaccaaactaagctggacaacgatgactgttcctctgtcaacacagcaatcacagataccacaactggagacgagggcaacgcagataacgacagtgcaacgggaatagcaactgaaaccaaatcctcttctgcacccaacgaagggttgaccaaagcggccatgatggcaatgtctgagtatgaagatcggttgtcatctggtctggtcagcccggccccgagcttttatagcaaggaatatgacaatgaaggtacagtggactacagtgaaacctcaagccttgcagatccctgctccccgagtcctggtgcgagtggatctgcaggcaaatctggtgacagcggagatcggcctgggcagaaacgttttcgcactcaaatgaccaatctgcagctgaaggtcctcaagtcatgctttaatgactacaggacacccactatgctagaatgtgaggtcctgggcaatgacattggactgccaaagagagtcgttcaggtctggttccagaatgcccgggcaaaagaaaagaagtccaagttaagcatggccaagcattttggtataaaccaaacgagttatgagggacccaaaacagagtgcactttgtgtggcatcaagtacagcgctcggctgtctgtacgtgaccatatcttttcccaacagcatatctccaaagttaaagacaccattggaagccagctggacaaggagaaagaatactttgacccagccaccgtacgtcagttgatggctcaacaagagttggaccggattaaaaaggccaacgaggtccttggactggcagctcagcagcaagggatgtttgacaacacccctcttcaggcccttaaccttcctacagcatatccagcgctccagggcattcctcctgtgttgctcccgggcctcaacagcccctccttgccaggctttactccatccaacacagctttaacgtctcctaagccgaacttgatgggtctgcccagcacaactgttccttcccctggcctccccacttctggattaccaaataaaccgtcctcagcgtcgctgagctccccaaccccagcacaagccacgatggcgatgggccctcagcaacccccccagcagcagcagcagcagcagcaaccacaggtgcagcagcctcccccgccgccagcagcccagccgccacccacaccacagctcccactgcaacagcagcagcaacgcaaggacaaagacagtgagaaagtaaaggagaaggaaaaggcacacaaagggaaaggggaacccctgcctgtccccaagaaggagaaaggagaggcccccacggcaactgcagccacgatctcagccccgctgcccaccatggagtatgcggtagaccctgcacagctgcaggccctgcaggccgcgttgacttcggaccccacagcattgctcacaagccagttccttccttactttgtaccaggcttttctccttattatgctccccagatccctggcgccctgcagagcgggtacctgcagcctatgtatggcatggaaggcctgttcccctacagccctgcactgtcgcaggccctgatggggctgtccccaggctccctactgcagcagtaccagcaataccagcagagtctgcaggaggcaattcagcagcagcagcagcggcaactacagcagcagcagcagcaaaaagtgcagcagcagcagcccaaagcaagccaaaccccagtcccccccggggctccttccccagacaaagaccctgccaaagaatcccccaaaccagaagaacagaaaaacaccccccgtgaggtgtcccccctcctgccgaaactccctgaagagccagaagcagaaagcaaaagtgcggactccctctacgaccccttcattgttccaaaggtgcagtacaagttggtctgccgcaagtgccaggcgggcttcagcgacgaggaggcagcgaggagccacctgaagtccctctgcttcttcggccagtctgtggtgaacctgcaagagatggtgcttcacgtccccaccggcggcggcggcggtggcagtggcggcggcggcggcggtggcggcggcggcggcggcggcggctcgtaccactgcctggcgtgcgagagcgcgctctgtggggaggaagctctgagtcaacatctcgagtcggccttgcacaaacacagaacaatcacgagagcagcaagaaacgccaaagagcaccctagtttattacctcactctgcctgcttccccgatcctagcaccgcatctacctcgcagtctgccgctcactcaaacgacagcccccctcccccgtcggccgccgccccctcctccgcttccccccacgcctccaggaagtcttggccgcaagtggtctcccgggcttcggcagcgaagcccccttcttttcctcctctctcctcatcttcaacggttacctcaagttcatgcagcacctcaggggttcagccctcgatgccaacagacgactattcggaggagtctgacacggatctcagccaaaagtccgacggaccggcgagcccggtggagggtcccaaagaccccagctgccccaaggacagtggtctgaccagtgtaggaacggacaccttcagattgtaagctttgaagatgaacaatacaaacaaatgaatttaaatacaaaaattaataacaaaccaatttcaaaaatagactaactgcaattccaaagcttctaaccaaaaaacaa

SEQ ID NO: 168786 - protein, 51 aa, Artificial Sequence
  derived and/or modified sequence
MVAYWRQAGLSYIRYSQICAKVVRDALKTEFKANAKKTSGNSVKIVKVKKE

SEQ ID NO: 168787 - protein, 51 aa, Artificial Sequence
  derived and/or modified sequence
MVAYWRQAGLSYIRYSQICAKAVRDALKTEFKANAEKTSGSNVKIVKVKKE

SEQ ID NO: 168788 - DNA, 156 bp, Artificial Sequence
  derived and/or modified sequence
atggtggcctactggagacaggccggcctgagctacatcagatacagccagatctgcgccaaggtggtgagagacgccctgaagaccgagttcaaggccaacgccaagaagaccagcggcaacagcgtgaagatcgtgaaggtgaagaaggagtag

SEQ ID NO: 168789 - DNA, 156 bp, Artificial Sequence
  derived and/or modified sequence
atggttgcctattggagacaggccgggctcagttatattcggtactctcagatctgcgcaaaagtcgtgcgcgatgccttgaagactgagtttaaagctaacgccaagaaaaccagcgggaacagtgtgaagatcgtgaaggtgaagaaagagtag

SEQ ID NO: 168790 - DNA, 156 bp, Artificial Sequence
  derived and/or modified sequence
atggtggcctactggaggcaggccggcctgagctacatccgctacagccagatctgtgccaaggtggtgagagatgccctgaagacagagttcaaggccaatgccaagaagaccagcggcaacagcgtgaagatcgtgaaggtgaagaaggagtag

SEQ ID NO: 168791 - DNA, 156 bp, Artificial Sequence
  derived and/or modified sequence
atggtggcctactggcggcaggccggcctgagctacatccggtactcacagatttgtgcaaaggtggtcagagacgcactgaaaactgagttcaaagccaatgcaaaaaaaacatcaggcaattccgtgaaaatagttaaggttaagaaagagtag

SEQ ID NO: 168792 - DNA, 156 bp, Artificial Sequence
  derived and/or modified sequence
atggtcgcctactggcggcaggcaggattgtcctacattagatacagtcagatctgtgctaaggttgttcgagatgccctcaagacggaattcaaagccaacgccaagaaaacttctgggaattcagtcaagatcgtaaaagtcaagaaagagtag

SEQ ID NO: 168793 - DNA, 385 bp, Artificial Sequence
  derived and/or modified sequence
gacattgccagagtcttggcgatttggcccgacgcgctccgctttcgctacagcatggtggcctactggagacaggctggactcagctacatccgatactcccagatctgtgcaaaagtagtgagagatgcactgaagacagaattcaaagcaaatgccaaaaagacttctggcaacagcgtaaaaattgtgaaagtaaagaaggaataatctaccctgactaaagcttgaaatgctgcatttccaaggtgaagatgtatgggcacatgttatggcagattgaaaaggatctcatttcatgggaaaaaaaaatcctgtcttgttcataaattgacaatgtcaataaattgaaatatggttcactgttaaaaaaaaaaaaaaaaaa

SEQ ID NO: 168794 - DNA, 156 bp, Artificial Sequence
  derived and/or modified sequence
atggtggcgtactggaggcaggcaggactgagttacattcgatacagccagatttgtgccaaggccgtgcgcgacgctctgaaaacagaattcaaggccaacgctgaaaagacctctggttccaacgtcaagattgtaaaagtgaaaaaggagtag

SEQ ID NO: 168795 - DNA, 156 bp, Artificial Sequence
  derived and/or modified sequence
atggttgcctactggcggcaggcaggcctgtcctacatccgctacagccagatctgtgccaaagccgtgagagacgcactcaaaaccgagtttaaagcaaacgctgaaaagacatccgggtccaatgtgaaaatcgtgaaagtgaaaaaagagtag

SEQ ID NO: 168796 - DNA, 156 bp, Artificial Sequence
  derived and/or modified sequence
atggtggcatactggaggcaagccgggctaagctatatcaggtatagccagatctgcgccaaggctgtacgagatgccttgaagacggagttcaaagctaacgctgagaagacatcaggctcaaatgtaaagattgtgaaggtcaagaaggagtag

SEQ ID NO: 168797 - DNA, 156 bp, Artificial Sequence
  derived and/or modified sequence
atggtggcctactggaggcaggccggcctgagctacatccgctacagccagatctgtgccaaggctgtgagagatgccctgaagacagagttcaaggccaatgctgagaagaccagcggcagcaatgtgaagatcgtgaaggtgaagaaggagtag

SEQ ID NO: 168798 - DNA, 156 bp, Artificial Sequence
  derived and/or modified sequence
atggtggcctactggcggcaggccggcctgagctacatccggtacagccagatatgcgcaaaggcagtgagggacgccctgaaaacagagtttaaggcaaatgccgaaaaaacatcaggatcgaacgtcaaaatcgtgaaggtgaaaaaggaatag

SEQ ID NO: 168799 - DNA, 156 bp, Artificial Sequence
  derived and/or modified sequence
atggtggcctactggcggcaggccggcctgagctacatccggtacagccagatatgtgcaaaggccgtaagagacgccttaaagaccgaattcaaggctaatgctgagaagacttcaggaagtaacgtcaagatagtaaaggtgaagaaggagtag

SEQ ID NO: 168800 - DNA, 156 bp, Artificial Sequence
  derived and/or modified sequence
atggtggcctactggcggcaggccggcctgagctacatccggtacagccagatctgtgcaaaggccgtccgggatgcgctcaaaacagagtttaaggcgaatgcggagaagacctctgggtcaaacgtgaagatcgtgaaggtgaaaaaagagtag

SEQ ID NO: 168801 - DNA, 156 bp, Artificial Sequence
  derived and/or modified sequence
atggttgcatactggcggcaggcaggcctttcatacattcggtatagtcagatctgtgctaaagcagtgcgcgatgccctgaagactgagttcaaggctaatgccgagaaaacttcaggatctaacgtcaaaattgtgaaagtgaagaaagaatag

SEQ ID NO: 168802 - DNA, 156 bp, Artificial Sequence
  derived and/or modified sequence
atggtggcatactggcggcaggcaggtctgagttacatcagatatagtcagatctgcgccaaggctgtgcgggacgctctgaaaaccgagttcaaggccaatgctgagaaaacctccggcagtaacgtgaagatcgtgaaagtcaagaaggaatag

SEQ ID NO: 168803 - DNA, 156 bp, Artificial Sequence
  derived and/or modified sequence
atggttgcctattggcgacaggcagggttgtcatacatcaggtacagccagatttgtgctaaggccgtccgggatgctctgaaaaccgaatttaaggccaacgcagaaaaaacgtccgggtcgaatgtgaagatcgttaaagttaagaaagaatag

SEQ ID NO: 168804 - DNA, 3665 bp, Artificial Sequence
  derived and/or modified sequence
gattggcaggtccgcacgccccgcctcttccgcttctgtggtctgatcttcctgcggctgaaccgcccggctgagccgacattgccggcgtcttggcgattcggcccgacgagctccgctttcgctacagcatggtggcctactggagacaggctggactcagctacatccgatactcccagatctgtgcaaaagcagtgagagatgcactgaagacagaattcaaagcaaatgctgagaagacttctggcagcaacgtaaaaattgtgaaagtaaagaaggaataatctaccctgactaaagcttgaaatgctacatttccaaggtgaagatgtgtgggcacatgttatggcagattgaaaaggatctcattccatgggaaaaaaaaaaatcctgtcttgttcataaattgacaatgtcaataaattgaaatatggttcactgttactcttgattttagtttgtgagactttttcattttctttaaaggaactgtctgcacagctgcatgattatggccatgtgaaccagggtttcttaaaagcaggggaagccagatttaatatttagtgaccaaagggatacagaaagcattttgaaaatgtctcaaaatagttgtttcatgacattaattggtgatcaaaattatctgctgtcattgaggcttcgtagtcccttatttttgaattgttgtcatgtcagaataatgacatggttatcagtaacaaatggaaataattattaaatactaaaagtgtagattagaagaagaaatactaaattgtacttgttttgtattgtgcacttaaagcctatagataagaacggttacagaatttaagcacaaagtgtttttcacattgttttgtaaatgaatctttatactctggtagcatttctcataggaaatgaggcaaagctattgaataacttgctcattgagttgatggccaaactgaaattaaaacctaggagttttgactgcaagtctgggacacggtgaccacaacagcagtttcgtggtatttccatagtgattcattcattcattatttagggatgaaaaattgttgcaagttatgtttttatctttctttgaaacttgaaagggcttgggcaagtaaaacaccattgcaaagttaactgcctgattttaactgtttttggagactggagaaataaatttgaactggaaattttgacacaccattctaggatcagttctcacatggtacttaagctcacaatgatttatcagggccactgtcagcaatgccgaggataagccgaaaagaacatctttgttctcggcttctgggaatgacttattgtcccgacacttgacctgtaggttttactgaattctcagcacagagcgagcagggaggcagagccaattgagtggaagagggtgcctctggaaaccagcaggttaggagcccttggagtcctccgcctcggagctgtcatcctgctgttggcaagttagggcacctcagttcagtgctgtggcccccaagattaaggtactaggaagtatcctccattacagggaacaggaataaatgaatcaaaaagctatcgggcctttttgacatgggacgaataaagtaactaataggcaaaggggctaaatgatttccagtcaagtaattagagataagtcatttattaaggaggcagatggggtattattggtatatagatggcatagtagattgctagtatattggtagattattggtatatagatggtatgttaaggaggcagatggggtattactggtatatagatggtatggtagattggtagtatattggcagattattggtatatggtatgttgaggcagatggggtattactggtatatagatggcatagtagattggtagtatattggtagattattggtatagagatggtatattattaaggaggcagatggggtaattagaggtgagacttagggacagggcttgtgatatggaaaggagtgaagtcactgagtaaaagacaagtttactgtcagcagagattcttagaggctcttttctccgtgattaaaaaaaaatcctaaaccagtagtataataaacttcctgcctccagcagtgctgggtagctggcaggatgactgtgcccagtgatgaggtgaccccagtcagaccaacttaatgagtatcccactaattagttggatgatgtttgaagctgtcagttaatctcttagttcacatcgttcttgtgagcaaagtgaaggaatcggataagctctaaatttcggtgatgctgctgctctgagagaccaaggtcgctggagcaaccgtactgctaaaggataagctcttcaaaatcaaaagggacagatttcttaagtttctagtttgttttgtgtttttacatctatttctaccatacgaaagagtaggatggtgagatgcatttctaaatatttttaactactcagtctggatggttaggcttcaagaaaaggaatttatttagtctgaaataaagcaattttgccatttaaaattgaattactttgtagtttaatgattactattgagcaaacaaatctttacagtaatataagtcagcaaaagttttttaaaaggtttaaatccctccttccttacatctatttcattgcttttttaggtttgggaagtaaagcaccagaggaagcatgtgtaaatccttgtataatcgcaggctgtaagtctttagcatctcaggaagttactaacttcaaactaagtatataggtagagtttcttactaaatctagtgcttcttgaaccacaagtagaaagcatttaaaacatgaatgttgttttgtgttttttgaagtttgtaaatagaagacttgttgatgatccgatggcaaggtatttttctcttggtatgtattttagttatttcctcgtgatgcataagtgaaaagagtgaagtttctcagaatgagcaactgtcatccatctacctgctattttattattgctgattacaaaagcaaatcaagagatgagaacccagttgcctgcaagtaaatatttactgcattgagggtcggagcattttcccattaccggttatccatggatcaaatagtgtatctcagtggtaattctagagggccattaaaaccctgatggtgctggaagagatggcagtgctgcatgtcagaaataggtaaactgtaattaagaagttacagatgatttgattacgctcttgtgtatttggtcctgttataatgtgagcagattaaaatcatgtagtgcttaaagctatgtcattatgcaaacatttatggcaacttctgcaaattaatttgaactgtaaaagttccctaatgagacgatgtcctccataactgagaaggacactgcagccattgctgcttaattcctgcatttgaatggttgccgagcgcatggtgtgccctttctcaaagagcagagaggctgcagagcattttggggggtgatgactgaatgaaagtgaaaagaccatttcaaaatagcctttaaaaggaaagccaaggatgattattaatgaattcctgggatctaacagtagtaagaaatttaaactatataaacatatatgttaaaggctagctcttcagaaataaagatcagaagactgcagttcttta

SEQ ID NO: 168805 - DNA, 1878 bp, Artificial Sequence
  derived and/or modified sequence
gtggtctgatcttcctgcggctgaaccgcccggctgagccgacattgccggcgtcttggcgattcggcccgacgagctccgctttcgctacagcatggtggcctactggagacaggctggactcagctacatccgatactcccagatctgtgcaaaagcagtgagagatgcactgaagacagaattcaaagcaaatgctgagaagacttctggcagcaacgtaaaaattgtgaaagtaaagaaggaataatctgtaagttatggatttatttagaagaacagttgcatcttaagtttttggagcaccataaagatcaaaataattttagttttgggttctattcattttttagtcagtgtatttggaagttagttattgggatggtataatttaaagcatgcaggttatagaagtcccctggcctaataaaaagaaagtcttcttgggccctgacaagcagaagtaattggcacattgattttcagttcatttagcaatgcttaggtagagagccatcgtatttgaattaaacctgtttcatttgtctgcacaaatcaaataatttggaggatgaactccccacttgtataattgcaattggagttacataacagtccaagagcatgaaaaactacagttctttacatttttatttcccccacaaccactaatgttctcacaaatcactacttcccgaacataataactacaggcacaggcaagggtcctgctgttgtatcaagcaataaaatctgcaagaccccgcagcgaatactgttttgctaatttattatgctttcagagggtttggttcattttacttttccaaagatgttggtgatgtaaagttaaattctcgtgaaataaaaaggtctgtacagttgataagtgtagacttttgtgttccacattataaaagtggtttgatctctaaagtactttcttgacattgttatttcaaaagtaggcaaggcaaattatcagagagatgtttttcagatttaatttttcttgttttgcttttaaaaagcttcagacccataatagcacagaaatgtgataaatattaatcctttggcagcttatggttatgagcaattttacttattggaactgtctcccctaagcacttttcattttcattttgaattagtaaatattttattacaagtctggagatgcagtgttttgaatttagccctttttctaggggctctctgtctaatctcataattctgagtaatgagacctggttttatgttgggttgttttgttttaacagtaagctaacagaaaatcatttagcctcactcggctcagagctgccagactgcatctaatgctgagattttgcaaagtcctgggggtcaggaagtagtgtccgatccccttaaacaaagcattagcccctctctgttatgcccttcagggttacagaccccacctcattagcacaaggagatgttagtgtcttttaaaggcaaagtagtttctttattctgggagagtgtttacttttactcagcaggaaaatgcctgcttgactaagcctgtgtacttgaaccagcactttttacatctgagccacggcaatgtgaatgatagccacagttatacagttcactataaggaagttatttcttatattcatgttgagtttttaagaaaacacagagaactagccagcaacttgcattttctttttcctcctagaccctgactaaagcttgaaatgctacatttccaaggtgaagatgtgtgggcacatgttatggcagattgaaaaggatctcattccatgggaaaaaaaaaaatcctgtcttgttcataaattgacaatgtcaataaattgaaatatggttcactgttactcttga

SEQ ID NO: 168806 - DNA, 697 bp, Artificial Sequence
  derived and/or modified sequence
tcttggcgattcggcccgacgagctccgctttcgctacagcatggtggcctactggagacaggctggactcagctacatccgatactcccagatctgtgcaaaagcagtgagagatgcactgaagacagaattcaaagcaaatgctgagaagacttctggcagcaacgtaaaaattgtgaaagtaaagaaggaataatctgtttgggaagtaaagcaccagaggaagcatgtgtaaatccttgtataatcgcaggctgtaagtctttagcatctcaggaagttactaacttcaaactaagtatataggtagagtttcttactaaatctagtgcttcttgaaccacaagtagaaagcatttaaaacatgaatgttgttttgtgttttttgaagtttgtaaatagaagacttgttgatgatccgatggcaaggtatttttctcttggtatgtattttagttatttcctcgtgatgcataagtgaaaagagtgaagtttctcagaatgagcaactgtcatccatctacctgctattttattattgctgattacaaaagcaaatcaagagatgagaacccagttgcctgcaagtaaatatttactgcattgagggtcggagcattttcccattaccggttatccatggatcaaatagtgtatctcagtggtaattctagagggccattaaaaccctgatgg

SEQ ID NO: 168807 - DNA, 156 bp, Artificial Sequence
  derived and/or modified sequence
atggtggcctactggagacaggccggcctgagctacatcagatacagccagatctgcgccaaggccgtgagagacgccctgaagaccgagttcaaggccaacgccgagaagaccagcggcagcaacgtgaagatcgtgaaggtgaagaaggagtag

SEQ ID NO: 168808 - protein, 494 aa, Artificial Sequence
  derived and/or modified sequence
MSTTLLSAFYDVDFLCKTEKSLANLNLNNMLDKKAVGTPVAAAPSSGFAPGFLRRHSASNLHALAHPAPSPGSCSPKFPGAANGSSCGSAAAGGPTSYGTLKEPSGGGGTALLNKENKFRDRSFSENGDRSQHLLHLQQQQKGGGGSQINSTRYKTELCRPFEESGTCKYGEKCQFAHGFHELRSLTRHPKYKTELCRTFHTIGFCPYGPRCHFIHNADERRPAPSGGASGDLRAFGTRDALHLGFPREPRPKLHHSLSFSGFPSGHHQPPGGLESPLLLDSPTSRTPPPPSCSSASSCSSSASSCSSASAASTPSGAPTCCASAAAAAAAALLYGTGGAEDLLAPGAPCAACSSASCANNAFAFGPELSSLITPLAIQTHNFAAVAAAAYYRSQQQQQQQGLAPPAQPPAPPSATLPAGAAAPPSPPFSFQLPRRLSDSPVFDAPPSPPDSLSDRDSYLSGSLSSGSLSGSESPSLDPGRRLPIFSRLSISDD

SEQ ID NO: 168809 - DNA, 3702 bp, Artificial Sequence
  derived and/or modified sequence
gagttccagcagtccgcgagctgccgtcggctccgcggggggggcgggccgggcaccccggggcgcggaggagcgctcctcgcttctctccttcccccctgccgcactccgccggaccctcccgccggcccgcgccgctgcactcgccctctcctctcgccccccggcaaactttcggcccctccccgcccctcgcccgttattcgtcgtggctcaagcccggccacgccgccccaagggctcctcccgacctcccggcctgccgctccggccactgcgggatccagaaacatgtcgaccacacttctgtccgccttctacgatgtcgacttcttgtgcaagacagagaaatccctggccaacctcaacctgaacaacatgctggacaagaaggcggtggggacgcctgtggccgccgcccccagctcgggcttcgcgccgggattcctccgacggcactcggccagcaacctgcatgcactcgcccaccccgcgcccagccccggcagctgctcgcccaagttcccgggcgccgctaacggcagcagctgcggcagcgcggcggccggcggtccgacctcctacggcacccttaaggagccgtcggggggcggcggcacagccctgctcaacaaggagaacaaattccgggaccgctcgtttagcgagaacggcgatcgcagccagcacctcctgcacctgcagcagcagcagaaggggggcggcggctcccagatcaactccacgcgctacaagaccgagctgtgccggcccttcgaggagagcggcacgtgcaagtacggcgaaaagtgccagttcgcgcatggcttccacgagctgcgcagcctgactcgccatccgaagtacaagaccgagctgtgccgcacctttcataccatcggcttctgcccctatgggccgcgctgccacttcatccacaacgcggacgagcggcggcccgcgccgtcggggggcgcctccggggacctgcgtgcctttggcacgcgcgatgcgttgcacctgggcttcccgcgggagccgcggcccaagttgcaccacagcctcagcttctcgggcttcccgtcgggccaccatcagcccccgggcggcctcgagtcgccgctgctgctcgacagccccacgtcgcgcacgccgccgccgccctcctgctcttcggcctcgtcctgctcctcctccgcctcctcctgttcctcggcctccgcggcctccacgccctcgggcgccccgacatgctgcgcctccgcggcggccgcggctgcggccgctctgctgtacggcaccgggggcgccgaggacctgctggcgccgggggccccgtgcgcggcctgctcgtcggcctcgtgcgccaacaacgccttcgccttcggtccggagctcagcagcctcatcacgccgctcgccatccagacccacaactttgccgccgtggccgccgccgcctactaccgcagtcagcagcagcagcagcagcagggcctggcgccccccgcgcagccgccggcgccgcccagcgcgaccctccccgccggggccgccgcacctccctcgccgcccttcagcttccagctgccgcgccgcctgtccgactcgcccgtgttcgacgcgccccccagccccccggactcgctgtcggaccgcgacagctacctaagcggctccctgagctccggcagcctcagcggctctgagtctcccagcctcgaccctggccgccgcctgccaatcttcagccgcctctccatctccgacgactgaggcaagagggcgccagtgaggaggaagggaaggcggttcagagatgttggaggacacccctcgccatctcgcccttgctgggggcacgggagtggggggggtgacatgggccctaggcagactgcaagcccgaccgagcacttggactcgaactctgtgccgggaggggcccccacccctcctttttcggtttcctcttgtctttttttttttatttttattacgaagtttcattctttttgagcaaaaaagtcgaactttttctgttgaacaaaatattcacaacagggcagttgtgatacgaatagaacaaaaaaaaaaaaaaaacacttaaactttgttaggactccgatgagtttgggacttcaggaaaaatcaacccagcaccagcagctaccaaccaccattccatctcttcacttgaacagcattagttaagtccagatgtgggaacccttctcttggaagaagttcctaattgtgtctcagaccggtgtaaacaaaccagccagccgccaccttgctaaacctataagctttttaaaatccaatatattctgccaagaatatgccttgatagttagccctcagcccataggtgttttttgttttttaacagaattatatatgtctgggggtgaaaaaacccttgcattccaaaggtccatactggttacttggtttcattgccaccacttagtggatgttcagtttagaaccattttgtctgctccctctggaagccttgcgcagagcttactttgtaattgttggagaataactgctgaatttttagctgttttgagttgattcgcaccactgcaccacaactcaatatgaaaactatttaacttatttattatcttgtgaaaagtatacaatgaaaattttgttcatactgtatttatcaagtatgatgaaaagcaatagatatatattcttttattatgttaaattatgattgccattattaatcggcaaaatgtggagtgtatgttcttttcacagtaatatatgccttttgtaacttcacttggttattttattgtaaatgagtacaaaattcttaatttaagagattgtatgtaatatttatttcattaatttctttccttgtttacgtaaattttgaaagattgcatgatttcttgacagaaatcgatcttgatgctgtggaagtagtttgaggaacatcctatgagttttcttagaatgtataaaggttgtagcccatccaacttcaaagaaaaaaatgaccacatactttgcaatcaggctgaaatgtggcatgcttttctaattccaactttataaactagcaaaaaagtgtttgcttattccaccagttctactgtgacatactcgagtataaagacatgtagcaataacggggagtggggggggagtctcacagtgcctttggaagggcccgaacttgccttaaatcttcctcaaccaaataagtattttattagtgcttgagagaatctgaatgtaggatgggttcaactgcacaaaaggaaaagatttttaccactttttttatatagatataaagtgaagcaaccgccttagtgctgaaatatgtagtacatgaatatgccttgtttaattacagaaaattccaaaacttgtactatttttttttccatgtagaaaggcaggaatgtctcctaagctttcctggacagcagatgaatgagcggtagctttagtttgtacgtaggtacagttggagcactatatgtactctctggactactttggacagaagtaggtttttgaatgtaacaagataagtcaacttgagttgtaatatattttggggaatcagctcactacaaattgtgactgtaaacattgtactgtaaatgttttgtagttttcccccaataaaatttttgggaaaaaaaggtaaaaaaaaaa

SEQ ID NO: 168810 - DNA, 387 bp, Artificial Sequence
  derived and/or modified sequence
atgggcaccagcagcatcttcctgtgcgtgctgttcctgtgcggcgccctgggcctgaccatgagccccgccagaggcagactgagatgctacatctgcggcttcaccaagccctgccaccccgtgcccaccgagtgcagagacgacgaggcctgcggcatcagcatcggcaccagcgtgaagaagctgcccctgaagggccccgtgcccagcgccagactgtgccacctgctggccgccctgctgcacagcgtggcccccctgctgagagccggccccgtgcagcacagcagattccccaccgccgcccaccagccccccagactgcccgcccccctgtgcggccagctgagatgggagagaacccccccccccctggccagctag

SEQ ID NO: 168811 - DNA, 1485 bp, Artificial Sequence
  derived and/or modified sequence
atgagcaccaccctgctgagcgccttctacgacgtggacttcctgtgcaagaccgagaagagcctggccaacctgaacctgaacaacatgctggacaagaaggccgtgggcacccccgtggccgccgcccccagcagcggcttcgcccccggcttcctgagaagacacagcgccagcaacctgcacgccctggcccaccccgcccccagccccggcagctgcagccccaagttccccggcgccgccaacggcagcagctgcggcagcgccgccgccggcggccccaccagctacggcaccctgaaggagcccagcggcggcggcggcaccgccctgctgaacaaggagaacaagttcagagacagaagcttcagcgagaacggcgacagaagccagcacctgctgcacctgcagcagcagcagaagggcggcggcggcagccagatcaacagcaccagatacaagaccgagctgtgcagacccttcgaggagagcggcacctgcaagtacggcgagaagtgccagttcgcccacggcttccacgagctgagaagcctgaccagacaccccaagtacaagaccgagctgtgcagaaccttccacaccatcggcttctgcccctacggccccagatgccacttcatccacaacgccgacgagagaagacccgcccccagcggcggcgccagcggcgacctgagagccttcggcaccagagacgccctgcacctgggcttccccagagagcccagacccaagctgcaccacagcctgagcttcagcggcttccccagcggccaccaccagccccccggcggcctggagagccccctgctgctggacagccccaccagcagaaccccccccccccccagctgcagcagcgccagcagctgcagcagcagcgccagcagctgcagcagcgccagcgccgccagcacccccagcggcgcccccacctgctgcgccagcgccgccgccgccgccgccgccgccctgctgtacggcaccggcggcgccgaggacctgctggcccccggcgccccctgcgccgcctgcagcagcgccagctgcgccaacaacgccttcgccttcggccccgagctgagcagcctgatcacccccctggccatccagacccacaacttcgccgccgtggccgccgccgcctactacagaagccagcagcagcagcagcagcagggcctggccccccccgcccagccccccgccccccccagcgccaccctgcccgccggcgccgccgccccccccagcccccccttcagcttccagctgcccagaagactgagcgacagccccgtgttcgacgccccccccagcccccccgacagcctgagcgacagagacagctacctgagcggcagcctgagcagcggcagcctgagcggcagcgagagccccagcctggaccccggcagaagactgcccatcttcagcagactgagcatcagcgacgactag

SEQ ID NO: 168812 - DNA, 1485 bp, Artificial Sequence
  derived and/or modified sequence
atgtccactaccctcctctcagccttctacgacgtcgacttcttgtgtaaaacggagaaaagcctcgctaacttaaatctgaacaatatgctcgataaaaaggcagtgggcacaccagttgctgctgcgccttcaagtggcttcgccccgggttttctccggcgacactctgcaagtaatcttcacgcactcgcccatcccgccccaagtcccgggtcctgtagtcccaagtttccaggcgcagctaacggtagcagctgcgggtccgctgcagctggaggtccaacctcttacggcacacttaaggaaccctcaggcggagggggtactgccctactgaacaaagagaacaagtttcgcgataggagtttttccgagaacggcgatcggagccagcaccttctccatctccagcaacagcagaagggaggcggcggttctcagataaactcgactagatacaagaccgagttgtgtcgcccctttgaagagtcaggaacatgcaagtacggagaaaaatgccaattcgctcacggctttcatgagcttaggtccctgactaggcaccctaagtataaaacagaactctgtcggacatttcacaccattggcttctgcccatacggtccccggtgtcacttcattcataacgccgatgagcgtaggccagctccctccggaggggcatcgggggacctccgcgccttcggcactcgggacgctttacacctggggttcccaagggaacccaggccaaagctccaccactctctgagcttcagcgggttcccttcaggccatcaccaacctcccggagggctggagtcacccctcctcctcgatagcccgacatcaaggacacctccccctccttcttgcagttctgctagtagttgctcctctagtgcgtcgtcctgtagctccgcatccgcggctagtaccccctccggcgcacccacttgttgtgcctccgccgccgctgcagccgctgccgccttgctgtatggaactggtggggccgaggaccttcttgccccgggcgcaccatgtgctgcatgcagctccgcgtcttgtgctaacaacgcttttgctttcggcccagaattgtcctctctgattactcccctggcaattcaaactcataatttcgcagccgtggccgcagcggcttactatagatcacagcaacagcaacagcaacagggtttagctcccccagcccagccacctgccccacctagtgccacccttcctgccggcgccgcggccccgcccagtccccctttctctttccagctgccccgacggctgtcagactctccagtcttcgacgctcccccgtctcccccagatagcctgtccgaccgcgatagctatctctccggaagcctttcatccggatctctttcgggaagcgagtctccatctctggatcctggtaggcggcttcctatcttctccaggctaagcatcagtgacgactag

SEQ ID NO: 168813 - DNA, 1485 bp, Artificial Sequence
  derived and/or modified sequence
atgagcaccaccctgctgagcgccttctatgatgtggacttcctgtgcaagacagagaagagcctggccaacctgaacctgaacaacatgctggacaagaaggctgtgggcacccctgtggccgccgcccccagcagcggctttgcccctggcttcctgcggcggcacagcgccagcaacctgcacgccctggcccacccagcccccagccctggcagctgcagccccaagtttcctggagctgccaacggcagcagctgtggcagcgctgctgctgggggccccaccagctatggcaccctgaaggagcccagcggcggcggcggcacagccctgctgaacaaggagaacaagttccgggaccgctccttctctgaaaatggagacaggagccagcacctgctgcacctgcagcagcagcagaagggcggcggcggcagccagatcaacagcacccgctacaagacagagctgtgccggccctttgaggagagcggcacctgcaagtacggggagaagtgccagtttgcccacggcttccacgagctgcggagcctgaccaggcaccccaagtacaagacagagctgtgcaggaccttccacaccatcggcttctgcccctacggcccccgctgccacttcatccacaatgctgatgaaagaagacctgcccccagcggcggggccagcggggacctgcgggccttcggcaccagagatgccctgcacctgggcttcccccgggagccccggcccaagctgcaccacagcctgtccttcagcggcttccccagcggccaccaccagcccccaggcggcctggagagccccctgctgctggacagccccaccagcaggaccccacctccacccagctgcagcagcgccagcagctgcagcagcagcgccagcagctgcagcagcgccagcgctgccagcacccccagcggggcccccacctgctgtgccagcgctgctgctgctgctgctgctgccctgctgtatggaactggaggagctgaggacctgctggcccctggggccccctgtgccgcctgcagcagcgccagctgtgccaacaatgcctttgcctttggacctgagctgagcagcctcatcacccccctggccatccagacccacaactttgctgctgtggccgctgctgcctactaccgcagccagcagcagcagcagcagcagggcctggcccccccagcccagcccccagccccacccagcgccaccctgcctgctggagctgctgccccacccagcccccccttctccttccagctgccccggcggctgagtgacagccctgtgtttgatgccccacccagccccccagacagcctgagtgaccgggacagctacctgagcggcagcctgagcagcggcagcctgagcggcagcgagagccccagcctggaccctggaagaaggctgcccatcttcagccggctgagcatcagtgatgactag

SEQ ID NO: 168814 - DNA, 1485 bp, Artificial Sequence
  derived and/or modified sequence
atgagcaccaccctgctgagcgccttctacgacgtggacttcctgtgtaaaaccgaaaagagtctagccaacttaaatctgaacaacatgttagacaaaaaggctgtcgggacacctgtggctgcagctccaagttccgggttcgcacccggattcctgagacgccacagcgcgtccaatctgcacgctctggcgcatcccgctccctctccaggcagctgcagcccaaaattccccggggcagccaacggatctagctgcggcagtgcggctgcggggggtcctacttcatatgggacgttgaaggagccttcaggcggaggtggcacagctcttctcaataaggagaacaaattccgcgaccgatctttcagcgagaacggagaccgctctcaacacttattacatctgcaacagcagcaaaagggaggcgggggcagccaaatcaacagtaccagatacaagactgagctctgcagacctttcgaagaatctggcacctgcaagtatggcgaaaaatgccagttcgcgcacggattccacgaactccgtagccttacgcgacaccctaagtacaaaactgagctgtgtagaacgtttcacactataggtttctgtccatacggtccccgttgccacttcattcacaacgccgacgaaaggcggcctgcaccaagtggaggagctagcggcgacttgcgcgcttttggcacacgggacgcccttcacctgggcttccctcgcgaaccccggcctaagctgcaccacagcctgagctttagtggattcccttcaggccaccatcaacctccaggaggcctcgagagtccactactcctggacagtcctacctcacgaacaccaccccctcctagctgtagctcagcttctagctgttcgagctcagcatcttcttgtagttccgccagcgcagcgtccaccccttccggtgcaccaacgtgctgcgcttccgcggccgcagcggctgccgcagccctcttgtatgggacaggaggtgcagaagacttactggccccaggcgcaccttgtgcggcttgttcctcggcctcctgtgctaacaacgccttcgctttcggcccagagctctcttctctgatcacccctctggctatacagacacacaattttgctgctgtagctgccgccgcatactataggtcccagcaacagcagcaacagcaaggtctcgcacccccagcccagcctccggcacctccatctgcaaccctgcctgctggagccgcggcgcctccgtcccctccattttccttccaacttccccgacgcctctctgatagcccggtctttgacgccccaccatcccccccagattcactctctgatagagacagttacctgtcgggatccctctcttctggatccctttctggcagcgaatccccaagcctggaccctggccggaggttgcctatcttctccagattgtcaatcagtgacgactag

SEQ ID NO: 168815 - DNA, 1485 bp, Artificial Sequence
  derived and/or modified sequence
atgtcaacaaccctgttgtctgccttttacgatgtagacttcctgtgtaagaccgagaaatcactggccaacttaaatctgaataatatgctggacaagaaggcagtgggtacacctgtggccgcagctccaagttctggctttgcccctggttttctgaggaggcactcagcttcgaatctgcacgccctcgcccatccagccccatccccgggatcttgctccccaaagttccccggtgccgctaacggttcaagttgcggctctgcagcagccggtgggcctacgagctacggaacgttaaaggagccctccggcggagggggaacggcactgctaaacaaagagaacaaattcagagacaggagctttagcgagaacggggataggagccagcatttactgcacttacaacagcaacagaaaggtggcggaggctcgcaaattaacagcacaagatacaaaaccgagctgtgcagaccatttgaggaatctgggacatgcaaatacggggaaaagtgccaattcgcccatggttttcacgagctgcgaagtctgacccgacatccaaagtataaaacagaactgtgtagaacttttcacactattggtttctgcccctatggccctcgctgtcattttattcacaatgctgatgagcgcaggccagcaccgagcggtggtgcctcaggtgacctccgtgcttttggtactagagatgctctacatttgggttttccacgtgagcccagacctaagctgcaccacagcctgtccttcagtggtttcccctcagggcaccaccagcccccagggggactggaaagccctctactgttggattccccgacatcgcggactccacccccacctagttgcagctccgcctcctcttgctctagctccgcctcgagttgtagtagcgcctctgcagcctcaacaccctccggcgcaccgacatgctgcgcttcagctgccgcagcagccgctgccgctctgctttatgggacgggaggtgccgaagatctcctcgccccaggcgcaccttgcgcggcttgcagctcagcctcatgtgcaaataacgcctttgcttttgggccagagctcagctctctgattacccctctggctatccaaactcataatttcgctgccgtggccgcagctgcttattacaggagccagcagcaacagcaacaacagggcctggctcctccagcccaaccgcctgccccaccctccgccaccttgcctgcaggagctgcggctccaccctctcctccatttagctttcagctcccacggagactgtccgacagcccagtcttcgacgcccctccttcccctccggacagtctgtcagatcgcgacagctacttgagcgggtccttgtcgtcagggtcattgtccggatctgaatcaccatccctggacccaggtcgtcggctgccaatctttagccgcctgtccatatcggatgactag

SEQ ID NO: 168816 - DNA, 3696 bp, Artificial Sequence
  derived and/or modified sequence
gccgagttccagcagtccgcgagctgccgtcggctccgcggggggggcgggccgggcaccccggggcgcggaggagcgctcctcgcttctctccttcccccctgccgcactccgccggaccctcccgccggcccgcgccgctgcactcgccctctcctctcgccccccggcaaactttcggcccctccccgcccctcgcccgttattcgtcgtggctcaagcccggccacgccgccccaagggctcctcccgacctcccggcctgccgctccggccactgcgggatccagaaacatgtcgaccacacttctgtccgccttctacgatgtcgacttcttgtgcaagacagagaaatccctggccaacctcaacctgaacaacatgctggacaagaaggcggtggggacgcctgtggccgccgcccccagctcgggcttcgcgccgggattcctccgacggcactcggccagcaacctgcatgcactcgcccaccccgcgcccagccccggcagctgctcgcccaagttcccgggcgccgctaacggcagcagctgcggcagcgcggcggccggcggtccgacctcctacggcacccttaaggagccgtcggggggcggcggcacagccctgctcaacaaggagaacaaattccgggaccgctcgtttagcgagaacggcgatcgcagccagcacctcctgcacctgcagcagcagcagaaggggggcggcggctcccagatcaactccacgcgctacaagaccgagctgtgccggcccttcgaggagagcggcacgtgcaagtacggcgaaaagtgccagttcgcgcatggcttccacgagctgcgcagcctgactcgccatccgaagtacaagaccgagctgtgccgcacctttcataccatcggcttctgcccctatgggccgcgctgccacttcatccacaacgcggacgagcggcggcccgcgccgtcggggggcgcctccggggacctgcgtgcctttggcacgcgcgatgcgttgcacctgggcttcccgcgggagccgcggcccaagttgcaccacagcctcagcttctcgggcttcccgtcgggccaccatcagcccccgggcggcctcgagtcgccgctgctgctcgacagccccacgtcgcgcacgccgccgccgccctcctgctcttcggcctcgtcctgctcctcctccgcctcctcctgttcctcggcctccgcggcctccacgccctcgggcgccccgacatgctgcgcctccgcggcggccgcggctgcggccgctctgctgtacggcaccgggggcgccgaggacctgctggcgccgggggccccgtgcgcggcctgctcgtcggcctcgtgcgccaacaacgccttcgccttcggtccggagctcagcagcctcatcacgccgctcgccatccagacccacaactttgccgccgtggccgccgccgcctactaccgcagtcagcagcagcagcagcagcagggcctggcgccccccgcgcagccgccggcgccgcccagcgcgaccctccccgccggggccgccgcacctccctcgccgcccttcagcttccagctgccgcgccgcctgtccgactcgcccgtgttcgacgcgccccccagccccccggactcgctgtcggaccgcgacagctacctaagcggctccctgagctccggcagcctcagcggctctgagtctcccagcctcgaccctggccgccgcctgccaatcttcagccgcctctccatctccgacgactgaggcaagagggcgccagtgaggaggaagggaaggcggttcagagatgttggaggacacccctcgccatctcgcccttgctgggggcacgggagtggggggggtgacatgggccctaggcagactgcaagcccgaccgagcacttggactcgaactctgtgccgggaggggcccccacccctcctttttcggtttcctcttgtctttttttttttatttttattacgaagtttcattctttttgagcaaaaaagtcgaactttttctgttgaacaaaatattcacaacagggcagttgtgatacgaatagaacaaaaaaaaaaaaaaaacacttaaactttgttaggactccgatgagtttgggacttcaggaaaaatcaacccagcaccagcagctaccaaccaccattccatctcttcacttgaacagcattagttaagtccagatgtgggaacccttctcttggaagaagttcctaattgtgtctcagaccggtgtaaacaaaccagccagccgccaccttgctaaacctataagctttttaaaatccaatatattctgccaagaatatgccttgatagttagccctcagcccataggtgttttttgttttttaacagaattatatatgtctgggggtgaaaaaacccttgcattccaaaggtccatactggttacttggtttcattgccaccacttagtggatgttcagtttagaaccattttgtctgctccctctggaagccttgcgcagagcttactttgtaattgttggagaataactgctgaatttttagctgttttgagttgattcgcaccactgcaccacaactcaatatgaaaactatttaacttatttattatcttgtgaaaagtatacaatgaaaattttgttcatactgtatttatcaagtatgatgaaaagcaatagatatatattcttttattatgttaaattatgattgccattattaatcggcaaaatgtggagtgtatgttcttttcacagtaatatatgccttttgtaacttcacttggttattttattgtaaatgagtacaaaattcttaatttaagagattgtatgtaatatttatttcattaatttctttccttgtttacgtaaattttgaaagattgcatgatttcttgacagaaatcgatcttgatgctgtggaagtagtttgaggaacatcctatgagttttcttagaatgtataaaggttgtagcccatccaacttcaaagaaaaaaatgaccacatactttgcaatcaggctgaaatgtggcatgcttttctaattccaactttataaactagcaaaaaagtgtttgcttattccaccagttctactgtgacatactcgagtataaagacatgtagcaataacggggagtggggggggagtctcacagtgcctttggaagggcccgaacttgccttaaatcttcctcaaccaaataagtattttattagtgcttgagagaatctgaatgtaggatgggttcaactgcacaaaaggaaaagatttttaccactttttttatatagatataaagtgaagcaaccgccttagtgctgaaatatgtagtacatgaatatgccttgtttaattacagaaaattccaaaacttgtactatttttttttccatgtagaaaggcaggaatgtctcctaagctttcctggacagcagatgaatgagcggtagctttagtttgtacgtaggtacagttggagcactatatgtactctctggactactttggacagaagtaggtttttgaatgtaacaagataagtcaacttgagttgtaatatattttggggaatcagctcactacaaattgtgactgtaaacattgtactgtaaatgttttgtagttttcccccaataaaatttttgggaaaaaaaggta

SEQ ID NO: 168817 - protein, 323 aa, Artificial Sequence
  derived and/or modified sequence
MGLSNILFVMAFLLSGAAPLKIQAYFNETADLPCQFANSQNQSLSELVVFWQDQENLVLNEVYLGKEKFDSVHSKYMGRTSFDSDSWTLRLHNLQIKDKGLYQCIIHHKKPTGMIRIHQMNSELSVLANFSQPEIVPISNITENVYINLTCSSIHGYPEPKKMSVLLRTKNSTIEYDGVMQKSQDNVTELYDVSISLSVSFPDVTSNMTIFCILETDKTRLLSSPFSIELEDPQPPPDHIPWITAVLPTVIICVMVFCLILWKWKKKKRPRNSYKCGTNTMEREESEQTKKREKIHIPERSDEAQRVFKSSKTSSCDKSDTCF

SEQ ID NO: 168818 - protein, 247 aa, Artificial Sequence
  derived and/or modified sequence
MGRTSFDSDSWTLRLHNLQIKDKGLYQCIIHHKKPTGMIRIHQMNSELSVLANFSQPEIVPISNITENVYINLTCSSIHGYPEPKKMSVLLRTKNSTIEYDGVMQKSQDNVTELYDVSISLSVSFPDVTSNMTIFCILETDKTRLLSSPFSIELEDPQPPPDHIPWITAVLPTVIICVMVFCLILWKWKKKKRPRNSYKCGTNTMEREESEQTKKREKIHIPERSDEAQRVFKSSKTSSCDKSDTCF

SEQ ID NO: 168819 - DNA, 972 bp, Artificial Sequence
  derived and/or modified sequence
atgggcctgtctaacatcttatttgtgatggccttcttgcttagtggcgcggctcccctgaagattcaggcttacttcaacgagacagccgacttgccctgccagttcgcaaattcccagaaccagtcactgagcgagcttgtcgtcttctggcaggatcaagagaacctggtactaaacgaggtgtatttgggtaaggagaagtttgattcagtgcacagcaagtacatgggccgcacttcttttgatagcgatagctggactttgcgtttacataacctccagatcaaagacaaagggctctatcaatgtataattcatcacaaaaaaccaacagggatgatcaggatccaccaaatgaactccgagctgtccgttttggccaacttttcgcaaccagaaatcgttcccatctccaatattacagaaaatgtatacattaacctcacttgctcctctatacacggctacccagagcctaaaaagatgagtgtgctgctgcggactaagaatagtaccattgagtatgatggggtcatgcagaaaagccaggataatgttacagaactgtatgatgtcagcatcagcttaagcgtgtcatttccggacgtgaccagtaacatgactatattttgcatcctggagaccgataagacaagactgttgtcctcacctttctccattgagctggaagatccccagcctcctcctgaccatatcccatggattacagccgtgctccccactgtcataatctgcgtcatggtcttctgtctgattttgtggaaatggaaaaaaaaaaaacgccccagaaatagttacaaatgcggtacaaataccatggagcgggaagagtccgaacagacaaaaaagagggaaaaaattcatattccggagcgttctgatgaagcccagcgggtattcaagagcagcaagacctcctcctgcgataagtccgatacctgcttctag

SEQ ID NO: 168820 - DNA, 972 bp, Artificial Sequence
  derived and/or modified sequence
atgggcctgagcaacatcctgtttgtgatggccttcctgctgtctggagctgcccccctgaagatccaggcctacttcaatgaaacagctgacctgccctgccagtttgccaacagccagaaccagagcctgtctgagctggtggtgttctggcaggaccaggagaacctggtgctgaatgaggtgtacctgggcaaggagaagtttgattctgtgcacagcaagtacatgggccgcaccagctttgacagcgacagctggaccctgcggctgcacaacctgcagatcaaggacaagggcctgtaccagtgcatcatccaccacaagaagcccaccggcatgatccgcatccaccagatgaacagcgagctgtctgtgctggccaacttcagccagcctgagatcgtgcccatcagcaacatcacagaaaatgtgtacatcaacctgacctgcagcagcatccacggctacccagagcccaagaagatgtctgtgctgctgcggaccaagaacagcaccatcgagtatgatggagtgatgcagaagagccaggacaacgtgacagagctgtatgatgtgtccatcagcctgtctgtgtccttcccagatgtgaccagcaacatgaccatcttctgcatcctggagacagacaagacccggctgctgagcagccccttcagcattgagctggaggacccccagcccccaccagaccacatcccctggatcacagctgtgctgcccaccgtcatcatctgtgtgatggtgttctgcctgatcctgtggaagtggaagaagaagaagaggcccagaaattcctacaagtgtggcaccaacaccatggagcgggaggagagcgagcagaccaagaagcgggagaagatccacatccctgagaggagtgatgaggcccagagggtcttcaagagcagcaagaccagcagctgtgacaagagtgacacctgcttctag

SEQ ID NO: 168821 - DNA, 972 bp, Artificial Sequence
  derived and/or modified sequence
atgggcctgagcaacatcctgttcgtgatggccttcctgctgagcggcgcagcacccttaaagattcaggcctattttaacgagactgccgatctgccctgtcagttcgcaaattcccagaatcaatctctctctgagcttgtggtgttttggcaagaccaggaaaacctggtcctcaatgaagtatatctgggaaaggagaaattcgatagtgtccatagtaaatatatggggaggacttctttcgattctgattcctggactctcagactgcataatttgcaaatcaaagacaaagggctgtaccagtgtatcattcaccataaaaagcccactggaatgattcgcattcaccaaatgaactcggagttgtccgtgttagccaatttctctcagccagagatcgtcccaatcagcaacattaccgaaaacgtctatataaatcttacttgcagttctatccacggctaccccgagccaaaaaaaatgtccgtgctccttcgtacaaaaaacagtactatagagtatgacggtgtgatgcagaagagccaggataacgttactgagctgtacgacgtgagcatctcgctgagtgtatcattccctgacgtcacctcaaatatgacaattttctgcatcctggaaacagataagaccaggctcttgtcctcaccctttagcattgaactggaggatccacagccacctccagaccatataccgtggattaccgcagttttgccaaccgtgattatctgtgtcatggtgttctgcttgattctatggaagtggaagaaaaaaaagcgcccaaggaattcatacaaatgtggcacaaatactatggagcgagaagagagcgagcagaccaagaaacgcgaaaaaatacacatccccgaacggtccgacgaggcacagagggtctttaaatcctctaagacaagctcgtgtgataagtccgatacttgtttctag

SEQ ID NO: 168822 - DNA, 972 bp, Artificial Sequence
  derived and/or modified sequence
atgggactttcaaatattctgttcgtgatggcctttttgctctcaggtgcagccccactcaaaattcaggcctacttcaacgagactgcggacctgccttgccagtttgccaacagtcagaaccaaagcttaagcgaattggtggttttttggcaggaccaggagaatcttgtattaaacgaggtgtacctcggtaaggaaaaatttgatagcgtccacagcaaatatatgggcaggactagcttcgactccgatagttggacactgaggctacataatctgcagatcaaggacaagggattgtaccaatgtatcatccaccacaaaaagcctaccggaatgattaggatccatcagatgaactcggagttatctgtgctagctaatttctcacagcccgagatagttccaatctctaacattacggagaatgtttacattaatctgacgtgctccagcattcatggataccccgagcctaaaaagatgtccgtattactccgcacaaaaaattctaccattgaatacgacggtgtcatgcaaaaatctcaggataatgttaccgaactgtacgatgtgagtatatctctgtcagtgagtttcccggacgtgacaagcaatatgacgatcttctgcatcctggagactgataagactcggctcttgagcagcccattttccatcgagctggaagatccccagccccctccagatcatattccctggataaccgctgtgttacctaccgttattatctgtgtcatggtgttctgtctgattctgtggaaatggaaaaagaaaaagcgcccaagaaattcatataagtgcggcactaataccatggaacgcgaggagagcgaacaaaccaagaagcgtgaaaagatacatatccccgagcggtccgacgaagctcaaagagtctttaaatccagcaaaaccagctcttgtgataaaagcgacacatgcttctag

SEQ ID NO: 168823 - DNA, 1604 bp, Artificial Sequence
  derived and/or modified sequence
attgccgaggaaggcttgcacagggtgaaagctttgcttctctgctgctgtaacagggactagcacagacacacggatgagtggggtcatttccagatattaggtcacagcagaagcagccaaaatggatccccagtggtgctgctcctctgaagattcaagcttatttcaatgagactgcagacctgccatgccaatttgcaaactctcaaaaccaaagcctgagtgagctagtagtattttggcaggaccaggaaaacttggttctgaatgaggtatacttaggcaaagagaaatttgacagtgttcattccaagtatatgggccgcacaagttttgattcggacagttggaccctgagacttcacaatcttcagatcaaggacaagggcttgtatcaatgtatcatccatcacaaaaagcccacaggaatgattcgcatccaccagatgaattctgaactgtcagtgcttgctaacttcagtcaacctgaaatagtaccaatttctaatataacagaaaatgtgtacataaatttgacctgctcatctatacacggttacccagaacctaagaagatgagtgttttgctaagaaccaagaattcaactatcgagtatgatggtgttatgcagaaatctcaagataatgtcacagaactgtacgacgtttccatcagcttgtctgtttcattccctgatgttacgagcaatatgaccatcttctgtattctggaaactgacaagacgcggcttttatcttcacctttctctatagagcttgaggaccctcagcctcccccagaccacattccttggattacagctgtacttccaacagttattatatgtgtgatggttttctgtctaattctatggaaatggaagaagaagaagcggcctcgcaactcttataaatgtggaaccaacacaatggagagggaagagagtgaacagaccaagaaaagagaaaaaatccatatacctgaaagatctgatgaagcccagcgtgtttttaaaagttcgaagacatcttcatgcgacaaaagtgatacatgtttttaattaaagagtaaagcccatacaagtattcattttttctaccctttcctttgtaagttcctgggcaacctttttgatttcttccagaaggcaaaaagacattaccatgagtaataagggggctccaggactccctctaagtggaatagcctccctgtaactccagctctgctccgtatgccaagaggagactttaattctcttactgcttcttttcacttcagagcacacttatgggccaagcccagcttaatggctcatgacctggaaataaaatttaggaccaatacctcctccagatcagattcttctcttaatttcatagattgtgttttttttttaaatagacctctcaatttctggaaaactgccttttatctgcccagaattctaagctggtgccccactgaattttgtgtgtacctgtgactaaacaactacctcctcagtctgggtgggacttatgtatttatgaccttatagtgttaatatcttgaaacatagagatctatgtactgtaatagtgtgattactatgctctag

SEQ ID NO: 168824 - DNA, 972 bp, Artificial Sequence
  derived and/or modified sequence
atgggcctgagcaacatcctgttcgtgatggccttcctgctgagcggcgccgcccccctgaagatccaggcctacttcaacgagaccgccgacctgccctgccagttcgccaacagccagaaccagagcctgagcgagctggtggtgttctggcaggaccaggagaacctggtgctgaacgaggtgtacctgggcaaggagaagttcgacagcgtgcacagcaagtacatgggcagaaccagcttcgacagcgacagctggaccctgagactgcacaacctgcagatcaaggacaagggcctgtaccagtgcatcatccaccacaagaagcccaccggcatgatcagaatccaccagatgaacagcgagctgagcgtgctggccaacttcagccagcccgagatcgtgcccatcagcaacatcaccgagaacgtgtacatcaacctgacctgcagcagcatccacggctaccccgagcccaagaagatgagcgtgctgctgagaaccaagaacagcaccatcgagtacgacggcgtgatgcagaagagccaggacaacgtgaccgagctgtacgacgtgagcatcagcctgagcgtgagcttccccgacgtgaccagcaacatgaccatcttctgcatcctggagaccgacaagaccagactgctgagcagccccttcagcatcgagctggaggacccccagcccccccccgaccacatcccctggatcaccgccgtgctgcccaccgtgatcatctgcgtgatggtgttctgcctgatcctgtggaagtggaagaagaagaagagacccagaaacagctacaagtgcggcaccaacaccatggagagagaggagagcgagcagaccaagaagagagagaagatccacatccccgagagaagcgacgaggcccagagagtgttcaagagcagcaagaccagcagctgcgacaagagcgacacctgcttctag

SEQ ID NO: 168825 - protein, 174 aa, Artificial Sequence
  derived and/or modified sequence
MGKITLYEDRGFQGRHYECSSDHPNLQPYLSRCNSARVDSGCWMLYEQPNYSGLQYFLRRGDYADHQQWMGLSDSVRSCRLIPHSGSHRIRLYEREDYRGQMIEFTEDCSCLQDRFRFNEIHSLNVLEGSWVLYELSNYRGRQYLLMPGDYRRYQDWGATNARVGSLRRVIDFS

SEQ ID NO: 168826 - DNA, 525 bp, Artificial Sequence
  derived and/or modified sequence
atgggcaaaatcactctctacgaagacagaggctttcagggacgacattatgaatgcagctccgatcaccccaatctgcagccatacttgtcacggtgcaacagcgcgagagtggactctggttgctggatgctgtacgagcagcctaattatagtgggctccagtattttctgcgccgcggggactatgcagatcatcagcaatggatgggattgtctgactcagtgagatcatgccgcctgatcccgcactccgggagtcacagaataaggctctatgagcgagaagattatcggggacagatgattgagtttaccgaggactgtagttgccttcaggacagattccgcttcaacgagattcacagtttaaatgttcttgagggctcatgggtgctgtatgaactgtcaaactacagaggaaggcagtacctcctgatgcccggcgactaccgacggtaccaagactggggtgcgacaaacgccagggtagggtccctccgacgcgttattgatttttcctag

SEQ ID NO: 168827 - DNA, 525 bp, Artificial Sequence
  derived and/or modified sequence
atgggcaagatcaccctgtatgaggaccggggcttccagggccgccactatgagtgcagcagtgaccaccccaacctgcagccctacctgagccgctgcaacagcgcccgggtggacagcggctgctggatgctgtatgagcagcccaactacagcggcctgcagtacttcctgcggcggggggactatgctgaccaccagcagtggatgggcctgagtgacagcgtgcgcagctgccgcctcatcccccacagcggcagccaccgcatccggctgtatgagcgggaggactaccggggccagatgattgagttcacagaggactgcagctgcctgcaggaccgcttccgcttcaatgagatccacagcctgaatgtgctggagggctcctgggtgctgtatgagctgagcaactaccggggccggcagtacctgctgatgcctggggactaccgccgctaccaggactggggcgccaccaatgcccgggtgggcagcctgcggcgggtgattgacttctcctag

SEQ ID NO: 168828 - DNA, 525 bp, Artificial Sequence
  derived and/or modified sequence
atgggcaagatcaccctgtacgaggaccggggcttccagggccggcactacgagtgtagttcagatcatccgaatttgcagccttatcttagcaggtgcaacagcgcccgggtggactcaggctgctggatgttatacgagcagccaaattactcaggcctgcaatattttctgcggcgcggtgattacgcagaccatcagcagtggatgggtctgagtgattcagtgcggtcttgccggctgatcccacactcaggctcccatcggatacgcctgtacgagagagaagactatagaggtcagatgatcgagttcaccgaagactgtagctgccttcaggatagattcaggtttaatgaaattcacagtctgaacgtgttggagggctcctgggtgctctatgaactgtctaattaccgcggacggcaatacctactgatgcctggtgattaccggagataccaagactggggggctactaacgccagagtgggcagcttacgccgggtgattgactttagctag

SEQ ID NO: 168829 - DNA, 525 bp, Artificial Sequence
  derived and/or modified sequence
atgggaaaaataacactctatgaggataggggctttcaggggcgacattacgaatgctccagcgaccatccaaatctgcagccctacctgtctaggtgcaatagcgccagagtggatagcgggtgttggatgctttacgaacaaccgaattattctgggctccaatacttcctcaggaggggggactacgccgatcaccagcagtggatggggctgtcagactctgtgcggtcatgcaggttgattcctcactcgggaagtcacagaattcgcttgtacgagcgagaagattaccgtgggcaaatgattgaatttacagaagattgcagctgtctgcaggaccgattcaggtttaatgaaattcactccctgaacgtacttgaagggtcttgggtgctatacgagctcagtaattatcgtggccgtcagtacctgttgatgccgggagactatagacgctatcaggattggggagccaccaacgcacgcgtcggctcactgcgtcgcgttattgatttctcatag

SEQ ID NO: 168830 - DNA, 619 bp, Artificial Sequence
  derived and/or modified sequence
ctcagcaccgccgtgcgcccagccagccatggggaagatcaccctctacgaggaccggggcttccagggccgccactatgaatgcagcagcgaccaccccaacctgcagccctacttgagccgctgcaactcggcgcgcgtggacagcggctgctggatgctctatgagcagcccaactactcgggcctccagtacttcctgcgccgcggcgactatgccgaccaccagcagtggatgggcctcagcgactcggtccgctcctgccgcctcatcccccactctggctctcacaggatcagactctatgagagagaggactacagaggccagatgatagagttcactgaggactgctcctgtcttcaggaccgcttccgcttcaatgaaatccactccctcaacgtgctggagggctcctgggtcctctacgagctgtccaactaccgaggacggcagtacctgctgatgccaggggactataggcgctaccaggactggggggccacgaatgccagagtgggctctctgaggagagtcatagatttctcctgaaatatgtcctcttttgttgtttcttaatttggaaactaataaaatattttctgtgtgttcctggca

SEQ ID NO: 168831 - DNA, 525 bp, Artificial Sequence
  derived and/or modified sequence
atgggcaagatcaccctgtacgaggacagaggcttccagggcagacactacgagtgcagcagcgaccaccccaacctgcagccctacctgagcagatgcaacagcgccagagtggacagcggctgctggatgctgtacgagcagcccaactacagcggcctgcagtacttcctgagaagaggcgactacgccgaccaccagcagtggatgggcctgagcgacagcgtgagaagctgcagactgatcccccacagcggcagccacagaatcagactgtacgagagagaggactacagaggccagatgatcgagttcaccgaggactgcagctgcctgcaggacagattcagattcaacgagatccacagcctgaacgtgctggagggcagctgggtgctgtacgagctgagcaactacagaggcagacagtacctgctgatgcccggcgactacagaagataccaggactggggcgccaccaacgccagagtgggcagcctgagaagagtgatcgacttcagctag

SEQ ID NO: 168832 - protein, 853 aa, Artificial Sequence
  derived and/or modified sequence
MKGDTRHLNGEEDAGGREDSILVNGACSDQSSDSPPILEAIRTPEIRGRRSSSRLSKREVSSLLSYTQDLTGDGDGEDGDGSDTPVMPKLFRETRTRSESPAVRTRNNNSVSSRERHRPSPRSTRGRQGRNHVDESPVEFPATRSLRRRATASAGTPWPSPPSSYLTIDLTDDTEDTHGTPQSSSTPYARLAQDSQQGGMESPQVEADSGDGDSSEYQDGKEFGIGDLVWGKIKGFSWWPAMVVSWKATSKRQAMSGMRWVQWFGDGKFSEVSADKLVALGLFSQHFNLATFNKLVSYRKAMYHALEKARVRAGKTFPSSPGDSLEDQLKPMLEWAHGGFKPTGIEGLKPNNTQPVVNKSKVRRAGSRKLESRKYENKTRRRTADDSATSDYCPAPKRLKTNCYNNGKDRGDEDQSREQMASDVANNKSSLEDGCLSCGRKNPVSFHPLFEGGLCQTCRDRFLELFYMYDDDGYQSYCTVCCEGRELLLCSNTSCCRCFCVECLEVLVGTGTAAEAKLQEPWSCYMCLPQRCHGVLRRRKDWNVRLQAFFTSDTGLEYEAPKLYPAIPAARRRPIRVLSLFDGIATGYLVLKELGIKVGKYVASEVCEESIAVGTVKHEGNIKYVNDVRNITKKNIEEWGPFDLVIGGSPCNDLSNVNPARKGLYEGTGRLFFEFYHLLNYSRPKEGDDRPFFWMFENVVAMKVGDKRDISRFLECNPVMIDAIKVSAAHRARYFWGNLPGMNRPVIASKNDKLELQDCLEYNRIAKLKKVQTITTKSNSIKQGKNQLFPVVMNGKEDVLWCTELERIFGFPVHYTDVSNMGRGARQKLLGRSWSVPVIRHLFAPLKDYFACE

SEQ ID NO: 168833 - DNA, 2562 bp, Artificial Sequence
  derived and/or modified sequence
atgaagggggacactagacacctcaatggggaagaagacgcaggaggaagagaggatagcatcctagtgaatggcgcttgtagcgatcagagttccgacagcccccctatcctggaggccatccggaccccagaaatcagaggccgccgcagcagctcacggttgtccaaaagggaggttagttcgctgttaagctatactcaggatctaacaggtgatggggatggcgaggatggggacggtagcgatacccccgtcatgcccaagttatttcgggaaactagaaccagaagcgagagccccgccgtccgcacacgcaataataactccgtgtcaagcagggagcgccaccgcccctcaccacgctctacacgagggagacaggggcggaaccatgtcgacgagtctcctgtggaatttcctgctacccgcagcctgcgtagaagggctactgcctccgccggaaccccatggccgtctcctccctcttcttacctgacgatagatcttaccgacgacaccgaggatactcatgggacaccacagtcaagtagtaccccttatgctcggctagcacaggatagtcagcagggaggcatggaaagcccacaggtggaggccgactcaggtgacggcgacagctctgagtatcaggacggaaaagagtttggcataggggatctggtttgggggaagataaagggttttagctggtggcctgctatggtggtcagctggaaagccacatcaaagaggcaagcgatgtcaggtatgaggtgggtacagtggttcggcgatggcaaattcagtgaggtcagcgctgataaacttgtcgcgctgggactcttttctcagcactttaacctcgctaccttcaacaagctcgtcagctatagaaaagcaatgtatcacgccttggagaaggcccgtgtgcgcgctggaaaaacttttccttcatcgccaggcgacagcctcgaagaccaacttaaacccatgctggagtgggctcatggaggatttaaacccacaggaatcgaaggactgaagcccaataatactcaaccagtggttaataagagcaaagtccgacgggcaggctctagaaagcttgagtctcggaagtatgagaacaaaacccgacgccggactgctgacgactctgcgacaagcgactattgtccggcaccaaagcgattgaagactaactgctacaacaatgggaaggataggggcgacgaggaccaatcaagagagcaaatggcaagcgatgtcgcaaacaacaagtcgtcactcgaggacgggtgcctcagctgcggacgtaagaacccagttagttttcaccccctgtttgagggaggattgtgtcagacctgccgagaccgttttctagagctattctatatgtacgacgatgatggataccagagctattgtaccgtgtgctgcgaggggagggaactcctgctctgcagcaacaccagttgttgccggtgcttttgtgtggagtgcctcgaagtcttggtggggacaggcaccgctgccgaagctaaactgcaagagccctggtcctgttatatgtgtctcccacagagatgccacggagtgctccgaaggcgaaaagattggaatgtacgcctacaggccttcttcacaagtgatacaggtctggaatatgaggcccctaagctctatcctgctattccagccgcacgacgccgccccatacgggtgttgtcccttttcgatggcatcgccaccggatacttggtcctgaaagagctgggaattaaggtcggaaagtatgtcgcatcagaggtatgtgaggagtcaattgcagtgggcaccgtaaagcacgagggcaacattaagtacgtcaatgacgtaagaaacattactaagaagaatattgaggagtggggtccatttgacctggtgataggaggtagcccctgtaacgacctgtccaacgtcaaccccgcccgaaagggtctatatgagggcactgggaggctattttttgaattctatcacctacttaactactcgcgacccaaggagggggatgaccgcccctttttctggatgtttgagaatgtggtggctatgaaagttggggataagagggatatcagccggtttcttgagtgcaaccctgttatgatcgatgctatcaaggtgagcgctgcccaccgagctcggtatttctggggaaatcttcccgggatgaatcgcccagtcattgcgtctaagaatgacaagttggaactccaggactgtttagagtataatcggatagcgaagttaaagaaggtccaaacgatcaccactaaatcgaattcaatcaaacaaggtaaaaatcagctcttccctgtggttatgaacgggaaagaggacgttttgtggtgtactgaactcgagcgtatatttgggttcccagtgcactacacagacgtgtccaatatgggtcggggggcccgccaaaaactgctaggaaggtcatggtccgtgcccgtcattaggcatctttttgctccactgaaggattactttgcctgcgaatag

SEQ ID NO: 168834 - DNA, 2562 bp, Artificial Sequence
  derived and/or modified sequence
atgaagggggacaccaggcacctgaatggagaggaggatgctgggggccgggaggacagcatcctggtgaatggagcctgcagcgaccagagcagtgacagcccccccatcctggaggccatccgcaccccagagatccggggcagaagaagcagcagccggctgagcaagcgggaggtgagcagcctgctgagctacacccaggacctgactggagatggagatggagaagatggagatggcagtgacacccctgtgatgcccaagctgttccgggagaccaggaccaggtctgagagccctgctgtgaggaccaggaacaacaacagcgtgagcagccgggagcggcaccggcccagccccaggagcacccggggccggcagggcaggaaccacgtggatgagagccctgtggagttccctgccaccaggagcctgcggcggcgggccacagccagcgctggcaccccctggcccagcccccccagcagctacctgaccatcgacctgacagatgacacagaggacacccacggcaccccccagagcagcagcaccccctatgcccggctggcccaggacagccagcagggcggcatggagagcccccaggtggaggccgacagcggagatggagacagcagcgagtaccaggacggcaaggagtttggaattggagacctggtgtggggcaagatcaagggcttctcctggtggccagccatggtggtgtcctggaaggccaccagcaagaggcaggccatgagcggcatgcgctgggtgcagtggtttggagatggcaagttcagcgaggtgtctgctgacaagctggtggccctgggcctcttcagccagcacttcaacctggccaccttcaacaagctggtgtcctacaggaaggccatgtaccacgccctggagaaggcccgggtgcgggccggcaagaccttccccagcagccctggggacagcctggaggaccagctgaagcccatgctggagtgggcccatggaggcttcaagcccactggaattgagggcctgaagcccaacaacacccagcctgtggtgaacaagagcaaggtgagaagagctggcagcaggaagctggagagcaggaaatatgagaacaagaccaggagaagaacagcagatgattctgccaccagtgactactgcccagcccccaagaggctgaagaccaactgctacaacaacgggaaggacagaggagatgaggaccagagccgggagcagatggccagtgatgtggccaacaacaagagcagcctggaggatggctgcctgagctgtggcaggaagaaccctgtgtccttccaccccctgtttgagggcggcctgtgccagacctgccgggaccgcttcctggagctgttctacatgtatgatgatgatggctaccagagctactgcaccgtgtgctgtgagggccgggagctgctgctgtgcagcaacaccagctgctgccgctgcttctgtgtggagtgcctggaggtgctggtgggcaccggcacagctgctgaggccaagctgcaggagccctggagctgctacatgtgcctgccccagcgctgccacggcgtgctgcggcggaggaaggactggaatgtgcggctgcaggccttcttcaccagtgacaccggcctggagtatgaggcccccaagctgtacccagccatcccagctgcccggcggcggcccatccgggtgctgagcctgtttgatggcatcgccaccggctacctggtgctgaaggagctgggcatcaaggtgggcaagtatgtggccagcgaggtgtgtgaggagagcattgctgtgggcaccgtgaagcatgagggcaacatcaagtatgtgaatgatgtgaggaacatcaccaagaagaacatcgaggagtggggcccctttgacctggtgattggaggcagcccctgcaatgacctgagcaatgtgaacccagccaggaagggcctgtatgagggcaccggccgcctcttctttgagttctaccacctgctgaactacagccggcccaaggagggagatgaccggcccttcttctggatgtttgaaaatgtggtggccatgaaggtgggggacaagagggacatcagccgcttcctggagtgcaaccctgtgatgattgatgccatcaaggtgtctgctgcccaccgggcccgctacttctggggcaacctgcccggcatgaacagacctgtgattgccagcaagaatgacaagctggagctgcaggactgcctggagtacaacagaattgccaagctgaagaaggtgcagaccatcaccaccaagagcaacagcatcaagcagggcaagaaccagctgtttcctgtggtgatgaatggcaaggaggatgtgctgtggtgcacagagctggagcgcatcttcggcttccctgtgcactacacagatgtgagcaacatgggccgcggggcccggcagaagctgctgggccgctcctggagcgtgcctgtgatccgccacctgtttgcccccctgaaggactactttgcctgtgagtag

SEQ ID NO: 168835 - DNA, 2562 bp, Artificial Sequence
  derived and/or modified sequence
atgaagggcgacacccggcacctgaacggcgaggaggacgccggcggccgtgaggattcaatcctggtgaatggtgcctgtagtgatcagagcagtgattctcctcctatcctcgaagcaattaggactcccgagattaggggtagacgttctagcagcaggctgtcaaagcgcgaagtgtcgagtcttctgtcctacacgcaagacttaaccggggatggggacggcgaggatggagacggtagtgataccccggtgatgccaaagttgttccgggagacccgtacccggtctgagtctccagctgtgcggactagaaataataattcggtgagctcacgcgagcggcaccgcccttcgccaaggtcaacacgcggcagacaaggacgcaatcacgtggacgagagccctgtcgagtttccagccaccaggtcgctgcgtcgtagggcaacggcatccgccggaactccgtggccctccccccccagcagctatctgactatcgacctgacggacgacaccgaggatacacatggcacaccgcagtccagttccactccctacgccagactggcccaggacagtcaacagggcgggatggagagccctcaggtggaggccgattccggcgatggggacagttccgagtaccaggatggaaaggaattcggcatcggcgacctagtctgggggaaaatcaaaggatttagttggtggccagctatggttgtgtcatggaaggccactagcaaaaggcaggccatgtctggaatgcgctgggtgcagtggtttggagacggcaaattttctgaggtgtccgccgataaactggtagcactgggcctcttctctcagcactttaacctggctacattcaataagttagtatcgtatcggaaggccatgtatcacgccctggaaaaagcccgcgtacgagctgggaagacttttccatccagcccgggcgatagcttagaagaccagttgaaacccatgttagagtgggcgcatggtggctttaagcccactggcattgagggcttgaaaccgaataatacacagcccgtcgtgaataagagtaaagtgagaagagcagggtcgagaaagttagaatccaggaagtacgagaacaagactcgccggcgtaccgctgatgacagtgctacatctgactactgtcccgcccccaagcggttaaagactaattgctataataatggcaaggataggggtgatgaggaccagtcaagggagcagatggcaagcgatgtcgcgaataacaaatctagcctcgaagatgggtgcttaagttgtggccggaaaaacccagtttcattccacccgctcttcgagggagggttgtgtcagacatgccgagatcgcttcttggaacttttctacatgtacgacgacgacggctaccagtcttattgcacagtgtgttgcgaaggccgggagcttctgctgtgttccaacacgtcctgctgcagatgcttctgcgttgagtgcctagaggtgctcgtcggtactggcactgctgccgaagccaagctgcaggaaccctggtcatgctacatgtgccttccgcagcgatgtcacggcgtactgcgacgcagaaaagattggaatgtgcgcctgcaagccttctttacctcggatacaggactggagtatgaagcacctaaactttaccctgcaataccagcggcccgacgaagacctatcagagtcctgagcctattcgatggcatcgccaccggatacttagtgctaaaggagctaggaatcaaggtgggcaagtacgtggcaagcgaagtatgtgaggagtctattgccgtaggcacagtgaaacacgaaggcaatataaagtacgtgaatgacgtgcgcaacattacaaaaaaaaacatagaggagtggggtccattcgatttggtcatcggcggatcaccctgtaatgacctgtccaatgtgaatccagccagaaaaggtctgtacgagggtacgggccggctctttttcgagttctatcaccttctgaactactctagacctaaggaaggtgatgacaggccattcttctggatgttcgagaatgtggtggccatgaaagtgggtgacaagcgtgacataagccgttttctcgaatgtaatccagtcatgattgacgcaataaaagtctccgctgcccatagggctaggtatttttggggcaatcttccgggaatgaatcgaccagttatcgcttcaaaaaacgataagcttgagctgcaggattgcctggagtataatagaatcgctaagcttaaaaaagtgcaaactatcactacaaagtcaaacagtatcaaacagggtaagaatcagcttttcccagttgttatgaacgggaaagaggacgtgctgtggtgcacagagctcgaaagaatctttggatttccagtgcactataccgatgtctcaaatatgggcaggggagcgcgccagaagctgctcgggagaagttggtccgtcccagtgatacggcacctgtttgcacccctcaaagactacttcgcatgtgagtag

SEQ ID NO: 168836 - DNA, 2562 bp, Artificial Sequence
  derived and/or modified sequence
atgaaaggtgatacccgtcatctgaatggcgaagaagacgccggaggacgtgaggattcaatactcgtcaatggggcttgctcagatcagagctccgattctccacccatcctagaggcgatacgcacacccgaaattcgcggacgcaggagctccagtcggttaagcaagcgcgaggttagtagcctgttatcttatacccaggatttgacgggcgacggcgacggtgaagacggtgatggaagcgatactcccgtcatgcctaagctgtttcgggaaacaaggaccagatcagaatcccctgcggtgcgaactcgtaataataacagcgtttctagccgagaacggcaccggcctagcccacgaagtacccgcggaaggcagggccgaaaccatgtggatgagtccccggtcgaattccctgctactcgatcactcagacgtagagcaaccgccagcgccggtaccccatggccgtcaccgccttcatcttacctgactatcgatctgaccgacgacacggaggacacacacggtaccccgcagtcaagcagcaccccctacgctcgactcgcccaggacagccagcagggtgggatggaatccccccaagtcgaagcagatagcggagacggtgatagcagcgaataccaagacggaaaggaattcggcatcggtgacctagtgtggggcaaaatcaaaggtttttcgtggtggcctgctatggtagtctcttggaaggcaacctcgaagcgtcaggcgatgagtggaatgagatgggtgcagtggttcggcgacggcaagttttccgaggtgtctgccgataagttagtcgctctgggacttttttcccaacattttaatctcgccacattcaacaaattggtgagttatcgtaaagcaatgtatcatgctctcgagaaggccagagttcgggcaggcaaaacatttccgagttctcccggagatagtcttgaagatcagttaaagcctatgcttgagtgggcccacggcggtttcaagcctaccggtatcgaaggcctgaaaccaaacaacacccagccagttgtgaataaatccaaggtccgaagagccggatcgcggaagttggagtccagaaaatacgagaataagacaagaagacggactgccgacgactctgctacaagcgactattgtcccgctcccaagcggttgaagactaattgctataacaatggaaaggacaggggcgacgaagaccagagtagagaacagatggccagcgacgtggcaaacaataagagttcgctcgaggatggctgcctcagctgtggtaggaagaaccccgtctcctttcatcccttgtttgagggaggtctatgtcagacatgcagggacaggttcctagagctcttttatatgtacgacgatgacggctatcagagctactgtacagtgtgctgcgaggggagagaactactgctgtgtagtaatacctcatgttgtcgctgcttctgtgtggaatgcctggaagtactggtgggtacaggcaccgcggcagaggctaagctccaggaaccatggtcttgctacatgtgcctgccacagcggtgtcacggagtgctacgtcggaggaaggactggaatgtcaggctgcaggcatttttcacctctgacacggggcttgagtacgaggcgcctaaattgtacccagccattcctgccgcaagaagacgtcccataagggtcttatccttgtttgacgggatcgcaactggatatttagtcttgaaggagctgggaattaaagttggcaagtatgtggcctcggaggtgtgtgaggaaagcattgccgtgggtaccgttaaacacgagggcaatatcaaatatgtcaatgatgtgaggaacattactaaaaaaaatatcgaagaatgggggccattcgatttggtgattggcggatctccttgtaatgacctgagtaacgtaaacccagcgaggaagggactgtacgaaggcacagggagactcttttttgaattttaccatttgttaaactacagtcgtccaaaggagggggatgatcgccctttcttctggatgttcgaaaatgtggttgcgatgaaggtgggagataaacgcgacattagccgtttcttggagtgtaatccagttatgattgacgcgatcaaagtctctgccgctcacagagccagatatttctggggtaacctcccagggatgaatcgccctgttattgcctccaaaaacgataagttggaactacaagattgtctcgagtataaccgaattgcgaagttaaagaaggtccaaaccattaccaccaaatctaactcgattaaacaaggtaaaaaccaactgttcccggtggttatgaacggcaaagaagacgtcctgtggtgtacagagttagaacgtatttttggcttcccagtccactatacggacgtttcaaacatgggccgtggcgcaaggcaaaaactgttgggccgaagttggtctgtcccagtgataaggcacctttttgccccactcaaggactacttcgcatgcgagtag

SEQ ID NO: 168837 - DNA, 2562 bp, Artificial Sequence
  derived and/or modified sequence
atgaagggcgacaccagacacctgaacggcgaggaggacgccggcggcagagaggacagcatcctggtgaacggcgcctgcagcgaccagagcagcgacagcccccccatcctggaggccatcagaacccccgagatcagaggcagaagaagcagcagcagactgagcaagagagaggtgagcagcctgctgagctacacccaggacctgaccggcgacggcgacggcgaggacggcgacggcagcgacacccccgtgatgcccaagctgttcagagagaccagaaccagaagcgagagccccgccgtgagaaccagaaacaacaacagcgtgagcagcagagagagacacagacccagccccagaagcaccagaggcagacagggcagaaaccacgtggacgagagccccgtggagttccccgccaccagaagcctgagaagaagagccaccgccagcgccggcaccccctggcccagcccccccagcagctacctgaccatcgacctgaccgacgacaccgaggacacccacggcaccccccagagcagcagcaccccctacgccagactggcccaggacagccagcagggcggcatggagagcccccaggtggaggccgacagcggcgacggcgacagcagcgagtaccaggacggcaaggagttcggcatcggcgacctggtgtggggcaagatcaagggcttcagctggtggcccgccatggtggtgagctggaaggccaccagcaagagacaggccatgagcggcatgagatgggtgcagtggttcggcgacggcaagttcagcgaggtgagcgccgacaagctggtggccctgggcctgttcagccagcacttcaacctggccaccttcaacaagctggtgagctacagaaaggccatgtaccacgccctggagaaggccagagtgagagccggcaagaccttccccagcagccccggcgacagcctggaggaccagctgaagcccatgctggagtgggcccacggcggcttcaagcccaccggcatcgagggcctgaagcccaacaacacccagcccgtggtgaacaagagcaaggtgagaagagccggcagcagaaagctggagagcagaaagtacgagaacaagaccagaagaagaaccgccgacgacagcgccaccagcgactactgccccgcccccaagagactgaagaccaactgctacaacaacggcaaggacagaggcgacgaggaccagagcagagagcagatggccagcgacgtggccaacaacaagagcagcctggaggacggctgcctgagctgcggcagaaagaaccccgtgagcttccaccccctgttcgagggcggcctgtgccagacctgcagagacagattcctggagctgttctacatgtacgacgacgacggctaccagagctactgcaccgtgtgctgcgagggcagagagctgctgctgtgcagcaacaccagctgctgcagatgcttctgcgtggagtgcctggaggtgctggtgggcaccggcaccgccgccgaggccaagctgcaggagccctggagctgctacatgtgcctgccccagagatgccacggcgtgctgagaagaagaaaggactggaacgtgagactgcaggccttcttcaccagcgacaccggcctggagtacgaggcccccaagctgtaccccgccatccccgccgccagaagaagacccatcagagtgctgagcctgttcgacggcatcgccaccggctacctggtgctgaaggagctgggcatcaaggtgggcaagtacgtggccagcgaggtgtgcgaggagagcatcgccgtgggcaccgtgaagcacgagggcaacatcaagtacgtgaacgacgtgagaaacatcaccaagaagaacatcgaggagtggggccccttcgacctggtgatcggcggcagcccctgcaacgacctgagcaacgtgaaccccgccagaaagggcctgtacgagggcaccggcagactgttcttcgagttctaccacctgctgaactacagcagacccaaggagggcgacgacagacccttcttctggatgttcgagaacgtggtggccatgaaggtgggcgacaagagagacatcagcagattcctggagtgcaaccccgtgatgatcgacgccatcaaggtgagcgccgcccacagagccagatacttctggggcaacctgcccggcatgaacagacccgtgatcgccagcaagaacgacaagctggagctgcaggactgcctggagtacaacagaatcgccaagctgaagaaggtgcagaccatcaccaccaagagcaacagcatcaagcagggcaagaaccagctgttccccgtggtgatgaacggcaaggaggacgtgctgtggtgcaccgagctggagagaatcttcggcttccccgtgcactacaccgacgtgagcaacatgggcagaggcgccagacagaagctgctgggcagaagctggagcgtgcccgtgatcagacacctgttcgcccccctgaaggactacttcgcctgcgagtag

SEQ ID NO: 168838 - DNA, 4336 bp, Artificial Sequence
  derived and/or modified sequence
acccactcccgctgccccgtccggcccgcgccgcttcctcgcagcagctgctcccggctccgcggccgcagcccgcgtggacgctccgagcgccccccgacggacgggaccggctccctggcggtcgggcgagcgggcggcaacgctgcccggccggcagcgctggggttaagtggcccaagtaaacctagctcggcgatcggcgccggagattcgcgagcccagcgccctgcacggccgccagccggcctcccgccagccagccccgacccgcggctccgccgcccagccgcgccccagccagccctgcggcaggaaagcatgaagggagacaccaggcatctcaatggagaggaggacgccggcgggagggaagactcgatcctcgtcaacggggcctgcagcgaccagtcctccgactcgcccccaatcctggaggctatccgcaccccggagatcagaggccgaagatcaagctcgcgactctccaagagggaggtgtccagtctgctaagctacacacaggacttgacaggcgatggcgacggggaagatggggatggctctgacaccccagtcatgccaaagctcttccgggaaaccaggactcgttcagaaagcccagctgtccgaactcgaaataacaacagtgtctccagccgggagaggcacaggccttccccacgttccacccgaggccggcagggccgcaaccatgtggacgagtcccccgtggagttcccggctaccaggtccctgagacggcgggcaacagcatcggcaggaacgccatggccgtcccctcccagctcttaccttaccatcgacctcacagacgacacagaggacacacatgggacgccccagagcagcagtaccccctacgcccgcctagcccaggacagccagcaggggggcatggagtccccgcaggtggaggcagacagtggagatggagacagttcagagtatcaggatgggaaggagtttggaataggggacctcgtgtggggaaagatcaagggcttctcctggtggcccgccatggtggtgtcttggaaggccacctccaagcgacaggctatgtctggcatgcggtgggtccagtggtttggcgatggcaagttctccgaggtctctgcagacaaactggtggcactggggctgttcagccagcactttaatttggccaccttcaataagctcgtctcctatcgaaaagccatgtaccatgctctggagaaagctagggtgcgagctggcaagaccttccccagcagccctggagactcattggaggaccagctgaagcccatgttggagtgggcccacgggggcttcaagcccactgggatcgagggcctcaaacccaacaacacgcaaccagtggttaataagtcgaaggtgcgtcgtgcaggcagtaggaaattagaatcaaggaaatacgagaacaagactcgaagacgcacagctgacgactcagccacctctgactactgccccgcacccaagcgcctcaagacaaattgctataacaacggcaaagaccgaggggatgaagatcagagccgagaacaaatggcttcagatgttgccaacaacaagagcagcctggaagatggctgtttgtcttgtggcaggaaaaaccccgtgtccttccaccctctctttgagggggggctctgtcagacatgccgggatcgcttccttgagctgttttacatgtatgatgacgatggctatcagtcttactgcactgtgtgctgcgagggccgagagctgctgctttgcagcaacacgagctgctgccggtgtttctgtgtggagtgcctggaggtgctggtgggcacaggcacagcggccgaggccaagcttcaggagccctggagctgttacatgtgtctcccgcagcgctgtcatggcgtcctgcggcgccggaaggactggaacgtgcgcctgcaggccttcttcaccagtgacacggggcttgaatatgaagcccccaagctgtaccctgccattcccgcagcccgaaggcggcccattcgagtcctgtcattgtttgatggcatcgcgacaggctacctagtcctcaaagagttgggcataaaggtaggaaagtacgtcgcttctgaagtgtgtgaggagtccattgctgttggaaccgtgaagcacgaggggaatatcaaatacgtgaacgacgtgaggaacatcacaaagaaaaatattgaagaatggggcccatttgacttggtgattggcggaagcccatgcaacgatctctcaaatgtgaatccagccaggaaaggcctgtatgagggtacaggccggctcttcttcgaattttaccacctgctgaattactcacgccccaaggagggtgatgaccggccgttcttctggatgtttgagaatgttgtagccatgaaggttggcgacaagagggacatctcacggttcctggagtgtaatccagtgatgattgatgccatcaaagtttctgctgctcacagggcccgatacttctggggcaacctacccgggatgaacaggcccgtgatagcatcaaagaatgataaactcgagctgcaggactgcttggaatacaataggatagccaagttaaagaaagtacagacaataaccaccaagtcgaactcgatcaaacaggggaaaaaccaacttttccctgttgtcatgaatggcaaagaagatgttttgtggtgcactgagctcgaaaggatctttggctttcctgtgcactacacagacgtgtccaacatgggccgtggtgcccgccagaagctgctgggaaggtcctggagcgtgcctgtcatccgacacctcttcgcccctctgaaggactactttgcatgtgaatagttccagccaggccccaagcccactggggtgtgtggcagagccaggacccaggaggtgtgattcctgaaggcatccccaggccctgctcttcctcagctgtgtgggtcataccgtgtacctcagttccctcttgctcagtgggggcagagccacctgactcttgcaggggtagcctgaggtgccgcctccttgtgcacaaatcagacctggctgcttggagcagcctaacacggtgctcattttttcttctcctaaaactttaaaacttgaagtaggtagcaacgtggctttttttttttcccttcctgggtctaccactcagagaaacaatggctaagataccaaaaccacagtgccgacagctctccaatactcaggttaatgctgaaaaatcatccaagacagttattgcaagagtttaatttttgaaaactggctactgctctgtgtttacagacgtgtgcagttgtaggcatgtagctacaggacatttttaagggcccaggatcgttttttcccagggcaagcagaagagaaaatgttgtatatgtcttttacccggcacattccccttgcctaaatacaagggctggagtctgcacgggacctattagagtattttccacaatgatgatgatttcagcagggatgacgtcatcatcacattcagggctattttttcccccacaaacccaagggcaggggccactcttagctaaatccctccccgtgactgcaatagaaccctctggggagctcaggaaggggtgtgctgagttctataatataagctgccatatattttgtagacaagtatggctcctccatatctccctcttccctaggagaggagtgtgaagcaaggagcttagataagacaccccctcaaacccattccctctccaggagacctaccctccacaggcacaggtccccagatgagaagtctgctaccctcatttctcatctttttactaaactcagaggcagtgacagcagtcagggacagacatacatttctcataccttccccacatctgagagatgacagggaaaactgcaaagctcggtgctccctttggagattttttaatccttttttattccataagaagtcgtttttagggagaacgggaattcagacaagctgcatttcagaaatgctgtcataatggtttttaacaccttttactcttcttactggtgctattttgtagaataaggaacaacgttgacaagttttgtggggctttttatacactttttaaaatctcaaacttctatttttatgtttaacgttttcattaaaattttttttgtaactggagccacgacgtaacaaatatggggaaaaaactgtgccttgtttcaacagtttttgctaatttttaggctgaaagatgacggatgcctagagtttaccttatgtttaattaaaatcagtatttgtcta

SEQ ID NO: 168839 - DNA, 1709 bp, Artificial Sequence
  derived and/or modified sequence
acggccgccagccggcctcccgccagccagccccgacccgcggctccgccgcccagccgcgccccagccagccctgcggcaggaaagcatgaagggagacaccaggcatctcaatggagaggaggacgccggcgggagggaagactcgatcctcgtcaacggggcctgcagcgaccagtcctccgactcgcccccaatcctggaggctatccgcaccccggagatcagaggccgaagatcaagctcgcgactctccaagagggaggtgtccagtctgctaagctacacacaggacttgacaggcgatggcgacggggaagatggggatggctctgacaccccagtcatgccaaagctcttccgggaaaccaggactcgttcagaaagcccagcttccctgagacggcgggcaacagcatcggcaggaacgccatggccgtcccctcccagctcttaccttaccatcgacctcacagacgacacagaggacacacatgggacgccccagagcagcagtaccccctacgcccgcctagcccaggacagccagcaggggggcatggagtccccgcaggtggaggcagacagtggagatggagacagttcagagtatcaggatgggaaggagtttggaataggggacctcgtgtggggaaagatcaagggcttctcctggtggcccgccatggtggtgtcttggaaggccacctccaagcgacaggctatgtctggcatgcggtgggtccagtggtttggcgatggcaagttctccgaggtctctgcagacaaactggtggcactggggctgttcagccagcactttaatttggccaccttcaataagctcgtctcctatcgaaaagccatgtaccatgctctggagagaacaagactcgaagacgcacagctgacgactcagccacctctgactactgccccgcacccaagcgcctcaagacaaattgctataacaacggcaaagaccgaggggatgaagatcagagccgagaacaaatggcttcagatgttgccaacaacaagagcagcctggaaggaaaaaccccgtgtccttccaccctctctttgagggggggctctgtcagacatgccgggatcgcttccttgagctgttttacatgtatgatgacgatggctatcagtcttactgcactgtgtgctgcgagggccgagagctgctgctttgcagcaacacgagctgctgccggtgtttctgtgtggagtgcctggaggtgctggtgggcacaggcacagcggccgaggccaagcttcaggagccctggagctgttacatgtgtctcccgcagcgctgtcatggcgtcctgcggcgccggaaggactggaacgtgcgcctgcaggccttcttcaccagtgacacggggcttgaatatgaagcccccaagctgtaccctgccattcccgcagcccgaaggcggcccattcgagtcctgtcattgtttgatggcatcgcgacaggctacctagtcctcaaagagttgggcataaaggtaggaaagtacgtcgcttctgaagtgtgtgaggagtccattgctgttggaaccgtgaagcacgaggggaatatcaaatacgtgaacgacgtgaggaacatcacaaagaaaaatattgaagaatggggcccatttgacttggtgattggcggaagcccatgcaacgatctctcaaatgtgaat

SEQ ID NO: 168840 - protein, 532 aa, Artificial Sequence
  derived and/or modified sequence
MGKKVAIIGAGVSGLASIRSCLEEGLEPTCFEKSNDIGGLWKFSDHAEEGRASIYKSVFSNSSKEMMCFPDFPFPDDFPNFMHNSKIQEYIIAFAKEKNLLKYIQFKTFVSSVNKHPDFATTGQWDVTTERDGKKESAVFDAVMVCSGHHVYPNLPKESFPGLNHFKGKCFHSRDYKEPGVFNGKRVLVVGLGNSGCDIATELSRTAEQVMISSRSGSWVMSRVWDNGYPWDMLLVTRFGTFLKNNLPTAISDWLYVKQMNARFKHENYGLMPLNGVLRKEPVFNDELPASILCGIVSVKPNVKEFTETSAIFEDGTIFEGIDCVIFATGYSFAYPFLDESIIKSRNNEIILFKGVFPPLLEKSTIAVIGFVQSLGAAIPTVDLQSRWAAQVIKGTCTLPSMEDMMNDINEKMEKKRKWFGKSETIQTDYIVYMDELSSFIGAKPNIPWLFLTDPKLAMEVYFGPCSPYQFRLVGPGQWPGARNAILTQWDRSLKPMQTRVVGRLQKPCFFFHWLKLFAIPILLIAVFLVLT

SEQ ID NO: 168841 - DNA, 2087 bp, Artificial Sequence
  derived and/or modified sequence
gtaggctcactagaacattttctctttcaaactgcccagacggttggacaggacgtagacacacagaagaaaagaagacaaagaacgggtaggaaaattaaaaaggttaccatggggaagaaagtggccatcattggagctggtgtgagtggcttggcctccatcaggagctgtctggaagaggggctggagcccacctgctttgagaagagcaatgacattgggggcctgtggaaattttcagaccatgcagaggagggcagggctagcatttacaaatcagtcttttccaactcttccaaagagatgatgtgtttcccagacttcccatttcccgatgacttccccaactttatgcacaacagcaagatccaggaatatatcattgcatttgccaaagaaaagaacctcctgaagtacatacaatttaagacatttgtatccagtgtaaataaacatcctgattttgcaactactggccagtgggatgttaccactgaaagggatggtaaaaaagaatcggctgtctttgatgctgtaatggtttgttccggacatcatgtgtatcccaacctaccaaaagagtcctttccaggactaaaccactttaaaggcaaatgcttccacagcagggactataaagaaccaggtgtattcaatggaaagcgtgtcctggtggttggcctggggaattcgggctgtgatattgccacagaactcagccgcacagcagaacaggtcatgatcagttccagaagtggctcctgggtgatgagccgggtctgggacaatggttatccttgggacatgctgctcgtcactcgatttggaaccttcctcaagaacaatttaccgacagccatctctgactggttgtacgtgaagcagatgaatgcaagattcaagcatgaaaactatggcttgatgcctttaaatggagtcctgaggaaagagcctgtatttaacgatgagctcccagcaagcattctgtgtggcattgtgtccgtaaagcctaacgtgaaggaattcacagagacctcggccatttttgaggatgggaccatatttgagggcattgactgtgtaatctttgcaacagggtatagttttgcctaccccttccttgatgagtctatcatcaaaagcagaaacaatgagatcattttatttaaaggagtatttcctcctctacttgagaagtcaaccatagcagtgattggctttgtccagtcccttggggctgccattcccacagttgacctccagtcccgctgggcagcacaagtaataaagggaacttgtactttgccttctatggaagacatgatgaatgatattaatgagaaaatggagaaaaagcgcaaatggtttggcaaaagcgagaccatacagacagattacattgtttatatggatgaactctcctccttcattggggcaaagcccaacatcccatggctgtttctcacagatcccaaattggccatggaagtttattttggcccttgtagtccctaccagtttaggctggtgggcccagggcagtggccaggagccagaaatgccatactgacccagtgggaccggtcgttgaaacccatgcagacacgagtggtcgggagacttcagaagccttgcttctttttccattggctgaagctctttgcaattcctattctgttaatcgctgttttccttgtgttgacctaatcatcattttctctaggatttctgaaagttactgacaatacccagacaggggctttgctatttaaaaattaaaattttcacaccacctgcttttctattcagcatcttttgcagtactctgtagacattagtcagtaatacagtgttatttctaggctctgaaatagccactttaagaatcatgtcatgatcttaagagagcactaatcatttctgtttgagttccactaacacttcaaaatcagaactatgttctttatatctaacttaaatcatttcctgaaacattttgacatgattcctttttccttttaaacaatgtatgaaagatgtattttaaatctaaataaagagcaaattaagcagaataattataa

SEQ ID NO: 168842 - DNA, 2066 bp, Artificial Sequence
  derived and/or modified sequence
gtaggctcactagaacattttctctttcaaactgcccagacggttggacaggacgtagacacacagaagaaaagaagacaaagaacgggttaccatggggaagaaagtggccatcattggagctggtgtgagtggcttggcctccatcaggagctgtctggaagaggggctggagcccacctgctttgagaagagcaatgacattgggggcctgtggaaattttcagaccatgcagaggagggcagggctagcatttacaaatcagtcttttccaactcttccaaagagatgatgtgtttcccagacttcccatttcccgatgacttccccaactttatgcacaacagcaagatccaggaatatatcattgcatttgccaaagaaaagaacctcctgaagtacatacaatttaagacatttgtatccagtgtaaataaacatcctgattttgcaactactggccagtgggatgttaccactgaaagggatggtaaaaaagaatcggctgtctttgatgctgtaatggtttgttccggacatcatgtgtatcccaacctaccaaaagagtcctttccaggactaaaccactttaaaggcaaatgcttccacagcagggactataaagaaccaggtgtattcaatggaaagcgtgtcctggtggttggcctggggaattcgggctgtgatattgccacagaactcagccgcacagcagaacaggtcatgatcagttccagaagtggctcctgggtgatgagccgggtctgggacaatggttatccttgggacatgctgctcgtcactcgatttggaaccttcctcaagaacaatttaccgacagccatctctgactggttgtacgtgaagcagatgaatgcaagattcaagcatgaaaactatggcttgatgcctttaaatggagtcctgaggaaagagcctgtatttaacgatgagctcccagcaagcattctgtgtggcattgtgtccgtaaagcctaacgtgaaggaattcacagagacctcggccatttttgaggatgggaccatatttgagggcattgactgtgtaatctttgcaacagggtatagttttgcctaccccttccttgatgagtctatcatcaaaagcagaaacaatgagatcattttatttaaaggagtatttcctcctctacttgagaagtcaaccatagcagtgattggctttgtccagtcccttggggctgccattcccacagttgacctccagtcccgctgggcagcacaagtaataaagggaacttgtactttgccttctatggaagacatgatgaatgatattaatgagaaaatggagaaaaagcgcaaatggtttggcaaaagcgagaccatacagacagattacattgtttatatggatgaactctcctccttcattggggcaaagcccaacatcccatggctgtttctcacagatcccaaattggccatggaagtttattttggcccttgtagtccctaccagtttaggctggtgggcccagggcagtggccaggagccagaaatgccatactgacccagtgggaccggtcgttgaaacccatgcagacacgagtggtcgggagacttcagaagccttgcttctttttccattggctgaagctctttgcaattcctattctgttaatcgctgttttccttgtgttgacctaatcatcattttctctaggatttctgaaagttactgacaatacccagacaggggctttgctatttaaaaattaaaattttcacaccacctgcttttctattcagcatcttttgcagtactctgtagacattagtcagtaatacagtgttatttctaggctctgaaatagccactttaagaatcatgtcatgatcttaagagagcactaatcatttctgtttgagttccactaacacttcaaaatcagaactatgttctttatatctaacttaaatcatttcctgaaacattttgacatgattcctttttccttttaaacaatgtatgaaagatgtattttaaatctaaataaagagcaaattaagcagaataatt

SEQ ID NO: 168843 - DNA, 1599 bp, Artificial Sequence
  derived and/or modified sequence
atgggcaaaaaagtggctattattggcgctggagtaagcggcctagcctctattcgcagctgtctagaggagggtttggagcccacctgttttgaaaaatctaacgatattggtggactctggaagttctccgatcatgctgaggaaggccgtgcctcaatttacaaatctgtcttctctaactcttccaaggaaatgatgtgttttccagacttcccatttcctgatgacttccccaactttatgcataacagcaaaatccaggaatatatcatcgcattcgccaaagagaagaatctccttaagtacatccagtttaagacttttgtgagctctgtgaacaagcacccggattttgcgacaaccggtcagtgggacgtgactaccgagcgggatggcaaaaaagaatccgccgttttcgacgctgtgatggtgtgtagcgggcaccacgtgtaccctaatcttccaaaggagtcattccccggcctgaatcatttcaaaggaaagtgtttccactcacgcgattacaaggagccgggagtattcaatggtaaacgcgtactggttgtagggctgggaaactccggttgtgatatcgctaccgagctatccaggaccgccgaacaagtgatgatctcatctagaagcggctcctgggttatgtcccgggtttgggacaacggatacccctgggatatgctacttgtcacgcggtttggaacctttcttaagaacaatctgccaacagccatatcagattggctgtacgtcaagcagatgaacgctaggttcaagcacgagaattacgggcttatgcctttgaacggcgtgctgagaaaggaacccgtatttaacgacgagctgcccgctagcatactgtgtggcatcgtgagtgtaaaacccaatgttaaggagtttaccgagacatccgcaatatttgaggacggcactatatttgaagggatcgattgcgtgatctttgcaacaggctattcattcgcatatcccttcctggatgaatccatcatcaaaagcagaaataacgagattattctcttcaagggggtcttcccaccgctccttgaaaaatcaaccatcgctgtcattggattcgtacagagcctcggcgccgctatcccaaccgtggatctgcagtccagatgggcagctcaggttatcaaaggtacttgcacactcccctcaatggaagacatgatgaacgacatcaacgaaaagatggaaaaaaaacggaaatggtttggcaagtctgaaacaatacagacagactatattgtgtatatggacgagcttagcagcttcattggagctaagccgaatataccttggctctttctgactgacccgaaattggctatggaggtgtatttcggaccatgctcaccttatcaattccggttggtggggcccgggcagtggcccggcgctcgcaacgctatcctcactcagtgggacaggtctttgaaacctatgcagactagggtggtgggcagactgcagaaaccttgtttcttcttccactggctcaaactcttcgccattcccattctgctgatcgccgtgtttctcgtccttacctag

SEQ ID NO: 168844 - DNA, 1599 bp, Artificial Sequence
  derived and/or modified sequence
atggggaagaaagtggccatcatcggcgcaggggtatccggactcgcaagtatcagatcttgccttgaagagggtctggaacccacttgcttcgaaaaatctaatgatattggcggtctgtggaagttctcagaccatgcagaggaagggcgcgcaagtatctataaatcagtatttagtaatagtagcaaggagatgatgtgcttccccgacttccccttccctgatgatttcccaaatttcatgcacaattctaagatccaggagtacatcatcgcattcgccaaggaaaagaacctcttgaagtacattcagttcaaaacgtttgtgtcaagcgtgaacaagcacccggattttgcaaccaccggccaatgggacgtcacaactgaaagggacggcaagaaagaatctgccgtttttgatgcagtcatggtgtgctccggtcatcatgtctaccccaatcttcccaaggagtcctttccaggtctaaaccatttcaaaggcaaatgcttccattctagagattataaagagcctggcgttttcaatggaaagcgggtactggttgtgggcctgggcaacagcggctgcgatatagcgactgaattgtcccgaactgccgagcaggtaatgatatccagcaggtcaggcagttgggttatgagcagagtttgggacaacggttacccgtgggacatgctcctggtcacccgatttgggaccttcctgaaaaacaatctccctacagcaatttccgattggctctacgtgaagcaaatgaacgcccgcttcaagcatgaaaactacgggctgatgccactgaacggagtcttgaggaaagagccagtgtttaacgacgagctgccagcttctatcctgtgcggcatcgtcagcgttaagcccaacgtgaaagaattcacagaaacaagcgcgatcttcgaggacggaaccatctttgagggtattgactgcgtcatttttgccactggttacagtttcgcttacccattcctcgacgaatccattatcaagtctagaaataacgaaattattctattcaaaggagtctttcccccgctgttggaaaaatccaccattgcagtgataggattcgtccagagccttggcgctgcaatcccaactgtggacctgcaaagtagatgggccgctcaagtgattaagggcacatgcaccctgccatccatggaagacatgatgaacgacatcaacgaaaagatggaaaaaaagcgtaagtggtttggaaagagcgaaaccatacaaactgactacatcgtttatatggatgagctgagttcttttattggggccaaaccgaatattccttggttgtttctgactgacccaaaactggccatggaggtttactttgggccgtgctctccttaccagttcagactggtggggccaggacagtggcccggagcccgaaatgccatactgacccagtgggacaggtctctcaagccaatgcagactcgcgtcgtaggaaggttgcagaagccatgcttcttctttcattggttaaagctgtttgccatcccgattttactgatcgccgtctttttggtcctgacatag

SEQ ID NO: 168845 - DNA, 1599 bp, Artificial Sequence
  derived and/or modified sequence
atgggcaagaaggtggccatcatcggggccggcgtgtctggcctggccagcatccgcagctgcctggaggagggcctggagcccacctgctttgagaagagcaatgacattggaggcctgtggaagttcagtgaccatgctgaggagggccgggccagcatctacaagtctgtgttcagcaacagcagcaaggagatgatgtgcttcccagacttccccttcccagatgacttccccaacttcatgcacaacagcaagatccaggagtacatcatcgcctttgccaaggagaagaacctgctgaagtacatccagttcaagacctttgtgtcctctgtgaacaagcacccagactttgccaccaccggccagtgggatgtgaccacagaaagagatggcaagaaggagagcgctgtgtttgatgctgtgatggtgtgcagcggccaccacgtgtaccccaacctgcccaaggagagcttccctggcctgaaccacttcaagggcaagtgcttccacagccgggactacaaggagcccggggtcttcaacgggaagagggtgctggtggtgggcctgggcaacagcggctgtgacatcgccacagagctgagcaggacagctgagcaggtgatgatcagcagccgcagcggctcctgggtgatgagccgggtgtgggacaatggctacccctgggacatgctgctggtgaccaggtttggcaccttcctgaagaacaacctgcccacagccatcagtgactggctgtatgtgaagcagatgaatgcccgcttcaagcatgaaaattatggcctgatgcccctgaatggagtgctgaggaaggagcccgtcttcaatgatgagctgcctgccagcatcctgtgtggcatcgtgtctgtgaagcccaacgtgaaggagttcacagagaccagcgccatctttgaagatggcaccatctttgagggcatcgactgtgtgatctttgccaccggctacagctttgcctaccccttcctggatgagagcatcatcaagagcaggaacaatgagatcatcctcttcaagggcgtcttcccccccctgctggagaagagcaccatcgctgtgattggatttgtgcagagcctgggcgccgccatccccaccgtggacctgcagagccgctgggccgcccaggtgatcaagggcacctgcaccctgcccagcatggaggacatgatgaatgacatcaatgagaagatggagaagaagaggaagtggtttgggaagtctgagaccatccagacagactacatcgtgtacatggatgagctgagcagcttcatcggggccaagcccaacatcccctggctgttcctgacagaccccaagctggccatggaggtgtacttcggcccctgcagcccctaccagttccggctggtgggccctggccagtggccaggggccagaaatgccatcctgacccagtgggacaggagcctgaagcccatgcagaccagggtggtgggccgcctgcagaagccctgcttcttcttccactggctgaagctgtttgccatccccatcctgctgattgctgtgttcctggtgctgacctag

SEQ ID NO: 168846 - DNA, 1599 bp, Artificial Sequence
  derived and/or modified sequence
atgggcaagaaggtggccatcatcggcgccggcgtgagcggcctggccagcattaggagttgccttgaggaaggcctggaaccaacttgcttcgaaaaaagcaacgatatcggaggactttggaagttctctgaccacgccgaggaggggcgagcctccatttataaatctgtgttcagtaactcctctaaggaaatgatgtgtttccctgactttccctttccagacgactttcccaacttcatgcataatagcaaaatccaggaatatatcatcgcattcgccaaggaaaagaacctgcttaagtatatccagttcaaaaccttcgtttcttcggtcaataaacacccggatttcgctaccacaggacagtgggatgtcaccaccgaacgtgacggcaaaaaagagtcggccgtgttcgatgccgtgatggtgtgttcgggccatcacgtttacccaaacttaccaaaggaaagcttccctgggctgaatcacttcaaaggcaagtgcttccattcccgggactataaagagcccggcgttttcaacggaaaaagagtgctggtcgtgggattaggcaacagcgggtgcgatattgccaccgaattatcgcgtacagccgagcaggtgatgatctctagcagatccgggtcatgggtaatgtcaagggtctgggataatggatacccttgggatatgttactagtcacccgcttcgggacctttttgaagaacaacttgccaacggctatctctgactggctgtacgtgaagcagatgaacgcgagattcaaacacgaaaattacggccttatgcccctcaacggcgtgctccgcaaagagcctgtgttcaatgacgagttgcccgcttcaatcctgtgcggaattgttagcgtgaagccgaacgtgaaggagtttaccgagacatctgccatcttcgaagacggaaccatctttgagggcatagattgcgttattttcgctacaggctactcattcgcatatcctttcctggacgagagcataatcaagagccgcaacaacgagatcatattgttcaagggagtgtttccaccactgctggagaagagcaccattgctgtgattggctttgtgcaatctctaggggcagccattcccactgtggatttgcaatcacggtgggcagcacaagtgattaaagggacatgtaccttgccctccatggaggacatgatgaacgacatcaatgaaaagatggaaaagaagagaaaatggtttggtaagtcggaaacaattcagacggattatatagtttatatggacgaattgagcagcttcattggagccaaacctaatataccctggctgtttctgacggaccccaagcttgccatggaggtgtatttcgggccttgttctccctaccagttcagattagtcggccccggtcaatggcctggcgcccggaacgctatcctcacgcagtgggacaggtcactaaagccaatgcagactagggttgtgggccggctgcagaagccttgcttcttcttccattggttgaagctcttcgccataccaattctgttaatagcagtttttctcgttctaacgtag

SEQ ID NO: 168847 - DNA, 1599 bp, Artificial Sequence
  derived and/or modified sequence
atgggcaagaaggtggccatcatcggcgccggcgtgagcggcctggcctctattcgctcctgtctggaggaaggactcgagcccacatgtttcgaaaaatctaacgatattggcgggctgtggaagttcagcgaccacgctgaggaggggcgcgccagcatttacaagagtgtattttccaattcttccaaggagatgatgtgctttccagattttccctttcccgatgacttcccaaacttcatgcacaattccaaaatacaggaatacattatcgccttcgctaaggagaagaacctcctcaagtacatccagttcaagacattcgtctcttctgtcaacaagcatccggacttcgccaccacgggccagtgggacgttacaaccgaacgggacggcaaaaaagagtcggcggtattcgacgccgtgatggtgtgctccggacaccatgtataccccaatctccccaaggagtctttcccaggcctgaatcacttcaaagggaaatgcttccattcaagagactacaaggagcccggtgtgttcaatggaaaacgagtcctggtagtcggccttggtaatagtggttgcgacatcgcaacagagctctctcgaacggctgaacaagtcatgatttcttcaaggagcggctcatgggtgatgagcagggtctgggacaatgggtacccctgggacatgcttctcgttactaggttcggcacctttttgaagaacaatttgcccactgctatctctgattggctatacgtgaaacaaatgaacgcacggttcaagcacgagaattacggactgatgcccctgaatggggttctgagaaaggaaccagtgtttaacgatgaactccccgcctctatcctgtgcgggatcgtttcggtcaaacctaacgtcaaggagtttacggaaacctccgccattttcgaagacggaacgattttcgaaggcattgactgcgtcatctttgcaacggggtactctttcgcatatccatttctggacgagtctattataaagagccgcaacaacgagattatcctgtttaagggggtctttccaccactcttggaaaaaagtacaattgccgtgattggctttgtgcaaagtctgggcgctgccattcctacagttgatcttcagtccaggtgggctgctcaggtgattaaagggacatgcacgctgccttctatggaagatatgatgaacgatataaatgaaaaaatggaaaaaaaaaggaaatggtttggcaaaagcgagaccattcagacggattacattgtgtacatggatgagttaagtagcttcatcggcgccaaacctaatattccctggctgttcttaaccgaccccaagctggccatggaggtttacttcggtccctgcagcccataccagtttcgcctcgttggacccggccagtggcctggagcgaggaatgccatactgacacagtgggacaggtccctcaaaccgatgcagacccgggtggtgggccggcttcagaaaccctgctttttctttcattggctgaagttgttcgccattcccatcctgctcatcgcagtattcttggtactgacttag

SEQ ID NO: 168848 - DNA, 1599 bp, Artificial Sequence
  derived and/or modified sequence
atgggaaagaaggttgcaatcatcggcgcaggggtgagcgggttggcatcgatacgttcctgcctggaggaggggctggagccaacgtgtttcgagaagtctaatgacataggtggcctttggaaattctctgatcacgccgaagaagggagagcatccatttataaaagcgtcttctctaactcgtctaaagagatgatgtgcttccctgatttcccctttcccgatgattttccaaatttcatgcacaacagtaagatccaggagtacatcatcgcgttcgccaaagaaaagaacctgttgaagtatatccagtttaaaacgttcgtttcctcggtgaataagcacccagattttgctacaacaggacagtgggatgtgaccactgaacgggacggaaagaaagagagcgccgtttttgatgccgtgatggtgtgtagcggccatcatgtttatcctaacctgcctaaggagagtttccctggactgaatcatttcaagggtaagtgctttcattcacgggattataaggaacctggggtgttcaatggaaaacgcgtcctggtggtggggctgggaaactcagggtgtgacatcgcaacagagttatcaagaaccgctgaacaggtcatgatttcaagcaggagtgggagctgggtaatgtcacgggtttgggacaacggatacccatgggatatgctcctggtgaccagattcgggaccttcctcaagaacaacctcccgactgccatctccgactggctctacgttaagcaaatgaatgccagattcaagcatgaaaattatggactcatgcccctgaacggcgtgctgagaaaggagccagtcttcaatgacgaactgcctgcatccatcctatgcggcatcgtttccgtgaagcctaatgtgaaggagttcactgagacctcggctattttcgaagatgggactatctttgaagggatcgactgcgtcatttttgcaacaggatactctttcgcctacccttttcttgacgagagcattataaaatctagaaacaatgaaattattctgttcaagggggtcttccctccacttctggagaagagcactattgctgtgattgggtttgtgcagtcactcggggcagccatacccacagtcgacctgcagtcccggtgggcggcacaggttatcaaaggaacttgcaccctgccatccatggaggatatgatgaacgacattaacgagaaaatggaaaagaagcggaaatggtttggtaaaagtgagacaatccagactgattatatagtttatatggatgaactgtcttctttcatcggcgctaagcctaatattccatggctctttctcaccgatcctaaattagccatggaggtatactttggcccttgttctccttaccagtttcggctcgtaggtcctggccagtggcccggtgctcggaacgccatcctgacccagtgggaccggtcccttaagccaatgcagactagagttgtgggcagactccaaaaaccttgctttttttttcactggcttaaactgttcgccattccaatactcctcattgcggtgtttctggttttgacttag

SEQ ID NO: 168849 - DNA, 1599 bp, Artificial Sequence
  derived and/or modified sequence
atggggaaaaaggtagcaattatcggggctggagtcagtgggcttgcctccattagatcatgcttggaagaaggcctcgaacccacatgcttcgaaaaaagcaacgatatcgggggtctctggaagttttctgaccacgcagaagaagggcgtgcgtccatatataagtctgttttcagtaacagctctaaagagatgatgtgcttcccagatttccctttcccggatgacttccctaacttcatgcataattcgaaaatccaagagtatattatcgcatttgctaaagagaaaaatttactgaaatatattcagtttaagacgttcgttagttccgtgaataagcatccagactttgctactactggccagtgggatgtcaccacggaacgggatgggaaaaaagaatccgctgtgtttgacgcagtgatggtctgtagcggccaccatgtttaccctaacctgcctaaagaatcttttcccggactgaatcacttcaaggggaaatgtttccacagccgggattataaggaacccggagtgttcaatggcaagcgtgtattagtggtcgggctggggaactccgggtgcgacatcgcgacggagctgtcacgaaccgcagagcaggtcatgatcagctcaagaagcgggtcttgggttatgtctcgagtctgggacaacggctatccatgggatatgctcttagtcacacgattcggcacttttttaaagaacaatcttccaacggctatttcagactggttgtatgtaaagcagatgaatgctaggttcaagcacgagaattatggtctgatgcccctgaatggtgtgctgaggaaagagcccgtctttaacgacgaacttcctgccagcatcctatgcggcatcgtgtctgtcaagccaaacgttaaagagtttaccgagacctcagccatattcgaggatgggacaatctttgaaggcatcgattgtgttatctttgctactggctatagcttcgcctacccctttctggatgagagtattatcaagtctcggaacaacgaaattattttattcaagggcgtctttcctcccctactggagaagtcaacaatcgccgtgattggcttcgtgcagtcgcttggcgcagcaattcccactgtcgacctgcagagtcggtgggccgcacaggtcattaaggggacttgtaccctgcccagcatggaagacatgatgaacgacatcaacgaaaagatggagaagaagaggaagtggttcggaaaaagcgaaacaattcagaccgactacatcgtgtatatggatgagctcagcagcttcataggagcaaagccgaacattccatggcttttcttgacagacccgaaacttgcaatggaagtctactttgggccatgctccccttaccagtttcgtttagtggggccaggccagtggcccggagctcggaacgctattctcacacaatgggaccgctccctcaagcctatgcaaacccgggtggttgggaggctccagaaaccctgttttttctttcactggctcaaactattcgcaatccctatcctcctgattgcagtgtttctggtgttaacatag

SEQ ID NO: 168850 - DNA, 1599 bp, Artificial Sequence
  derived and/or modified sequence
atgggcaagaaggtggccatcatcggcgccggcgtgagcggcctggccagcatcagaagctgcctggaggagggcctggagcccacctgcttcgagaagagcaacgacatcggcggcctgtggaagttcagcgaccacgccgaggagggcagagccagcatctacaagagcgtgttcagcaacagcagcaaggagatgatgtgcttccccgacttccccttccccgacgacttccccaacttcatgcacaacagcaagatccaggagtacatcatcgccttcgccaaggagaagaacctgctgaagtacatccagttcaagaccttcgtgagcagcgtgaacaagcaccccgacttcgccaccaccggccagtgggacgtgaccaccgagagagacggcaagaaggagagcgccgtgttcgacgccgtgatggtgtgcagcggccaccacgtgtaccccaacctgcccaaggagagcttccccggcctgaaccacttcaagggcaagtgcttccacagcagagactacaaggagcccggcgtgttcaacggcaagagagtgctggtggtgggcctgggcaacagcggctgcgacatcgccaccgagctgagcagaaccgccgagcaggtgatgatcagcagcagaagcggcagctgggtgatgagcagagtgtgggacaacggctacccctgggacatgctgctggtgaccagattcggcaccttcctgaagaacaacctgcccaccgccatcagcgactggctgtacgtgaagcagatgaacgccagattcaagcacgagaactacggcctgatgcccctgaacggcgtgctgagaaaggagcccgtgttcaacgacgagctgcccgccagcatcctgtgcggcatcgtgagcgtgaagcccaacgtgaaggagttcaccgagaccagcgccatcttcgaggacggcaccatcttcgagggcatcgactgcgtgatcttcgccaccggctacagcttcgcctaccccttcctggacgagagcatcatcaagagcagaaacaacgagatcatcctgttcaagggcgtgttcccccccctgctggagaagagcaccatcgccgtgatcggcttcgtgcagagcctgggcgccgccatccccaccgtggacctgcagagcagatgggccgcccaggtgatcaagggcacctgcaccctgcccagcatggaggacatgatgaacgacatcaacgagaagatggagaagaagagaaagtggttcggcaagagcgagaccatccagaccgactacatcgtgtacatggacgagctgagcagcttcatcggcgccaagcccaacatcccctggctgttcctgaccgaccccaagctggccatggaggtgtacttcggcccctgcagcccctaccagttcagactggtgggccccggccagtggcccggcgccagaaacgccatcctgacccagtgggacagaagcctgaagcccatgcagaccagagtggtgggcagactgcagaagccctgcttcttcttccactggctgaagctgttcgccatccccatcctgctgatcgccgtgttcctggtgctgacctag

SEQ ID NO: 168851 - protein, 292 aa, Artificial Sequence
  derived and/or modified sequence
MASSMRSLFSDHGKYVESFRRFLNHSTEHQCMQEFMDKKLPGIIGRIGDTKSEIKILSIGGGAGEIDLQILSKVQAQYPGVCINNEVVEPSAEQIAKYKELVAKTSNLENVKFAWHKETSSEYQSRMLEKKELQKWDFIHMIQMLYYVKDIPATLKFFHSLLGTNAKMLIIVVSGSSGWDKLWKKYGSRFPQDDLCQYITSDDLTQMLDNLGLKYECYDLLSTMDISDCFIDGNENGDLLWDFLTETCNFNATAPPDLRAELGKDLQEPEFSAKKEGKVLFNNTLSFIVIEA

SEQ ID NO: 168852 - DNA, 879 bp, Artificial Sequence
  derived and/or modified sequence
atggcatcatctatgaggtctcttttttccgatcacggcaaatacgtggagtcttttaggaggttcctcaatcatagtacggaacatcaatgtatgcaggagttcatggataaaaaattgcccggaattataggaaggatcggcgacaccaagagcgaaatcaaaattctgtccatcggtggtggggccggtgagatcgacctgcagattctatctaaggtgcaggctcaatatcctggagtttgcatcaataacgaggtcgtggagcctagcgccgaacagatcgccaagtataaagagctggtggccaaaaccagcaaccttgagaacgttaaatttgcatggcataaggagacttccagtgagtaccaatcacgaatgctcgagaaaaaggagctccagaaatgggactttattcacatgatccagatgctctactacgtcaaagatatccccgcaactttgaagtttttccattccttgctcggcacaaacgctaagatgttgatcatagtagttagcggctcttccggctgggataagctgtggaagaagtatggctcccgatttcctcaggatgacttatgccagtacatcaccagcgatgatctcacacagatgttggacaatctcggcttaaagtacgagtgctatgacttgctgagtacaatggacatcagtgattgctttatagacgggaacgaaaacggcgacttactatgggactttttgacggaaacttgcaatttcaacgccacagctccgccggacctacgcgccgagctgggaaaggatctgcaggaacccgaattctccgcaaagaaggaaggcaaggtgctcttcaataatacgctgagctttatcgtgatcgaagcctag

SEQ ID NO: 168853 - DNA, 879 bp, Artificial Sequence
  derived and/or modified sequence
atggcttcttcaatgcggtcgctgttcagcgaccacggcaaatacgtcgagtcatttcggcgattcttaaaccactccaccgagcatcagtgcatgcaggaatttatggacaagaagctgccaggaatcataggcagaataggtgatacaaagtctgaaattaagatcctgtctatcggcgggggagccggcgagattgacctccagattctgagtaaagtacaagcacagtatcccggggtatgcatcaataatgaagtcgttgaaccaagcgccgagcagattgcaaagtataaagagctcgtggccaagacctctaacctcgagaacgtgaagttcgcatggcacaaggagacatctagcgagtaccagagccgcatgctggagaagaaggaattacagaaatgggattttatccacatgatacagatgctttactacgtcaaagacatcccagctaccctcaagttttttcatagtctgctgggcactaacgccaagatgctgatcatagtcgtgtccgggtcatctgggtgggataagttgtggaaaaaatatggtagtaggttccctcaggacgatctctgtcagtacattacctctgacgatctgacacagatgctagataatctgggcctcaagtatgaatgttatgacctattaagcaccatggatatttccgactgcttcattgacggtaacgagaacggcgacttgctgtgggattttctgactgaaacgtgtaacttcaatgccacggccccccccgacctgcgcgcagagctcggcaaggatctgcaggagcccgagttcagtgcaaaaaaggagggcaaggtcttgtttaacaacaccctgtccttcattgtgatcgaggcatag

SEQ ID NO: 168854 - DNA, 3291 bp, Artificial Sequence
  derived and/or modified sequence
gactcagtaatgagctctacaagccagcctttgtggcatgttaaattcaaaacaagcttagcatttttttttttttttttggatagaaactggtgggggtggggaaagaaagagggaactgggaagagaaggaggggaacttaaaccttgcttcctgctctgtctttctcagaaaaccaaatatggcatcttccatgaggagcttgttttctgaccacgggaaatatgttgaatctttccggaggtttctcaaccattccacggaacaccagtgcatgcaggaattcatggacaagaagctgccaggcataataggaaggattggagacacaaaatcagaaattaagattctaagcataggcggaggtgcaggtgaaattgatcttcaaattctctccaaagttcaggctcaatacccaggagtttgtatcaacaatgaagttgttgagccaagtgctgaacaaattgccaaatacaaagagcttgtagccaagacatcgaacctcgagaacgtaaagtttgcttggcataaggagacatcatctgaataccaaagtagaatgttggagaaaaaggagcttcaaaagtgggactttattcatatgattcaaatgctgtattatgtaaaagacatcccagctaccctgaaattcttccatagtctcttaggtaccaatgctaagatgctcattattgttgtgtcaggaagcagtggctgggacaagctgtggaaaaagtacggatcacgctttccccaggatgacctctgccagtatatcacatcagatgacctcactcagatgctggacaacctagggcttaagtatgagtgctatgaccttttgtccaccatggatatatctgactgctttattgatggtaatgaaaatggagacctgctttgggattttttgactgaaacctgcaactttaatgccacagcaccacctgatctcagagcagagcttgggaaagatctacaagagcctgaatttagtgctaagaaagaggggaaggttctttttaataatactctgagtttcatagtgattgaggcataactatcaatcacaaaagtatattcaaaaattatattttgaacaactcgaatcactcatttatttccatattaaaatcacaaactcatccattaatgtagataaagcactgtttggatatgagatgtagcaaattccaatacattattggacttccatttggaatcatatgggatactgctggtcttatcctgtccctcctccaggtagagagaccacaagcaggctcaacataacataagctagaaaaattagatgactgaatttctatggcatattgataataaaattcattccatttgctgattgtctgaaattttctagaatactaataaaatacatactatagattctttattagtgaagtatgcactaatcaatactttgaacacaaagcctgtgttactgatttggccgttttgtgaagaaacatttatctttgtacgttcttctattgtgctttctatctaatttttattaatttgtaagagtaagcacctttagaatattaaaaattaattctttatcacatgttgtcatttcttcccattgtgttttctcttgtaattttatctgtgaattaatagctttttgtttgtctttttgatatactgaagttttctattatattcagccagatttttttttaagtctcggcttctgatacattttaaaagaccttctaaaaccaaggttttagaatactaacattttatcaaaataatattatagttttgctttttttaaaaaatgaaatctttactatgtttgaaatttagataagtataaacagtgagaacaaactgtttcccctcaaaataatagccagatgtataaacaaaatttattgaagaacaaagaaacacaaaactaaacctgttctagcttaaaatgcagcttttaccagatttctaggaattgggtaaatgcaaggttctagaaaaccttcaatgcattttgatactttatagtttcttatgtcactctcaagaactcctataagaccaagagtcatctttggactgtaggatttcaggggggttttgaaaacaaatttgatgtttcttatttttaataataacgctctgttatttttgacataaacagtacatttaataattaataaataaatattttaagtatgtaaataattagtactccctgtcacaaacaaaacaaaagtaaggttttactaaacagctcatgagccctcattctgccagtgaggaagccttcaaccccgtgtgatactcactctttcatgcaatagggcttccatgtaatgttgccgtataatcactttaaaaagttaaacgacccatctcaatcacctagtttatccccagggaatacactggcatagagagcctatttacactaataaactaccaagctttgttgttcataataagtaaaatggacttgcattgctctcttttttggacaacttcatcaatgctttttgaattatatgtttcaacaaatgaaacgacagttatccaatcagattcctgaaaatgaacactgaaccgttaatcatactgatatgtactactgacaaaggaaatctgtgaggcacacatgattgatgggtatggggccatgaagaccttgaagagcttcaccagaagtatggaaatcaagactttacagagtcttttgtataaagcacacgtgcaaaaacaaacaaaattagaactaacaatgctattgaaagatacaaaagaattgcagtccatagattggtgtttgtaaatatggcctttttctcgtccttattaaacccttagtatacaaggataaataaattctcacctgcttaattttagtgcaattgaaacacataagcctttttaaagagagaaattcccatgaaaacctactagtcagcaatgggaagttgtataaattcaagggataaacctatccctgttttcttcctgcactgtatgataataccaaaatttgggacagtcacatactaacttttcagatttgttcttgtgtttcagaaaaaagtgctcagcatgaatttggaatgttgttttatgtattgttgtggatctctcagtgtttaacatggtgccttgcatatggtaaatgctaagtaaagcgggatcaatgaattatttccttctcaaacatttatcttataccttgtgtgttcatattattattataaacagagctcaagaaacccaataaagttatgtgttgccagtgtaaaccttaa

SEQ ID NO: 168855 - DNA, 1150 bp, Artificial Sequence
  derived and/or modified sequence
cagtcttccgttaaagatttcactgctgtagatttctgagagtgctgtgtagctgtcctctttatcctggtgtttgccacttcgaacagtcactttcccacttggaacttacttgtggctttgctgacaaaacaggaaaaaaccaaatatggcatcttccatgaggagcttgttttctgaccacgggaaatatgttgaatctttccggaggtttctcaaccattccacggaacaccagtgcatgcaggaattcatggacaagaagctgccaggcataataggaaggattggagacacaaaatcagaaattaagattctaagcataggcggaggtgcaggtgaaattgatcttcaaattctctccaaagttcaggctcaatacccaggagtttgtatcaacaatgaagttgttgagccaagtgctgaacaaattgccaaatacaaagagcttgtagccaagacatcgaacctcgagaacgtaaagtttgcttggcataaggagacatcatctgaataccaaagtagaatgttggagaaaaaggagcttcaaaagtgggactttattcatatgattcaaatgctgtattatgtaaaagacatcccagctaccctgaaattcttccatagtctcttaggtaccaatgctaagatgctcattattgttgtgtcaggaagcagtggctgggacaagctgtggaaaaagtacggatcacgctttccccaggatgacctctgccagtatatcacatcagatgacctcactcagatgctggacaacctagggcttaagtatgagtgctatgaccttttgtccaccatggatatatctgactgctttattgatggtaatgaaaatggagacctgctttgggattttttgactgaaacctgcaactttaatgccacagcaccacctgatctcagagcagagcttgggaaagatctacaagagcctgaatttagtgctaagaaagaggggaaggttctttttaataatactctgagtttcatagtgattgaggcataactatcaatcacaaaagtatattcaaaaattatattttgaacaactcgaatcactcatttatttccatattaaaatcacaaactcatccattaatgtagataaagcactgtttggatatgagat

SEQ ID NO: 168856 - DNA, 879 bp, Artificial Sequence
  derived and/or modified sequence
atggccagctccatgaggagcctcttcagtgaccacggcaagtatgtggagagcttccgccgcttcctgaaccacagcacagagcaccagtgcatgcaggagttcatggacaagaagctgcccggcatcatcggcagaattggagacaccaagtctgagatcaagatcctgagcattggaggaggagctggggagattgacctgcagatcctgagcaaggtgcaggcccagtacccaggagtgtgcatcaacaatgaggtggtggagcccagcgctgagcagatcgccaagtacaaggagctggtggccaagaccagcaacctggagaatgtgaagtttgcctggcacaaggagaccagcagcgagtaccagagcaggatgctggagaagaaggagctgcagaagtgggacttcatccacatgatccagatgctgtactacgtgaaggacatcccagccaccctgaagttcttccacagcctgctgggcaccaatgccaagatgctgatcatcgtggtgtctggcagcagcggctgggacaagctgtggaagaagtatggcagccgcttcccccaggatgacctgtgccagtacatcaccagtgatgacctgacccagatgctggacaacctgggcctgaagtatgagtgctatgacctgctgagcaccatggacatcagtgactgcttcattgatggaaatgaaaatggagacctgctgtgggacttcctgacagagacctgcaacttcaatgccacagcccccccagacctgcgggcagagctgggcaaggacctgcaggagcctgagttcagcgccaagaaggagggcaaggtgctcttcaacaacaccctgtccttcatcgtcatcgaggcctag

SEQ ID NO: 168857 - DNA, 879 bp, Artificial Sequence
  derived and/or modified sequence
atggccagcagcatgcggagcctgttcagcgaccacggcaagtacgtggaatctttccgcaggttcctgaatcactcgactgagcatcagtgtatgcaggagtttatggacaagaagttgcccggtatcattggcagaattggcgataccaagtcagaaattaagattctcagcatcggtggcggcgctggcgaaatcgatctacaaatcctcagcaaggtgcaggctcagtaccctggggtgtgtatcaacaacgaagtggttgagcctagcgctgaacagatcgccaaatataaagaactggttgccaagaccagcaacctagagaatgtgaagtttgcctggcataaggaaaccagctctgagtatcaatcccgcatgcttgaaaagaaggagcttcagaaatgggactttatccacatgatccagatgctttactacgtgaaagacatacccgcaactctgaagttctttcatagcctcctcggcaccaacgcaaaaatgctgattattgtggtaagtggtagctcggggtgggataagctgtggaaaaagtacggctccagatttccacaggacgacctctgccaatacattacctccgatgacctgacccagatgctggacaacctgggcctgaagtatgaatgttacgatctgctgtcaactatggatatctctgattgtttcatcgatggaaacgagaatggggatcttctgtgggactttctgacagaaacctgtaacttcaacgccacagcaccaccagacctgcgggctgagctgggcaaagatttgcaggaacctgagttctccgcgaaaaaggagggcaaagtactgtttaacaacacgctttcatttatcgtcatcgaagcgtag

SEQ ID NO: 168858 - DNA, 879 bp, Artificial Sequence
  derived and/or modified sequence
atggccagcagcatgcggagcctgttcagcgaccacggcaagtacgtcgagagcttccgccggttcttgaaccattccacagaacatcagtgcatgcaggagttcatggataagaaattgccagggatcattggccgcatcggcgatactaagagcgaaatcaaaattctgtctattggaggaggagcgggagagatcgacctgcagatcctgagcaaggtacaggcacagtaccccggtgtgtgcatcaacaacgaggtcgtggagccttctgctgaacagattgctaagtataaggaacttgtagctaagaccagcaatctggaaaatgtgaagtttgcatggcacaaggagaccagcagcgagtaccagagccgtatgctggagaagaaagagctgcagaagtgggattttatccacatgattcagatgctttattacgtcaaggatatcccggctacactgaagttctttcactcgttgttaggaacgaatgccaaaatgcttattatcgttgtctccggttctagcgggtgggacaaactttggaaaaaatacggatcacgatttccccaagatgacctgtgtcagtacatcacaagcgatgacttgacccagatgctagacaatctcggactcaagtatgaatgctatgatctgctctccacaatggacatctccgactgttttattgatggtaatgagaatggggacctcctgtgggactttttgactgagacatgtaactttaatgctacagccccccctgatcttagagccgagcttggaaaagacctgcaagagccggaattctccgccaagaaagaaggcaaggtcctctttaataacactctctctttcatagtcatcgaggcctag

SEQ ID NO: 168859 - DNA, 879 bp, Artificial Sequence
  derived and/or modified sequence
atggcctcaagcatgcgctcgctgttcagtgatcacggaaaatacgtggagagtttccggaggttcttgaatcacagtacggagcaccagtgtatgcaggaatttatggacaaaaagttacccggtatcattgggaggatcggtgatacgaaatcagaaatcaaaattctctccatcggtggaggagcaggagagattgatctgcaaatactgagcaaggtgcaagcacaataccccggtgtgtgcatcaataacgaggtggtggaacccagtgcagaacagatcgccaagtacaaggagctcgtggcaaagaccagcaacttggaaaatgtcaagtttgcatggcataaggagacatcaagtgaataccaatcaagaatgttggaaaagaaagagctccagaaatgggattttattcatatgatccagatgttatattacgtgaaggatatccctgctactctgaagtttttccacagcctcctcggcaccaatgccaaaatgctcatcatcgtggtgtccggttcctcaggatgggacaaattgtggaagaagtatggatcacgctttccacaggatgatctgtgtcagtatattacatcggacgatctgactcagatgcttgataatctggggctcaagtatgaatgctacgatcttcttagtactatggacatctcagattgttttatagatggcaatgagaatggcgacctgctttgggacttcttgacagaaacctgcaatttcaacgctactgcaccgccagatcttagggcggagctgggcaaggacttacaggagccagaattcagcgctaagaaagaaggcaaagttctctttaataatacactcagtttcatcgtaatcgaggcgtag

SEQ ID NO: 168860 - DNA, 879 bp, Artificial Sequence
  derived and/or modified sequence
atggcaagctccatgagatctttgttctcagatcacggaaagtacgtggagtctttccggagattcttgaaccattctactgagcaccaatgcatgcaggagttcatggataaaaagttgccaggcataataggaagaatcggggatacaaagtccgagattaaaatactttccattggtggtggagcgggtgagatcgacctccaaatactcagtaaagtgcaggcccaatatcccggagtttgcatcaacaatgaggtggtggagccttccgcagaacagatcgctaaatacaaagaactggtcgctaaaacgagcaacctggagaatgtgaaattcgcctggcacaaagaaacaagttcagagtatcagtcccggatgctcgagaagaaagaacttcagaagtgggactttattcacatgattcagatgctttattacgttaaggatattccagctactctaaagttttttcactcattactgggcactaatgctaagatgcttatcatcgtggtgtcggggtcctcaggctgggacaagctctggaagaaatacggatccagattcccacaggacgacctctgccagtacattaccagtgacgatcttactcaaatgctggacaatctggggctcaaatatgagtgctacgatcttctgtccacaatggacatctcagactgttttatagacggcaacgaaaacggggatttattgtgggattttctgacagagacttgtaatttcaacgctacagctccgccagacttgagggccgagcttggcaaggatttacaggaacccgaattcagcgccaaaaaggaagggaaggtcctgttcaacaacactctgagttttatagtgatcgaagcctag

SEQ ID NO: 168861 - DNA, 879 bp, Artificial Sequence
  derived and/or modified sequence
atggccagcagcatgagaagcctgttcagcgaccacggcaagtacgtggagagcttcagaagattcctgaaccacagcaccgagcaccagtgcatgcaggagttcatggacaagaagctgcccggcatcatcggcagaatcggcgacaccaagagcgagatcaagatcctgagcatcggcggcggcgccggcgagatcgacctgcagatcctgagcaaggtgcaggcccagtaccccggcgtgtgcatcaacaacgaggtggtggagcccagcgccgagcagatcgccaagtacaaggagctggtggccaagaccagcaacctggagaacgtgaagttcgcctggcacaaggagaccagcagcgagtaccagagcagaatgctggagaagaaggagctgcagaagtgggacttcatccacatgatccagatgctgtactacgtgaaggacatccccgccaccctgaagttcttccacagcctgctgggcaccaacgccaagatgctgatcatcgtggtgagcggcagcagcggctgggacaagctgtggaagaagtacggcagcagattcccccaggacgacctgtgccagtacatcaccagcgacgacctgacccagatgctggacaacctgggcctgaagtacgagtgctacgacctgctgagcaccatggacatcagcgactgcttcatcgacggcaacgagaacggcgacctgctgtgggacttcctgaccgagacctgcaacttcaacgccaccgccccccccgacctgagagccgagctgggcaaggacctgcaggagcccgagttcagcgccaagaaggagggcaaggtgctgttcaacaacaccctgagcttcatcgtgatcgaggcctag

SEQ ID NO: 168862 - protein, 230 aa, Artificial Sequence
  derived and/or modified sequence
MSSSYYVNALFSKYTAGASLFQNAEPTSCSFAPNSQRSGYGAGAGAFASTVPGLYNVNSPLYQSPFASGYGLGADAYGNLPCASYDQNIPGLCSDLAKGACDKTDEGALHGAAEANFRIYPWMRSSGPDRKRGRQTYTRYQTLELEKEFHFNRYLTRRRRIEIAHALCLTERQIKIWFQNRRMKWKKEHKDEGPTAAAAPEGAVPSAAATAAADKADEEDDDEEEEDEEE

SEQ ID NO: 168863 - protein, 30 aa, Artificial Sequence
  derived and/or modified sequence
MSSSYYVNALFSKYTAGASLFQNAEPTSCS

SEQ ID NO: 168864 - DNA, 693 bp, Artificial Sequence
  derived and/or modified sequence
atgtcttcaagctattacgtgaatgcacttttctcaaagtataccgccggagcaagtttgtttcagaatgccgaacctacctcttgcagcttcgcgcctaactcccagaggtcaggctacggcgctggtgccggtgcattcgcttctacagtcccaggcctgtataacgtgaacagccccttataccaaagcccttttgcctccggatacggtctgggggcagacgcctatggtaacctaccttgtgcttcatatgaccagaatatacccggactctgctctgatctggcaaagggggcctgcgacaaaacagacgaaggcgcccttcatggggcggctgaggcaaacttccggatttatccgtggatgcggtcaagtggcccagatcgcaaacggggcagacaaacctatactcgctaccagactctggaacttgaaaaagaatttcatttcaatcgttatcttacccgccgtcgaaggatcgagatcgctcatgctctttgcctgactgaacgccaaatcaagatctggtttcagaatagacgcatgaagtggaagaaagagcataaggatgagggacccactgcagcagctgctccagaaggggccgtcccaagtgccgctgccacagccgcagccgataaggcggatgaggaagatgacgacgaggaggaagaagacgaggaagagtag

SEQ ID NO: 168865 - DNA, 93 bp, Artificial Sequence
  derived and/or modified sequence
atgtccagctcctattacgtgaacgctctttttagcaagtatacggccggtgcgagtctctttcaaaacgctgagccaacctcatgcagctag

SEQ ID NO: 168866 - DNA, 2020 bp, Artificial Sequence
  derived and/or modified sequence
acgtgctgcggcgagctccgtccaaaagaaaatggggtttggtgtaaatctgggggtgtaatgttatcatatatcactctacctcgtaaaaccgacactgaaagctgccggacaacaaatcacaggtcaaaattatgagttcttcgtattatgtgaacgcgctttttagcaaatatacggcgggggcttctctgttccaaaatgccgagccgacttcttgctcctttgctcccaactcacagagaagcggctacggggcgggcgccggcgccttcgcctcgaccgttccgggcttatacaatgtcaacagccccctttatcagagcccctttgcgtccggctacggcctgggcgccgacgcctacggcaacctgccctgcgcctcctacgaccaaaacatccccgggctctgcagtgacctcgccaaaggcgcctgcgacaagacggacgagggcgcgctgcatggcgcggctgaggccaatttccgcatctacccctggatgcggtcttcaggacctgacaggaagcggggccgccagacctacacgcgctaccagacgctggagctggagaaggagttccacttcaaccgctacctgacgcggcgccgccgcattgaaatcgcccacgcgctctgcctcaccgagcgccagattaagatctggttccagaaccgccgcatgaagtggaagaaagagcataaggacgaaggtccgactgccgccgcagctcccgagggcgccgtgccctctgccgccgccactgctgccgcggacaaggccgacgaggaggacgatgatgaagaagaggaagacgaggaggaatgaggggccgatccggggccctctctgcaccggacagtcggaaaagcgtctttaagagactcactggttttacttacaaaaatgggaaaaataaaagaaaatgtaaaaaacaaaaacaaaaacaaaaaagcaacccagtccccaacctgcactctacccacccccatcacctactccagctcccaacttttgtggactgagcggccgcagagactgggtcgccttggattccctctgcctccgaggaccccaaaagacacccccaaccccaggccagccggccctgctctggcgcgtccaaaatactacctagcacaggcctctgctcgaggcacccccaaactacctatgtatccagccccagagggcctccattcccaggaagtccctatgtatcccaacactggcagacacccagcaccaccctcccagacccgcaagaaagtgaatctcactactacctactcccctaaaactacctattttgtgctggctggcttgcctgctacctagtgccgactgctcccaggcaagtcccctgctgcttacagcccgcagcttttggggtccctgaggctgccctgagaatgtgctgaggtccaggatcagggtattggcatctatttaaatcgaaaaataatatatttattccaaaaagcatcctaagtgcttgcaccctagaatcaatccctccttctctggcttggcacccacagctcaggcccatcaacccccacttctggaggggaatgttcctgagctggctgcagatctgtgggttagcttctgcttagcaggactgtggagatgcttccagcttcgctgtcctttcctctggctcctgtatcttactgttcagctgtgttaaatatgtacgccctgatgtttcctataatagcagatactgtatatttgaacaagatttttttttatcatttctatagtcttggagttcatttgtaaggcagtgtcttgacttggaaaggatgtgttaatggggtgactttgtagcatggtatgttgtcttgagttaactgtagtgggtggggaggtccaatgccctccgcaatgcccttcatctcctgtgttgtcctgtaccctgctcagctccatcctggggttcagggaaggcacacttcccagcccagctgtgttttatgtaaccgaaaataaagatgcgtggtgacaaagaaaaa

SEQ ID NO: 168867 - DNA, 585 bp, Artificial Sequence
  derived and/or modified sequence
gggcagtttatgaggcgtttaggggaagggttctccccaccatcctccaccgagcggtgggcggcaggggcttcagctggtgcaacatggtgcaggggtcggaggcctggaagggcggataaacagtgtgcctccgattaaggaaaggaagctgggagacgttgactttattcgaaccacatggctccagtttgcggtggcaatctctctgcagctgcaagagatgctgcgccttccccgtctggatccgagtctaagtccggcctgtcgcccactggacctgggcggctgcgggccctgcggagcgagaccacctgtgaggactgctgagattggcggaggcggtcatgtgggcggtcacgtgctgcggcgagctccgtccaaaagaaaatggggtttggtgtaaatctgggggtgtaatgttatcatatatcactctacctcgtaaaaccgacactgaaagctgccggacaacaaatcacaggtcaaaattatgagttcttcgtattatgtgaacgcgctttttagcaaatatacggcgggggcttctctgttccaaaatgccgagccgacttcttgctcctt

SEQ ID NO: 168868 - DNA, 693 bp, Artificial Sequence
  derived and/or modified sequence
atgagcagcagctactacgtgaatgccctcttcagcaagtacacagctggggccagcctcttccagaatgctgagcccaccagctgcagctttgcccccaacagccagaggagcggctacggggccggggccggggcctttgccagcacagtgcccggcctgtacaacgtgaacagccccctgtaccagagcccctttgccagcggctacggcctgggcgcagatgcctacggcaacctgccctgtgccagctatgaccagaacatccctggcctgtgcagcgacctggccaagggggcctgtgacaagacagatgaaggagccctgcacggggctgctgaggccaacttccgcatctacccctggatgaggagcagcggccctgacaggaagaggggccggcagacctacacccgctaccagaccctggagctggagaaggagttccacttcaaccgctacctgaccaggagaagaagaattgaaattgcccacgccctgtgcctgacagagcggcagatcaagatctggttccagaacagaaggatgaagtggaagaaggagcacaaggatgagggccccacagctgctgctgcccctgagggcgctgtgcccagcgctgctgccacagctgctgctgacaaggcagatgaagaagatgatgatgaggaggaggaggatgaggaggagtag

SEQ ID NO: 168869 - DNA, 93 bp, Artificial Sequence
  derived and/or modified sequence
atgagcagcagctactacgtgaatgccctcttcagcaagtacacagctggggccagcctcttccagaatgctgagcccaccagctgcagctag

SEQ ID NO: 168870 - DNA, 693 bp, Artificial Sequence
  derived and/or modified sequence
atgagcagcagctactacgtgaacgccctgttcagcaagtacaccgcaggagcttcactttttcaaaacgcagagccaacaagttgttcttttgcacctaatagccagcgaagtggatatggggccggagcaggtgccttcgccagtacagtgcctggattatacaacgtgaactcccctctctatcagagccctttcgcctctggctatggcctgggagccgacgcatatggaaacctgccctgcgcgagttacgatcaaaacattcctgggctttgttctgatctggctaagggtgcctgcgacaaaactgacgaaggcgcattacacggagccgccgaggctaacttccggatctacccatggatgagaagcagtggccccgatcggaagcggggcaggcagacttacactcgatatcagactcttgagttggagaaagaatttcatttcaatcggtacctgactaggcgccggaggattgaaattgcccatgcactctgcttgaccgagaggcagattaagatttggttccagaatcgcagaatgaagtggaagaaggagcataaagacgagggcccaactgccgctgcggcaccagagggcgctgtgccctctgcagcagccaccgccgccgccgataaggccgatgaagaagacgatgatgaggaggaggaagatgaagaggagtag

SEQ ID NO: 168871 - DNA, 93 bp, Artificial Sequence
  derived and/or modified sequence
atgagcagcagctactacgtgaacgccctgttcagcaagtacaccgccggcgcctcattatttcaaaatgctgagcctacctcctgcagctag

SEQ ID NO: 168872 - DNA, 693 bp, Artificial Sequence
  derived and/or modified sequence
atgtcaagctcctattatgtgaacgccctgttctctaaatacacagctggagccagcctgttccagaatgctgagccgacttcatgctcattcgcaccaaattctcagaggtctggatacggggctggcgcaggagccttcgcttctacggtaccaggtctctataacgtgaattcgcccctgtaccagtctcccttcgcctccggttacggcctgggggctgatgcttacggcaatcttccttgcgcaagttacgaccagaatattcccggtctgtgtagcgatttggccaagggagcctgtgataagactgacgagggggctctgcatggtgcggcagaggccaattttcggatttatccatggatgagatcatcaggacccgatcgaaaaaggggcagacagacctatacgcggtaccaaacccttgagctagaaaaagagttccactttaatcgatatctgacccgccgtaggcggatcgagatcgcgcatgcactctgtctgacagagcgacagatcaagatctggttccagaaccgcagaatgaaatggaagaaggaacacaaagatgagggacccaccgccgcagcagcacccgagggggctgtgccctcagccgcagcaaccgcggcagcagacaaagccgacgaagaagatgacgacgaggaggaggaggacgaggaagaatag

SEQ ID NO: 168873 - DNA, 93 bp, Artificial Sequence
  derived and/or modified sequence
atgagctccagttactacgtaaacgccttattttctaaatataccgcgggtgcctccctcttccagaacgctgaacctacatcttgctcctag

SEQ ID NO: 168874 - DNA, 693 bp, Artificial Sequence
  derived and/or modified sequence
atgagcagcagctactacgtgaacgccctgttcagcaagtacaccgccggcgccagcctgttccagaacgccgagcccaccagctgcagcttcgcccccaacagccagagaagcggctacggcgccggcgccggcgccttcgccagcaccgtgcccggcctgtacaacgtgaacagccccctgtaccagagccccttcgccagcggctacggcctgggcgccgacgcctacggcaacctgccctgcgccagctacgaccagaacatccccggcctgtgcagcgacctggccaagggcgcctgcgacaagaccgacgagggcgccctgcacggcgccgccgaggccaacttcagaatctacccctggatgagaagcagcggccccgacagaaagagaggcagacagacctacaccagataccagaccctggagctggagaaggagttccacttcaacagatacctgaccagaagaagaagaatcgagatcgcccacgccctgtgcctgaccgagagacagatcaagatctggttccagaacagaagaatgaagtggaagaaggagcacaaggacgagggccccaccgccgccgccgcccccgagggcgccgtgcccagcgccgccgccaccgccgccgccgacaaggccgacgaggaggacgacgacgaggaggaggaggacgaggaggagtag

SEQ ID NO: 168875 - DNA, 93 bp, Artificial Sequence
  derived and/or modified sequence
atgagcagcagctactacgtgaacgccctgttcagcaagtacaccgccggcgccagcctgttccagaacgccgagcccaccagctgcagctag

SEQ ID NO: 168876 - protein, 260 aa, Artificial Sequence
  derived and/or modified sequence
MSATGPISNYYVDSLISHDNEDLLASRFPATGAHPAAARPSGLVPDCSDFPSCSFAPKPAVFSTSWAPVPSQSSVVYHPYGPQPHLGADTRYMRTWLEPLSGAVSFPSFPAGGRHYALKPDAYPGRRADCGPGEGRSYPDYMYGSPGELRDRAPQTLPSPEADALAGSKHKEEKADLDPSNPVANWIHARSTRKKRCPYTKYQTLELEKEFLFNMYLTRDRRYEVARVLNLTERQVKIWFQNRRMKMKKMNKEKTDKEQS

SEQ ID NO: 168877 - DNA, 1640 bp, Artificial Sequence
  derived and/or modified sequence
tggaaaaataattacctgacttgattgttctgtgagcagataaaaagtacatatacagttcatacaataatcttatgtatgtaaaaccccgttacgatgtcggcgacggggcccatcagtaactattacgtggactcgctcatctctcacgacaatgaagacctcctagcgtccaggtttccggccaccggggctcatcccgccgccgccagacccagcggtttggtgccggactgtagcgattttccgtcctgtagcttcgcgcccaagccggcagtgttcagcacgtcgtgggcgcccgtgccctctcagtcgtccgtggtatatcacccgtacggcccccagccccacctcggcgccgacacgcgctacatgcggacttggctcgagccgctgtccggcgccgtctccttccccagcttcccggccgggggccgtcactacgccctcaagccggacgcctaccccgggcgccgcgcggactgcggcccaggggagggccgcagctacccggactacatgtacggctcgcccggggagctgcgcgaccgcgccccgcagacactgccctcgcccgaggcggacgcgctcgccggcagcaagcacaaagaggagaaggccgacctggaccccagcaaccccgtggccaactggattcacgcccgctccacgaggaagaagcgctgcccctacaccaagtaccagacgctggaactggagaaggagtttctcttcaatatgtatttaaccagggaccgtcggtatgaggtggcccgggttctcaatctcaccgagcggcaggtcaaaatctggtttcagaatcgaaggatgaagatgaaaaagatgaataaagagaaaaccgacaaggagcagtcctaaaccctacccagcctgctgcctcagcacagccaagggaaaaacaaaaaccccacaaaataccccaacacaggcgggggagagacgaaaaagaaaaggaaagagcaagatagacaaaagccaatcagcttaaaaagaaaaacaaggaaggggaaaagaaaactcttgcgatttgggagggttcagtgttgagatattggtgttttagagttagttctacccagcgaggaggaggcggggagagaaactgcgttctctttccccagcgcaaccgaaataaatgacacatacaaatgtgatttttttcctcctttcttcagagaagccagtacttgaatcgctatatttctatttttttttccctgtatcgtatttggtccaggtcatccctccccgggcctggggcgctctgcgtgcagattttgtacaaaaaaaaaaaagacacacacacatacatgataatgattcccagcccaggagctgaggggtgagggctggggaccatgccgcgggctaggtcgggcccgtgcaggccggcgccttgggctgtacatagtgttccctctcatccccagggttcgtccccagcgtccgtcctgtaacgtgcttctgtttgttatggtagaacagccctgtgttaatatattgaagtcacttaaccagaaaaaaaaaaaaaaaaaaaaaaaaaaaaaaaaaaaaaaaaaaaaaaaaaaaaaaaaaaaaaaaaaaaaaaaaaaaaaaaaaaaaaaaaaaaaaaaaaaaaa

SEQ ID NO: 168878 - DNA, 783 bp, Artificial Sequence
  derived and/or modified sequence
atgtccgccactggaccaatcagcaactattatgttgactccctgatttctcacgataacgaagacctcttagcttcccgcttccccgcgacgggggctcatcctgcagctgccagaccaagtgggctggtgcccgattgcagcgactttccaagctgttccttcgcacctaagcctgctgtgttcagcactagttgggcacctgtaccaagccagtcaagcgtggtttatcacccttacggtcctcagcctcacctaggcgctgacactcgctacatgcgcacttggctcgaaccactttcaggtgcagtgagtttccctagctttccggcagggggccgacactatgcgcttaaacccgacgcgtaccccggtaggagagctgactgtgggcctggggagggcagaagttatcctgactatatgtacggctcacctggtgaactgcgggacagggctcctcagaccctgccctcaccagaagccgatgcgctcgctggcagcaagcataaggaagagaaggcggacctcgacccatctaacccagtggcaaactggattcatgctaggagcacgaggaagaaaagatgcccctacaccaaatatcagactctcgaactagagaaggaattcttatttaacatgtacctgaccagagacagaaggtacgaggtggcgcgggtcttgaaccttacagaacgccaggtaaagatatggttccaaaataggcggatgaagatgaagaagatgaataaggaaaagacggataaagagcaaagttag

SEQ ID NO: 168879 - DNA, 783 bp, Artificial Sequence
  derived and/or modified sequence
atgagcgccacgggccctattagcaattactacgtcgactccttgatcagccatgacaacgaggatctgctggcttccagatttccagcgaccggggctcaccccgccgcggccagaccaagcggtctcgtgcctgactgctcggacttcccctcctgtagcttcgcgcccaaaccagctgtcttctcgacttcttgggcgccagttccctcccagtcttcagtggtgtatcacccctacggtccacagccccacctcggagctgacacacggtacatgcgcacttggctagaacctctgtcaggagcagtctcctttccctcatttccggcgggcggaagacattatgccctgaaaccagatgcataccctggcaggagagccgactgcgggcccggagaagggaggtcgtaccctgactatatgtacggctcacctggcgaactccgcgacagggcaccacagaccctgccttcccctgaggcagacgcactggccggctctaaacacaaggaggagaaagctgatctggacccctccaacccagtcgcaaactggatccacgcccgttccactagaaagaaacgctgtccgtatacgaagtaccaaacactggagcttgagaaggagtttctctttaacatgtacctgacgcgtgacagaaggtacgaggtcgcccgggtgctgaaccttactgagaggcaggtgaagatctggttccagaacaggaggatgaagatgaagaagatgaataaggaaaagaccgacaaggagcaaagttag

SEQ ID NO: 168880 - DNA, 1516 bp, Artificial Sequence
  derived and/or modified sequence
gttctgtgagcagataaaaagtacatatacagttcatacaataatcttatgtatgtaaaaccccgttacgatgtcggcgacggggcccatcagtaactattacgtggactcgctcatctctcacgacaatgaagacctcctagcgtccaggtttccggccaccggggctcatcccgccgccgccagacccagcggtttggtgccggactgtagcgattttccgtcctgtagcttcgcgcccaagccggcagtgttcagcacgtcgtgggcgcccgtgccctctcagtcgtccgtggtatatcacccgtacggcccccagccccacctcggcgccgacacgcgctacatgcggacttggctcgagccgctgtccggcgccgtctccttccccagcttcccggccgggggccgtcactacgccctcaagccggacgcctaccccgggcgccgcgcggactgcggcccaggggagggccgcagctacccggactacatgtacggctcgcccggggagctgcgcgaccgcgccccgcagacactgccctcgcccgaggcggacgcgctcgccggcagcaagcacaaagaggagaaggccgacctggaccccagcaaccccgtggccaactggattcacgcccgctccacgaggaagaagcgctgcccctacaccaagtaccagacgctggaactggagaaggagtttctcttcaatatgtatttaaccagggaccgtcggtatgaggtggcccgggttctcaatctcaccgagcggcaggtcaaaatctggtttcagaatcgaaggatgaagatgaaaaagatgaataaagagaaaaccgacaaggagcagtcctaaaccctacccagcctgctgcctcagcacagccaagggaaaaacaaaaaccccacaaaataccccaacacaggcgggggagagacgaaaaagaaaaggaaagagcaagatagacaaaagccaatcagcttaaaaagaaaaacaaggaaggggaaaagaaaactcttgcgatttgggagggttcagtgttgagatattggtgttttagagttagttctacccagcgaggaggaggcggggagagaaactgcgttctctttccccagcgcaaccgaaataaatgacacatacaaatgtgatttttttcctcctttcttcagagaagccagtacttgaatcgctatatttctatttttttttccctgtatcgtatttggtccaggtcatccctccccgggcctggggcgctctgcgtgcagattttgtacaaaaaaaaaaaagacacacacacatacatgataatgattcccagcccaggagctgaggggtgagggctggggaccatgccgcgggctaggtcgggcccgtgcaggccggcgccttgggctgtacatagtgttccctctcatccccagggttcgtccccagcgtccgtcctgtaacgtgcttctgtttgttatggtagaacagccctgtgttaatatattgaagtcacttaaccagaaa

SEQ ID NO: 168881 - DNA, 1505 bp, Artificial Sequence
  derived and/or modified sequence
tgcaaatttccttgcgacacatacatcacacaaaagatcagataaaaagtacatatacagttcatacaataatcttatgtatgtaaaaccccgttacgatgtcggcgacggggcccatcagtaactattacgtggactcgctcatctctcacgacaatgaagacctcctagcgtccaggtttccggccaccggggctcatcccgccgccgccagacccagcggtttggtgccggactgtagcgattttccgtcctgtagcttcgcgcccaagccggcagtgttcagcacgtcgtgggcgcccgtgccctctcagtcgtccgtggtatatcacccgtacggcccccagccccacctcggcgccgacacgcgctacatgcggacttggctcgagccgctgtccggcgccgtctccttccccagcttcccggccgggggccgtcactacgccctcaagccggacgcctaccccgggcgccgcgcggactgcggcccaggggagggccgcagctacccggactacatgtacggctcgcccggggagctgcgcgaccgcgccccgcagacactgccctcgcccgaggcggacgcgctcgccggcagcaagcacaaagaggagaaggccgacctggaccccagcaaccccgtggccaactggattcacgcccgctccacgaggaagaagcgctgcccctacaccaagtaccagacgctggaactggagaaggagtttctcttcaatatgtatttaaccagggaccgtcggtatgaggtggcccgggttctcaatctcaccgagcggcaggtcaaaatctggtttcagaatcgaaggatgaagatgaaaaagatgaataaagagaaaaccgacaaggagcagtcctaaaccctacccagcctgctgcctcagcacagccaagggaaaaacaaaaaccccacaaaataccccaacacaggcgggggagagacgaaaaagaaaaggaaagagcaagatagacaaaagccaatcagcttaaaaagaaaaacaaggaaggggaaaagaaaactcttgcgatttgggagggttcagtgttgagatattggtgttttagagttagttctacccagcgaggaggaggcggggagagaaactgcgttctctttccccagcgcaaccgaaataaatgacacatacaaatgtgatttttttcctcctttcttcagagaagccagtacttgaatcgctatatttctatttttttttccctgtatcgtatttggtccaggtcatccctccccgggcctggggcgctctgcgtgcagattttgtacaaaaaaaaaaaagacacacacacatacatgataatgattcccagcccaggagctgaggggtgagggctggggaccatgccgcgggctaggtcgggcccgtgcaggccggcgccttgggctgtacatagtgttccctctcatccccagggttcgtccccagcgtccgtcctgtaacgtgcttctgtttgttatggtagaa

SEQ ID NO: 168882 - DNA, 783 bp, Artificial Sequence
  derived and/or modified sequence
atgtctgccaccggccccatcagcaactactacgtggacagcctcatcagccatgacaatgaagacctgctggccagccgcttccctgccactggagcccaccctgctgctgcccggcccagcggcctggtgcctgactgcagcgacttccccagctgcagctttgcccccaagccagctgtgttcagcacctcctgggcccctgtgcccagccagagctctgtggtgtaccacccctacggcccccagccccacctgggcgctgacacccgctacatgaggacctggctggagcccctgtctggagctgtgtccttccccagcttccctgctgggggccgccactacgccctgaagccagatgcctacccaggccggcgggctgactgtggccctggagagggccgcagctacccagactacatgtatggcagccctggagagctgcgggaccgggccccccagaccctgcccagccctgaggctgatgccctggccggcagcaagcacaaggaggagaaggctgacctggaccccagcaaccctgtggccaactggatccacgcccggagcaccaggaagaagcgctgcccctacaccaagtaccagaccctggagctggagaaggagttcctgttcaacatgtacctgacccgggacagaagatatgaggtggcccgggtgctgaacctgacagagcggcaggtgaagatctggttccagaacagaaggatgaagatgaagaagatgaacaaggagaagacagacaaggagcagagctag

SEQ ID NO: 168883 - DNA, 783 bp, Artificial Sequence
  derived and/or modified sequence
atgagcgccaccggccccatcagcaactactacgtggacagcctgattagtcatgataatgaggatctgctcgcaagcagatttccagctaccggggctcatcctgccgccgcccggccgagcggtctggttcccgattgttcagatttccccagttgtagcttcgcgcccaagcccgccgtgttctcaacttcttgggcccccgtgccgtcacagtccagtgttgtgtatcacccctacggccctcaaccgcacttaggcgccgatactagatacatgaggacatggctggagcctctttctggagcagtctcgtttcccagttttcctgccggaggtcgtcattacgccctgaaacccgatgcttatccgggcagacgtgctgactgcggtccgggcgaaggacgtagctatccggattacatgtacggcagcccgggagagctgcgggacagggctccccaaacacttcctagccccgaggccgatgccctcgctggctccaaacataaggaagagaaagccgatcttgatccaagtaatccagttgcgaattggatacatgcacgttccacccggaaaaaacggtgtccctatacaaagtaccagactttggagctggagaaggaattcttattcaacatgtacctcaccagggatcggaggtacgaggtagctagggttctgaatctgaccgaacgacaggtaaaaatctggtttcaaaatagaaggatgaaaatgaagaagatgaataaagagaagaccgataaagagcagagctag

SEQ ID NO: 168884 - DNA, 783 bp, Artificial Sequence
  derived and/or modified sequence
atgagcgccaccggccccatcagcaactactacgtggacagcctgatcagccacgacaacgaggacctgcttgcgtctaggttccccgcaacaggtgcccaccctgctgccgcgagaccatccggacttgtgccggattgttctgatttccccagctgctctttcgctccaaagccagccgtgtttagcacatcgtgggctcccgtcccgtctcagtctagcgtcgtctatcatccatacggccctcagccccacctgggcgctgatacacgctacatgagaacatggctggagcccctctcaggcgcggtgagcttcccatcctttcccgctggcggccgccactacgcactgaaaccagacgcatatccaggacgtcgagccgactgtggcccgggagaggggaggagctatccagactatatgtacggtagtcccggggagctgagggatcgggctccacagactctgccctcccccgaagccgacgctctggcgggaagtaagcacaaagaggaaaaggccgacttggatccaagcaaccccgtcgccaactggatacatgcccgctctacacgtaaaaagaggtgcccttacaccaaataccagaccttggagctagagaaagaattcctgtttaacatgtatctgactagggaccgtcggtacgaagtggctcgcgtgctgaatctcacagaaagacaggtgaaaatttggtttcagaaccggaggatgaagatgaagaaaatgaataaggagaaaacagataaagaacagtcgtag

SEQ ID NO: 168885 - DNA, 783 bp, Artificial Sequence
  derived and/or modified sequence
atgtctgccactgggcctatttccaactattatgtcgactcgttaatctcacatgataacgaggacttgttggccagcagattccctgccaccggagctcatcccgctgccgctaggccctcaggacttgtacccgactgtagtgactttccatcttgttcattcgcccctaagccagccgtattttccacttcctgggcccctgttcctagccagagcagcgtggtgtaccacccatacgggcctcagccccatctgggcgctgatacccgctatatgcgcacttggctggagccactgtctggcgcagttagtttcccctccttcccagccggaggacgtcactacgctctcaaacccgacgcctacccaggacggagggccgattgcggacccggagaagggaggagttatcccgattatatgtatggaagcccaggggagctgagggaccgcgcaccacaaaccttgcccagtccggaagccgacgcactggcaggatctaaacacaaagaggagaaggctgatctcgatccttctaacccagttgctaattggatacatgctcggagcacccgcaagaaacgatgtccttacactaaatatcagacgttagaattagaaaaagagtttttgttcaatatgtatctcacacgggataggcgctacgaggtcgcacgcgtcttaaacctaacggagcggcaggtgaaaatatggtttcagaataggagaatgaagatgaaaaagatgaataaggagaaaactgacaaggagcagtcatag

SEQ ID NO: 168886 - DNA, 783 bp, Artificial Sequence
  derived and/or modified sequence
atgtctgcaacaggtcctataagcaattactatgtggacagcctaatcagtcacgacaatgaagacctccttgcttctcgtttcccagcaacaggagctcaccctgccgctgccaggccctccggattagtccccgactgtagtgattttccaagctgctctttcgctccaaagccagctgtattcagcaccagttgggctcccgtaccatcccaaagcagtgtagtctatcacccatatgggcctcaacctcatctcggagctgacacgaggtacatgcgaacttggctcgagccattaagcggagcggtttctttccctagcttccctgcaggtgggaggcattatgccctcaaacctgacgcttatccagggaggagggcagattgtggacccggagaaggccgatcctatcctgactacatgtacgggtccccaggcgaactgagggacagggccccacagactctccccagtcctgaagcagatgcactggctgggagcaaacacaaggaagaaaaggccgatctggacccatctaatcccgttgctaactggattcacgcaagatctaccaggaagaaaagatgtccgtacacaaaataccaaacactcgaactcgaaaaggagttcctctttaatatgtacttaacaagggacaggagatacgaagtggcacgagtcctcaacctgactgagcgtcaggtaaagatttggttccagaatcgcagaatgaagatgaaaaaaatgaacaaggaaaagaccgataaagagcaaagctag

SEQ ID NO: 168887 - DNA, 783 bp, Artificial Sequence
  derived and/or modified sequence
atgagcgccaccggccccatcagcaactactacgtggacagcctgatcagccacgacaacgaggacctgctggccagcagattccccgccaccggcgcccaccccgccgccgccagacccagcggcctggtgcccgactgcagcgacttccccagctgcagcttcgcccccaagcccgccgtgttcagcaccagctgggcccccgtgcccagccagagcagcgtggtgtaccacccctacggcccccagccccacctgggcgccgacaccagatacatgagaacctggctggagcccctgagcggcgccgtgagcttccccagcttccccgccggcggcagacactacgccctgaagcccgacgcctaccccggcagaagagccgactgcggccccggcgagggcagaagctaccccgactacatgtacggcagccccggcgagctgagagacagagccccccagaccctgcccagccccgaggccgacgccctggccggcagcaagcacaaggaggagaaggccgacctggaccccagcaaccccgtggccaactggatccacgccagaagcaccagaaagaagagatgcccctacaccaagtaccagaccctggagctggagaaggagttcctgttcaacatgtacctgaccagagacagaagatacgaggtggccagagtgctgaacctgaccgagagacaggtgaagatctggttccagaacagaagaatgaagatgaagaagatgaacaaggagaagaccgacaaggagcagagctag

SEQ ID NO: 168888 - protein, 164 aa, Artificial Sequence
  derived and/or modified sequence
MAALSGVRWLTRALVSAGNPGAWRGLSTSAAAHAASRSQAEDVRVEGSFPVTMLPGDGVGPELMHAVKEVFKAAAVPVEFQEHHLSEVQNMASEEKLEQVLSSMKENKVAIIGKIHTPMEYKGELASYDMRLRRKLDLFANVVHVKSLPGYDSAQQSRPGDHSR

SEQ ID NO: 168889 - DNA, 1158 bp, Artificial Sequence
  derived and/or modified sequence
atggccgcgctatcaggtgttcgatggctcaccagagcgctggtgtccgccggaaatccaggagcatggaggggtcttagcacatcagctgctgcacacgcagcgtcacgttcacaggcagaggatgtgcgtgtggaaggctcctttcccgtgactatgttacctggtgatggggtaggcccagaacttatgcacgcagtcaaggaagtgttcaaagcagcagcagttccggtcgaatttcaggaacatcatctctctgaggtgcagaacatggcatctgaagagaagctcgagcaggtgctatccagcatgaaggaaaataaggtggccatcattggcaaaattcacacgccaatggaatataaaggggagctggctagttacgacatgaggttgaggcgaaagctggacctttttgcaaacgtggtccacgtcaagagtttgcctggttacatgacacgacacaataatctggacttggtgataattcgggagcagaccgagggagaatattcctcgttggaacacgaaagtgcacgcggcgtgatcgagtgcttaaaaatagtgaccagagccaaatcccagcggatcgctaaatttgcctttgattatgccaccaagaagggaagagggaaagttaccgccgtacacaaggccaatatcatgaagctgggggacggtctgtttctgcagtgctgcgaagaagtggcagaactctaccccaagataaagttcgagacgatgatcatcgacaactgctgcatgcaactggtgcagaacccataccagttcgacgtgttggtaatgccgaacctatacggaaacataatcgacaacctcgcagccggcctcgtgggcggcgctggcgtcgtgccaggggaatcgtactctgcagaatatgccgtgttcgagaccggcgctaggcaccccttcgcccaggcagtcggacgcaatattgcgaaccccacagctatgttgttaagcgcttcaaacatgctccgacacctcaacctggaatatcactcatcaatgatcgctgacgccgtgaagaaggtgatcaaagtcggcaaggtccgaaccagagacatgggcgggtacagcaccactaccgactttatcaaatcagtaataggccacctccagactaaaggatcatag

SEQ ID NO: 168890 - DNA, 702 bp, Artificial Sequence
  derived and/or modified sequence
atgaagatgggcgagagatggagtagtctgtttccattcccagtgtctccaagctgctgctttctcttgacccagtccgctcgcggagtgatcgaatgcctgaagattgttactagggctaaatctcagcgcatcgccaaatttgcctttgactacgcgacaaaaaagggcagggggaaagtgactgcagtgcacaaggccaacattatgaaacttggcgacggcctcttcctccagtgttgcgaggaagtcgcagaactctacccaaagatcaagtttgaaacaatgatcatagacaattgttgtatgcagctcgtacaaaacccgtaccagtttgatgtgctggtaatgccaaacctctacggtaacatcatcgacaatctggcggcaggccttgtcgggggcgcaggagtggtacctggggagagttactcagccgagtacgctgtctttgagacgggagctagacatccattcgcccaggcggttggaaggaatatcgccaaccctaccgctatgttactgagcgctagtaacatgttacgtcatctgaatctcgaataccattcatcaatgatcgccgatgccgtaaagaaagtgattaaggtgggaaaggtgcgaacaagagacatggggggctactccaccaccaccgatttcatcaagagcgtgataggacacttgcaaactaaagggtcctag

SEQ ID NO: 168891 - DNA, 1545 bp, Artificial Sequence
  derived and/or modified sequence
gtcacttcccacgcgacttcctgcgggaaacatggcggcattgagcggagtccgctggctgacccgagcgctggtctccgccgggaaccctggggcatggagaggtctgagtacctcggccgcggcgcacgctgcatcgcggagccaggccgaggacgtgagggtggagggctcctttcccgtgaccatgcttccgggagacggtgtggggcctgagctgatgcacgccgtcaaggaggtgttcaaggctgccgctgtcccagtggagttccaggagcaccacctgagtgaggtgcagaatatggcatctgaggagaagctggagcaggtgctgagttccatgaaggagaacaaagtggccatcattggaaagattcataccccgatggagtataagggggagctagcctcctatgatatgcggctgaggcgtaagttggacttatttgccaacgtagtccatgtgaagtcacttcctgggtatatgactcggcacaacaatctagacctggtgatcattcgagagcagacagaaggggagtacagctctctggaacatgagagtgcaaggggtgtgattgagtgtttgaagattgtcacacgagccaagtctcagcggattgcaaagttcgcctttgactatgccaccaagaaggggcggggcaaggtcactgctgtccacaaggccaacatcatgaaacttggggatgggttgttcctgcagtgctgtgaggaagttgctgaactgtaccccaaaatcaaatttgagacaatgatcatagacaactgctgcatgcagctggtgcagaatccttaccagtttgatgtgcttgtgatgcccaatctctatgggaacattattgacaatctggctgctggcctggttgggggagctggtgtggtccctggtgagagctatagtgcagaatacgcagtctttgagacgggtgcccggcacccatttgcccaggcagtgggcaggaatatagccaatcccacggccatgctgctgtcggcttccaacatgctgcggcatcttaatcttgagtatcactccagcatgatcgcagatgcggtgaagaaggtgatcaaagttggcaaggtgcggactcgagacatgggcggctacagcaccacaaccgacttcatcaagtctgtcatcggtcacctgcagactaaagggagctagagccctttatttcttccaaccttgcaaggaccacactccccatacccttcagtgcagtgtaccagggaagagaccttgtgcctctaagcagtggaccatggtcaccttgctgggtagagcctaggttgtccttgggccggcttccttaggggacagactgttgggtggtgatggggattgttaggatggagcccaggccacatggatgatgatgattctcccccacaggttcgaacctctgacatgggtggctatgctacttgccatgacttcactgaggctgtcattgctgccttgccccacccataggccctgtccatacccatgtaaggtgttcaataaagaacatgaaccaa

SEQ ID NO: 168892 - DNA, 1158 bp, Artificial Sequence
  derived and/or modified sequence
atggccgccctgtctggagtgcgctggctgacccgggccctggtgtctgctggcaaccctggggcctggaggggcctgagcaccagcgctgctgcccacgccgccagccgcagccaggctgaagatgtgcgggtggagggcagcttccctgtgaccatgctgcctggagatggagtgggccctgagctgatgcatgctgtgaaggaggtgttcaaggctgctgctgtgcctgtggagttccaggagcaccacctgtctgaggtgcagaacatggccagcgaggagaagctggagcaggtgctgagctccatgaaggagaacaaggtggccatcatcggcaagatccacacccccatggagtacaagggggagctggccagctatgacatgaggctgcggaggaagctggacctgtttgccaacgtggtgcacgtgaagagcctgcccggctacatgaccaggcacaacaacctggacctggtgatcatccgggagcagacagaaggagagtacagcagcctggagcacgagagcgcccggggcgtgattgagtgcctgaagatcgtgacccgggccaagagccagagaattgccaagtttgcctttgattatgccaccaagaagggccggggcaaggtgacagctgtgcacaaggccaacatcatgaagctgggagatggcctcttcctgcagtgctgtgaggaggtggccgagctgtaccccaagatcaagtttgagaccatgatcatcgacaactgctgcatgcagctggtgcagaacccctaccagtttgatgtgctggtgatgcccaacctgtatggcaacatcatcgacaacctggccgccggcctggtgggcggggccggcgtggtgcctggagagagctacagcgcagaatatgctgtgtttgaaacaggagcccggcacccctttgcccaggccgtgggcagaaatattgccaaccccacagccatgctgctgagcgccagcaacatgctgcggcacctgaacctggagtaccacagctccatgattgctgatgctgtgaagaaggtgatcaaggtgggcaaggtgaggacccgggacatgggcggctacagcaccaccacagacttcatcaagtctgtgattggccacctgcagaccaagggcagctag

SEQ ID NO: 168893 - DNA, 702 bp, Artificial Sequence
  derived and/or modified sequence
atgaagatgggagagcgctggagcagcctcttccccttccctgtgagccccagctgctgcttcctgctgacccagagcgcccggggcgtgattgagtgcctgaagatcgtgacccgggccaagagccagagaattgccaagtttgcctttgattatgccaccaagaagggccggggcaaggtgacagctgtgcacaaggccaacatcatgaagctgggagatggcctcttcctgcagtgctgtgaggaggtggccgagctgtaccccaagatcaagtttgagaccatgatcatcgacaactgctgcatgcagctggtgcagaacccctaccagtttgatgtgctggtgatgcccaacctgtatggcaacatcatcgacaacctggccgccggcctggtgggcggggccggcgtggtgcctggagagagctacagcgcagaatatgctgtgtttgaaacaggagcccggcacccctttgcccaggccgtgggcagaaatattgccaaccccacagccatgctgctgagcgccagcaacatgctgcggcacctgaacctggagtaccacagctccatgattgctgatgctgtgaagaaggtgatcaaggtgggcaaggtgaggacccgggacatgggcggctacagcaccaccacagacttcatcaagtctgtgattggccacctgcagaccaagggcagctag

SEQ ID NO: 168894 - DNA, 1158 bp, Artificial Sequence
  derived and/or modified sequence
atggccgccctgagcggcgtgcggtggctgacccgggccctggtgtccgccggaaatccaggagcgtggcgcgggctgagcacatctgctgctgcacacgccgcaagtcgatcacaagctgaggacgtgagggttgagggttcttttcccgtgactatgctgcccggggacggcgtggggcccgaactgatgcatgcggtgaaggaggttttcaaagcggcagcagtccctgtcgaatttcaggagcaccatttaagtgaggttcagaacatggcctccgaggagaagctggaacaagtgctgagcagcatgaaagagaataaagtcgccataattggcaaaatacataccccaatggagtacaagggggagcttgcgtcctacgatatgcgtctgaggaggaaactggatctgtttgccaatgtggttcatgtgaaatccctccctgggtatatgactcggcacaataatctcgacctcgtcatcattagggaacagacggaaggtgaatactcttccctggaacatgagtcggcacgtggtgttatcgagtgcctgaaaatcgtgacgagggcaaaatcacagagaattgcaaagttcgcctttgattatgctacaaaaaaaggacgcgggaaggtgacggccgtgcacaaggccaacatcatgaagctgggggacggactgttcctgcagtgctgcgaagaagtcgccgaactctaccctaagataaaattcgaaaccatgatcatcgataattgttgcatgcagctggtccagaacccttaccagttcgacgtgctggtcatgcccaatctctacggaaacattatcgacaatctggctgctggattggttggcggcgccggagtggtgcccggtgaatcctactccgccgagtatgcggtctttgaaacaggagccaggcacccttttgctcaggccgtgggacggaatattgctaaccccactgcgatgctgctatccgccagtaacatgctccgacacctgaatctagagtaccattcctcgatgatcgctgatgccgtgaagaaggttatcaaggtggggaaagttcgtaccagggatatgggcggttacagcacaacaactgatttcatcaaatctgtgattggacacctgcagacaaaggggtcctag

SEQ ID NO: 168895 - DNA, 702 bp, Artificial Sequence
  derived and/or modified sequence
atgaagatgggcgagcggtggagcagcctgttccccttccccgtgtctccctcttgctgtttcctgcttacccagagcgcacggggcgttattgagtgtctgaagatcgttacccgtgccaagtcacagcgaattgccaaattcgcttttgattatgctaccaagaaaggaaggggcaaggtgacagccgtgcacaaagccaacataatgaagctgggtgatggtctgtttttacagtgttgtgaagaggtggccgaactgtatcccaaaataaagtttgaaactatgataattgacaactgctgtatgcagctggtccagaatccttaccagtttgatgtcttggtcatgcctaacctatacgggaatataatcgacaatctggccgccggccttgtcggcggcgcgggagtcgtgcccggcgagtcgtatagcgccgagtatgccgtgtttgagaccggagctcgacacccattcgcccaggctgtaggccgaaacattgccaaccctacagctatgttactttcagccagcaacatgctgcggcacctgaatcttgaataccacagctcaatgatcgctgacgctgtcaagaaagtgattaaggttggaaaggtccgaacaagagacatgggcggttatagcacaacaacagactttataaagagcgttatcggccatttacagacaaaggggagctag

SEQ ID NO: 168896 - DNA, 1158 bp, Artificial Sequence
  derived and/or modified sequence
atggctgccttaagcggcgttagatggctaacgcgtgcacttgtgtccgccggaaaccccggtgcatggagaggactgtctactagtgccgctgctcacgccgcatcccggtcccaggctgaagatgttagagtcgagggcagttttcccgtcactatgcttcccggagacggagtgggcccagagctcatgcacgctgttaaagaagtcttcaaggcagcggctgtcccagtggaatttcaggagcaccacctgagcgaagttcaaaacatggcctctgaggagaagcttgaacaagtgctatcaagtatgaaggaaaacaaggtcgcgatcattggcaaaatccacaccccaatggaatacaaaggcgagctcgcttcatatgacatgagactcagaagaaaactggatctgttcgccaacgtagtgcacgtaaaatcactcccaggttatatgactcgccacaacaatcttgatctggtaatcataagggagcagacagagggcgagtactcctctctggagcatgagtctgccaggggcgtaatcgaatgcctgaagatcgtaacaagggccaagtctcagcgcatagccaaatttgccttcgattatgctactaaaaaaggtcgtggaaaagtgacagccgttcacaaggcaaatatcatgaagctgggagatggcctctttttacagtgctgcgaggaagtggccgaactctatccgaaaatcaaattcgagacaatgataatcgacaactgctgtatgcagctcgtgcagaacccctatcagttcgatgttttagtcatgccaaacctctacggaaacatcattgataacttagccgcaggcttggtgggcggagccggagtagttcctggggaatcatacagcgctgaatacgccgtgttcgaaaccggtgccagacacccattcgcacaggcagttgggcgaaacattgctaacccgacggccatgctcctttccgctagtaacatgctgagacatctgaatctcgaatatcacagctctatgattgcagatgccgtgaaaaaggttatcaaagtgggcaaggtcagaacccgcgatatgggaggttacagtactacaacggatttcattaaatcagtgattggccacctccagaccaagggctcttag

SEQ ID NO: 168897 - DNA, 702 bp, Artificial Sequence
  derived and/or modified sequence
atgaaaatgggggagagatggagctctctattccccttccccgtcagcccatcgtgttgctttttactgacccagtctgccaggggtgtgattgagtgcctgaagatcgtgactcgtgccaagtcacagcggatcgcaaaatttgcatttgactatgccactaaaaaggggagggggaaagtgacagccgtgcataaggccaacatcatgaagctgggagacggattattcttgcagtgttgcgaggaggtggctgagctttaccccaaaattaaattcgagaccatgattatcgacaactgttgtatgcaattagttcagaatccatatcagttcgacgttctggtgatgccaaatctgtacggcaatattattgataaccttgctgcagggctggtaggcggtgcaggggtagtgccaggggagtcgtattctgccgagtatgccgtcttcgaaacaggcgctaggcacccttttgcccaagcagttggacgaaacatcgccaatcccactgctatgctcctttcagccagtaatatgctgaggcatctgaacctggagtaccactctagcatgatcgccgacgccgtcaaaaaggtgatcaaagtaggcaaggttaggactagggatatgggtggatacagcaccactacagactttattaagtctgtgattgggcatcttcagactaagggttcatag

SEQ ID NO: 168898 - DNA, 1158 bp, Artificial Sequence
  derived and/or modified sequence
atggccgccctgagcggcgtgagatggctgaccagagccctggtgagcgccggcaaccccggcgcctggagaggcctgagcaccagcgccgccgcccacgccgccagcagaagccaggccgaggacgtgagagtggagggcagcttccccgtgaccatgctgcccggcgacggcgtgggccccgagctgatgcacgccgtgaaggaggtgttcaaggccgccgccgtgcccgtggagttccaggagcaccacctgagcgaggtgcagaacatggccagcgaggagaagctggagcaggtgctgagcagcatgaaggagaacaaggtggccatcatcggcaagatccacacccccatggagtacaagggcgagctggccagctacgacatgagactgagaagaaagctggacctgttcgccaacgtggtgcacgtgaagagcctgcccggctacatgaccagacacaacaacctggacctggtgatcatcagagagcagaccgagggcgagtacagcagcctggagcacgagagcgccagaggcgtgatcgagtgcctgaagatcgtgaccagagccaagagccagagaatcgccaagttcgccttcgactacgccaccaagaagggcagaggcaaggtgaccgccgtgcacaaggccaacatcatgaagctgggcgacggcctgttcctgcagtgctgcgaggaggtggccgagctgtaccccaagatcaagttcgagaccatgatcatcgacaactgctgcatgcagctggtgcagaacccctaccagttcgacgtgctggtgatgcccaacctgtacggcaacatcatcgacaacctggccgccggcctggtgggcggcgccggcgtggtgcccggcgagagctacagcgccgagtacgccgtgttcgagaccggcgccagacaccccttcgcccaggccgtgggcagaaacatcgccaaccccaccgccatgctgctgagcgccagcaacatgctgagacacctgaacctggagtaccacagcagcatgatcgccgacgccgtgaagaaggtgatcaaggtgggcaaggtgagaaccagagacatgggcggctacagcaccaccaccgacttcatcaagagcgtgatcggccacctgcagaccaagggcagctag

SEQ ID NO: 168899 - DNA, 702 bp, Artificial Sequence
  derived and/or modified sequence
atgaagatgggcgagagatggagcagcctgttccccttccccgtgagccccagctgctgcttcctgctgacccagagcgccagaggcgtgatcgagtgcctgaagatcgtgaccagagccaagagccagagaatcgccaagttcgccttcgactacgccaccaagaagggcagaggcaaggtgaccgccgtgcacaaggccaacatcatgaagctgggcgacggcctgttcctgcagtgctgcgaggaggtggccgagctgtaccccaagatcaagttcgagaccatgatcatcgacaactgctgcatgcagctggtgcagaacccctaccagttcgacgtgctggtgatgcccaacctgtacggcaacatcatcgacaacctggccgccggcctggtgggcggcgccggcgtggtgcccggcgagagctacagcgccgagtacgccgtgttcgagaccggcgccagacaccccttcgcccaggccgtgggcagaaacatcgccaaccccaccgccatgctgctgagcgccagcaacatgctgagacacctgaacctggagtaccacagcagcatgatcgccgacgccgtgaagaaggtgatcaaggtgggcaaggtgagaaccagagacatgggcggctacagcaccaccaccgacttcatcaagagcgtgatcggccacctgcagaccaagggcagctag

SEQ ID NO: 168900 - protein, 190 aa, Artificial Sequence
  derived and/or modified sequence
MMASPFALLMALVVLSCKSSCSLGCDLPETHSLDNRRTLMLLAQMSRISPSSCLMDRHDFGFPQEEFDGNQFQKAPAISVLHELIQQIFNLFTTKDSSAAWDEDLLDKFCTELYQQLNDLEACVMQEERVGETPLMNADSILAVKKYFRRITLYLTEKKYSPCAWEVVRAEIMRSLSLSTNLQERLRRKE

SEQ ID NO: 168901 - DNA, 573 bp, Artificial Sequence
  derived and/or modified sequence
atgatggccagccccttcgccctgctgatggccctggtggtgctgagctgcaagagcagctgcagcctgggctgcgacctgcccgagacccacagcctggacaacagaagaaccctgatgctgctggcccagatgagcagaatcagccccagcagctgcctgatggacagacacgacttcggcttcccccaggaggagttcgacggcaaccagttccagaaggcccccgccatcagcgtgctgcacgagctgatccagcagatcttcaacctgttcaccaccaaggacagcagcgccgcctgggacgaggacctgctggacaagttctgcaccgagctgtaccagcagctgaacgacctggaggcctgcgtgatgcaggaggagagagtgggcgagacccccctgatgaacgccgacagcatcctggccgtgaagaagtacttcagaagaatcaccctgtacctgaccgagaagaagtacagcccctgcgcctgggaggtggtgagagccgagatcatgagaagcctgagcctgagcaccaacctgcaggagagactgagaagaaaggagtag

SEQ ID NO: 168902 - DNA, 573 bp, Artificial Sequence
  derived and/or modified sequence
atgatggcaagcccattcgccctgctgatggctttggtggtgttgtcttgcaaatcatcatgtagcttgggctgcgatttgcctgagacccactctctggataaccggagaaccctgatgctgctcgctcaaatgagtagaatctcaccgtccagttgtctgatggatcgacatgatttcggttttcctcaagaagagtttgatggaaatcaattccagaaagctccagccatcagcgtgctacatgagttgatccagcagatcttcaaccttttcacgacgaaggactcctccgccgcttgggatgaggacctgcttgacaaattctgcaccgagctctaccagcaactcaacgacttggaggcctgcgtgatgcaagaagagcgggtaggtgagactcccttgatgaacgcagattctattctagccgtgaaaaagtatttcaggcgaattactctctacctgacggaaaagaagtattccccatgcgcttgggaagttgtaagggctgagattatgagatcgctgagcctgtccactaacctccaggagcgactgaggcgcaaagaatag

SEQ ID NO: 168903 - DNA, 573 bp, Artificial Sequence
  derived and/or modified sequence
atgatggccagcccctttgccctgctgatggccctggtggtgctgagctgcaagagcagctgcagcctgggctgtgacctgcctgagacccacagcctggacaacagaaggaccctgatgctgctggcccagatgagccgcatcagccccagcagctgcctgatggacagacatgactttggcttcccccaggaggagtttgatggcaaccagttccagaaggccccagccatctctgtgctgcacgagctgatccagcagatcttcaacctcttcaccaccaaggacagcagcgctgcctgggatgaggacctgctggacaagttctgcacagagctgtaccagcagctgaatgacctggaggcctgtgtgatgcaggaggagcgggtgggggagacccccctgatgaatgctgacagcatcctggccgtgaagaagtacttccgccgcatcaccctgtacctgacagagaagaagtacagcccctgtgcctgggaggtggtgcgggcagagatcatgaggagcctgagcctgagcaccaacctgcaggagcggctgcggaggaaggagtag

SEQ ID NO: 168904 - DNA, 573 bp, Artificial Sequence
  derived and/or modified sequence
atgatggccagccccttcgccctgctgatggccctggtggtgctgtcttgcaagagttcctgctctcttggatgcgacctgcccgaaactcacagcctggacaaccggagaactctcatgctcctcgcacagatgtcgcgtattagtcccagcagttgcctcatggatagacatgattttggattccctcaggaggaattcgacggcaatcagttccagaaggctccagcaatctcagtgctgcacgagctcattcagcagatcttcaaccttttcactaccaaggactcctccgctgcctgggacgaggaccttctggataaattctgcaccgaattgtatcagcagcttaatgatttggaagcgtgcgtcatgcaggaggagcgggtgggcgaaaccccactcatgaacgctgacagcattctcgccgtgaagaaatacttccgaaggatcactctctatctgactgaaaagaagtactcgccgtgtgcctgggaagttgtaagagcagaaatcatgaggtccctcagcctgtccactaatctgcaggagcgcctgcgccgtaaggagtag

SEQ ID NO: 168905 - DNA, 573 bp, Artificial Sequence
  derived and/or modified sequence
atgatggcaagcccctttgccttgctcatggccttagtggtcctgagctgcaaatcttcttgctcattggggtgcgatctgcctgagactcacagtctcgataaccgacgaactctgatgctcctggcccagatgtcccggatctccccttccagctgtctcatggaccgtcatgactttggctttcctcaagaagagtttgacggaaaccagtttcagaaagccccagccattagcgtcctgcacgagctgatccaacagattttcaatctgtttaccactaaggactccagcgccgcttgggatgaagacctgctggacaaattctgtaccgaactttaccagcagcttaacgacctagaagcttgcgtaatgcaagaagagcgggtgggtgagacccctctcatgaacgctgacagtatattggccgtcaagaaatattttcgacgcatcacactgtacctgactgagaagaaatattcgccatgtgcttgggaagtagtccgggctgaaataatgcgatcactctccctgagcacgaacttgcaggagcggctgcgtcgtaaagagtag

SEQ ID NO: 168906 - DNA, 705 bp, Artificial Sequence
  derived and/or modified sequence
agagaacctagagcccaaggttcagagtcacccatctcagcaagcccagaagcatctgcaatatctatgatggcctcgccctttgctttactgatggccctggtggtgctcagctgcaagtcaagctgctctctgggctgtgatctccctgagacccacagcctggataacaggaggaccttgatgctcctggcacaaatgagcagaatctctccttcctcctgtctgatggacagacatgactttggatttccccaggaggagtttgatggcaaccagttccagaaggctccagccatctctgtcctccatgagctgatccagcagatcttcaacctctttaccacaaaagattcatctgctgcttgggatgaggacctcctagacaaattctgcaccgaactctaccagcagctgaatgacttggaagcctgtgtgatgcaggaggagagggtgggagaaactcccctgatgaatgcggactccatcttggctgtgaagaaatacttccgaagaatcactctctatctgacagagaagaaatacagcccttgtgcctgggaggttgtcagagcagaaatcatgagatccctctctttatcaacaaacttgcaagaaagattaaggaggaaggaataacacctggtccaacatgaaacaattcttattgactcatataccaggtcacgctttcatgaattctgc

SEQ ID NO: 168907 - DNA, 573 bp, Artificial Sequence
  derived and/or modified sequence
atgatggctagccctttcgccctgctgatggccctagtagttttaagctgcaaatcatcatgttcacttggttgtgatcttcccgaaacccatagtttagacaatcgccggacacttatgctgttggctcagatgtctcggattagcccgagctcatgtctcatggaccgacacgattttggatttcctcaagaggaatttgacgggaaccagttccagaaagccccagctatttccgttctgcacgagctgattcaacagatttttaatctgtttactacgaaggactcttccgccgcctgggatgaagaccttctcgacaaattctgtacagaactctaccagcagttaaatgatcttgaggcatgcgtgatgcaagaagaacgtgtgggagaaactccattaatgaacgcagactcaatcttggctgttaaaaagtattttagacgtatcaccctttatctcaccgagaaaaaatactcaccttgtgcttgggaagtggtgagggcggaaatcatgaggtcactgagcctaagtacgaacctccaggagcgacttaggcgtaaggagtag

SEQ ID NO: 168908 - DNA, 573 bp, Artificial Sequence
  derived and/or modified sequence
atgatggccagcccctttgctctccttatggcacttgtcgtgctgtcttgcaaatcttcctgttccctgggctgcgacctgcctgaaacgcattctctcgacaatcggcgaactctcatgcttcttgctcagatgtctcggatatcccccagctcctgcttaatggatcggcacgacttcggcttcccccaagaagagtttgacgggaaccagtttcagaaagcccccgccatttccgtcctgcacgagcttatccagcaaattttcaacctctttacgactaaagactcttccgccgcatgggacgaggatctattggacaagttttgcaccgaattataccagcaactaaatgacttggaggcttgtgttatgcaagaagagcgtgtgggagagacgcccttgatgaatgctgattctatcctggctgtgaagaaatactttcggagaattactctatatctaactgaaaaaaagtacagcccctgcgcctgggaagttgtcagagccgagatcatgcgatccctgagcctcagcaccaacctccaagagcggctgcgcagaaaggagtag

SEQ ID NO: 168909 - RNA, 573 nt, Artificial Sequence
  derived and/or modified sequence
augauggcuagcccuuucgcccugcugauggcccuaguaguuuuaagcugcaaaucaucauguucacuugguugugaucuucccgaaacccauaguuuagacaaucgccggacacuuaugcuguuggcucagaugucucggauuagcccgagcucaugucucauggaccgacacgauuuuggauuuccucaagaggaauuugacgggaaccaguuccagaaagccccagcuauuuccguucugcacgagcugauucaacagauuuuuaaucuguuuacuacgaaggacucuuccgccgccugggaugaagaccuucucgacaaauucuguacagaacucuaccagcaguuaaaugaucuugaggcaugcgugaugcaagaagaacgugugggagaaacuccauuaaugaacgcagacucaaucuuggcuguuaaaaaguauuuuagacguaucacccuuuaucucaccgagaaaaaauacucaccuugugcuugggaaguggugagggcggaaaucaugaggucacugagccuaaguacgaaccuccaggagcgacuuaggcguaaggaguag

SEQ ID NO: 168910 - RNA, 573 nt, Artificial Sequence
  derived and/or modified sequence
augauggccagccccuuugcucuccuuauggcacuugucgugcugucuugcaaaucuuccuguucccugggcugcgaccugccugaaacgcauucucucgacaaucggcgaacucucaugcuucuugcucagaugucucggauaucccccagcuccugcuuaauggaucggcacgacuucggcuucccccaagaagaguuugacgggaaccaguuucagaaagcccccgccauuuccguccugcacgagcuuauccagcaaauuuucaaccucuuuacgacuaaagacucuuccgccgcaugggacgaggaucuauuggacaaguuuugcaccgaauuauaccagcaacuaaaugacuuggaggcuuguguuaugcaagaagagcgugugggagagacgcccuugaugaaugcugauucuauccuggcugugaagaaauacuuucggagaauuacucuauaucuaacugaaaaaaaguacagccccugcgccugggaaguugucagagccgagaucaugcgaucccugagccucagcaccaaccuccaagagcggcugcgcagaaaggaguag

SEQ ID NO: 168911 - protein, 2548 aa, Artificial Sequence
  derived and/or modified sequence
MNINDGGRRRFEDNEHTLRIYPGAISEGTIYCPIPARKNSTAAEVIESLINKLHLDKTKCYVLAEVKEFGGEEWILNPTDCPVQRMMLWPRMALENRLSGEDYRFLLREKNLDGSIHYGSLQSWLRVTEERRRMMERGFLPQPQQKDFDDLCSLPDLNEKTLLENLRNRFKHEKIYTYVGSILIVINPFKFLPIYNPKYVKMYDNHQLGKLEPHIYAVADVAYHAMLQRKKNQCIVISGESGSGKTQSTNFLIHHLTALSQKGFASGVEQIILGAGPVLEAFGNAKTAHNNNSSRFGKFIQVNYQETGTVLGAYVEKYLLEKSRLVYQEHNERNYHVFYYLLAGASEDERSAFHLKQPEEYHYLNQITKKPLRQSWDDYCYDSEPDCFTVEGEDLRHDFERLQLAMEMVGFLPKTRRQIFSLLSAILHLGNICYKKKTYRDDSIDICNPEVLPIVSELLEVKEEMLFEALVTRKTVTVGEKLILPYKLAEAVTVRNSMAKSLYSALFDWIVFRINHALLNSKDLEHNTKTLSIGVLDIFGFEDYENNSFEQFCINFANERLQHYFNQHIFKLEQEEYRTEGISWHNIDYIDNTCCINLISKKPTGLLHLLDEESNFPQATNQTLLDKFKHQHEDNSYIEFPAVMEPAFIIKHYAGKVKYGVKDFREKNTDHMRPDIVALLRSSKNAFISGMIGIDPVAVFRWAILRAFFRAMVAFREAGKRNIHRKTGHDDTAPCAILKSMDSFSFLQHPVHQRSLEILQRCKEEKYSITRKNPRTPLSDLQGMNALNEKNQHDTFDIAWNGRTGIRQSRLSSGTSLLDKDGIFANSTSSKLLERAHGILTRNKNFKSKPALPKHLLEVNSLKHLTRLTLQDRITKSLLHLHKKKKPPSISAQFQASLSKLMETLGQAEPYFVKCIRSNAEKLPLRFSDVLVLRQLRYTGMLETVRIRQSGYSSKYSFQDFVSHFHVLLPRNIIPSKFNIQDFFRKINLNPDNYQVGKTMVFLKEQERQHLQDLLHQEVLRRIILLQRWFRVLLCRQHFLHLRQASVIIQRFWRNYLNQKQVRDAAVQKDAFVMASAAALLQASWRAHLERQRYLELRAAAIVIQQKWRDYYRRRHMAAICIQARWKAYRESKRYQEQRKKIILLQSTCRGFRARQRFKALKEQRLRETKPEVGLVNIKGYGSLEIQGSDPSGWEDCSFDNRIKAIEECKSVIESNRISRESSVDCLKESPNKQQERAQSQSGVDLQEDVLVRERPRSLEDLHQKKVGRAKRESRRMRELEQAIFSLELLKVRSLGGISPSEDRRWSTELVPEGLQSPRGTPDSESSQGSLELLSYEESQKSKLESVISDEGDLQFPSPKISSSPKFDSRDNALSASNETSSAEHLKDGTMKEMVVCSSESITCKPQLKDSFISNSLPTFFYIPQQDPLKTNSQLDTSIQRNKLLENEDTAGEALTLDINRETRRYHCSGKDQIVPSLNTESSNPVLKKLEKLNTEKEERQKQLQQQNEKEMMEQIRQQTDILEKERKAFKTIEKPRIGECLVAPSSYQSKQRVERPSSLLSLNTSNKGELNVLGSLSLKDAALAQKDSSSAHLPPKDRPVTVFFERKGSPCQSSTVKELSKTDRMGTQLNVACKLSNNRISKREHFRPTQSYSHNSDDLSREGNARPIFFTPKDNMSIPLVSKEALNSKNPQLHKEDEPAWKPVKLAGPGQRETSQRFSSVDEQAKLHKTMSQGEITKLAVRQKASDSDIRPQRAKMRFWAKGKQGEKKTTRVKPTTQSEVSPLFAGTDVIPAHQFPDELAAYHPTPPLSPELPGSCRKEFKENKEPSPKAKRKRSVKISNVALDSMHWQNDSVQIIASVSDLKSMDEFLLKKVNDLDNEDSKKDTLVDVVFKKALKEFRQNIFSFYSSALAMDDGKSIRYKDLYALFEQILEKTMRLEQRDSLGESPVRVWVNTFKVFLDEYMNEFKTSDCTATKVPKTERKKRRKKETDLVEEHNGHIFKATQYSIPTYCEYCSSLIWIMDRASVCKLCKYACHKKCCLKTTAKCSKKYDPELSSRQFGVELSRLTSEDRTVPLVVEKLINYIEMHGLYTEGIYRKSGSTNKIKELRQGLDTDAESVNLDDYNIHVIASVFKQWLRDLPNPLMTFELYEEFLRAMGLQERKETIRGVYSVIDQLSRTHLNTLERLIFHLVRIALQEDTNRMSANALAIVFAPCILRCPDTTDPLQSVQDISKTTTCVELIVVEQMNKYKARLKDISSLEFAENKAKTRLSLIRRSMGKGRIRRGNYPGPSSPVVVRLPSVSDVSEETLTSEAAMETDITEQQQAAMQQEERVLTEQIENLQKEKEELTFEMLVLEPRASDDETLESEASIGTADSSENLNMESEYAISEKSERSLALSSLKTAGKSEPSSKLRKQLKKQQDSLDVVDSSVSSLCLSNTASSHGTRKLFQIYSKSPFYRAASGNEALGMEGPLGQTKFLEDKPQFISRGTFNPEKGKQKLKNVKNSPQKTKETPEGTVMSGRRKTVDPDCTSNQQLALFGNNEFMV

SEQ ID NO: 168912 - protein, 2529 aa, Artificial Sequence
  derived and/or modified sequence
MNINDGGRRRFEDNEHTLRIYPGAISEGTIYCPIPARKNSTAAEVIESLINKLHLDKTKCYVLAEVKEFGGEEWILNPTDCPVQRMMLWPRMALENRLSGEDYRFLLREKNLDGSIHYGSLQSWLRVTEERRRMMERGFLPQPQQKDFDDLCSLPDLNEKTLLENLRNRFKHEKIYTYVGSILIVINPFKFLPIYNPKYVKMYDNHQLGKLEPHIYAVADVAYHAMLQRKKNQCIVISGESGSGKTQSTNFLIHHLTALSQKGFASGVEQIILGAGPVLEAFGNAKTAHNNNSSRFGKFIQVNYQETGTVLGAYVEKYLLEKSRLVYQEHNERNYHVFYYLLAGASEDERSAFHLKQPEEYHYLNQDCFTVEGEDLRHDFERLQLAMEMVGFLPKTRRQIFSLLSAILHLGNICYKKKTYRDDSIDICNPEVLPIVSELLEVKEEMLFEALVTRKTVTVGEKLILPYKLAEAVTVRNSMAKSLYSALFDWIVFRINHALLNSKDLEHNTKTLSIGVLDIFGFEDYENNSFEQFCINFANERLQHYFNQHIFKLEQEEYRTEGISWHNIDYIDNTCCINLISKKPTGLLHLLDEESNFPQATNQTLLDKFKHQHEDNSYIEFPAVMEPAFIIKHYAGKVKYGVKDFREKNTDHMRPDIVALLRSSKNAFISGMIGIDPVAVFRWAILRAFFRAMVAFREAGKRNIHRKTGHDDTAPCAILKSMDSFSFLQHPVHQRSLEILQRCKEEKYSITRKNPRTPLSDLQGMNALNEKNQHDTFDIAWNGRTGIRQSRLSSGTSLLDKDGIFANSTSSKLLERAHGILTRNKNFKSKPALPKHLLEVNSLKHLTRLTLQDRITKSLLHLHKKKKPPSISAQFQASLSKLMETLGQAEPYFVKCIRSNAEKLPLRFSDVLVLRQLRYTGMLETVRIRQSGYSSKYSFQDFVSHFHVLLPRNIIPSKFNIQDFFRKINLNPDNYQVGKTMVFLKEQERQHLQDLLHQEVLRRIILLQRWFRVLLCRQHFLHLRQASVIIQRFWRNYLNQKQVRDAAVQKDAFVMASAAALLQASWRAHLERQRYLELRAAAIVIQQKWRDYYRRRHMAAICIQARWKAYRESKRYQEQRKKIILLQSTCRGFRARQRFKALKEQRLRETKPEVGLVNIKGYGSLEIQGSDPSGWEDCSFDNRIKAIEECKSVIESNRISRESSVDCLKESPNKQQERAQSQSGVDLQEDVLVRERPRSLEDLHQKKVGRAKRESRRMRELEQAIFSLELLKVRSLGGISPSEDRRWSTELVPEGLQSPRGTPDSESSQGSLELLSYEESQKSKLESVISDEGDLQFPSPKISSSPKFDSRDNALSASNETSSAEHLKDGTMKEMVVCSSESITCKPQLKDSFISNSLPTFFYIPQQDPLKTNSQLDTSIQRNKLLENEDTAGEALTLDINRETRRYHCSGKDQIVPSLNTESSNPVLKKLEKLNTEKEERQKQLQQQNEKEMMEQIRQQTDILEKERKAFKTIEKPRIGECLVAPSSYQSKQRVERPSSLLSLNTSNKGELNVLGSLSLKDAALAQKDSSSAHLPPKDRPVTVFFERKGSPCQSSTVKELSKTDRMGTQLNVACKLSNNRISKREHFRPTQSYSHNSDDLSREGNARPIFFTPKDNMSIPLVSKEALNSKNPQLHKEDEPAWKPVKLAGPGQRETSQRFSSVDEQAKLHKTMSQGEITKLAVRQKASDSDIRPQRAKMRFWAKGKQGEKKTTRVKPTTQSEVSPLFAGTDVIPAHQFPDELAAYHPTPPLSPELPGSCRKEFKENKEPSPKAKRKRSVKISNVALDSMHWQNDSVQIIASVSDLKSMDEFLLKKVNDLDNEDSKKDTLVDVVFKKALKEFRQNIFSFYSSALAMDDGKSIRYKDLYALFEQILEKTMRLEQRDSLGESPVRVWVNTFKVFLDEYMNEFKTSDCTATKVPKTERKKRRKKETDLVEEHNGHIFKATQYSIPTYCEYCSSLIWIMDRASVCKLCKYACHKKCCLKTTAKCSKKYDPELSSRQFGVELSRLTSEDRTVPLVVEKLINYIEMHGLYTEGIYRKSGSTNKIKELRQGLDTDAESVNLDDYNIHVIASVFKQWLRDLPNPLMTFELYEEFLRAMGLQERKETIRGVYSVIDQLSRTHLNTLERLIFHLVRIALQEDTNRMSANALAIVFAPCILRCPDTTDPLQSVQDISKTTTCVELIVVEQMNKYKARLKDISSLEFAENKAKTRLSLIRRSMGKGRIRRGNYPGPSSPVVVRLPSVSDVSEETLTSEAAMETDITEQQQAAMQQEERVLTEQIENLQKEKEELTFEMLVLEPRASDDETLESEASIGTADSSENLNMESEYAISEKSERSLALSSLKTAGKSEPSSKLRKQLKKQQDSLDVVDSSVSSLCLSNTASSHGTRKLFQIYSKSPFYRAASGNEALGMEGPLGQTKFLEDKPQFISRGTFNPEKGKQKLKNVKNSPQKTKETPEGTVMSGRRKTVDPDCTSNQQLALFGNNEFMV

SEQ ID NO: 168913 - DNA, 7647 bp, Artificial Sequence
  derived and/or modified sequence
atgaacatcaatgatggcggccgacgccggttcgaagataacgagcatacactgcgcatctaccctggggcgatttctgaggggacaatatactgtcccatccctgctcggaagaactcaacggcagcagaagtgattgaaagcctcatcaacaagctgcatttggacaagaccaaatgttacgtgctggctgaagttaaagagtttggaggtgaagagtggatactcaacccaacagattgcccggtccagcgcatgatgctgtggcctcgtatggcacttgaaaatcggctgagcggagaggattacagatttctgctgcgggaaaagaatcttgacggctctatccattatggcagcctgcagagctggttgcgggtgactgaagagcgcaggcggatgatggagcgtgggttcctgccacagccacagcagaaagacttcgatgatctgtgtagcttgcctgatttgaacgaaaaaaccctactggagaatctcaggaaccggttcaagcatgagaagatctatacgtatgtaggttccatcctcatcgtcataaatccattcaaattcttgcctatctacaaccccaaatatgtcaaaatgtatgataaccaccagttgggaaagctggagccccacatatatgcagtcgctgacgtcgcttatcacgctatgctgcagcggaagaaaaaccagtgcatcgtgatatctggtgagtcaggcagcggtaaaacgcaatccactaacttcctgatacaccacctcaccgcgctaagccagaaaggattcgcgagcggggtggaacagattatcctgggggctggacccgttctggaggcctttggcaatgctaaaactgcccataataataactcatctaggtttgggaagttcattcaggttaactaccaggagacaggaactgtgctgggggcttacgtggaaaagtatctgttggaaaagagtcgcctggtgtatcaggaacataatgaacggaactaccatgtattctattacttattagcaggcgccagcgaggatgagcggagtgctttccatctgaaacagcctgaggagtatcattatctaaaccagataacaaagaaaccactcagacagtcctgggacgactattgttacgactcggagccggactgctttacggttgagggagaggatttgcgccatgactttgaacgtctgcagctggccatggagatggtgggattcctcccaaagacacgaaggcagattttctccctcttgtccgccattttgcacctagggaatatctgttataaaaagaagacctacagagatgacagcattgatatttgtaatcccgaggtgctgcctatcgtgtccgagctcctggaggtgaaggaagagatgctgttcgaggccctcgttacaagaaagacagtcactgttggtgagaagctgatactaccctacaagctggcagaagcagtaacggtgagaaactctatggctaagagcctttactccgctttatttgattggatcgtgtttcgaattaatcatgctctgctgaactctaaagacttggaacacaataccaagacattgagtatcggagtgctcgacatcttcggttttgaagactatgagaacaacagctttgagcaattttgcataaattttgccaatgaaagattgcaacattacttcaaccagcatatcttcaagctcgaacaggaagaataccggaccgagggaatttcctggcacaatatagactatatcgataacacctgctgcatcaacctgatatccaaaaagcctactgggctgttgcacctgctagatgaagagtccaacttccctcaggcgactaaccagacactcctggacaagttcaaacaccagcacgaagataattcctacattgaattccccgctgttatggaacctgccttcataattaaacattatgccggcaaagtgaaatacggcgtaaaggactttagagagaagaatactgatcatatgcggcctgatatcgtagccctactgaggtcttcaaagaatgccttcatctccgggatgattggaatcgatccggtcgctgtctttcgttgggccattctccgcgcctttttcagggctatggtcgccttccgagaagcgggtaagcgcaacattcacaggaaaactggccacgatgacaccgccccttgcgccattttaaagtcaatggactcattctcctttcttcagcacccggtgcatcagcggtcattggaaatcctacagaggtgtaaggaagagaaatacagtataacccgcaaaaatcctaggaccccattgtcagacctgcaggggatgaatgccctgaacgagaaaaaccagcacgatactttcgatattgcgtggaacggacggacaggcatcagacagtcaagactaagcagcggcacctcgctgctggataaggatggcatcttcgccaactccacttcaagcaagctgctggaacgtgcccacggcatcctcacccggaacaagaattttaagtccaaaccagctcttccaaaacacctcctggaagtgaatagtctaaagcaccttacccgcctcactcttcaggatagaatcactaaatctctgctgcacctgcataaaaagaagaaacccccgagtatttcagcccagttccaagcatctctaagtaagttgatggagacgcttggccaagcagaaccatactttgttaaatgtatcaggagcaacgcggagaaactgccgctgaggttctcggatgtgcttgtcctcagacagctcaggtatactggcatgctggagacagttaggatccgccagagcggatactcctctaaatactcgttccaagattttgtgagtcatttccatgtattactgcctagaaatataattccttcgaagtttaatatacaggatttcttccgcaagataaacctcaatcccgataactaccaggttgggaagaccatggtgtttctgaaggagcaggaaagacaacatttgcaggacctgctgcatcaggaggtgctcagaaggatcatactgctccagagatggttccgcgtcctgttatgtaggcagcatttcttacacttgcgccaggcaagcgtgatcattcagcgattttggagaaactatctcaaccagaaacaggtgcgtgatgccgcagtccagaaagatgcctttgtgatggcatctgcagctgcactcctgcaggcaagttggcgggcccatctcgaaagacaaaggtacctcgaattgcgcgcagctgcaatcgtgatacagcaaaaatggcgagactactaccggcgaagacacatggcagcgatatgcatccaggccagatggaaagcataccgggaatccaaaaggtatcaggaacagcggaaaaagatcatactgctgcagtcaacatgtagagggttccgggctagacaacgcttcaaggcgctgaaggagcaacggctgagagagactaaaccagaggtaggcctggttaatattaaaggctatgggtccttagaaattcagggctctgaccctagcgggtgggaggactgctcgttcgataatcgcatcaaagccatcgaagaatgcaaatcagttattgaatcaaacaggatctcccgtgaatcttctgtcgactgcctgaaagaaagtcccaacaaacaacaggaaagagctcaatcgcaaagcggtgtcgacctgcaggaggacgtactcgtgcgagagcggcctaggagcctggaagacctccaccagaagaaggtcggacgcgccaaacgggaaagcagaaggatgagggaactcgagcaagccatcttttcactagagctcttaaaggttcgatccttaggagggatctccccgtctgaagacagacggtggagcacagagctggtgccggaaggtctgcagagccctaggggaactcccgactcagagtcaagtcaaggctcactcgagctcttgtcttatgaggaaagtcagaagtccaagctcgagtctgtgatctctgatgagggcgacctccagtttcctagcccaaaaatttcttcatcacccaagtttgatagtagggacaatgccctgtccgcaagtaacgaaactagttccgcagaacatcttaaggacggaaccatgaaggaaatggtcgtctgtagcagcgaatccataacctgcaaacctcagctgaaggactcctttatctctaatagtttaccaacgtttttttacattcctcagcaggaccctctcaagactaatagccagctcgatactagcatacagaggaacaaactgctggaaaacgaagatacggctggggaggctctcacgctggacataaatcgggaaaccaggaggtatcattgttctggtaaagatcaaatcgtaccctcactgaacaccgaaagttccaatcccgtcctcaaaaaactggaaaaattaaataccgaaaaggaagaacgacaaaaacaactgcagcagcagaatgagaaagaaatgatggagcaaatcaggcagcaaacagacattctcgagaaagagaggaaggcctttaagaccattgagaagccgcgaatcggtgagtgcttggtagctcctagctcctaccagagcaagcagagggtggaacgcccaagctcactgttatccttgaacacctccaacaagggagaacttaatgtcctgggaagcctctctcttaaggatgcggccctcgcccagaaagatagcagctccgcgcatctgccccctaaagacaggcccgtgaccgtgtttttcgagcgcaaaggctccccatgccagagttccacagttaaggagctaagtaaaactgatcgcatgggaacccaactgaatgtcgcctgtaaactgagcaataaccgaatctccaagcgcgagcacttccgcccaacccagtcatatagccataattctgacgacttaagcagagaaggcaatgctcgcccaatctttttcacaccgaaagataacatgtctatccccctggtgagtaaagaggcactcaactcaaaaaatcctcagcttcacaaggaagacgagcccgcgtggaagcctgtcaagctcgcaggacctgggcaacgggagacatctcaacgtttctcttctgtagatgaacaggcaaaactgcacaaaactatgtctcagggtgaaattacgaagcttgcagtgaggcagaaagccagcgattcagatatccgtccccagagggcaaagatgcgcttctgggccaaagggaagcagggcgagaagaaaactacacgggtcaaaccgaccacacaatcagaggtttctcctctctttgccggcacagacgttattcccgcacatcagttccccgacgaattggcggcctatcatcctaccccaccactgagtcccgagttacccggctcgtgcagaaaggaattcaaggaaaacaaagagcctagtcccaaggcgaaacggaaaagatctgttaaaataagtaatgtcgcactagactctatgcactggcagaatgactctgtccagatcatcgcctccgtatccgacttgaaatctatggatgagttcctgttgaaaaaagtcaatgacctggataacgaggattccaaaaaagatactcttgtggacgttgtgttcaaaaaagcactgaaggaattccgacaaaacatcttttccttttacagtagcgccctcgccatggacgacggcaagtctatccggtacaaggacctctatgcacttttcgaacagatccttgagaagactatgaggctcgaacagcgagattctctgggagagagtcccgttagggtctgggtgaataccttcaaggttttcctagatgagtatatgaacgagttcaagacttccgactgcaccgccactaaggtccccaagacagagcggaaaaagaggcgcaaaaaggagaccgacctggtagaagaacataacggccacattttcaaagctacacagtacagtatacccacatactgtgaatattgtagctccttgatttggatcatggaccgagcatctgtctgtaaactgtgcaagtacgcctgccacaagaagtgctgtctaaaaactaccgcgaagtgtagcaagaaatacgaccccgagctgagtagcaggcagttcggggtcgagctgagcagactgacaagcgaagaccgaacagtgcctttggtggtcgagaaactgatcaattatattgaaatgcatggcttgtatacagaaggcatctaccgcaaatccggctctaccaataaaattaaagagctcagacagggacttgacactgatgccgagtctgtgaacctagatgactacaacatacatgtcatagcgtctgtgttcaaacagtggctgcgcgatctccccaaccctttaatgactttcgagctttacgaggagttcttgcgggctatgggtttgcaagagcgaaaggagaccatccgcggagtttattccgtgatagaccagctgtcccggacacatctgaacaccttggagagattaatcttccatctggtgcggattgcactccaagaagacaccaacaggatgtctgctaatgcgctggccattgtatttgctccttgtatactgagatgtccagataccaccgacccactgcagagtgtacaggatattagcaagactactacctgcgtagaactgattgtggtggagcaaatgaacaagtacaaggcccggctgaaagatatatcctctcttgagttcgcagaaaacaaggctaaaacacggttgtcgctcatcagacgctccatggggaagggaagaatacgacgcgggaactacccgggcccttcatctccggtggtagtacggcttccgagcgtgagcgacgtcagcgaggagacgctaacgagtgaggctgcaatggaaacagatattaccgaacagcagcaagctgctatgcagcaggaggaaagagtcctcactgaacaaatcgaaaacctccagaaagaaaaggaagaactgaccttcgagatgctggtgctggaaccgcgcgcttctgatgacgagactctggagtccgaagcgtctatagggaccgctgacagctctgagaacctcaacatggagtcggaatatgctatcagtgaaaagtccgagcgcagtctggcactgtctagtttaaagacagctggtaagtctgagccctccagtaaactgaggaagcaactgaagaagcagcaggattctcttgacgtggtggacagctcggtcagctccctctgcctttcaaacactgccagttctcacggcaccaggaagcttttccagatttactccaagtctccgttctatagagcagcttcaggcaacgaggccctgggcatggaaggacccctcgggcagaccaagttccttgaggacaagccccaattcatcagtcggggaacgttcaatcctgaaaaaggaaaacaaaaactgaagaacgttaaaaacagtccgcagaagaccaaggagacgcccgaggggactgtgatgtctggcaggagaaagacagtggacccagattgcacctccaatcagcaactagccctgttcgggaacaatgaatttatggtgtag

SEQ ID NO: 168914 - DNA, 7590 bp, Artificial Sequence
  derived and/or modified sequence
atgaatatcaatgacggtggacgccgcaggtttgaagataatgaacataccctcaggatttaccctggcgccatcagcgagggaaccatttactgtcccatccccgcccgcaagaattctacagcggcagaagtaattgaatccctcatcaacaagctccatctcgacaagactaagtgctacgtactcgccgaggtaaaagagttcggcggcgaagagtggattctcaatccaactgactgccccgtgcagcgaatgatgctgtggccccgaatggccctcgaaaacaggctgtcaggagaagattacagattcctgcttagagagaagaatttggacggctctatccattacgggagccttcaaagctggcttcgggtaaccgaagagcgacgtcggatgatggagagaggctttttaccccagccacagcagaaagactttgacgatctgtgctccctgccagatttaaacgagaaaaccttgcttgaaaatttaagaaaccgtttcaaacatgaaaaaatttacacgtacgtgggttccattttgattgtcattaatccttttaaattcctccccatttataatccaaagtatgtgaaaatgtatgacaaccaccagctcggtaaattggagcctcatatttatgctgtggcagacgtcgcctatcacgctatgctgcagcgcaaaaagaatcagtgcatcgttatatccggggagagcggttcgggaaagacacaatcaaccaacttcctgatccatcacttgactgccctgtctcaaaaggggttcgcttccggagttgagcagattatccttggagcaggccctgtgttggaagcctttggtaacgccaagactgctcataataataattccagccgcttcggtaagttcatccaggtgaactatcaagagacagggaccgtgctgggcgcttatgtcgaaaaatatctccttgagaaaagccgcttagtgtatcaagaacacaacgaaaggaactaccatgtcttctattatctcttggcaggagctagcgaggatgagcgaagcgcctttcatttaaaacagcccgaggagtaccactacctcaatcaagactgctttaccgttgagggtgaagacttgaggcacgactttgagagactccagctggccatggaaatggtgggctttttacctaaaacacgacgccagatcttcagcttgctgtcggccatcctccatcttggcaatatatgctacaaaaagaagacataccgagacgattctatcgacatatgtaaccctgaggtccttcctatcgtgtcggaattactcgaagtcaaggaggagatgctgtttgaagcgctggttactcgaaagactgttactgtcggcgaaaaattgatcctgccatacaagctcgccgaagctgtaacggttagaaactcaatggccaagtccctgtattcagcgctcttcgactggattgttttcaggatcaaccatgccctgctaaactctaaggatcttgaacacaacactaaaaccctgtccataggcgtgctggacatattcggttttgaagattacgaaaacaactctttcgagcagttctgtatcaatttcgccaacgagcggctgcagcattactttaatcaacacatttttaagcttgaacaggaagaatacaggacagagggcataagttggcataacattgactacatcgacaacacctgctgtataaacctgattagtaagaaacccacagggctattgcacctgctcgatgaggagtccaattttccccaagccacaaaccagacactattggataaatttaagcatcagcacgaagataactcgtacatcgagttccccgccgtgatggaacccgcctttatcataaagcactacgctgggaaagtgaagtacggtgttaaagattttcgagagaaaaacactgatcatatgcggcctgacattgtggccctcctgcgaagcagcaaaaacgcattcatctctggcatgattggtatcgaccccgtagctgtctttcgctgggccatcctgagggcttttttcagggccatggtggcttttcgggaggctgggaagcgcaatatccatcgaaaaaccggacatgatgataccgctccctgcgctattctcaagagcatggactctttcagtttcctgcagcatcctgttcaccagagaagcctcgagatacttcagagatgcaaggaggagaaatactctattacacggaaaaatcctcgcaccccgctgagtgacctgcagggtatgaacgccctgaatgagaaaaatcaacatgacacgtttgacatagcctggaatggccgtacgggaattcggcagtcacggctttccagcggcacctcactgctggacaaggacggtatcttcgccaattcgacatctagcaaactcctggagcgggcccacggcatcctcaccaggaataagaattttaagagtaagccggcgctcccaaaacacctgcttgaagttaactcactgaagcatcttacacggctgacactgcaggaccgaatcacaaaatcgctcctccatttgcataagaaaaaaaaaccgccttccatcagcgctcagttccaggcgtccctcagtaagctgatggagactctcgggcaggccgagccttactttgtgaagtgtattagatccaatgcggaaaagctgcccctgcggttctccgatgttttggtgctgagacaactccggtatactgggatgctcgagacggtccggatcaggcaatctgggtattcctctaaatactctttccaggacttcgtgagccattttcacgtattattgccccggaatataatcccctcaaaatttaacatccaggacttctttaggaaaatcaacctgaacccagataattatcaggtggggaaaactatggtatttcttaaggagcaggagcggcagcacctgcaggacctacttcaccaggaagttcttagacgcattattctgctacagaggtggttcagggtcctcctttgccgccagcattttctccatttgcgtcaggctagcgttatcatccagcgcttctggcgtaactatctcaaccaaaaacaggtccgcgatgctgccgtacagaaagatgcttttgtgatggcatccgcggccgcactgctccaagctagctggcgagcacacctggagaggcagcggtatctggagttgcgtgccgcagcaattgtcatacagcagaagtggagagattactatcgccgacgccacatggctgccatctgtattcaagcacgatggaaggcttatagggagtcaaagcggtaccaggaacaacgtaagaagatcattctactgcagtccacctgccgggggttcagagcaagacagaggtttaaagcattgaaggagcagcggctaagagaaaccaagcccgaggttggtctggtcaacatcaagggctatggatctctcgagattcaggggtctgatccatcagggtgggaagactgctcttttgacaacagaatcaaggcaatcgaagaatgtaaatctgtcattgagtcaaataggattagcagagagagttccgtcgactgcctgaaggagtcacctaataaacagcaagagagggcgcagagtcaatcaggcgtagacttacaggaggacgttcttgtcagagagaggccccgatctttggaagacctgcaccagaaaaaagtcggacgggcaaaaagggagtcccggagaatgagagaactcgagcaagctattttcagcctcgaactgctgaaggtccgaagtcttggtggcattagcccatccgaagaccgccgatggtcgactgaactggtgcccgagggtttgcagtctccccgaggaacaccggatagtgaatctagccagggatctttagaattactgagttatgaggagtcgcagaagtcgaaactggaaagcgtgatcagtgatgagggcgacttacaattcccgtcacctaaaatcagtagctcccccaagtttgattccagggataatgcattatcagccagcaacgaaactagtagcgccgagcacctcaaagatggcacaatgaaggagatggtcgtctgttcctccgaaagcatcacatgcaaaccccagctcaaagattcttttatctccaatagcctacctacattcttctatatcccccaacaggacccccttaaaactaactcacaactcgacacttccatccagcggaataagctcctggagaacgaggataccgccggcgaagccctaactctggacattaatcgggagacgcgacgttaccattgcagcggaaaggatcagattgtgccatcactgaacacagaatccagtaacccagtcctgaagaagctcgaaaaactcaacacagagaaggaggagaggcagaaacaactccagcagcagaatgaaaaagaaatgatggaacagattcgacagcagaccgacatactggaaaaagagaggaaggccttcaaaactattgagaaaccacgcatcggagagtgtcttgtcgcaccaagcagctatcaatccaagcagagggtggaaagacctagttccctgctttccctcaatacatccaacaaaggggagctaaatgtcttgggcagcctgtccctgaaagatgccgctctggctcaaaaggattctagcagcgctcacctgcccccaaaagacagaccagtgactgtgttctttgagcgaaagggttccccttgccaatctagcaccgttaaagagttgtccaagaccgacagaatgggtacccagctaaacgtggcctgtaagctgagtaacaatcgaatctccaagcgagagcactttagaccaacccaaagctattctcataattctgatgacctgtctcgagagggtaatgcgcgtcctattttttttacaccgaaggataacatgtctattcctttagtttccaaggaggccttgaactccaagaatccccagcttcataaagaggacgagcccgcttggaagccagtgaagctagccggcccgggacagagagagacttcacaaaggttcagttcagtcgatgaacaggcgaaacttcacaaaaccatgagtcagggagaaatcacaaaactggcagttcgacaaaaggcctccgactccgacatccggcctcagagggccaagatgcgcttttgggccaaaggaaaacagggggagaagaagacgacacgtgtaaagcccacaacacaatctgaggttagcccccttttcgccggtaccgatgtcattcctgcccaccagttcccagacgagctggcagcctaccacccaacccctcctctgtctccagaactacctggtagctgtagaaaagagtttaaggaaaataaggaacctagccccaaagccaagcggaaacgaagcgttaagatcagcaatgtggcccttgatagcatgcattggcagaatgattcagtgcagattatagcatctgtctctgacctcaagagtatggacgaattcctcctcaaaaaggtgaatgatctggacaatgaggatagcaagaaagataccctagtggatgttgtgttcaagaaagcactcaaggaattccgccagaatattttctccttctattcctccgcgctcgccatggatgacgggaaaagtattagatacaaggacctgtatgccctgttcgaacagatcttggaaaaaaccatgcgtttagagcagagagattccctcggtgaatcaccagtgcgggtatgggtcaatacctttaaggtttttctggatgaatatatgaatgagtttaaaacatctgattgcaccgcaaccaaagtgccaaaaacggagaggaaaaaaagacgcaaaaaggaaaccgatctcgtagaggagcacaatggacacatctttaaggccacccaatatagcatccctacatactgtgagtactgtagtagcttgatttggattatggaccgggctagtgtgtgcaaactctgcaagtatgcctgccacaagaagtgttgcctgaagactaccgccaaatgctctaaaaagtacgaccccgaacttagtagcaggcaatttggagttgaactaagcagactgacctcagaagatcgcaccgtgcccctcgtcgtggagaaactaatcaactacatcgagatgcatgggctttacaccgaggggatttataggaagtccgggagcactaacaaaatcaaggaactgcggcaaggtctagacaccgacgccgagtcggtgaatctcgacgactacaacattcacgtcatcgcgtctgtttttaagcaatggctgagagatctccccaaccctctgatgacctttgagttgtacgaggagttcctgcgggccatgggcctccaggaaagaaaagagaccatccgtggggtctacagcgtgatcgaccaactttccagaacgcacctgaacaccctggaaaggctaattttccacttggtgaggatcgcactgcaggaagacactaataggatgtcagctaatgctttagcaatcgtgtttgccccctgtatcctcaggtgccccgatactaccgacccccttcagtccgtgcaggatatctccaaaacaaccacttgtgttgagctcattgtggtagagcagatgaacaagtataaggcccgacttaaagacatttcaagcctagagttcgcagagaataaagccaaaactcggctgtcgctcatcagaagaagcatgggaaagggacgaatccgaagaggtaactatcctggaccttccagcccagtggtggtgcggctcccgtcggtcagtgatgtttcagaagaaacccttacctcagaggctgcaatggagacggacattactgagcagcagcaggcagccatgcagcaagaagagagagtccttactgagcaaatcgagaacctccaaaaggagaaggaggagctgaccttcgaaatgctcgtcctggagcctagggccagcgatgacgagactttagaaagtgaagcttccatcggaactgctgattccagtgaaaaccttaacatggaaagcgaatatgcgatttctgaaaagtccgagagatcgttggccttaagttctctgaaaaccgccgggaagtccgaaccgtcaagtaagctgagaaagcagctcaaaaaacagcaggatagtttggatgtagtcgatagcagcgtatcatctctctgcctgagtaacaccgcctcgagtcacgggacgcggaagttatttcaaatctattctaagtcacctttttaccgagcggcttctggtaacgaagctctcggcatggaagggcctctgggtcagactaagttcttggaggacaagcctcagttcatctcacgagggacgtttaaccccgagaagggtaagcagaagctcaagaatgtgaagaattcacctcagaaaactaaagaaacaccggagggaaccgtgatgtctggtcgccgcaaaactgtggatcctgattgcacctccaaccagcagctggctttgtttggaaacaatgagttcatggtgtag

SEQ ID NO: 168915 - DNA, 7647 bp, Artificial Sequence
  derived and/or modified sequence
atgaacatcaatgatggcggcagaagaagatttgaggacaatgagcacaccctgcgcatctacccaggggccatcagcgagggcaccatctactgccccatcccagccaggaagaacagcacagctgctgaggtgattgagagcctcatcaacaagctgcacctggacaagaccaagtgctacgtgctggccgaggtgaaggagtttggaggagaggagtggatcctgaaccccacagactgccctgtgcagaggatgatgctgtggcccaggatggccctggagaaccggctgtctggagaggactaccgcttcctgctgcgggagaagaacctggatggcagcatccactacggcagcctgcagagctggctgcgggtgacagaggagaggaggaggatgatggagcggggcttcctgccccagccccagcagaaggactttgatgacctgtgcagcctgcctgacctgaatgagaagaccctgctggagaacctgaggaaccgcttcaagcatgagaagatctacacctacgtgggcagcatcctgattgtcatcaaccccttcaagttcctgcccatctacaaccccaagtatgtgaagatgtatgacaaccaccagctgggcaagctggagccccacatctatgctgtggctgatgtggcctaccacgccatgctgcagaggaagaagaaccagtgcatcgtcatcagcggggagagcggcagcggcaagacccagagcaccaacttcctgatccaccacctgacagccctgagccagaagggctttgccagcggcgtggagcagatcatcctgggcgccggccctgtgctggaggcctttggaaatgccaagacagcccacaacaacaacagcagcagatttgggaagttcatccaggtgaactaccaggagactggaacagtgctgggcgcctacgtggagaagtacctgctggagaagagccggctggtgtaccaggagcacaatgaaagaaactaccacgtgttctactacctgctggccggggcctctgaagatgagaggtctgccttccacctgaagcagcctgaggagtaccactacctgaaccagatcaccaagaagcccctgcggcagagctgggatgactactgctatgattctgagccagactgcttcaccgtggagggggaggacctgcggcatgactttgagcggctgcagctggccatggagatggtgggcttcctgcccaagacccggcggcagatcttcagcctgctgagcgccatcctgcacctgggcaacatctgctacaagaagaagacctacagagatgacagcattgacatctgcaaccctgaggtgctgcccatcgtgtctgagctgctggaggtgaaggaggagatgctgtttgaggccctggtgaccaggaagacagtgacagtgggggagaagctgatcctgccctacaagctggccgaggccgtgacagtgagaaattccatggccaagagcctgtacagcgccctgtttgactggatcgtgttccgcatcaaccacgccctgctgaacagcaaggacctggagcacaacaccaagaccctgagcattggagtgctggacatctttggatttgaggactatgagaacaacagctttgagcagttctgcatcaactttgccaatgaaaggctgcagcactacttcaaccagcacatcttcaagctggagcaggaggagtacagaacagagggcatctcctggcacaacatcgactacatcgacaacacctgctgcatcaacctgatcagcaagaagcccaccggcctgctgcacctgctggatgaggagagcaacttcccccaggccaccaaccagaccctgctggacaagttcaagcaccagcacgaggacaacagctacatcgagttccctgctgtgatggagcccgccttcatcatcaagcactacgccggcaaggtgaagtatggagtgaaggacttccgggagaagaacacagaccacatgaggccagacatcgtggccctgctgcggagcagcaagaatgccttcatcagcggcatgattggcatcgaccctgtggccgtgttccgctgggccatcctgcgggccttcttccgggccatggtggccttccgggaggccggcaagaggaacatccacaggaagacaggccatgatgacacagccccctgtgccatcctgaagtccatggacagcttctccttcctgcagcaccctgtgcaccagaggagcctggagatcctgcagcgctgcaaggaggagaagtacagcatcaccaggaagaaccccaggacccccctgagtgacctgcagggcatgaatgccctgaatgagaagaaccagcacgacacctttgacatcgcctggaatggaagaacaggcatccggcagagccggctgagcagcggcaccagcctgctggacaaggatggcatctttgccaacagcaccagcagcaagctgctggagcgggcccacggcatcctgaccaggaacaagaacttcaagagcaagccagccctgcccaagcacctgctggaggtgaacagcctgaagcacctgacccggctgaccctgcaggaccgcatcaccaagagcctgctgcacctgcacaagaagaagaagcccccatccatcagcgcccagttccaggccagcctgagcaagctgatggagaccctgggccaggccgagccctactttgtgaagtgcatccgcagcaatgctgagaagctgcccctgcgcttcagtgatgtgctggtgctgcggcagctgcgctacacaggcatgctggagaccgtgcgcatccggcagagcggctacagcagcaagtacagcttccaggactttgtgagccacttccacgtgctgctgcccaggaacatcatccccagcaagttcaacatccaggacttcttcaggaagatcaacctgaacccagacaactaccaggtgggcaagaccatggtgttcctgaaggagcaggagcggcagcacctgcaggacctgctgcaccaggaggtgctgcggcgcatcatcctgctgcagcgctggttccgggtgctgctgtgccggcagcacttcctgcacctgcggcaggccagcgtcatcatccagcgcttctggaggaactacctgaaccagaagcaggtgagagatgctgctgtgcagaaggatgcctttgtgatggccagcgctgctgccctgctgcaggcctcctggagggcccacctggagcggcagcgctacctggagctgcgggccgccgccatcgtcatccagcagaagtggagggactactacagaagaagacacatggccgccatctgcatccaggcccgctggaaggcctaccgggagagcaagcgctaccaggagcagaggaagaagatcatcctgctgcagagcacctgccggggcttccgggcccggcagcgcttcaaggccctgaaggagcagaggctgcgggagaccaagccagaggtgggcctggtgaacatcaagggctacggcagcctggagatccagggcagtgaccccagcggctgggaggactgcagctttgacaaccgcatcaaggccatcgaggagtgcaagtctgtgattgagagcaaccgcatcagccgggagagctctgtggactgcctgaaggagagccccaacaagcagcaggagcgggcccagagccagagcggcgtggacctgcaggaggatgtgctggtgcgggagcggcccaggagcctggaggacctgcaccagaagaaggtgggccgggccaagcgggagagcaggaggatgagggagctggagcaggccatcttcagcctggagctgctgaaggtgcgcagcctgggcggcatcagccccagcgaggaccggcgctggagcacagagctggtgcctgagggcctgcagagcccccggggcaccccagacagcgagagcagccagggcagcctggagctgctgtcctatgaggagagccagaagagcaagctggagagcgtcatcagtgatgaaggagacctgcagttccccagccccaagatcagcagcagccccaagtttgacagccgggacaatgccctgagcgccagcaatgagaccagcagcgctgagcacctgaaggatggcaccatgaaggagatggtggtgtgcagcagcgagagcatcacctgcaagccccagctgaaggacagcttcatcagcaacagcctgcccaccttcttctacatcccccagcaggaccccctgaagaccaacagccagctggacaccagcatccagaggaacaagctgctggagaatgaagacacagctggggaggccctgaccctggacatcaaccgggagacccggcgctaccactgcagcggcaaggaccagatcgtgcccagcctgaacacagagagcagcaaccctgtgctgaagaagctggagaagctgaacacagagaaggaggagcggcagaagcagctgcagcagcagaatgagaaggagatgatggagcagatccggcagcagacagacatcctggagaaggagaggaaggccttcaagaccatcgagaagccccgcatcggggagtgcctggtggcccccagcagctaccagagcaagcagagggtggagcggcccagcagcctgctgagcctgaacaccagcaacaagggggagctgaatgtgctgggcagcctgagcctgaaggatgctgccctggcccagaaggacagcagcagcgcccacctgccccccaaggacaggcctgtgaccgtcttctttgagaggaagggcagcccctgccagagcagcacagtgaaggagctgagcaagacagacaggatgggcacccagctgaatgtggcctgcaagctgagcaacaaccgcatcagcaagcgggagcacttccggcccacccagagctacagccacaacagtgatgacctgagccgggagggcaatgcccggcccatcttcttcacccccaaggacaacatgagcatccccctggtgtccaaggaggccctgaacagcaagaacccccagctgcacaaggaggatgagcccgcctggaagcctgtgaagctggccggccctggccagcgggagaccagccagcgcttcagctctgtggatgagcaggccaagctgcacaagaccatgagccagggcgagatcaccaagctggccgtgcggcagaaggccagtgacagcgacatccggccccagagggccaagatgaggttctgggccaagggcaagcagggcgagaagaagaccaccagggtgaagcccaccacccagagcgaggtgagccccctgtttgctggaacagatgtgatcccagcccaccagttcccagatgagctggccgcctaccaccccaccccacccctgagccctgagctgcccggcagctgcaggaaggagttcaaggagaacaaggagcccagccccaaggccaagaggaagaggtctgtgaagatcagcaatgtggccctggacagcatgcactggcagaatgacagcgtgcagatcatcgcctctgtgtctgacctgaagtccatggatgagttcctgctgaagaaggtgaatgacctggacaatgaagacagcaagaaggacaccctggtggatgtggtgttcaagaaggccctgaaggagttccggcagaacatcttctccttctacagcagcgccctggccatggatgatggcaagagcatccgctacaaggacctgtatgccctgtttgagcagatcctggagaagaccatgaggctggagcagagggacagcctgggggagagccctgtgcgggtgtgggtgaacaccttcaaggtgttcctggatgagtacatgaatgagttcaagaccagtgactgcacagccaccaaggtgcccaagacagagaggaagaagaggaggaagaaggagacagacctggtggaggagcacaacggccacatcttcaaggccacccagtacagcatccccacctactgtgagtactgcagcagcctcatctggatcatggaccgggcctctgtgtgcaagctgtgcaagtatgcctgccacaagaagtgctgcctgaagaccacagccaagtgcagcaagaagtatgaccctgagctgagcagccggcagtttggagtggagctgagccggctgaccagcgaggacagaacagtgcccctggtggtggagaagctgatcaactacatcgagatgcacggcctgtacacagagggcatctacaggaagagcggcagcaccaacaagatcaaggagctgcggcagggcctggacacagatgctgagagcgtgaacctggatgactacaacatccacgtgattgccagcgtcttcaagcagtggctgcgggacctgcccaaccccctgatgacctttgagctgtatgaggagttcctgcgggccatgggcctgcaggagaggaaggagaccatccggggcgtgtacagcgtcatcgaccagctgagcaggacccacctgaacaccctggagcggctcatcttccacctggtgagaattgccctgcaggaggacaccaacaggatgtctgccaatgccctggccatcgtgtttgccccctgcatcctgcgctgcccagacaccacagaccccctgcagagcgtgcaggacatcagcaagaccaccacctgtgtggagctgattgtggtggagcagatgaacaagtacaaggcccggctgaaggacatcagcagcctggagtttgctgagaacaaggccaagacccggctgagcctcatccgccgctccatgggcaagggccgcatcagaagaggcaactacccaggccccagcagccctgtggtggtgcggctgcccagcgtgtctgatgtgtctgaggagaccctgaccagcgaggccgccatggagacagacatcacagagcagcagcaggccgccatgcagcaggaggagcgggtgctgacagagcagatcgagaacctgcagaaggagaaggaggagctgacctttgagatgctggtgctggagccccgggccagtgatgatgagaccctggagagcgaggccagcattggaacagctgacagcagcgagaacctgaacatggagagtgaatatgccatcagcgagaagtctgagaggagcctggccctgagcagcctgaagacagctgggaagtctgagcccagcagcaagctgaggaagcagctgaagaagcagcaggacagcctggatgtggtggacagctctgtgagcagcctgtgcctgagcaacacagccagcagccacggcaccaggaagctgttccagatctacagcaagagccccttctaccgggccgccagcggaaatgaggccctgggcatggagggccccctgggccagaccaagttcctggaggacaagccccagttcatcagccggggcaccttcaaccctgagaagggcaagcagaagctgaagaatgtgaagaacagcccccagaagaccaaggagaccccagagggcaccgtgatgagcggccgcaggaagacagtggaccctgactgcaccagcaaccagcagctggccctgtttggaaataatgagttcatggtgtag

SEQ ID NO: 168916 - DNA, 7590 bp, Artificial Sequence
  derived and/or modified sequence
atgaacatcaatgatggcggcagaagaagatttgaggacaatgagcacaccctgcgcatctacccaggggccatcagcgagggcaccatctactgccccatcccagccaggaagaacagcacagctgctgaggtgattgagagcctcatcaacaagctgcacctggacaagaccaagtgctacgtgctggccgaggtgaaggagtttggaggagaggagtggatcctgaaccccacagactgccctgtgcagaggatgatgctgtggcccaggatggccctggagaaccggctgtctggagaggactaccgcttcctgctgcgggagaagaacctggatggcagcatccactacggcagcctgcagagctggctgcgggtgacagaggagaggaggaggatgatggagcggggcttcctgccccagccccagcagaaggactttgatgacctgtgcagcctgcctgacctgaatgagaagaccctgctggagaacctgaggaaccgcttcaagcatgagaagatctacacctacgtgggcagcatcctgattgtcatcaaccccttcaagttcctgcccatctacaaccccaagtatgtgaagatgtatgacaaccaccagctgggcaagctggagccccacatctatgctgtggctgatgtggcctaccacgccatgctgcagaggaagaagaaccagtgcatcgtcatcagcggggagagcggcagcggcaagacccagagcaccaacttcctgatccaccacctgacagccctgagccagaagggctttgccagcggcgtggagcagatcatcctgggcgccggccctgtgctggaggcctttggaaatgccaagacagcccacaacaacaacagcagcagatttgggaagttcatccaggtgaactaccaggagactggaacagtgctgggcgcctacgtggagaagtacctgctggagaagagccggctggtgtaccaggagcacaatgaaagaaactaccacgtgttctactacctgctggccggggcctctgaagatgagaggtctgccttccacctgaagcagcctgaggagtaccactacctgaaccaggactgcttcaccgtggagggggaggacctgcggcatgactttgagcggctgcagctggccatggagatggtgggcttcctgcccaagacccggcggcagatcttcagcctgctgagcgccatcctgcacctgggcaacatctgctacaagaagaagacctacagagatgacagcattgacatctgcaaccctgaggtgctgcccatcgtgtctgagctgctggaggtgaaggaggagatgctgtttgaggccctggtgaccaggaagacagtgacagtgggggagaagctgatcctgccctacaagctggccgaggccgtgacagtgaggaacagcatggccaagagcctgtacagcgccctgtttgactggatcgtgttccgcatcaaccacgccctgctgaacagcaaggacctggagcacaacaccaagaccctgagcattggagtgctggacatcttcggctttgaagattatgagaacaacagctttgagcagttctgcatcaactttgccaatgaaaggctgcagcactacttcaaccagcacatcttcaagctggagcaggaggagtacagaacagagggcatctcctggcacaacatcgactacatcgacaacacctgctgcatcaacctgatcagcaagaagcccaccggcctgctgcacctgctggatgaggagagcaacttcccccaggccaccaaccagaccctgctggacaagttcaagcaccagcacgaggacaacagctacatcgagttccctgctgtgatggagcccgccttcatcatcaagcactacgccggcaaggtgaagtatggagtgaaggacttccgggagaagaacacagaccacatgaggccagacatcgtggccctgctgcggagcagcaagaatgccttcatcagcggcatgattggaattgatcctgtggccgtgttccgctgggccatcctgcgggccttcttccgggccatggtggccttccgggaggccggcaagaggaacatccacaggaagacaggccatgatgacacagccccctgtgccatcctgaagtccatggacagcttctccttcctgcagcaccctgtgcaccagaggagcctggagatcctgcagcgctgcaaggaggagaagtacagcatcaccaggaagaaccccaggacccccctgagtgacctgcagggcatgaatgccctgaatgagaagaaccagcacgacacctttgatattgcctggaatggccgcacaggcatccggcagagccggctgagcagcggcaccagcctgctggacaaggatggcatctttgccaacagcaccagcagcaagctgctggagcgggcccacggcatcctgaccaggaacaagaacttcaagagcaagccagccctgcccaagcacctgctggaggtgaacagcctgaagcacctgacccggctgaccctgcaggaccgcatcaccaagagcctgctgcacctgcacaagaagaagaagccacccagcatcagcgcccagttccaggccagcctgagcaagctgatggagaccctgggccaggccgagccctactttgtgaagtgcatccgcagcaatgctgagaagctgcccctgcgcttcagtgatgtgctggtgctgcggcagctgcgctacacaggcatgctggagaccgtgcgcatccggcagagcggctacagcagcaagtacagcttccaggactttgtgagccacttccacgtgctgctgcccaggaacatcatccccagcaagttcaacatccaggacttcttcaggaagatcaacctgaacccagacaactaccaggtgggcaagaccatggtgttcctgaaggagcaggagcggcagcacctgcaggacctgctgcaccaggaggtgctgcggcgcatcatcctgctgcagcgctggttccgggtgctgctgtgccggcagcacttcctgcacctgcggcaggccagcgtcatcatccagcgcttctggaggaactacctgaaccagaagcaggtgagagatgctgctgtgcagaaggatgcctttgtgatggccagcgctgctgccctgctgcaggcctcctggagggcccacctggagcggcagcgctacctggagctgcgggctgctgccatcgtcatccagcagaagtggagggactactacagaagaagacacatggccgccatctgcatccaggcccgctggaaggcctaccgggagagcaagcgctaccaggagcagaggaagaagatcatcctgctgcagagcacctgccggggcttccgggcccggcagcgcttcaaggccctgaaggagcagaggctgcgggagaccaagccagaggtgggcctggtgaacatcaagggctacggcagcctggagatccagggcagtgaccccagcggctgggaggactgcagctttgacaaccgcatcaaggccatcgaggagtgcaagagcgtcatcgagagcaaccgcatcagccgggagagctctgtggactgcctgaaggagagccccaacaagcagcaggagcgggcccagagccagagcggcgtggacctgcaggaggatgtgctggtgcgggagcggcccaggagcctggaggacctgcaccagaagaaggtgggccgggccaagcgggagagcaggaggatgagggagctggagcaggccatcttcagcctggagctgctgaaggtgcgcagcctgggcggcatcagccccagtgaagatcggcgctggagcacagagctggtgcctgagggcctgcagagcccccggggcaccccagattctgagagcagccagggcagcctggagctgctgtcctatgaggagagccagaagagcaagctggagagcgtcatcagtgatgaaggagacctgcagttccccagccccaagatcagcagcagccccaagtttgacagccgggacaatgccctgagcgccagcaatgagaccagcagcgctgagcacctgaaggatggcaccatgaaggagatggtggtgtgcagcagcgagagcatcacctgcaagccccagctgaaggacagcttcatcagcaacagcctgcccaccttcttctacatcccccagcaggaccccctgaagaccaacagccagctggacaccagcatccagaggaacaagctgctggagaatgaagacacagctggggaggccctgaccctggacatcaaccgggagacccggcgctaccactgcagcggcaaggaccagatcgtgcccagcctgaacacagagagcagcaaccctgtgctgaagaagctggagaagctgaacacagagaaggaggagcggcagaagcagctgcagcagcagaatgagaaggagatgatggagcagatccggcagcagacagacatcctggagaaggagaggaaggccttcaagaccatcgagaagcccagaattggagaatgtctggtggcccccagcagctaccagagcaagcagagggtggagcggcccagcagcctgctgagcctgaacaccagcaacaagggggagctgaatgtgctgggcagcctgagcctgaaggatgctgccctggcccagaaggacagcagcagcgcccacctgccccccaaggacaggcctgtgacagtgttctttgagaggaagggcagcccctgccagagcagcacagtgaaggagctgagcaagacagacaggatgggcacccagctgaatgtggcctgcaagctgagcaacaaccgcatcagcaagcgggagcacttccggcccacccagagctacagccacaacagtgatgacctgagccgggagggcaatgcccggcccatcttcttcacccccaaggacaacatgagcatccccctggtgtccaaggaggccctgaacagcaagaacccccagctgcacaaggaggatgagcccgcctggaagcctgtgaagctggccggccctggccagcgggagaccagccagcgcttcagctctgtggatgagcaggccaagctgcacaagaccatgagccagggcgagatcaccaagctggccgtgcggcagaaggccagtgacagcgacatccggccccagagggccaagatgaggttctgggccaagggcaagcagggcgagaagaagaccaccagggtgaagcccaccacccagagcgaggtgagccccctgtttgctggaacagatgtgatcccagcccaccagttcccagatgagctggccgcctaccaccccaccccacccctgagccctgagctgcccggcagctgcaggaaggagttcaaggagaacaaggagcccagccccaaggccaagaggaagaggtctgtgaagatcagcaatgtggccctggacagcatgcactggcagaatgattctgtgcagatcatcgcctctgtgtctgacctgaagtccatggatgagttcctgctgaagaaggtgaatgacctggacaatgaagacagcaagaaggacaccctggtggatgtggtgttcaagaaggccctgaaggagttccggcagaacatcttctccttctacagcagcgccctggccatggatgatggcaagagcatccgctacaaggacctgtatgccctgtttgagcagatcctggagaagaccatgaggctggagcagagggacagcctgggggagagccctgtgcgggtgtgggtgaacaccttcaaggtgttcctggatgagtacatgaatgagttcaagaccagtgactgcacagccaccaaggtgcccaagacagagaggaagaagaggaggaagaaggagacagacctggtggaggagcacaacggccacatcttcaaggccacccagtacagcatccccacctactgtgagtactgcagcagcctcatctggatcatggaccgggcctctgtgtgcaagctgtgcaagtatgcctgccacaagaagtgctgcctgaagaccacagccaagtgcagcaagaagtatgaccctgagctgagcagccggcagtttggagtggagctgagccggctgaccagcgaggacagaacagtgcccctggtggtggagaagctgatcaactacatcgagatgcacggcctgtacacagagggcatctacaggaagagcggcagcaccaacaagatcaaggagctgcggcagggcctggacacagatgctgagagcgtgaacctggatgactacaacatccacgtgattgcctctgtgttcaagcagtggctgcgggacctgcccaaccccctgatgacctttgagctgtatgaggagttcctgcgggccatgggcctgcaggagaggaaggagaccatccggggcgtgtacagcgtgattgaccagctgagcaggacccacctgaacaccctggagcggctcatcttccacctggtgcgcatcgccctgcaggaggacaccaacaggatgtctgccaatgccctggccatcgtgtttgccccctgcatcctgcgctgcccagacaccacagaccccctgcagagcgtgcaggacatcagcaagaccaccacctgtgtggagctgattgtggtggagcagatgaacaagtacaaggcccggctgaaggacatcagcagcctggagtttgctgagaacaaggccaagacccggctgagcctcatcagaagatccatgggcaagggccgcatccggcggggcaactacccaggccccagcagccctgtggtggtgcggctgcccagcgtgtctgatgtgtctgaggagaccctgaccagcgaggccgccatggagacagacatcacagagcagcagcaggccgccatgcagcaggaggagcgggtgctgacagagcagatcgagaacctgcagaaggagaaggaggagctgacctttgagatgctggtgctggagccccgggccagtgatgatgagaccctggagagcgaggccagcatcggcacagctgacagcagcgagaacctgaacatggagagtgaatatgccatcagcgagaagtctgagaggagcctggccctgagcagcctgaagacagctgggaagtctgagcccagcagcaagctgaggaagcagctgaagaagcagcaggacagcctggatgtggtggacagctctgtgagcagcctgtgcctgagcaacacagccagcagccacggcaccaggaagctgttccagatctacagcaagagccccttctacagagctgccagcggaaatgaggccctgggcatggagggccccctgggccagaccaagttcctggaggacaagccccagttcatcagccggggcaccttcaaccctgagaagggcaagcagaagctgaagaatgtgaagaacagcccccagaagaccaaggagaccccagagggcaccgtgatgtctggaagaaggaagacagtggaccctgactgcaccagcaaccagcagctggccctgtttggaaataatgagttcatggtgtag

SEQ ID NO: 168917 - DNA, 12409 bp, Artificial Sequence
  derived and/or modified sequence
gcgcgaccgaagcggataagggacgcggcggcggttggctgtgtctgttgagagagtacaggacagcccggactgcgagaggcggcggcggaggcagtagttgcaccggcagaggcggccgctggcagcggttgaggcggcggtccaacgcgtgctctctgggcggggtgcggcgggggatgtgcctgctcaggccgggcggagtctctctgacagggcgggggatgcgccgcggccgctcgcccggaccctgaggctgctgggcccaccctcccggaaccgtccgaccctcggtggcctcggcctcttctgccatctccggtcctaccctggggcggagggtggaaggcagcttccgtcgaagaggagggggctgcggtggccaccgcggcggagcccgagttattttaccaagaaaatggtttgcacgactttgaacatatactatccatgctgatgggacaggatccaatatgaatataaatgatggaggaagacgacgctttgaagataatgaacatacattacggatatatcctggggctatttcagaagggacaatctactgtccgattcctgccagaaaaaactccacagctgctgaggtgattgagtctcttataaacaaacttcatcttgacaaaacaaaatgttatgttctagcagaggtaaaggaatttggtggagaagaatggattctcaatccaacagattgtccagttcagcgaatgatgctgtggccccgaatggctctggaaaatcgcttaagtggagaggactaccgcttccttctgagagagaaaaaccttgatggatcaatccattatggtagcctgcagtcatggctacgggtaacagaagaacgtcgcaggatgatggaacggggttttcttccacagcctcaacagaaagactttgatgatttatgtagtttacctgatttgaatgagaaaactctcttagaaaacctacgaaatcgctttaagcatgaaaaaatttatacctatgttggcagtattctaatagttattaacccattcaagtttcttcctatttataaccccaaatatgtcaaaatgtatgataaccaccaactgggaaaacttgagccccacatttatgctgtggctgatgtagcttatcatgccatgcttcagcgcaaaaagaatcagtgcatcgtgatttcaggagagagtggttctgggaagactcaaagcacaaactttcttattcaccaccttactgctctcagtcagaaaggatttgccagtggagtagaacagattattcttggagctggaccagtacttgaggcctttggaaatgcaaagacagctcataataacaattcaagtcgttttgggaagtttattcaagtaaattaccaggaaacaggcactgtacttggtgcctatgttgaaaaatatctactggagaagtccagactcgtttatcaggagcataatgaacggaactatcatgtattctattacctcctggcaggagcaagtgaagatgagagatcagcattccatcttaagcaaccagaggaatatcattatctcaatcagataacaaagaaacccctcagacagagctgggatgattattgctatgactctgagccggattgcttcacggtggaaggagaagatttgagacatgactttgagcgcctacaacttgccatggaaatggtaggatttcttcccaagacacgaagacagattttctctcttctctcagccatactacatttgggtaatatctgttacaaaaagaagacataccgggatgactccattgatatctgtaatcctgaagttctgcctattgtctcagaattattagaggttaaagaagagatgctatttgaagcattagttacaaggaagacggtgacagtgggagaaaagcttattttgccatacaagttggcagaggctgtgacagtgaggaactccatggctaagtctctgtatagtgccctgtttgactggatagtttttcgaattaatcatgcacttctgaatagtaaagatttagagcataataccaagacattgtctattggtgttcttgatatttttgggtttgaagattatgaaaataacagctttgaacagttctgtattaattttgctaatgaacgtttacagcactactttaatcagcatatctttaaattggaacaagaggaatatagaactgaaggtatcagctggcacaacatagattacattgataatacctgctgcataaatcttattagcaaaaaaccaacaggactgcttcatcttttggatgaagaaagcaactttccacaggctacaaatcaaacattgctagacaagtttaagcatcaacatgaagataattcttacatcgaatttccagccgtgatggagcctgctttcattataaaacattatgctggaaaagtaaaatatggggtaaaggatttccgggaaaaaaatacagatcatatgcgcccagacattgtagctcttctgagaagcagcaagaatgcatttatctctgggatgattggaattgatcctgtagctgttttccgatgggcaattctccgagcttttttcagagccatggttgctttcagggaagctgggaaaagaaacattcacagaaaaactggacatgatgatacagcgccatgtgcaattttgaaaagtatggatagttttagctttctccaacacccagtccaccagaggagcttagagattctgcagagatgcaaggaagagaagtacagtataacccggaaaaatcccagaacacctctttctgatctccagggcatgaatgctctaaatgaaaaaaaccaacatgatacatttgatattgcctggaatggcagaactgggattcgccagagcagactatcaagtggcacctccttgcttgataaagatggaatatttgctaattcaactagcagcaaactcctggagagagcccatggaattctcacgagaaacaaaaatttcaaatccaagcctgcccttccaaagcacttgctagaagtaaattctttaaagcacctgacaagactgacactacaagatcgcattaccaagtctcttcttcatttacacaagaagaaaaaacctcccagcatcagtgcccagtttcaggcatcattaagcaagctaatggaaacacttggtcaagcagaaccatattttgtaaaatgcattcgctctaatgctgaaaagctgcccttaaggttcagtgatgtcttggtacttagacagcttcgatacaccgggatgctggaaacagttcgaattcgccaatcaggatacagctccaaatattctttccaggattttgtgagccacttccatgtacttcttccccgaaatattattccatccaaatttaacattcaggatttcttcaggaaaataaatcttaatccagataattatcaagttggaaaaaccatggtctttctaaaggagcaggaacgacagcacttacaagatctgcttcaccaagaggtgctccgcagaatcatattgttgcagcgatggttcagggtcttgctgtgtaggcagcatttcctccatctgagacaagcatctgttattatccagagattctggaggaattacctaaatcagaagcaagtcagagatgcagctgtgcagaaggatgcttttgttatggctagtgcagctgctcttctccaagcttcctggcgtgctcacttagagaggcagcggtacttggagttacgggctgcagccatcgttatccagcagaaatggagagattactataggcgcaggcacatggctgctatttgcatacaagcaagatggaaagcctacagggaaagtaaaaggtaccaagaacaaaggaaaaaaattatccttttgcaatcaacatgtagaggattcagagcaagacaaagatttaaagctttaaaagaacaaaggctaagagaaacaaagccagaagttggattggtgaatattaagggatatggatctctggaaattcagggttcagacccttcaggatgggaggattgttcttttgacaacagaataaaagccatagaggaatgtaaatctgtaatagagagtaatcgaattagccgtgaaagttcagtggactgcttgaaggagtcaccaaacaagcagcaggagagagcccaaagccagagtggtgtggacttgcaggaagatgtgcttgtaagagagagacccagatccttggaggatctccatcagaaaaaagtaggccgggctaagagagaaagtaggagaatgagagaactagagcaagctatatttagcttagaattgctgaaagttcgttctcttggtggtatttctccttcagaggatcgcagatggtctacagaattggtgcctgaaggccttcagtctccacggggtacacctgatagtgagagctctcaaggaagcttggaacttctgagctatgaggaaagccaaaagagcaaactagagtctgtcatttcagatgaaggagacttgcagtttccatcacctaagatatccagcagtccaaaatttgattcacgggacaatgccctcagtgcctcaaatgagactagcagtgcagagcatttgaaggatggaactatgaaggaaatggtggtctgcagttctgagtctattacctgtaaaccacagctgaaagactccttcatttcaaatagtctacctacttttttttatatcccccaacaagacccactgaaaacaaattcccaactagacacaagtatccaaagaaacaaactattggaaaatgaagacacagcgggggaagctcttactttggatatcaacagggaaactagaaggtatcactgctcaggaaaagatcagattgttccttctttgaatacagagtcttctaatcctgtgcttaagaagttagaaaagctaaacactgagaaggaagaaaggcaaaaacagttgcagcaacagaatgaaaaagagatgatggaacagattcgccagcaaacagatattttagagaaggagcgcaaagccttcaagacaattgaaaagccaagaattggagagtgtttggtggcaccatcttcctatcagtcaaagcaaagagtagagaggccatcctctctcctcagcttaaatacctcaaataagggagaacttaatgtactggggtccctatcattaaaagatgcagctcttgcccaaaaagacagttcctctgctcacttacccccaaaggaccgacctgtcaccgtgttctttgaaagaaaaggaagtccatgccaatctagtactgtcaaggaattatccaagacagacagaatgggcacccagctgaatgtagcctgtaaactctcaaataatcgcatttcaaaaagagaacactttaggccaactcagtcttacagccacaattctgatgacctttccagagagggaaatgctaggcccattttcttcactccaaaggacaatatgagtattccccttgtcagcaaagaagccttaaacagtaaaaatcctcaactccataaagaagatgaaccagcatggaaacctgtgaagttagctgggccaggccaaagagagacatcacagcgattttcgtcagttgatgaacaagcaaaacttcataagactatgtctcaaggagagattaccaagttggcagtgagacagaaggcttcagattcagatataagacctcagagagctaagatgagattctgggccaaagggaaacaaggggagaagaagactaccagagtgaaacctactacccagtcagaggtttcgccactctttgcaggcacagatgtgattccagctcatcagtttccagatgaattagctgcatatcacccaacacctcctttgagcccagaactgcccggcagttgccggaaggaattcaaagagaacaaagaaccttctccaaaggctaagcgcaagcgaagtgtgaagattagcaacgtggctttggattctatgcattggcaaaatgactctgtccagatcatagcaagtgtcagtgatttaaaaagcatggatgaatttcttctgaaaaaggtgaatgacctagataatgaagacagcaagaaggatacactagtggatgttgtatttaaaaaagccctgaaggaatttcggcagaatatcttcagcttttattcatctgcattggcgatggatgatgggaaaagcatacggtataaagacctctatgcactatttgaacagattctggaaaagacgatgaggcttgagcagcgtgattcactgggtgaatctccagtgagagtttgggtcaacacttttaaagtgtttttagatgaatatatgaatgaattcaagacttcagattgcacagccacaaaggtgccaaaaacagaaagaaagaaaagaaggaaaaaggaaactgatttggtggaagaacacaatggtcacatctttaaagccacccaatatagcatccctacatactgtgaatactgttcttctttgatatggataatggaccgagcctctgtttgcaaattatgcaagtatgcttgccataagaagtgctgtctgaaaaccacagccaagtgctctaaaaagtatgatccagagctgtcatctcgacaatttggggttgaactgtcccgtttgaccagtgaagaccgaactgttcctttagtagtggaaaagctcataaactacattgaaatgcatggactgtatacagaaggtatttatcgaaagtctggttcgactaataaaatcaaggagcttcggcagggtctagatacagatgctgagagtgtaaatctagatgactataacatacacgtcattgcaagtgtattcaaacaatggcttcgagatttgcccaatcctctcatgacctttgaactctatgaggaatttcttcgagctatgggccttcaggagaggaaggagacaatccgtggtgtatactctgtgattgatcaactctcccgaactcatctcaatacactggaacgcctcatctttcatctagtcaggattgctctgcaggaagacactaatcgaatgtctgctaatgctttggccattgtgtttgcgccctgcattctccgctgccctgacaccactgacccactacaaagtgtacaggacatcagtaagactaccacttgtgtggaactgattgttgtggaacaaatgaataaatacaaggctcgtctcaaagatatcagtagcttggaatttgctgagaataaggcaaagaccaggttgtcactgattcgtagatcaatgggaaaggggcgtattcgtcgaggaaactatccaggtccatcgtctcctgttgtagttcggttgccttctgtgtctgatgtctcagaggagaccttgactagtgaggcagccatggagactgacatcacagaacagcagcaagcagctatgcagcaggaggagagagtactgactgagcagattgagaacctacagaaggagaaggaggagctaacatttgagatgcttgtactggaaccccgtgcctctgatgatgaaacccttgagtctgaggcctccattgggactgctgatagctcagagaatttgaatatggagtctgaatatgctatctctgagaaatcagaaagaagcttagcccttagctccctgaagacagctggcaagtctgaaccttccagcaagttgcgaaagcaacttaaaaagcagcaagactctttagatgtcgtggactcttcggtctcctctttatgtctgtctaacacggcatcatctcatgggaccagaaaactatttcagatttattccaaatctccattctaccgagctgcctcaggtaatgaggccctgggaatggaaggaccattgggccagaccaaattcctggaagacaagcctcagttcatcagcagaggaaccttcaacccggaaaagggcaaacaaaaattaaagaatgtgaaaaactcacctcagaaaaccaaagagaccccagaggggacagtcatgtctggccgcagaaaaactgtggacccagactgcacctccaaccaacagctagcactctttggaaataatgaatttatggtctgaaccggcagatgtgtgtccctccgtggctacagagtggtaaacaaatctcacctttggggctgcgtttcatcacctcgtccacaatagtcaatcctaattgtggtcctgcctcttttctaagcatatggctaagactgtatgtgctgaattcctgggcctcctgcagaagcagaaagcctgctggggatggtgccagctgtgccttggctgttgtatttgaattgagatttttactatacaaagccacctagggcctggggatttgggtcagttgtagttgcctctcccccaccctcttttcccttcccaaaggtgggtgttgaactaggggggatattgctgtcctgagggaccctctcatttctgacatttgaagaaaacgtataaatctttcttaaccgtgaaagcaaaagcctttgggtttattttgggatagttaggagctagggtagaatataatttttttccaaaaacttacttacaaacaaaaagcctaatccctctattttaagatttctgaaaaaacactccatgttatattctggggaaagcaaaaacaaaaaaaaaaaacaaaaaaaaaaaaacaaaaaaaaaccgtgattgtttccattaagccatcagagcgtgtctcagatatcttgttatacagtgaagaagagaatacctattttttttgatgatgtttgatgtcatagtaatcagtgctggtttaactcctgtttagttcctgccaaatacattgcatgggctgaagtgtcagtagccatactgttctcatgtttcttggtcctaggatcagattcttctacattattttttagtttcccagagacatggtgatccctaaacttatgaaggtttcatcctaagccattcaggcttttctctttgtatagattaaaccgaaaaccgcatatgagcctgttcatctgctggtggattcccaccacagactcagactcaaacaaacaaacaaataatgtgaccgtttagttagtttccaaaaacattcacatacaatattgcatgaataagtaagtaagtgttacagaaagctgccaaaaaataaaaaggtttttaatatgacctatctaactaactaacttttatcttccttttctcagactatcagtattaaatagatggaaaaaaatcaaggactacttgaagctatttttgttaatattctggttactgaagtttattgtaaatatgtatgtatagtaggcatatttctttttaaccttgtgcttccctccttcccatggaatttcttcccacagatgaggggccactggacagggggatgagagccattcgtccctgggttgagggaattagtaagacatcattttcaccactgggtggtcttcatacacatgagttataatagcattttaagtatcttagcatttgtgggattagaaatctgtttttgctatttataatatataaaaaatgaaacatgatagcctttcttgagataagtatgtgaaatgtttatttttaaagttactaaatgcatcttgtcttgctactacatgcactgctctgaaaaagagcctttaccatctataacctgtattttgggtattcttccttttcatacttctttgaagttgtggaaatattaagtcttttgttaaggcagagtctctctctcctgttacacaacactgaacctcacgccactgcctcagtggttattggccagccccagaggttagacttggagcataattctgagtggcagctaaaggtagcaggagtcttacctctccctactttgggttcagaattgagccagagaaaggaagccattaaaatctccagaataatgatagttaatgagcaaatgttatgctttatatcccacagacatctgccaccttgttcatcttgtcctgaggagtaataaataatgttaagcttttaaaaatctgaatttcagagaatctcctagaggatagaggaaaacccctcagcatggtgtgttagagtgggattgctggttcctcagccccgtgccaggttgcacagtctgtgtttcagtgttcttgggagagtagtgtactgctgggcattaattgttactctgcacttgctccagaatgttggttaaatcctgtatgaaaaaaagagattgcccttatggaataatttcctgtggcccagaggaatggccagaagaacatatgttggcacatgttcttccttctaaatctttgtggggcttttttggcaaaataagttttttggcagttaaaaaacgactgatgtaggtcactttaaaggaactaggtgatggatgttaagagactttataatttttctcagggacctgaaactccagtttggataaaattcaattaaaaaaacttgttttttcagttgctagatttgtggatttctagtaatttaatctgccaggattggggtgggtgggtgaggaggagagagccacaaaatgataagagtggagagcagtgtggggccctccctttgagggaaagccgttgtttacatagggtagtaggccttgttggcctgatcaagagatgaagccataactcttaaaaaccttcagaaccaaacgctgtgtctgcatccatctgttctcactggccctctgcatggtaaagttatgtcaccacaaagtgatgccgcattacaatcacttatgaaactgttagcccttaatatgcatcacatttgtggttccatagtgcttctcctttgcttgtttgatctctgcatggcagcagtggggcagctccacatttggagcccatactccaaaatgcagagcactcttctcacagcacacattcccagccccaaacaaaacctgaattttcaactctgcccattaaagtgaatgtatccctgtaatttagtatgtacttattatggaaaatgtaacaaaagcagagaagtgtgatttcattctgtatcacaaattgaagcaaatcaacagcaaatacagcaggattcagggaggcttagtttacaacgtactttgtacctcctgccatttaaattattttgccactctgggcttctgaaaacacaaagggagatacagccctccaactatgagccttgcagagagagacaaaagggccagaggtcctgggatggaatactagagcccccaccttctcatgctttggaaacctgccagagcacttaccctgctggaagattaatgaagactccattctgtgtttcataacagtagcgttgttttctccatcaaaaacagagggtcacagaaatgtgctgaaaagatgtggtccagcaaggttctgtagtcccacctcagtgcctgtgggctgtgtttttcactgtaacaagcactttggtaaactagaaagaagaaaggattctcaggatgtgttcaaagctaagagagttttcattttaaaaagaaacatacatactcactccatggctttcctcatcctcctctcttttttcttcttggtgggaagctggatgcggggcatgcatcattctgtatggacaaatgtgttatgtccacccatactcttgtgacaactccccagcactgtcctgcaataccatgctggccttggtagtaaaactccttggtatctgtgagagtcctctttttctatgccctagactacttttaaccacttttctctggaatgactcccacatttgattgggtattgaaagggtaacagcaaaatgatgattgtggagatggatctattaggtctcatgttggtcccctggttgaaactattttcaaaaaagccccaacaatgggcctgtcaccttgctagtcatccattcttaatgcctatttatcagccctctgaggtcatataaaagttgcaccttttgaaccaagtatttgtatttactatgggaaaggtgtggactacagattcgtattatattattttaatggattttaagtaatttataagtatgctgagtgtaaattttttttaaaaactgtattataaaaggacatatcctgtgaaatataacattttactgtttaatagaataattctataagaagaatgatttatctcacccacggaactgattacattccggatgcaatcaataggcactttgtaatttcctttttgtttttttttctttgctggggggttgaggggtaacaagataccatctgtataaagtgcagtttgtgtcactcaaaatatgcactgtatggctacacaaaagcagcttgatgaacaaatcaccccatggctcattaaagaacaaagcttccagaagca

SEQ ID NO: 168918 - DNA, 8615 bp, Artificial Sequence
  derived and/or modified sequence
gcgcgaccgaagcggataagggacgcggcggcggttggctgtgtctgttgagagagtacaggacagcccggactgcgagaggcggcggcggaggcagtagttgcaccggcagaggcggccgctggcagcggttgaggcggcggtccaacgcgtgctctctgggcggggtgcggcgggggatgtgcctgctcaggccgggcggagtctctctgacagggcgggggatgcgccgcggccgctcgcccggaccctgaggctgctgggcccaccctcccggaaccgtccgaccctcggtggcctcggcctcttctgccatctccggtcctaccctggggcggagggtggaaggcagcttccgtcgaagaggagggggctgcggtggccaccgcggcggagcccgagttattttaccaagaaaatggtttgcacgactttgaacatatactatccatgctgatgggacaggatccaatatgaatataaatgatggaggaagacgacgctttgaagataatgaacatacattacggatatatcctggggctatttcagaagggacaatctactgtccgattcctgccagaaaaaactccacagctgctgaggtgattgagtctcttataaacaaacttcatcttgacaaaacaaaatgttatgttctagcagaggtaaaggaatttggtggagaagaatggattctcaatccaacagattgtccagttcagcgaatgatgctgtggccccgaatggctctggaaaatcgcttaagtggagaggactaccgcttccttctgagagagaaaaaccttgatggatcaatccattatggtagcctgcagtcatggctacgggtaacagaagaacgtcgcaggatgatggaacggggttttcttccacagcctcaacagaaagactttgatgatttatgtagtttacctgatttgaatgagaaaactctcttagaaaacctacgaaatcgctttaagcatgaaaaaatttatacctatgttggcagtattctaatagttattaacccattcaagtttcttcctatttataaccccaaatatgtcaaaatgtatgataaccaccaactgggaaaacttgagccccacatttatgctgtggctgatgtagcttatcatgccatgcttcagcgcaaaaagaatcagtgcatcgtgatttcaggagagagtggttctgggaagactcaaagcacaaactttcttattcaccaccttactgctctcagtcagaaaggatttgccagtggagtagaacagattattcttggagctggaccagtacttgaggcctttggaaatgcaaagacagctcataataacaattcaagtcgttttgggaagtttattcaagtaaattaccaggaaacaggcactgtacttggtgcctatgttgaaaaatatctactggagaagtccagactcgtttatcaggagcataatgaacggaactatcatgtattctattacctcctggcaggagcaagtgaagatgagagatcagcattccatcttaagcaaccagaggaatatcattatctcaatcaggattgcttcacggtggaaggagaagatttgagacatgactttgagcgcctacaacttgccatggaaatggtaggatttcttcccaagacacgaagacagattttctctcttctctcagccatactacatttgggtaatatctgttacaaaaagaagacataccgggatgactccattgatatctgtaatcctgaagttctgcctattgtctcagaattattagaggttaaagaagagatgctatttgaagcattagttacaaggaagacggtgacagtgggagaaaagcttattttgccatacaagttggcagaggctgtgacagtgaggaactccatggctaagtctctgtatagtgccctgtttgactggatagtttttcgaattaatcatgcacttctgaatagtaaagatttagagcataataccaagacattgtctattggtgttcttgatatttttgggtttgaagattatgaaaataacagctttgaacagttctgtattaattttgctaatgaacgtttacagcactactttaatcagcatatctttaaattggaacaagaggaatatagaactgaaggtatcagctggcacaacatagattacattgataatacctgctgcataaatcttattagcaaaaaaccaacaggactgcttcatcttttggatgaagaaagcaactttccacaggctacaaatcaaacattgctagacaagtttaagcatcaacatgaagataattcttacatcgaatttccagccgtgatggagcctgctttcattataaaacattatgctggaaaagtaaaatatggggtaaaggatttccgggaaaaaaatacagatcatatgcgcccagacattgtagctcttctgagaagcagcaagaatgcatttatctctgggatgattggaattgatcctgtagctgttttccgatgggcaattctccgagcttttttcagagccatggttgctttcagggaagctgggaaaagaaacattcacagaaaaactggacatgatgatacagcgccatgtgcaattttgaaaagtatggatagttttagctttctccaacacccagtccaccagaggagcttagagattctgcagagatgcaaggaagagaagtacagtataacccggaaaaatcccagaacacctctttctgatctccagggcatgaatgctctaaatgaaaaaaaccaacatgatacatttgatattgcctggaatggcagaactgggattcgccagagcagactatcaagtggcacctccttgcttgataaagatggaatatttgctaattcaactagcagcaaactcctggagagagcccatggaattctcacgagaaacaaaaatttcaaatccaagcctgcccttccaaagcacttgctagaagtaaattctttaaagcacctgacaagactgacactacaagatcgcattaccaagtctcttcttcatttacacaagaagaaaaaacctcccagcatcagtgcccagtttcaggcatcattaagcaagctaatggaaacacttggtcaagcagaaccatattttgtaaaatgcattcgctctaatgctgaaaagctgcccttaaggttcagtgatgtcttggtacttagacagcttcgatacaccgggatgctggaaacagttcgaattcgccaatcaggatacagctccaaatattctttccaggattttgtgagccacttccatgtacttcttccccgaaatattattccatccaaatttaacattcaggatttcttcaggaaaataaatcttaatccagataattatcaagttggaaaaaccatggtctttctaaaggagcaggaacgacagcacttacaagatctgcttcaccaagaggtgctccgcagaatcatattgttgcagcgatggttcagggtcttgctgtgtaggcagcatttcctccatctgagacaagcatctgttattatccagagattctggaggaattacctaaatcagaagcaagtcagagatgcagctgtgcagaaggatgcttttgttatggctagtgcagctgctcttctccaagcttcctggcgtgctcacttagagaggcagcggtacttggagttacgggctgcagccatcgttatccagcagaaatggagagattactataggcgcaggcacatggctgctatttgcatacaagcaagatggaaagcctacagggaaagtaaaaggtaccaagaacaaaggaaaaaaattatccttttgcaatcaacatgtagaggattcagagcaagacaaagatttaaagctttaaaagaacaaaggctaagagaaacaaagccagaagttggattggtgaatattaagggatatggatctctggaaattcagggttcagacccttcaggatgggaggattgttcttttgacaacagaataaaagccatagaggaatgtaaatctgtaatagagagtaatcgaattagccgtgaaagttcagtggactgcttgaaggagtcaccaaacaagcagcaggagagagcccaaagccagagtggtgtggacttgcaggaagatgtgcttgtaagagagagacccagatccttggaggatctccatcagaaaaaagtaggccgggctaagagagaaagtaggagaatgagagaactagagcaagctatatttagcttagaattgctgaaagttcgttctcttggtggtatttctccttcagaggatcgcagatggtctacagaattggtgcctgaaggccttcagtctccacggggtacacctgatagtgagagctctcaaggaagcttggaacttctgagctatgaggaaagccaaaagagcaaactagagtctgtcatttcagatgaaggagacttgcagtttccatcacctaagatatccagcagtccaaaatttgattcacgggacaatgccctcagtgcctcaaatgagactagcagtgcagagcatttgaaggatggaactatgaaggaaatggtggtctgcagttctgagtctattacctgtaaaccacagctgaaagactccttcatttcaaatagtctacctacttttttttatatcccccaacaagacccactgaaaacaaattcccaactagacacaagtatccaaagaaacaaactattggaaaatgaagacacagcgggggaagctcttactttggatatcaacagggaaactagaaggtatcactgctcaggaaaagatcagattgttccttctttgaatacagagtcttctaatcctgtgcttaagaagttagaaaagctaaacactgagaaggaagaaaggcaaaaacagttgcagcaacagaatgaaaaagagatgatggaacagattcgccagcaaacagatattttagagaaggagcgcaaagccttcaagacaattgaaaagccaagaattggagagtgtttggtggcaccatcttcctatcagtcaaagcaaagagtagagaggccatcctctctcctcagcttaaatacctcaaataagggagaacttaatgtactggggtccctatcattaaaagatgcagctcttgcccaaaaagacagttcctctgctcacttacccccaaaggaccgacctgtcaccgtgttctttgaaagaaaaggaagtccatgccaatctagtactgtcaaggaattatccaagacagacagaatgggcacccagctgaatgtagcctgtaaactctcaaataatcgcatttcaaaaagagaacactttaggccaactcagtcttacagccacaattctgatgacctttccagagagggaaatgctaggcccattttcttcactccaaaggacaatatgagtattccccttgtcagcaaagaagccttaaacagtaaaaatcctcaactccataaagaagatgaaccagcatggaaacctgtgaagttagctgggccaggccaaagagagacatcacagcgattttcgtcagttgatgaacaagcaaaacttcataagactatgtctcaaggagagattaccaagttggcagtgagacagaaggcttcagattcagatataagacctcagagagctaagatgagattctgggccaaagggaaacaaggggagaagaagactaccagagtgaaacctactacccagtcagaggtttcgccactctttgcaggcacagatgtgattccagctcatcagtttccagatgaattagctgcatatcacccaacacctcctttgagcccagaactgcccggcagttgccggaaggaattcaaagagaacaaagaaccttctccaaaggctaagcgcaagcgaagtgtgaagattagcaacgtggctttggattctatgcattggcaaaatgactctgtccagatcatagcaagtgtcagtgatttaaaaagcatggatgaatttcttctgaaaaaggtgaatgacctagataatgaagacagcaagaaggatacactagtggatgttgtatttaaaaaagccctgaaggaatttcggcagaatatcttcagcttttattcatctgcattggcgatggatgatgggaaaagcatacggtataaagacctctatgcactatttgaacagattctggaaaagacgatgaggcttgagcagcgtgattcactgggtgaatctccagtgagagtttgggtcaacacttttaaagtgtttttagatgaatatatgaatgaattcaagacttcagattgcacagccacaaaggtgccaaaaacagaaagaaagaaaagaaggaaaaaggaaactgatttggtggaagaacacaatggtcacatctttaaagccacccaatatagcatccctacatactgtgaatactgttcttctttgatatggataatggaccgagcctctgtttgcaaattatgcaagtatgcttgccataagaagtgctgtctgaaaaccacagccaagtgctctaaaaagtatgatccagagctgtcatctcgacaatttggggttgaactgtcccgtttgaccagtgaagaccgaactgttcctttagtagtggaaaagctcataaactacattgaaatgcatggactgtatacagaaggtatttatcgaaagtctggttcgactaataaaatcaaggagcttcggcagggtctagatacagatgctgagagtgtaaatctagatgactataacatacacgtcattgcaagtgtattcaaacaatggcttcgagatttgcccaatcctctcatgacctttgaactctatgaggaatttcttcgagctatgggccttcaggagaggaaggagacaatccgtggtgtatactctgtgattgatcaactctcccgaactcatctcaatacactggaacgcctcatctttcatctagtcaggattgctctgcaggaagacactaatcgaatgtctgctaatgctttggccattgtgtttgcgccctgcattctccgctgccctgacaccactgacccactacaaagtgtacaggacatcagtaagactaccacttgtgtggaactgattgttgtggaacaaatgaataaatacaaggctcgtctcaaagatatcagtagcttggaatttgctgagaataaggcaaagaccaggttgtcactgattcgtagatcaatgggaaaggggcgtattcgtcgaggaaactatccaggtccatcgtctcctgttgtagttcggttgccttctgtgtctgatgtctcagaggagaccttgactagtgaggcagccatggagactgacatcacagaacagcagcaagcagctatgcagcaggaggagagagtactgactgagcagattgagaacctacagaaggagaaggaggagctaacatttgagatgcttgtactggaaccccgtgcctctgatgatgaaacccttgagtctgaggcctccattgggactgctgatagctcagagaatttgaatatggagtctgaatatgctatctctgagaaatcagaaagaagcttagcccttagctccctgaagacagctggcaagtctgaaccttccagcaagttgcgaaagcaacttaaaaagcagcaagactctttagatgtcgtggactcttcggtctcctctttatgtctgtctaacacggcatcatctcatgggaccagaaaactatttcagatttattccaaatctccattctaccgagctgcctcaggtaatgaggccctgggaatggaaggaccattgggccagaccaaattcctggaagacaagcctcagttcatcagcagaggaaccttcaacccggaaaagggcaaacaaaaattaaagaatgtgaaaaactcacctcagaaaaccaaagagaccccagaggggacagtcatgtctggccgcagaaaaactgtggacccagactgcacctccaaccaacagctagcactctttggaaataatgaatttatggtctgaaccggcagatgtgtgtccctccgtggctacagagtggtaaacaaatctcacctttggggctgcgtttcatcacctcgtccacaatagtcaatcctaattgtggtcctgcctcttttctaagcatatggctaagactgtatgtgctgaattcctgggcctcctgcagaagcagaaagcctgctggggatggtgccagctgtgccttggctgttgtatttgaattgagatttttactatacaaagccacctagggcctggggatttgggtcagttgtagttgcctctcccccaccctcttttcccttcccaaaggtgggtgttgaactaggggggatattgctgtcctgagggaccctctcatttctgacatttgaagaaaacgtataaatctttcttaaccgtgaaagcaaaagcctttgggtttattttgggatagttaggagctagggtagaatataatttttttccaaaaacttacttacaaacaaaaagcctaatccctctattttaagatttctgaaaaaacactccatgttatattctggggaaagc

SEQ ID NO: 168919 - DNA, 7647 bp, Artificial Sequence
  derived and/or modified sequence
atgaacatcaacgacggcggccggcggcggttcgaggacaacgagcatactttacgtatttatccaggagctatcagtgaaggcacgatctattgcccaatcccggcccgcaagaatagcaccgccgctgaggttatcgaaagcttaatcaacaaacttcatctggataaaaccaaatgttacgtacttgcagaggtgaaagaatttggcggcgaggaatggattctgaaccctacagattgtcctgtgcaacgtatgatgttatggcccagaatggccctggaaaacagactgagtggcgaagattatagatttcttctccgggaaaaaaacctagatggctctatccactacggcagcctccaatcgtggttgagggtgaccgaggagcgacgtagaatgatggagaggggatttttgccccagcctcagcagaaggactttgacgacctttgttcactgcccgatctgaacgagaaaaccctgttggagaatcttagaaatagatttaagcatgaaaagatctatacttacgtgggatccattctgatcgtgataaaccctttcaagttccttccaatctacaatcctaaatacgtgaaaatgtacgataatcatcagctaggcaagctcgagccccatatctacgccgtcgcagatgtcgcctatcatgcaatgctgcagcgcaagaaaaaccagtgcatagttatttccggcgaaagtggatcagggaagacacagtcaactaacttcttgattcaccatcttacagcactgtcccagaaggggttcgcctctggtgtcgaacaaatcatcctgggtgcagggcctgtcctagaagctttcggcaatgctaaaaccgcccacaataataattcaagccgtttcggaaaatttattcaagtgaattatcaggaaacaggaacggtgttgggcgcatacgtcgaaaaatacttgctggaaaaatcacgattggtttatcaggaacacaatgaaaggaactaccatgtattttactatctcctggccggggcgagcgaggacgagcgctcagccttccatctgaaacagcctgaagagtatcattacctgaaccagataacaaagaagcccctgaggcaatcatgggacgactactgttacgatagtgaacccgattgtttcaccgtggaaggggaggacctgagacatgattttgagagacttcagctcgccatggagatggttgggttcctgcccaaaacgcggaggcagattttctccctgctgagtgccatacttcatctgggtaacatctgttataagaaaaagacgtatagggacgatagcatcgatatatgcaaccctgaagttctgcccattgtgagcgagctattggaggtcaaggaagaaatgctgtttgaagccctggttactcgaaagacagtgaccgtaggggagaaactgatcctgccctacaaactggccgaagccgtgaccgtgaggaacagcatggctaagagcctgtacagtgcgttgttcgattggattgtctttcggatcaaccacgctctcctgaattctaaggacctggagcacaacaccaagacgctcagtatcggagtgcttgacatcttcgggttcgaggactatgaaaacaacagctttgagcagttctgcataaattttgctaatgaacggctccagcattactttaaccaacacattttcaaacttgaacaggaggagtatcggactgagggtatcagctggcacaatatcgactacatcgacaatacttgctgtatcaacttaatcagcaaaaagccaaccgggctattacatctcctggatgaggaatcaaacttcccacaggctacgaaccagactcttctcgataaattcaagcatcagcacgaagacaattcttacatcgagttcccagccgtcatggagcccgctttcatcatcaaacactacgcaggaaaggtgaaatatggtgtaaaagactttcgcgagaagaacaccgaccatatgcgtcccgacatcgtggcccttctgaggtcatctaagaatgccttcatcagcgggatgataggcatagaccctgtagctgttttccgatgggccattcttcgggcttttttccgggctatggtggccttccgtgaagcgggaaagcgtaatatacacaggaagaccggccacgacgataccgccccgtgcgctattcttaaaagtatggatagctttagctttttacaacaccccgttcatcagcgcagtcttgagattctgcaaagatgcaaggaagaaaagtattctataactaggaagaaccctaggactccactctccgacctccagggtatgaacgccctgaatgaaaaaaaccaacatgatacgttcgacattgcctggaatgggcggacagggatcagacagtctcggctgtcttccggtaccagtctcctcgacaaggacggcatttttgctaactcaacatctagcaaactcctcgaaagggcccacggtatactgacacgaaataaaaattttaaaagtaagccagcattaccaaaacacttgcttgaagtgaattccctgaagcatcttacgagactgacactgcaggacaggatcactaaatcgttgttacatctgcataaaaaaaaaaagcctccttccatctcggctcagttccaggcttcactatcaaagctaatggagacgctggggcaggcagagccttacttcgttaagtgcataaggtccaatgctgagaaactaccgttgaggttctccgatgtgctggttctgaggcagcttaggtacaccggaatgttggagaccgtccggatacgccagtcagggtattcatccaagtattcctttcaggacttcgtaagtcatttccacgttctcctcccaaggaacatcatcccgagtaaatttaacattcaggacttcttccgtaaaatcaatttgaatcccgataattaccaggtgggtaaaacaatggtttttttaaaagagcaagaacgacaacatctccaggaccttttgcaccaggaagttctgaggcgtatcatcctgttacagagatggtttcgcgtcctgctatgtcggcagcactttctgcacctgcgacaggcctccgtgatcatccagcgattctggcgaaattacctgaatcagaagcaagtgagagatgcagctgttcagaaagacgccttcgtgatggcttctgccgctgcgcttcttcaagctagttggcgtgcccatctggaaaggcaacggtatctggaactgcgagctgcagcgatcgtcatccagcagaagtggcgcgattattataggagacgacacatggcagcaatctgcatccaggcccgatggaaagcttaccgtgaaagcaagagataccaggagcagcgtaaaaagattattctactacagagtacctgtcggggattccgcgcgagacagcggttcaaggccctcaaggaacagagactgcgcgagaccaaaccagaagtgggcctggtgaacatcaaaggctacggcagcttagagatccaagggtcagatccttctgggtgggaagattgttcctttgataaccggatcaaagcgatcgaagagtgtaagtctgtcatcgagtcaaaccgcatctctagagaaagtagtgtggactgcctcaaggagtcacccaacaaacaacaggagagggctcaaagccagagcggagtcgacctacaggaggatgtgctggtgagagagcgcccgaggagcttagaggacctgcaccagaaaaaggttggccgcgccaaacgtgaaagccgaaggatgcgggagctggagcaggccatcttctcattagaactattaaaggtgagatccctagggggcatcagccccagcgaagataggcgatggtcgacagagctggtccccgaagggctgcagtcacctcggggcactcccgatagtgagagcagccaagggagcctggagttgctgtcttatgaggaaagtcagaaaagtaaactcgaaagcgtcatttctgacgaaggagacctgcagtttccttctcctaaaatctcctcatcaccaaagtttgatagccgcgacaatgctctgtccgcctccaacgagactagctccgcggaacacctgaaggacggaaccatgaaggagatggttgtgtgtagttctgagtccattacttgtaagcctcaactcaaagacagctttatttcaaactcactgcccacatttttttacattccacagcaagatcctcttaagaccaactcccagttagatacttcgatccagagaaacaagctcctggagaatgaagacaccgcgggggaggcactgaccctggacatcaacagggagactagaaggtatcactgcagcggaaaagatcagatagtaccctcgttaaacaccgaatcttctaatcctgtcctgaaaaagttggaaaagcttaacactgaaaaggaggaaagacaaaagcagctgcagcagcagaacgaaaaggaaatgatggaacagattagacaacaaacagacattctggagaaggagaggaaggcttttaagaccatcgagaagcccaggattggcgagtgcctggttgcaccctcatcctaccagtctaagcaaagggtagagagacctagttctctcctgagcctgaacacatccaacaaaggcgaactcaacgtgcttgggagtctgagtctgaaggacgcggctctggctcaaaaagacagttcctcagctcacctcccgccgaaagatcgaccagtgaccgttttcttcgaaaggaaaggctctccctgccagtctagtactgtcaaagagctgtctaaaactgataggatgggcacacagctgaatgttgcatgcaagttgtctaacaatcgaatttccaagcgagagcactttagacctacccagtcttactcccataacagcgatgacttgtctcgggaagggaatgcccgccctattttctttacacctaaggacaacatgtctataccactggtgagcaaggaagccttgaactctaaaaacccccagctgcacaaggaggacgaacccgcctggaaaccagtgaaactagcgggcccagggcagagagagacgagccagcgctttagtagtgtggacgagcaggcgaaactccataaaacaatgtctcagggtgaaattaccaagctggccgtgcgccagaaagccagtgactcagacatcaggccccagcgtgcaaaaatgcgattttgggctaagggcaaacagggagaaaagaaaacaacccgggtcaagcctaccacgcagtcagaggtatctccactgttcgccgggacggacgtgatacccgcccaccaatttcccgatgaattagcggcatatcacccaacacctcccttgtccccggaacttccaggaagctgcagaaaggagtttaaggagaataaagagccctctcctaaggccaagcgcaagcgatcagtcaagatctctaatgtcgctctagattccatgcattggcagaacgactccgtgcagattattgctagcgtatctgatctgaaaagcatggacgaattcttgctgaagaaagtgaacgacttggataacgaagacagcaaaaaagatacattagttgacgtagtctttaagaaagcgctcaaggaatttcgacaaaacatattcagcttttatagttcagctttggctatggacgacggtaaaagcataagatacaaggacctctacgctctgttcgaacagatcctggagaagaccatgagactggagcagagggattccctaggcgaatccccagtgagagtgtgggtgaatacttttaaagtgttcttagatgaatacatgaacgaatttaagacatccgactgcaccgcaacaaaggtacccaaaactgaaaggaaaaaaaggagaaagaaggagaccgatctagttgaagaacataacggccacatcttcaaggctacccagtactccatcccaacatactgcgagtattgttccagcttgatttggattatggatcgtgccagtgtctgtaaactgtgtaaatacgcctgtcacaagaagtgttgcctcaagacgactgcgaagtgttctaaaaaatacgaccccgaattgtcctcacggcagtttggcgttgagctcagtcggctgacctctgaggacagaactgttcctctcgtggtggagaaacttattaattacatcgagatgcatggactgtatacagagggcatttaccgcaaatctggcagtaccaataagatcaaagagctgcgtcaggggctagacaccgatgctgagagcgtgaatctggacgactataacatccatgtgattgcgagcgtcttcaagcagtggctgcgtgatctcccaaaccctcttatgaccttcgagttgtacgaagaattcttacgagccatggggctgcaagagcgcaaggagaccattagaggagtgtatagtgtcatcgatcagctgtcaaggacccatctgaacactttagaacgacttatttttcatctggtccgcatcgctctacaagaggataccaatagaatgtcagccaacgccctggccattgtattcgctccctgcatcctgaggtgtcccgacacaaccgaccctcttcagtcagttcaggacatctcaaagactacaacctgtgtcgaactaatagtggtggaacaaatgaacaaatacaaggcgcgcctcaaagatatcagttcattggagtttgccgaaaacaaagccaagactcggttgtcactgattcgtagaagtatggggaaaggcaggattagaagaggaaactatccaggtccctctagccccgtggtagttagattacccagcgtgagcgatgtatccgaggaaacactcacttcggaagccgccatggagaccgacatcacagaacagcagcaagccgctatgcagcaggaagagagagtcctaactgaacagatcgagaatctccaaaaagaaaaggaggagctgacctttgagatgctagtactcgagccacgtgcttccgacgacgagaccctggaaagcgaggcatccatcggaacggccgattccagcgagaacctcaacatggagagcgagtatgctatctctgaaaagtctgaaaggagcctggctctctcatctctgaagacagccggcaagagcgagccaagcagcaaactgcgcaagcagctgaagaaacaacaggacagcctggatgtggttgactcctcagttagtagtctttgcctgagcaataccgccagcagtcacggcacacgcaaactgtttcagatatactctaagagccctttttatagggcggcctccggaaacgaggccttgggcatggaggggccactcggccagaccaaattcctagaagataagccccagtttatctctcgtgggacttttaacccagagaaaggaaaacagaagctgaaaaacgttaagaactccccccaaaagactaaagaaaccccagagggcactgtgatgtctggtcgacgcaaaacggtggatccggactgtactagcaatcagcagcttgcgctgttcggcaacaacgaattcatggtgtag

SEQ ID NO: 168920 - DNA, 7590 bp, Artificial Sequence
  derived and/or modified sequence
atgaacatcaacgacggcggccggcggcggttcgaggacaacgagcatactctccggatatacccaggagccatttctgaggggaccatttattgtcccattccggcccgtaaaaattccacagcggcagaagttatcgaaagtcttatcaataaattgcatctcgataagacaaagtgctatgttctggccgaagtgaaggagtttggaggagaagagtggattttaaatccaacagattgtcccgtgcagcgaatgatgctgtggcctcggatggccctcgaaaaccgcctttccggagaggactaccggtttcttctgcgcgagaagaacttggatgggagcatccattatggaagcctccagagctggttacgagtgacagaagaacgcaggaggatgatggagcggggtttccttcctcaaccccaacagaaagactttgacgacctgtgctcactgcccgacttgaacgaaaagacactgttagaaaacttgcggaacaggttcaaacatgagaagatttacacatacgtggggtctatactcatcgtgattaatccgttcaagttcctgcctatttataaccctaagtacgttaaaatgtatgataatcatcagctgggcaagctggagccgcatatctatgcagtcgccgacgtggcttatcacgcgatgctgcaacgaaaaaaaaaccagtgcatcgtgatcagtggtgagtctggctcgggaaagacccaatccacaaatttcctaattcaccatctgactgcattgtcacagaagggctttgccagtggcgtagagcagatcatcctcggtgctggaccagtccttgaggcttttggtaatgccaaaacagctcacaacaacaatagctcccggttcggtaagttcatccaggtgaactatcaggagaccgggacagtgctcggcgcatacgtggagaagtatctgctcgaaaagagtcgcctcgtgtaccaggagcataatgaacgcaactatcatgtgttttactatcttctggcgggtgcctctgaagatgagaggagcgccttccatctcaagcagccggaagagtatcactacctaaaccaggattgcttcactgtggagggagaggacctgcggcacgattttgagagattgcagttggcaatggagatggtgggattcctgcctaagacacggcgtcaaattttctctctgctttcagccatcctgcacctgggcaacatctgctacaaaaaaaagacgtaccgtgacgattccatagacatctgtaatcccgaagtgctccctatcgtgtctgaactgctggaagtaaaggaagagatgttgttcgaggcattagtgaccagaaaaactgtgacagtgggcgaaaagcttatactcccctacaaactggcagaggctgtgaccgtcaggaacagcatggccaagtccctgtactcagccctgttcgactggattgtcttcagaataaaccacgctctgctaaactccaaggacttagagcataatacaaaaaccctgagtattggagtcctagatattttcggattcgaagactatgaaaacaacagttttgaacagttctgcattaattttgctaatgaacgtctgcagcattacttcaatcaacacattttcaaactggaacaagaagagtaccggacagagggaatcagctggcacaacatcgactatatagataatacatgctgtattaacctaatcagcaagaagccgactggactgcttcatctcctggacgaagagtctaatttcccccaagctacaaatcagactctgctggataaattcaagcatcagcacgaagacaactcttacatcgaatttcccgccgtgatggagcccgctttcattatcaagcactatgcaggcaaggtcaaatacggggtgaaagacttccgggagaaaaacacggatcacatgaggccggacatcgtagctctcttaagatctagtaaaaacgctttcattagtgggatgataggcatcgatccggtggctgtttttcgttgggccattctccgtgccttcttcagagccatggtagcttttagagaggctggaaagcgcaacatccataggaaaaccgggcatgacgacacagccccatgtgctatcctcaaatccatggattccttttcctttctgcaacatcccgtgcaccagagatccctcgaaattctgcagcggtgcaaggaggaaaaatacagcatcacaagaaaaaatcccaggactcctctatctgatctgcaggggatgaacgccctcaatgagaagaatcaacacgacactttcgatatcgcgtggaacggccgcacaggaattcgccagagtaggctgtcatccggcacttctctgttagacaaagatggcatttttgctaattcaacttctagcaagctgctcgagcgcgctcatggcatacttacccgcaataagaactttaagtctaaaccggccctgccaaagcatcttctagaggtcaactccttaaagcatctcacaagattgaccctgcaggaccggatcaccaagtcactccttcacctccacaagaagaaaaaaccgccgtccatcagtgcccagttccaggccagtctatcaaaactgatggagaccctgggccaggcagaaccttatttcgttaaatgcatccgcagcaacgccgagaagctccctctgaggttctcagatgttctcgtgctacggcagttgcggtatactggcatgttggagacggtccgtattcggcagtcaggctactcgagcaagtactcctttcaggacttcgtgtcccattttcatgtgttgctacctcggaacatcataccatctaagtttaatattcaggacttctttcggaagatcaatctgaaccccgacaactaccaagttgggaaaacaatggtatttctcaaagaacaagagcggcagcacttacaggacctacttcatcaagaagtgttaaggcggattatcctcctgcagaggtggttcagagtgctcctgtgtaggcagcattttctgcaccttcgacaggcctccgtcatcatccaaaggttctggaggaactacctaaaccagaagcaggtgcgagatgcagcggtgcaaaaggacgccttcgtgatggcgtcggcagcagcgcttctccaggctagctggcgtgctcacctggaacgacaacgctatctcgaattgcgggccgcagccattgttatccaacaaaaatggagggactactatcggcgccgacacatggccgcgatctgcatccaggcacgatggaaggcttaccgagagagcaagagatatcaagaacagaggaagaaaattattctgctccagtcaacatgtaggggatttagagccagacagagattcaaagctctgaaggagcaacgcctacgggagaccaagcccgaagtgggcctcgttaacatcaagggctatggctctttggaaatacaggggtcagatccctctgggtgggaagactgctctttcgacaacaggattaaagctatcgaggaatgcaagtctgttattgaatccaatagaatctcccgggagagcagcgtggactgcctgaaggaatcacctaacaagcagcaggaacgggcccagtcacaaagtggggtcgacttgcaggaagacgtcttggtccgcgaacgtccacgttcactggaggaccttcaccagaaaaaggtcggcagagctaaacgggaatccaggagaatgcgcgagttagaacaggccattttcagcctagagctcttgaaggtgaggtccctgggcggtatttcaccctctgaggataggcggtggtccactgaactggttccagagggcctgcagtcccctcggggcactcccgactctgaaagctcccagggatcactggagcttctctcttatgaagagtctcagaagtcaaagctagaaagcgtgatttctgacgaaggagatctacaatttcctagtcccaagatttcatcatcccctaagttcgacagccgcgataacgccctaagtgcttctaacgaaacatcctcagctgagcacctcaaagacggcactatgaaagagatggtcgtctgcagttcagagtccatcacttgtaaaccccagctgaaagactcctttatttctaacagcctcccaacctttttctatatacctcaacaagacccactgaaaacaaactcccaacttgacacgtcaatacaaaggaacaaacttcttgaaaatgaagacaccgcaggtgaagcactcacactggatatcaaccgggagactaggcggtatcattgttcaggaaaagaccaaatcgtgccctcactgaacactgaaagttccaaccccgttctaaaaaaattggagaaattgaatacagagaaagaggagcgacagaaacagttgcaacaacagaacgagaaggagatgatggagcagattcggcagcagaccgacatcctggagaaggaaagaaaagcgtttaagaccatcgagaaaccaagaataggtgagtgtctcgtagcgccatcatcctatcagtcaaaacagagggtcgagcggcctagctctttactctctttaaatactagtaataagggggaactcaatgtgctgggaagcctcagcttgaaggacgcagcgctggcccagaaagactccagcagtgctcacttacctcccaaggacagaccagtgaccgtgttttttgagcgcaagggtagcccctgccagtcttccaccgtcaaggaactttctaaaacggaccggatggggacacagctaaacgtagcgtgtaaactgagcaacaataggattagtaaacgcgagcattttcggccaacccaaagttattcccacaatagcgacgaccttagtcgggaagggaacgctcggccgatctttttcacacctaaagataatatgagcataccactggtaagtaaagaagccttgaacagtaaaaatccccagttacataaggaggatgaacctgcctggaaacctgtaaaactggccggccccggccaacgagagacttcccagcgattcagctccgtagacgaacaggcaaaattgcacaagactatgtctcagggggaaataacaaagttagcagttcgtcaaaaggcctcagacagcgatattagaccacaaagagcaaagatgcgattctgggctaaggggaagcaaggcgagaagaagaccactagggtgaagcccactacccagtccgaggtctctcccttgttcgccggaacagacgtgatcccggcacatcagttcccagacgagctggcagcgtaccatccaaccccgcccctttcacccgagctcccaggttcatgcagaaaagaattcaaggagaacaaagagccctcacccaaagccaaacggaaacgctcagtcaaaatctcgaacgtcgccctggactctatgcactggcagaatgatagcgtccagatcattgcttctgtgagtgacttgaagagcatggacgagtttcttctcaaaaaagtcaacgacttggacaatgaggactccaagaaagacactttagtcgatgtggttttcaaaaaagccctgaaagagttccgccagaacatcttcagtttctattcttcagcattggccatggatgacggaaaaagtatcaggtacaaagacctctatgccctgtttgaacagatactcgaaaagacgatgagattagaacagcgagattcgttaggggagagtccagtgagagtctgggtgaatacctttaaggtgtttctagacgagtacatgaatgaattcaagacctccgattgtacagctaccaaggtcccaaagactgaaagaaagaaacgccgtaaaaaagagacagatctggtagaggagcacaatggtcatatctttaaagcaacacagtacagcatccctacttattgtgagtactgctccagtttgatttggattatggacagggcgagcgtatgtaaactttgtaaatacgcatgccataagaagtgctgtctcaaaacaaccgccaagtgtagcaaaaagtacgatcctgaactgtcttcaaggcagtttggcgtggagctgagtagactgacttctgaggatcgcacggtgcccctggtggtagaaaagctgatcaactatatcgagatgcatgggctgtatactgaaggcatataccggaagtctggtagcaccaacaagatcaaagaactccgccagggcctggatacagatgcagagtctgtcaacctcgatgattataatattcatgtgatcgcgagcgtgtttaagcagtggctgagagaccttcccaaccccctaatgactttcgaactgtacgaagaattcttaagagctatggggctccaggagagaaaagagacaatccggggggtctacagtgtgatcgatcagttatcgagaacgcatttgaacacgttggaaaggcttatctttcacctagtacgcatcgctcttcaagaggacacaaaccggatgtctgcgaatgccctggccatcgtgtttgcaccctgtatccttcgctgtcctgatacaactgatcctctccaaagcgtgcaggatattagcaagacgactacttgcgtcgagctgatcgtggtcgaacaaatgaacaaatacaaggcccgtttaaaggacatttcttccctggaattcgccgagaataaggcaaaaactagattatcactcattcgccggagcatggggaaaggccggattcgccgggggaattaccccgggccctcatccccagtggtcgtgagactgccttcagtttcggacgtgagtgaagaaacacttacctctgaagctgcaatggagaccgatatcacagaacagcagcaggctgctatgcagcaggaggaaagggtccttaccgagcagattgaaaacctccagaaggagaaagaggagttaacgtttgagatgttggtgctcgaacccagagccagcgatgacgagaccttggagagcgaggccagcatcggcaccgcggacagtagtgaaaacttgaatatggagtcagaatatgccatcagcgaaaaatcggaacggtctctcgcactgagcagtctcaagacggctgggaagtccgaaccatccagcaagttgcgtaaacagctcaaaaagcagcaggactccctagatgtggttgattcatccgtttcaagcctatgcctgtcaaatacagcgagttcccacggtacccggaaactgttccagatctactccaagtcacctttctatcgtgcagcgtcaggaaacgaggcactgggtatggaaggccccttgggtcagacaaagttcctggaagacaagccacagtttatcagtcgtggaacgttcaatccagagaagggaaaacagaaattaaagaacgtcaagaactcacctcagaaaaccaaagaaaccccagaaggcacagtgatgtcaggccggaggaaaacggtcgatccagactgtaccagcaaccagcaactggctttgtttggtaacaatgaatttatggtctag

SEQ ID NO: 168921 - DNA, 7646 bp, Artificial Sequence
  derived and/or modified sequence
atgaatattaatgatggtggccgacggaggtttgaagacaatgaacatacattgaggatctaccctggggcaattagcgagggcactatctattgccccatcccggctagaaaaaattcaacagccgctgaagtgatcgaaagcctgataaataaattacacctggacaaaactaaatgttatgtcttagcagaggtcaaagagttcggcggagaagaatggatcctgaaccccacagactgtcctgtgcagagaatgatgttatggccaaggatggcgcttgagaacaggctctctggcgaagactacagattcctcctgagagaaaaaaatctggacgggagcattcattatggttcacttcagtcgtggttgagggtgacggaggagcgtaggcggatgatggaacgtgggttcctgccccagccccagcagaaggacttcgatgatctatgctcactccccgacctcaatgaaaaaacactgttggagaatctgcgcaaccgttttaagcacgagaaaatttacacgtacgtcggatctatcttgattgtaattaacccattcaaatttctgcccatctacaatcccaaatacgtgaaaatgtacgataatcaccaactcggcaagctggagccgcacatctacgcagtcgcggacgtggcctatcacgccatgctgcagaggaaaaaaaatcaatgcattgtgatatccggtgagagcgggtctgggaagacccagtctacaaacttcctgattcaccatttaaccgctctttcgcaaaaaggattcgcctccggtgtcgagcaaattatactcggggcaggtccagtactggaagcattcggaaatgcaaagactgctcataataataactcaagcaggtttggcaagtttatccaagtgaactaccaggaaacaggtaccgtgctaggagcatatgtggaaaagtatctcctggagaagtcccgactcgtttatcaggaacataacgagcgaaactatcacgttttctattacctgttagccggtgcttcagaagacgagaggtccgcctttcatctgaagcaacctgaagagtaccactatcttaatcagattaccaaaaaaccactgcggcagagctgggatgactactgttacgattcagagcctgactgtttcactgtggaaggcgaggatctgagacatgactttgagaggctgcaattggccatggagatggttggtttcctgccaaaaacacgcaggcagatcttttccctgctaagtgctatccttcacttgggcaacatctgttataaaaaaaagacctatcgtgacgacagcattgatatttgtaaccctgaggtgctgcctatcgtatcggaactcctagaagtcaaagaggagatgctcttcgaagcgttagtgacacgtaagacggtgacagtcggcgaaaagctgatattgccatacaaactcgccgaggccgtgacagttcgaaactcaatggccaagtctctctacagcgcattgttcgattggattgtgttcagaatcaatcacgcactgttgaattcaaaggaccttgagcacaacaccaagactctgtcgataggagtactcgacatcttcggattcgaggactatgagaacaattcctttgagcaattctgtattaatttcgccaatgaacgcctgcaacattatttcaatcagcacatattcaaactcgagcaggaggaataccggactgaggggatcagctggcacaatatcgactacattgacaacacttgttgtatcaacttaatcagtaagaaacctaccggccttttacacctcctggacgaagaatccaacttcccccaggccacaaaccagactctgcttgacaaattcaaacaccagcatgaggataattcatacatcgagtttccagctgtgatggaaccggcattcattatcaaacactatgccggaaaggtgaaatacggggtgaaggatttccgggaaaagaacaccgatcatatgcgtccagatattgtcgctctcctacgctcatccaagaatgcgtttataagcgggatgataggaatcgacccagttgcggtctttcggtgggctatactgcgggctttcttccgcgcaatggtggcctttcgggaagccggaaaaagaaatatccatcggaagaccggccatgacgacaccgctccctgcgccatcctgaaatcgatggactcattcagttttctgcagcatcctgtccatcaacgttccctagagatactccagcggtgtaaggaggaaaaatattccattacccggaagaacccaagaacaccactcagcgatctgcagggtatgaatgccctcaacgaaaagaatcaacacgacacttttgatattgcctggaatggcagaacaggcattaggcagtccaggctctcctcgggcacgtcactcttagacaaggatggtatctttgccaattccacctcatcgaagttactggaaagagcacacgggattctgacaaggaataaaaactttaagagtaaaccagctctgccgaagcacctgttggaagtgaatagtctgaagcatctgacgcgtctgacactgcaggatcgcatcaccaaatctctcctacatctccacaagaagaagaagcctcccagcattagtgcccagtttcaagccagcctttcgaagctgatggagaccctcggccaggcggagccctatttcgtgaagtgtattaggagtaatgctgaaaagctccctctccggttttctgacgtgctcgtcctgagacaacttagatatactggaatgttggaaaccgttagaatcagacagtccggctacagttctaaatactcgtttcaagatttcgttagtcatttccacgtgctgttacccaggaacattattccgtcaaagtttaatatccaggatttctttaggaagattaacctgaatcctgacaattaccaggtcggaaagaccatggtgtttctcaaagaacaggaacgacagcacctccaggatcttctacaccaggaagtgctccgtcgaatcattctgctccagcggtggtttcgtgtactgctctgccgtcagcactttcttcaccttcgacaggcgtctgtgatcatccagaggttctggcgcaattatttgaatcagaaacaagtgcgagatgcagcggtacagaaagacgcttttgtgatggccagcgcagcggctctgctgcaggcttcctggcgtgcccacctggagagacagaggtacctggaactcagggccgctgctatcgtcatccagcaaaaatggcgggattattatcgcagacgccatatggcggctatatgtatccaagcaagatggaaagcgtatagggaatcaaagcgctatcaagagcagagaaagaagatcattctgctgcagtcgacttgccggggattccgcgctcggcagcgatttaaggctttaaaagaacaacggctgagagagacaaagcctgaagtgggcttagtgaatattaaaggctatggaagcctggaaattcaagggtcagacccttctggctgggaagactgttcgttcgataatagaatcaaggccatcgaggaatgcaaaagtgtcatcgagtcaaatcggatcagcagggaaagctcagtagattgcctgaaggagtctcccaacaaacaacaggagcgcgctcagtctcagtccggcgtggacctgcaggaggacgtgttggtgcgcgagagacccaggtcactcgaggacctgcatcagaagaaagttgggagggcgaagcgggagagccgaaggatgcgagaactcgaacaggctattttttccctggagttgctgaaggtcaggagcctcggcggaatttcaccatctgaggatagacgatggtctactgagctggtgccggagggattgcagtctccacgaggtacgccagatagtgaaagtagccagggcagtcttgaactgctgtcctacgaggagagccagaagagcaaactggaatcagttatctctgatgagggcgacctccagttccctagcccaaagatttcctcctcccctaagtttgactctagggacaatgcactatccgctagcaacgagacctcaagtgcagaacatctgaaggatggcacgatgaaagaaatggttgtgtgctctagtgagagcatcacttgtaagccgcagctcaaggactcctttatcagcaattctctgcctacctttttctatatcccacagcaggaccccctgaaaacaaatagccaactggacacctcaattcagcgcaacaaacttctcgagaacgaggatacagccggagaagccctgacgctggacatcaatcgggagacaaggagatatcattgtagcggcaaggaccagattgtacctagtttaaataccgagtcctctaacccagtgctaaagaagctggagaagctcaacaccgaaaaggaagaaaggcagaaacagctccagcagcagaatgagaaggagatgatggagcagatcaggcaacagacagacatacttgaaaaggagagaaaggcattcaagacaatcgaaaagccacgcatcggtgagtgtttggtggcgcctagctcctaccaatccaaacagagagttgagagaccatcgtccctgctgtcactgaacacatcgaacaagggagaattgaatgtgctcggctctttgagtctgaaagacgcagccctcgcacagaaggactctagcagtgcccacctgcccccaaaggatagacctgttactgtgttctttgaacgcaagggctcaccatgccagtcaagtacagtgaaagaattatccaagacagatcgtatgggcacccagcttaacgtagcttgcaagttgtcaaacaacagaatctcaaaacgggaacattttcgacccacacaatcctacagccataacagcgatgacctgtcgagggagggaaacgcaaggccaatcttctttacgcccaaagataacatgtcaattcccctcgtgtctaaagaggctctcaatagcaagaacccccagctgcacaaagaggatgaaccggcttggaagccggttaagctggccggaccaggtcaaagggaaactagccagcggttttcaagcgtagatgagcaggccaagctgcataagaccatgagtcaaggagagatcacaaaactggcagtccggcagaaggcatctgacagcgatataaggccccagcgcgcaaaaatgagattttgggccaagggaaagcaaggcgagaaaaaaaccacaagggtgaaaccaacaacacaatccgaggtcagccctttgtttgcaggcacggatgtgatacccgctcaccaattcccagacgaattggctgcctaccatcccaccccccctctgtctcctgaattgcccggtagttgtcggaaagagttcaaagaaaataaagaacctagcccaaaagctaagagaaagcgctctgtgaaaatcagcaatgttgcgctggactctatgcactggcagaacgacagcgtgcaaattattgcttcagtctccgatctgaaaagcatggacgaattcttgttgaaaaaagttaacgacttagataatgaggatagcaagaaagacaccctcgttgacgttgtttttaagaaggccctcaaggaattccggcaaaacatcttttctttttactcgtcagcactcgccatggacgacggtaagagcattcgctataaagacctctacgcacttttcgagcagatcctggagaagacaatgagattagagcaaagagatagcttgggagagagccctgtgagggtctgggtgaacacattcaaggtgttcttagatgaatatatgaatgagttcaagacaagtgactgtaccgctactaaggtccctaaaacagagcggaaaaaacgcagaaaaaaagagactgaccttgtcgaagagcacaacggtcatatctttaaagccacccagtacagcatccctacctactgcgaatattgttcgtctttgatttggattatggatagggcaagtgtctgtaagctctgcaagtatgcctgtcataagaaatgctgtctaaagactacggcaaaatgtagcaagaagtacgatcctgagctttcttctcggcaattcggagtggaattgtctcgtctaacatcagaggataggacggtccccctggtcgtcgagaagctcatcaattacatcgagatgcatggcctatacaccgagggaatatatagaaagtccggcagcaccaacaagattaaggagctacggcagggactggacactgacgccgagagtgtgaacctggacgattataacattcatgtaattgcctctgtatttaaacagtggttacgcgacttgccgaaccctctgatgacattcgaactgtatgaggagttcctaagggccatgggcttacaggagcggaaggaaacaattaggggcgtatactcagtcatcgatcagttgtccagaacacatttgaatacactggagcgtcttatctttcatctggtcaggatcgctctccaggaggacaccaaccggatgtcggcgaatgccctcgcaatcgttttcgctccctgcatcctcaggtgtcctgatacaacagatcccctgcaatcagtgcaagacatcagtaagacaacaacttgtgtggaactgattgtggttgagcagatgaataaatataaggccaggctgaaagatattagttccttagagtttgctgaaaataaagctaaaacacgcctcagcctcataagaaggagtatgggcaaagggaggatcagacgcggaaactatcccggaccctcatctccagtggtggtgcgcctcccgtcagtttccgatgtttcagaggaaacactcaccagcgaggcagctatggaaacagacatcaccgagcagcagcaggccgctatgcaacaggaggaacgcgtgttgactgaacagatcgagaatctgcagaaggagaaagaggagctgacatttgagatgctcgtgctggaacccagagcaagtgacgatgaaacgcttgagtcagaagcaagcataggcacagctgactccagcgagaacttgaatatggagagcgaatacgccatatctgaaaaatccgaaagatccctcgccctgtcttctcttaaaaccgctggaaagagcgagccatccagtaagcttaggaaacaactgaaaaagcagcaggactcactggacgttgtcgacagctcagtgagcagcctgtgtctgtcaaacacagcctctagccatggtacgagaaagctctttcagatttacagcaaaagtcccttttatagagctgcatcaggcaacgaggctctagggatggaagggccactagggcagacgaagtttctggaagacaagcctcaattcatttccagggggacatttaatcctgaaaaaggaaagcaaaagttaaaaaatgtgaagaacagcccccagaagacaaaggagactccagaagggactgtgatgtcaggcagacgaaaaactgtggacccggattgcacatctaatcaacagcttgcattgtttggcaataatgaattcatggttta

SEQ ID NO: 168922 - DNA, 7589 bp, Artificial Sequence
  derived and/or modified sequence
atgaatataaatgatgggggacgtcgcaggttcgaagacaacgaacacacattgcgaatatacccaggcgcaataagcgagggcaccatctactgtccaatccctgctagaaaaaactccacagccgctgaggtaatagaatctttgattaataagctgcacctcgacaagacaaagtgttatgtgctggccgaggtaaaagagtttggaggtgaggaatggatcctgaatccgaccgactgtccagttcagcgaatgatgctgtggccccgaatggccctggagaatagactcagtggcgaggactaccgattcttgctaagggagaaaaacctggatggcagcatccactacggatcactccagtcttggctgagggtgacggaagagcgcagacggatgatggagcgcggattcctcccccaaccccagcagaaggatttcgacgacctgtgctcactgccagatcttaatgaaaaaacactgctcgagaatctacgaaacagatttaaacatgagaagatttacacctacgtggggtctatcttgattgtgataaacccatttaagtttttgcctatctataatccgaagtacgtgaaaatgtacgataaccatcagcttggaaagctcgagccacacatatatgccgtcgctgacgtggcgtaccacgccatgctccagcgcaaaaaaaatcagtgtatcgtaatatcgggggagagcggttccggaaagacccaaagtaccaattttcttatccatcatctgaccgccctttcccagaagggcttcgcttcaggagtggagcagattatcctgggggctgggccagttctggaggcttttggcaatgctaagacagcccataataacaactccagtagattcgggaagtttatccaggttaactaccaagaaaccggtacagtcctgggcgcatacgtcgaaaaatacttgttagagaagtcccggttagtgtaccaagaacataacgagcgcaactatcacgttttctattatctgctggcaggggctagcgaagacgagaggtccgcttttcacctgaagcagcctgaggaataccactatctcaatcaggattgtttcaccgtcgaaggagaagatctgaggcacgacttcgagaggctccagctcgccatggagatggttggctttctgcctaagactaggagacagatcttcagtctgctttcggctatcctccacctagggaatatctgctataagaaaaagacataccgagatgattctatcgatatctgtaatcccgaagtgctccccatagtatccgagctccttgaagtgaaggaggaaatgctcttcgaagctctcgtgacgcggaaaacggtgacggtgggggagaaattgattcttccctacaagttggccgaagccgtcaccgtgcgcaatagcatggccaagtccctgtacagcgctctcttcgattggatcgtcttcagaataaaccatgcactcctgaattctaaagatctcgagcacaatactaagaccctcagtatcggggtcctggatatctttggttttgaagactacgagaacaattctttcgagcaattttgtatcaactttgccaacgagagactccagcattactttaatcaacacatctttaagttagaacaggaggaatatagaacggagggaatctcttggcacaatatagattacattgacaacacctgttgtatcaacctgatcagcaagaaacctactgggctactgcacctgctggacgaggagagcaattttcctcaagccacaaatcagaccctcctcgacaaattcaagcaccagcatgaggataacagctacatagaatttcccgcagtgatggagcccgcttttattatcaaacactacgctggaaaggtcaagtatggggtaaaagattttagagagaagaacactgatcatatgaggcccgatatcgtggctctattaaggagcagcaaaaacgcattcatcagcggaatgattggaatcgatcctgtggcagtgttccgctgggcaatccttcgtgcctttttccgggctatggtcgcattccgggaagccggaaaacggaacatccaccgcaagactggacacgatgacacggccccatgtgcaattttgaaaagcatggattccttcagttttctccagcaccctgttcatcaaaggagtttggagatcctgcagcgctgcaaggaagaaaaatacagcatcactagaaaaaatcctaggaccccacttagcgacctgcagggcatgaatgccttaaacgagaaaaatcaacacgacacttttgatatcgcgtggaacggcaggaccggaatccggcagagccgcctgagttcgggcacgagtctgctggacaaggacggaatctttgcaaattcaacatcatcaaagctcctggagcgcgcacacggcatcttgacccgcaataaaaatttcaagtccaagccagccctgcccaagcacttgctggaggtgaactcgttaaaacaccttacacgtctgaccctacaggataggatcaccaagtcactgctgcatctacataagaagaagaagcctccctcaattagtgctcagttccaagccagtctgtcaaagctgatggagactctgggccaggccgagccttacttcgttaagtgcattcgaagcaatgctgagaaactgcctcttcgcttctccgacgtactggtcctgaggcagctgcgatacacgggtatgctggagaccgttagaatcaggcagtcaggatacagcagcaaatatagcttccaggactttgtgagtcattttcacgtgttgcttcccaggaacataatccccagcaagttcaatatacaggacttcttccggaaaattaacctgaatccagacaactatcaggttggcaaaaccatggtgtttctgaaggaacaggagcgccaacacctccaggaccttttacatcaggaggtgcttcgcaggatcatcctccttcagcgctggtttagagtgttactctgtcggcagcactttcttcacttacgccaggcatcagtgattatccagaggttttggcgcaattatttgaaccagaaacaggtgagagacgccgctgttcagaaagatgcctttgtcatggctagcgctgccgctctgctgcaagcaagctggcgggctcatttagagcggcagaggtatctggaactgcgagcggcagctattgtgatccagcagaaatggcgcgattactacagacgccgacacatggctgccatctgtatccaggcgaggtggaaggcataccgagaaagcaagaggtaccaagaacagaggaaaaaaataattctgcttcaatcaacttgtagaggatttagagctagacagcgattcaaagcactgaaagaacagcgtctgagggagacaaagccagaggtgggactagttaacataaaaggatatgggagtctggaaattcagggctctgatccttcgggttgggaagattgctcattcgataatcgtattaaagccattgaagaatgtaaatcagtgatagaatccaacaggatttccagggaatcctctgtggactgtcttaaagagagtccaaataagcagcaggagcgtgctcagtctcaatcaggggtcgatctgcaggaggacgtactggtgagagagagaccccgttcgcttgaggatctgcaccagaaaaaggtggggagggcgaagcgcgaaagtagacgtatgcgagaactagaacaagcaatcttctccctagagctcctaaaggttcggtcattaggcggaatctccccctccgaggacagacgctggtcaaccgaactggtgcctgagggactgcaaagccccaggggcacgcccgacagcgagtcaagtcagggatcgctggagctcctctcttacgaggaatctcagaagtctaagttagaatcagtgatttcagatgaaggagatctacagttcccttcaccaaagattagcagcagcccgaagttcgatagccgagataacgctctgtcagcgtcgaatgagacaagttctgccgaacaccttaaggacggcactatgaaagaaatggtcgtgtgctccagcgaaagcatcacctgcaagccccagttgaaggattcctttatctcaaactccttaccaacattcttctacattccacagcaggacccactgaagacaaactctcagctggacaccagcatacaacgtaacaagcttctcgagaatgaggacacggctggggaggctcttacacttgacattaaccgtgagactcgaaggtatcactgcagtggcaaggatcagatcgtaccatccctgaacacagagtcgagcaatccggttcttaagaagttggagaaattgaataccgaaaaggaagagcgacagaaacagctacagcagcagaacgagaaggagatgatggagcaaattcggcagcagacagatattctcgaaaaggagaggaaagccttcaagacgatcgagaaaccgcgtataggcgagtgcttagtcgctcctagcagctatcagagtaagcaaagggtcgaaagaccaagttctctactgtcactgaatacttcaaacaaaggcgaattgaacgtgctcgggtcactctccctaaaggacgctgcactggctcaaaaggactctagctctgcccacttgccccctaaagatcggcctgtgacagttttcttcgagaggaaggggtcaccttgtcaaagttctaccgtgaaggagctgagtaagactgatcgcatgggaacacaacttaacgtggcatgcaagctgagcaacaaccgcattagcaaaagggaacattttcggcctacccaatcctactcccacaattctgacgacctgagcagagaaggaaatgcgagacccatatttttcacccccaaggacaatatgagcatccctcttgtttctaaggaagctctgaattcaaaaaatccacagttgcataaagaagatgaaccggcatggaagccagtgaagctggccggaccgggtcaaagggagactagccagcggttttcctctgtggacgagcaggctaaactgcacaagacgatgtcacaaggcgaaattactaaactggccgtacgccagaaagccagcgatagcgatatccgccctcaacgggcaaaaatgagattttgggccaagggtaaacaaggtgagaagaagaccacgagagtgaaacccactactcagagcgaggtgagcccactcttcgctgggactgacgtaattccagctcatcagttcccagatgaacttgctgcctaccacccaacgcctcctctgtcacctgaactgccaggttcgtgccgaaaagaatttaaagagaataaagagccttcacccaaagcaaagcggaagagatccgtcaaaatctcaaacgtagctctagattcaatgcactggcagaatgactcggtccaaattatagcctctgttagcgaccttaaaagcatggacgaattcctgttgaaaaaagtcaacgatctggacaatgaggattcaaagaaggacactttggttgatgtcgtctttaaaaaagccttaaaagagttccgccagaatatcttttccttttacagttctgcactggcaatggatgatgggaagtccattcggtacaaagacctgtacgcgctgtttgagcagatattggagaagaccatgcgcctggagcaaagggactcgctcggtgaatccccggtcagggtatgggtgaacacgtttaaggtcttcctggacgaatatatgaatgaatttaagacttccgactgtaccgccacaaaggttcccaaaacagagcgcaagaagagacgcaaaaaagagacagacttggttgaggagcataacggccatatctttaaggctacccaatactccatcccgacatattgtgaatactgttcttccttaatctggataatggacagggcgtccgtctgcaaactgtgcaagtacgcctgccacaaaaagtgttgcctcaagacgactgccaagtgctccaagaagtacgacccggagctgtcgtcccggcagttcggggtggagttgtctaggctgacctctgaagacaggacagtcccgctggttgtggagaaactaatcaactacatagagatgcacggcctgtacactgagggcatttataggaagtccggatccactaataaaattaaggaactgcggcagggcctggacacagacgcagagagtgtaaacctcgacgattataacatccacgtcattgcctctgttttcaagcagtggctccgggatctacctaaccccctgatgacctttgaactctacgaggagtttctgagagccatggggctccaggagcggaaagagactatcagaggagtctacagtgttattgatcaactttcccgaacccacctgaatacactcgagcggctgatatttcaccttgtgagaatcgccctccaggaggacacgaatcgcatgtcagcgaatgcgcttgccatcgtttttgcgccatgcatactcaggtgcccagacacaacagatcccctgcagtccgtgcaggacatctccaaaaccacaacttgtgttgagctgatcgttgtcgaacagatgaataagtataaggctcggctgaaggacataagcagtctggagttcgcagagaacaaggccaaaaccaggctgtccctgatcaggcgcagcatgggaaaaggaaggatcaggaggggcaactatccaggcccatctagccctgtggtggtgcgactgccgtcagtaagtgacgtgagcgaggagaccttgacttccgaggctgctatggaaaccgacataactgagcaacagcaagcagccatgcaacaggaggagagagtcctgacagaacagatcgagaacctccagaaagagaaggaggaactgacgtttgagatgcttgtgctggagcccagagcaagcgatgacgagacccttgagtccgaagcatccatagggactgcagactcttcggagaacctgaacatggaatccgaatacgccattagcgagaagtccgaacggagtctggcgctgtcctccttaaagactgcaggcaaatcagaaccctctagcaaattacgcaagcagctgaagaaacagcaggactccctggatgtggttgattcaagtgtgtcatcgctgtgtctgagtaacacggccagcagtcacggaactaggaagctttttcagatctacagcaaatccccattttaccgcgctgcgtctggaaacgaagccctggggatggaggggcctctgggtcaaacgaaatttctggaagataaaccccaattcatcagcaggggcaccttcaaccctgagaaagggaagcagaaactgaagaatgtgaagaatagcccacagaagactaaagaaactcctgaggggaccgtgatgtccggtcgcaggaagaccgtcgacccagattgtaccagcaatcagcaactagcccttttcggcaataatgagtttatggtgta

SEQ ID NO: 168923 - DNA, 7647 bp, Artificial Sequence
  derived and/or modified sequence
atgaacatcaacgacggcggcagaagaagattcgaggacaacgagcacaccctgagaatctaccccggcgccatcagcgagggcaccatctactgccccatccccgccagaaagaacagcaccgccgccgaggtgatcgagagcctgatcaacaagctgcacctggacaagaccaagtgctacgtgctggccgaggtgaaggagttcggcggcgaggagtggatcctgaaccccaccgactgccccgtgcagagaatgatgctgtggcccagaatggccctggagaacagactgagcggcgaggactacagattcctgctgagagagaagaacctggacggcagcatccactacggcagcctgcagagctggctgagagtgaccgaggagagaagaagaatgatggagagaggcttcctgccccagccccagcagaaggacttcgacgacctgtgcagcctgcccgacctgaacgagaagaccctgctggagaacctgagaaacagattcaagcacgagaagatctacacctacgtgggcagcatcctgatcgtgatcaaccccttcaagttcctgcccatctacaaccccaagtacgtgaagatgtacgacaaccaccagctgggcaagctggagccccacatctacgccgtggccgacgtggcctaccacgccatgctgcagagaaagaagaaccagtgcatcgtgatcagcggcgagagcggcagcggcaagacccagagcaccaacttcctgatccaccacctgaccgccctgagccagaagggcttcgccagcggcgtggagcagatcatcctgggcgccggccccgtgctggaggccttcggcaacgccaagaccgcccacaacaacaacagcagcagattcggcaagttcatccaggtgaactaccaggagaccggcaccgtgctgggcgcctacgtggagaagtacctgctggagaagagcagactggtgtaccaggagcacaacgagagaaactaccacgtgttctactacctgctggccggcgccagcgaggacgagagaagcgccttccacctgaagcagcccgaggagtaccactacctgaaccagatcaccaagaagcccctgagacagagctgggacgactactgctacgacagcgagcccgactgcttcaccgtggagggcgaggacctgagacacgacttcgagagactgcagctggccatggagatggtgggcttcctgcccaagaccagaagacagatcttcagcctgctgagcgccatcctgcacctgggcaacatctgctacaagaagaagacctacagagacgacagcatcgacatctgcaaccccgaggtgctgcccatcgtgagcgagctgctggaggtgaaggaggagatgctgttcgaggccctggtgaccagaaagaccgtgaccgtgggcgagaagctgatcctgccctacaagctggccgaggccgtgaccgtgagaaacagcatggccaagagcctgtacagcgccctgttcgactggatcgtgttcagaatcaaccacgccctgctgaacagcaaggacctggagcacaacaccaagaccctgagcatcggcgtgctggacatcttcggcttcgaggactacgagaacaacagcttcgagcagttctgcatcaacttcgccaacgagagactgcagcactacttcaaccagcacatcttcaagctggagcaggaggagtacagaaccgagggcatcagctggcacaacatcgactacatcgacaacacctgctgcatcaacctgatcagcaagaagcccaccggcctgctgcacctgctggacgaggagagcaacttcccccaggccaccaaccagaccctgctggacaagttcaagcaccagcacgaggacaacagctacatcgagttccccgccgtgatggagcccgccttcatcatcaagcactacgccggcaaggtgaagtacggcgtgaaggacttcagagagaagaacaccgaccacatgagacccgacatcgtggccctgctgagaagcagcaagaacgccttcatcagcggcatgatcggcatcgaccccgtggccgtgttcagatgggccatcctgagagccttcttcagagccatggtggccttcagagaggccggcaagagaaacatccacagaaagaccggccacgacgacaccgccccctgcgccatcctgaagagcatggacagcttcagcttcctgcagcaccccgtgcaccagagaagcctggagatcctgcagagatgcaaggaggagaagtacagcatcaccagaaagaaccccagaacccccctgagcgacctgcagggcatgaacgccctgaacgagaagaaccagcacgacaccttcgacatcgcctggaacggcagaaccggcatcagacagagcagactgagcagcggcaccagcctgctggacaaggacggcatcttcgccaacagcaccagcagcaagctgctggagagagcccacggcatcctgaccagaaacaagaacttcaagagcaagcccgccctgcccaagcacctgctggaggtgaacagcctgaagcacctgaccagactgaccctgcaggacagaatcaccaagagcctgctgcacctgcacaagaagaagaagccccccagcatcagcgcccagttccaggccagcctgagcaagctgatggagaccctgggccaggccgagccctacttcgtgaagtgcatcagaagcaacgccgagaagctgcccctgagattcagcgacgtgctggtgctgagacagctgagatacaccggcatgctggagaccgtgagaatcagacagagcggctacagcagcaagtacagcttccaggacttcgtgagccacttccacgtgctgctgcccagaaacatcatccccagcaagttcaacatccaggacttcttcagaaagatcaacctgaaccccgacaactaccaggtgggcaagaccatggtgttcctgaaggagcaggagagacagcacctgcaggacctgctgcaccaggaggtgctgagaagaatcatcctgctgcagagatggttcagagtgctgctgtgcagacagcacttcctgcacctgagacaggccagcgtgatcatccagagattctggagaaactacctgaaccagaagcaggtgagagacgccgccgtgcagaaggacgccttcgtgatggccagcgccgccgccctgctgcaggccagctggagagcccacctggagagacagagatacctggagctgagagccgccgccatcgtgatccagcagaagtggagagactactacagaagaagacacatggccgccatctgcatccaggccagatggaaggcctacagagagagcaagagataccaggagcagagaaagaagatcatcctgctgcagagcacctgcagaggcttcagagccagacagagattcaaggccctgaaggagcagagactgagagagaccaagcccgaggtgggcctggtgaacatcaagggctacggcagcctggagatccagggcagcgaccccagcggctgggaggactgcagcttcgacaacagaatcaaggccatcgaggagtgcaagagcgtgatcgagagcaacagaatcagcagagagagcagcgtggactgcctgaaggagagccccaacaagcagcaggagagagcccagagccagagcggcgtggacctgcaggaggacgtgctggtgagagagagacccagaagcctggaggacctgcaccagaagaaggtgggcagagccaagagagagagcagaagaatgagagagctggagcaggccatcttcagcctggagctgctgaaggtgagaagcctgggcggcatcagccccagcgaggacagaagatggagcaccgagctggtgcccgagggcctgcagagccccagaggcacccccgacagcgagagcagccagggcagcctggagctgctgagctacgaggagagccagaagagcaagctggagagcgtgatcagcgacgagggcgacctgcagttccccagccccaagatcagcagcagccccaagttcgacagcagagacaacgccctgagcgccagcaacgagaccagcagcgccgagcacctgaaggacggcaccatgaaggagatggtggtgtgcagcagcgagagcatcacctgcaagccccagctgaaggacagcttcatcagcaacagcctgcccaccttcttctacatcccccagcaggaccccctgaagaccaacagccagctggacaccagcatccagagaaacaagctgctggagaacgaggacaccgccggcgaggccctgaccctggacatcaacagagagaccagaagataccactgcagcggcaaggaccagatcgtgcccagcctgaacaccgagagcagcaaccccgtgctgaagaagctggagaagctgaacaccgagaaggaggagagacagaagcagctgcagcagcagaacgagaaggagatgatggagcagatcagacagcagaccgacatcctggagaaggagagaaaggccttcaagaccatcgagaagcccagaatcggcgagtgcctggtggcccccagcagctaccagagcaagcagagagtggagagacccagcagcctgctgagcctgaacaccagcaacaagggcgagctgaacgtgctgggcagcctgagcctgaaggacgccgccctggcccagaaggacagcagcagcgcccacctgccccccaaggacagacccgtgaccgtgttcttcgagagaaagggcagcccctgccagagcagcaccgtgaaggagctgagcaagaccgacagaatgggcacccagctgaacgtggcctgcaagctgagcaacaacagaatcagcaagagagagcacttcagacccacccagagctacagccacaacagcgacgacctgagcagagagggcaacgccagacccatcttcttcacccccaaggacaacatgagcatccccctggtgagcaaggaggccctgaacagcaagaacccccagctgcacaaggaggacgagcccgcctggaagcccgtgaagctggccggccccggccagagagagaccagccagagattcagcagcgtggacgagcaggccaagctgcacaagaccatgagccagggcgagatcaccaagctggccgtgagacagaaggccagcgacagcgacatcagaccccagagagccaagatgagattctgggccaagggcaagcagggcgagaagaagaccaccagagtgaagcccaccacccagagcgaggtgagccccctgttcgccggcaccgacgtgatccccgcccaccagttccccgacgagctggccgcctaccaccccaccccccccctgagccccgagctgcccggcagctgcagaaaggagttcaaggagaacaaggagcccagccccaaggccaagagaaagagaagcgtgaagatcagcaacgtggccctggacagcatgcactggcagaacgacagcgtgcagatcatcgccagcgtgagcgacctgaagagcatggacgagttcctgctgaagaaggtgaacgacctggacaacgaggacagcaagaaggacaccctggtggacgtggtgttcaagaaggccctgaaggagttcagacagaacatcttcagcttctacagcagcgccctggccatggacgacggcaagagcatcagatacaaggacctgtacgccctgttcgagcagatcctggagaagaccatgagactggagcagagagacagcctgggcgagagccccgtgagagtgtgggtgaacaccttcaaggtgttcctggacgagtacatgaacgagttcaagaccagcgactgcaccgccaccaaggtgcccaagaccgagagaaagaagagaagaaagaaggagaccgacctggtggaggagcacaacggccacatcttcaaggccacccagtacagcatccccacctactgcgagtactgcagcagcctgatctggatcatggacagagccagcgtgtgcaagctgtgcaagtacgcctgccacaagaagtgctgcctgaagaccaccgccaagtgcagcaagaagtacgaccccgagctgagcagcagacagttcggcgtggagctgagcagactgaccagcgaggacagaaccgtgcccctggtggtggagaagctgatcaactacatcgagatgcacggcctgtacaccgagggcatctacagaaagagcggcagcaccaacaagatcaaggagctgagacagggcctggacaccgacgccgagagcgtgaacctggacgactacaacatccacgtgatcgccagcgtgttcaagcagtggctgagagacctgcccaaccccctgatgaccttcgagctgtacgaggagttcctgagagccatgggcctgcaggagagaaaggagaccatcagaggcgtgtacagcgtgatcgaccagctgagcagaacccacctgaacaccctggagagactgatcttccacctggtgagaatcgccctgcaggaggacaccaacagaatgagcgccaacgccctggccatcgtgttcgccccctgcatcctgagatgccccgacaccaccgaccccctgcagagcgtgcaggacatcagcaagaccaccacctgcgtggagctgatcgtggtggagcagatgaacaagtacaaggccagactgaaggacatcagcagcctggagttcgccgagaacaaggccaagaccagactgagcctgatcagaagaagcatgggcaagggcagaatcagaagaggcaactaccccggccccagcagccccgtggtggtgagactgcccagcgtgagcgacgtgagcgaggagaccctgaccagcgaggccgccatggagaccgacatcaccgagcagcagcaggccgccatgcagcaggaggagagagtgctgaccgagcagatcgagaacctgcagaaggagaaggaggagctgaccttcgagatgctggtgctggagcccagagccagcgacgacgagaccctggagagcgaggccagcatcggcaccgccgacagcagcgagaacctgaacatggagagcgagtacgccatcagcgagaagagcgagagaagcctggccctgagcagcctgaagaccgccggcaagagcgagcccagcagcaagctgagaaagcagctgaagaagcagcaggacagcctggacgtggtggacagcagcgtgagcagcctgtgcctgagcaacaccgccagcagccacggcaccagaaagctgttccagatctacagcaagagccccttctacagagccgccagcggcaacgaggccctgggcatggagggccccctgggccagaccaagttcctggaggacaagccccagttcatcagcagaggcaccttcaaccccgagaagggcaagcagaagctgaagaacgtgaagaacagcccccagaagaccaaggagacccccgagggcaccgtgatgagcggcagaagaaagaccgtggaccccgactgcaccagcaaccagcagctggccctgttcggcaacaacgagttcatggtgtag

SEQ ID NO: 168924 - DNA, 7590 bp, Artificial Sequence
  derived and/or modified sequence
atgaacatcaacgacggcggcagaagaagattcgaggacaacgagcacaccctgagaatctaccccggcgccatcagcgagggcaccatctactgccccatccccgccagaaagaacagcaccgccgccgaggtgatcgagagcctgatcaacaagctgcacctggacaagaccaagtgctacgtgctggccgaggtgaaggagttcggcggcgaggagtggatcctgaaccccaccgactgccccgtgcagagaatgatgctgtggcccagaatggccctggagaacagactgagcggcgaggactacagattcctgctgagagagaagaacctggacggcagcatccactacggcagcctgcagagctggctgagagtgaccgaggagagaagaagaatgatggagagaggcttcctgccccagccccagcagaaggacttcgacgacctgtgcagcctgcccgacctgaacgagaagaccctgctggagaacctgagaaacagattcaagcacgagaagatctacacctacgtgggcagcatcctgatcgtgatcaaccccttcaagttcctgcccatctacaaccccaagtacgtgaagatgtacgacaaccaccagctgggcaagctggagccccacatctacgccgtggccgacgtggcctaccacgccatgctgcagagaaagaagaaccagtgcatcgtgatcagcggcgagagcggcagcggcaagacccagagcaccaacttcctgatccaccacctgaccgccctgagccagaagggcttcgccagcggcgtggagcagatcatcctgggcgccggccccgtgctggaggccttcggcaacgccaagaccgcccacaacaacaacagcagcagattcggcaagttcatccaggtgaactaccaggagaccggcaccgtgctgggcgcctacgtggagaagtacctgctggagaagagcagactggtgtaccaggagcacaacgagagaaactaccacgtgttctactacctgctggccggcgccagcgaggacgagagaagcgccttccacctgaagcagcccgaggagtaccactacctgaaccaggactgcttcaccgtggagggcgaggacctgagacacgacttcgagagactgcagctggccatggagatggtgggcttcctgcccaagaccagaagacagatcttcagcctgctgagcgccatcctgcacctgggcaacatctgctacaagaagaagacctacagagacgacagcatcgacatctgcaaccccgaggtgctgcccatcgtgagcgagctgctggaggtgaaggaggagatgctgttcgaggccctggtgaccagaaagaccgtgaccgtgggcgagaagctgatcctgccctacaagctggccgaggccgtgaccgtgagaaacagcatggccaagagcctgtacagcgccctgttcgactggatcgtgttcagaatcaaccacgccctgctgaacagcaaggacctggagcacaacaccaagaccctgagcatcggcgtgctggacatcttcggcttcgaggactacgagaacaacagcttcgagcagttctgcatcaacttcgccaacgagagactgcagcactacttcaaccagcacatcttcaagctggagcaggaggagtacagaaccgagggcatcagctggcacaacatcgactacatcgacaacacctgctgcatcaacctgatcagcaagaagcccaccggcctgctgcacctgctggacgaggagagcaacttcccccaggccaccaaccagaccctgctggacaagttcaagcaccagcacgaggacaacagctacatcgagttccccgccgtgatggagcccgccttcatcatcaagcactacgccggcaaggtgaagtacggcgtgaaggacttcagagagaagaacaccgaccacatgagacccgacatcgtggccctgctgagaagcagcaagaacgccttcatcagcggcatgatcggcatcgaccccgtggccgtgttcagatgggccatcctgagagccttcttcagagccatggtggccttcagagaggccggcaagagaaacatccacagaaagaccggccacgacgacaccgccccctgcgccatcctgaagagcatggacagcttcagcttcctgcagcaccccgtgcaccagagaagcctggagatcctgcagagatgcaaggaggagaagtacagcatcaccagaaagaaccccagaacccccctgagcgacctgcagggcatgaacgccctgaacgagaagaaccagcacgacaccttcgacatcgcctggaacggcagaaccggcatcagacagagcagactgagcagcggcaccagcctgctggacaaggacggcatcttcgccaacagcaccagcagcaagctgctggagagagcccacggcatcctgaccagaaacaagaacttcaagagcaagcccgccctgcccaagcacctgctggaggtgaacagcctgaagcacctgaccagactgaccctgcaggacagaatcaccaagagcctgctgcacctgcacaagaagaagaagccccccagcatcagcgcccagttccaggccagcctgagcaagctgatggagaccctgggccaggccgagccctacttcgtgaagtgcatcagaagcaacgccgagaagctgcccctgagattcagcgacgtgctggtgctgagacagctgagatacaccggcatgctggagaccgtgagaatcagacagagcggctacagcagcaagtacagcttccaggacttcgtgagccacttccacgtgctgctgcccagaaacatcatccccagcaagttcaacatccaggacttcttcagaaagatcaacctgaaccccgacaactaccaggtgggcaagaccatggtgttcctgaaggagcaggagagacagcacctgcaggacctgctgcaccaggaggtgctgagaagaatcatcctgctgcagagatggttcagagtgctgctgtgcagacagcacttcctgcacctgagacaggccagcgtgatcatccagagattctggagaaactacctgaaccagaagcaggtgagagacgccgccgtgcagaaggacgccttcgtgatggccagcgccgccgccctgctgcaggccagctggagagcccacctggagagacagagatacctggagctgagagccgccgccatcgtgatccagcagaagtggagagactactacagaagaagacacatggccgccatctgcatccaggccagatggaaggcctacagagagagcaagagataccaggagcagagaaagaagatcatcctgctgcagagcacctgcagaggcttcagagccagacagagattcaaggccctgaaggagcagagactgagagagaccaagcccgaggtgggcctggtgaacatcaagggctacggcagcctggagatccagggcagcgaccccagcggctgggaggactgcagcttcgacaacagaatcaaggccatcgaggagtgcaagagcgtgatcgagagcaacagaatcagcagagagagcagcgtggactgcctgaaggagagccccaacaagcagcaggagagagcccagagccagagcggcgtggacctgcaggaggacgtgctggtgagagagagacccagaagcctggaggacctgcaccagaagaaggtgggcagagccaagagagagagcagaagaatgagagagctggagcaggccatcttcagcctggagctgctgaaggtgagaagcctgggcggcatcagccccagcgaggacagaagatggagcaccgagctggtgcccgagggcctgcagagccccagaggcacccccgacagcgagagcagccagggcagcctggagctgctgagctacgaggagagccagaagagcaagctggagagcgtgatcagcgacgagggcgacctgcagttccccagccccaagatcagcagcagccccaagttcgacagcagagacaacgccctgagcgccagcaacgagaccagcagcgccgagcacctgaaggacggcaccatgaaggagatggtggtgtgcagcagcgagagcatcacctgcaagccccagctgaaggacagcttcatcagcaacagcctgcccaccttcttctacatcccccagcaggaccccctgaagaccaacagccagctggacaccagcatccagagaaacaagctgctggagaacgaggacaccgccggcgaggccctgaccctggacatcaacagagagaccagaagataccactgcagcggcaaggaccagatcgtgcccagcctgaacaccgagagcagcaaccccgtgctgaagaagctggagaagctgaacaccgagaaggaggagagacagaagcagctgcagcagcagaacgagaaggagatgatggagcagatcagacagcagaccgacatcctggagaaggagagaaaggccttcaagaccatcgagaagcccagaatcggcgagtgcctggtggcccccagcagctaccagagcaagcagagagtggagagacccagcagcctgctgagcctgaacaccagcaacaagggcgagctgaacgtgctgggcagcctgagcctgaaggacgccgccctggcccagaaggacagcagcagcgcccacctgccccccaaggacagacccgtgaccgtgttcttcgagagaaagggcagcccctgccagagcagcaccgtgaaggagctgagcaagaccgacagaatgggcacccagctgaacgtggcctgcaagctgagcaacaacagaatcagcaagagagagcacttcagacccacccagagctacagccacaacagcgacgacctgagcagagagggcaacgccagacccatcttcttcacccccaaggacaacatgagcatccccctggtgagcaaggaggccctgaacagcaagaacccccagctgcacaaggaggacgagcccgcctggaagcccgtgaagctggccggccccggccagagagagaccagccagagattcagcagcgtggacgagcaggccaagctgcacaagaccatgagccagggcgagatcaccaagctggccgtgagacagaaggccagcgacagcgacatcagaccccagagagccaagatgagattctgggccaagggcaagcagggcgagaagaagaccaccagagtgaagcccaccacccagagcgaggtgagccccctgttcgccggcaccgacgtgatccccgcccaccagttccccgacgagctggccgcctaccaccccaccccccccctgagccccgagctgcccggcagctgcagaaaggagttcaaggagaacaaggagcccagccccaaggccaagagaaagagaagcgtgaagatcagcaacgtggccctggacagcatgcactggcagaacgacagcgtgcagatcatcgccagcgtgagcgacctgaagagcatggacgagttcctgctgaagaaggtgaacgacctggacaacgaggacagcaagaaggacaccctggtggacgtggtgttcaagaaggccctgaaggagttcagacagaacatcttcagcttctacagcagcgccctggccatggacgacggcaagagcatcagatacaaggacctgtacgccctgttcgagcagatcctggagaagaccatgagactggagcagagagacagcctgggcgagagccccgtgagagtgtgggtgaacaccttcaaggtgttcctggacgagtacatgaacgagttcaagaccagcgactgcaccgccaccaaggtgcccaagaccgagagaaagaagagaagaaagaaggagaccgacctggtggaggagcacaacggccacatcttcaaggccacccagtacagcatccccacctactgcgagtactgcagcagcctgatctggatcatggacagagccagcgtgtgcaagctgtgcaagtacgcctgccacaagaagtgctgcctgaagaccaccgccaagtgcagcaagaagtacgaccccgagctgagcagcagacagttcggcgtggagctgagcagactgaccagcgaggacagaaccgtgcccctggtggtggagaagctgatcaactacatcgagatgcacggcctgtacaccgagggcatctacagaaagagcggcagcaccaacaagatcaaggagctgagacagggcctggacaccgacgccgagagcgtgaacctggacgactacaacatccacgtgatcgccagcgtgttcaagcagtggctgagagacctgcccaaccccctgatgaccttcgagctgtacgaggagttcctgagagccatgggcctgcaggagagaaaggagaccatcagaggcgtgtacagcgtgatcgaccagctgagcagaacccacctgaacaccctggagagactgatcttccacctggtgagaatcgccctgcaggaggacaccaacagaatgagcgccaacgccctggccatcgtgttcgccccctgcatcctgagatgccccgacaccaccgaccccctgcagagcgtgcaggacatcagcaagaccaccacctgcgtggagctgatcgtggtggagcagatgaacaagtacaaggccagactgaaggacatcagcagcctggagttcgccgagaacaaggccaagaccagactgagcctgatcagaagaagcatgggcaagggcagaatcagaagaggcaactaccccggccccagcagccccgtggtggtgagactgcccagcgtgagcgacgtgagcgaggagaccctgaccagcgaggccgccatggagaccgacatcaccgagcagcagcaggccgccatgcagcaggaggagagagtgctgaccgagcagatcgagaacctgcagaaggagaaggaggagctgaccttcgagatgctggtgctggagcccagagccagcgacgacgagaccctggagagcgaggccagcatcggcaccgccgacagcagcgagaacctgaacatggagagcgagtacgccatcagcgagaagagcgagagaagcctggccctgagcagcctgaagaccgccggcaagagcgagcccagcagcaagctgagaaagcagctgaagaagcagcaggacagcctggacgtggtggacagcagcgtgagcagcctgtgcctgagcaacaccgccagcagccacggcaccagaaagctgttccagatctacagcaagagccccttctacagagccgccagcggcaacgaggccctgggcatggagggccccctgggccagaccaagttcctggaggacaagccccagttcatcagcagaggcaccttcaaccccgagaagggcaagcagaagctgaagaacgtgaagaacagcccccagaagaccaaggagacccccgagggcaccgtgatgagcggcagaagaaagaccgtggaccccgactgcaccagcaaccagcagctggccctgttcggcaacaacgagttcatggtgtag

SEQ ID NO: 168925 - protein, 217 aa, Artificial Sequence
  derived and/or modified sequence
MTSSYGHVLERQPALGGRLDSPGNLDTLQAKKNFSVSHLLDLEEAGDMVAAQADENVGEAGRSLLESPGLTSGSDTPQQDNDQLNSEEKKKRKQRRNRTTFNSSQLQALERVFERTHYPDAFVREDLARRVNLTEARVQVWFQNRRAKFRRNERAMLANKNASLLKSYSGDVTAVEQPIVPRPAPRPTDYLSWGTASPYRSSSLPRCCLHEGLHNGF

SEQ ID NO: 168926 - DNA, 654 bp, Artificial Sequence
  derived and/or modified sequence
atgactagcagttacggacatgtcctcgagagacaaccggccctgggcggccgattggattccccaggtaacctagatactctccaggccaagaaaaactttagcgtttcccatctgctggacctggaagaggccggcgatatggtggcggctcaggccgacgagaacgttggggaggccggccgctctctacttgaatcaccaggcctcacctctggttctgacactcctcagcaagacaatgaccagctgaactccgaggagaagaagaagcggaaacagaggaggaatcggactacgttcaatagtagtcagttgcaggcactggagcgggtgtttgaacgaacccactatcctgacgcattcgtgagggaagacctggctcggcgtgtaaacctcacagaagcacgagttcaggtttggtttcaaaaccgtagggccaagtttcggagaaatgaacgcgccatgctcgcaaataagaatgcctctctgctgaagagctatagcggagatgtcacagccgtggagcagcctattgttccgaggccagcccccagacccacggactacttgagttgggggaccgcgagcccttatcggtccagttcgctgccacgttgctgcctccatgaggggcttcacaatgggttttag

SEQ ID NO: 168927 - DNA, 654 bp, Artificial Sequence
  derived and/or modified sequence
atgaccagcagctatggccacgtgctggagcggcagcctgccctgggcggccgcctggacagccctggcaacctggacaccctgcaggccaagaagaacttctctgtgagccacctgctggacctggaggaggccggggacatggtggccgcccaggctgatgaaaatgtgggggaggccggccgcagcctgctggagagccctggcctgaccagcggcagtgacaccccccagcaggacaatgaccagctgaacagcgaggagaagaagaagaggaagcagaggaggaacagaaccaccttcaacagcagccagctgcaggccctggagcgggtgtttgagaggacccactacccagatgcctttgtgcgggaggacctggccaggagagtgaacctgacagaggcccgggtgcaggtgtggttccagaacagaagagccaagttcagaagaaatgaaagagccatgctggccaacaagaatgccagcctgctgaagagctacagcggagatgtgacagctgtggagcagcccatcgtgcccaggcctgccccccggcccacagactacctgtcctggggcacagccagcccctaccgcagcagcagcctgccccgctgctgcctgcacgagggcctgcacaacggcttctag

SEQ ID NO: 168928 - DNA, 654 bp, Artificial Sequence
  derived and/or modified sequence
atgaccagcagctacggccacgtgctggagcggcagcccgccctgggcgggaggctcgacagtccaggaaatctcgacacgctgcaagcaaagaagaactttagcgtgtcacaccttctggatttggaagaggccggtgacatggtggctgcgcaagccgatgagaacgtgggagaggccggcaggagtctgctggaaagccctgggctgacatccggaagcgatacaccacagcaggataacgatcagctcaattcagaagagaagaagaagcgcaaacagaggaggaatagaacgacttttaactcgtctcagttgcaggccctggagcgagtttttgagagaacacactacccggacgccttcgtgagagaggacttggcacgacgggtgaacctcaccgaagcccgcgtccaggtctggtttcagaatcggagggctaaattccgtaggaacgaaagagccatgttagccaacaaaaacgcaagtctgttgaaaagctattcaggtgacgtgactgctgtcgaacagccgattgtacctagacctgccccccgcccgaccgattacctgtcttggggaacggcgagcccttaccgctctagtagcctgcctcgctgttgccttcacgagggcctgcacaatggattttag

SEQ ID NO: 168929 - DNA, 654 bp, Artificial Sequence
  derived and/or modified sequence
atgactagcagctatggacatgtgctcgaaagacagcccgcattagggggacggctcgacagtcccggaaatcttgacacactgcaagccaaaaagaacttttccgtcagccacctcctcgatctggaggaagccggtgacatggtcgcagcccaggccgatgaaaacgttggggaagctggccgatccctcctcgagagtcccggtctgacctccggatcagacacccctcaacaagataatgatcaactgaacagcgaggagaagaagaagcgcaagcagcgaagaaatcggactactttcaacagctctcagctgcaagccctcgagcgcgtctttgagcgcacacactatccagatgcttttgtccgggaagatctcgctcggagggtgaacctaacggaggcaagggttcaggtgtggttccagaaccgcagagccaagttccggcgtaacgaacgcgcaatgttggcaaacaagaacgcctctttgctcaaaagctatagtggcgatgtgactgccgtggaacagcctatcgttccgagacctgccccacggccaacagactatctcagctggggcacagcttcaccctatagaagtagcagcctaccaagatgttgtttacatgaaggactacacaacgggttttag

SEQ ID NO: 168930 - DNA, 654 bp, Artificial Sequence
  derived and/or modified sequence
atgaccagcagctacggccacgtgctggagagacagcccgccctgggcggcagactggacagccccggcaacctggacaccctgcaggccaagaagaacttcagcgtgagccacctgctggacctggaggaggccggcgacatggtggccgcccaggccgacgagaacgtgggcgaggccggcagaagcctgctggagagccccggcctgaccagcggcagcgacaccccccagcaggacaacgaccagctgaacagcgaggagaagaagaagagaaagcagagaagaaacagaaccaccttcaacagcagccagctgcaggccctggagagagtgttcgagagaacccactaccccgacgccttcgtgagagaggacctggccagaagagtgaacctgaccgaggccagagtgcaggtgtggttccagaacagaagagccaagttcagaagaaacgagagagccatgctggccaacaagaacgccagcctgctgaagagctacagcggcgacgtgaccgccgtggagcagcccatcgtgcccagacccgcccccagacccaccgactacctgagctggggcaccgccagcccctacagaagcagcagcctgcccagatgctgcctgcacgagggcctgcacaacggcttctag

SEQ ID NO: 168931 - protein, 305 aa, Artificial Sequence
  derived and/or modified sequence
MSALLRLLRTGAPAAACLRLGTSAGTGSRRAMALYHTEERGQPCSQNYRLFFKNVTGHYISPFHDIPLKVNSKEENGIPMKKARNDEYENLFNMIVEIPRWTNAKMEIATKEPMNPIKQYVKDGKLRYVANIFPYKGYIWNYGTLPQILSCGEVIHVKILGILALIDEGETDWKLIAINANDPEASKFHDIDDVKKFKPGYLEATLNWFRLYKVPDGKPENQFAFNGEFKNKAFALEVIKSTHQCWKALLMKKCNGGAINCTNVQISDSPFRCTQEEARSLVESVSSSPNKESNEEEQVWHFLGK

SEQ ID NO: 168932 - DNA, 918 bp, Artificial Sequence
  derived and/or modified sequence
atgagcgccctgctgaggctcttaagaactggtgcccccgccgcggcttgcctacgcctgggcacttctgcaggcacgggaagcaggagagccatggcgctctaccataccgaggagaggggtcagccttgttcacaaaattaccgactgttcttcaagaacgtaacgggtcactatattagtccattccacgatatccccttaaaggtgaattcaaaagaggagaatggtattcccatgaaaaaggcacgcaatgacgagtacgagaatttattcaacatgattgtggagattcctcgctggacaaatgccaagatggaaatagccaccaaagaaccgatgaatcccataaagcagtacgtaaaggatgggaagctgcgctacgtggcaaacattttcccttacaaagggtacatatggaactacggcactcttcctcaaatcctgagttgcggggaagttatacacgttaaaatacttgggatcctggcactcatagatgaaggggagaccgattggaaactgattgcaattaatgcgaacgaccccgaagcgtctaaattccacgacattgacgatgtgaaaaagttcaagccaggctatctcgaggctactctgaattggttcaggctgtataaggtgcccgacggaaaacccgagaaccagtttgccttcaacggagagtttaagaataaggcgtttgcccttgaggttattaagagtacacatcagtgttggaaagctttactgatgaaaaaatgcaatggaggggcgattaattgcacaaacgtgcagatcagcgacagcccctttaggtgcacacaggaagaagcacggagtctcgtcgagagcgtcagctcctcacctaacaaagaatctaacgaagaggaacaggtgtggcattttcttgggaaatag

SEQ ID NO: 168933 - DNA, 918 bp, Artificial Sequence
  derived and/or modified sequence
atgtctgccctgctgcggctgctgaggactggagccccagctgctgcctgcctgcggctgggcaccagcgctggcaccggcagcagaagagccatggccctgtaccacacagaggagcggggccagccctgcagccagaactaccgcctcttcttcaagaatgtgacaggccactacatcagccccttccatgacatccccctgaaggtgaacagcaaggaggagaatggcatccccatgaagaaggccagaaatgatgaatatgaaaatctcttcaacatgattgtggagatcccccgctggaccaatgccaagatggagatcgccaccaaggagcccatgaaccccatcaagcagtatgtgaaggatggcaagctgcgctacgtggccaacatcttcccctacaagggctacatctggaactacggcaccctgccccagatcctgagctgtggggaggtgatccacgtgaagatcctgggcatcctggccctgattgatgaaggagaaacagactggaagctgattgccatcaatgccaatgaccctgaggccagcaagttccatgacattgatgatgtgaagaagttcaagccaggctacctggaggccaccctgaactggttccggctgtacaaggtgcctgatggcaagccagagaaccagtttgccttcaacggggagttcaagaacaaggcctttgccctggaggtgatcaagagcacccaccagtgctggaaggccctgctgatgaagaagtgcaatggaggagccatcaactgcaccaacgtgcagatcagtgacagccccttccgctgcacccaggaggaggcccggagcctggtggagagcgtgagcagcagccccaacaaggagagcaatgaggaggagcaggtgtggcacttcctgggcaagtag

SEQ ID NO: 168934 - DNA, 918 bp, Artificial Sequence
  derived and/or modified sequence
atgagcgccctgctgcggctgctgcggaccggcgcccccgccgccgcttgcctcagactcggcacctcagctggaacagggtctcgcagagccatggctctgtatcatacggaagagagggggcaaccttgttcgcagaattacaggcttttttttaaaaacgtgaccgggcactatattagccctttccacgacatacccctcaaggtcaatagcaaggaggagaatggtatccccatgaagaaagctaggaatgatgagtacgaaaatttgtttaacatgatagtcgagattcctcgatggacaaatgccaaaatggagatcgctaccaaggagcccatgaatccaataaaacaatacgtgaaggacggcaaactgcggtatgtggccaatattttcccatacaaaggttacatttggaactacggaacgctgcctcagatcctgtcctgcggagaagtgatacatgtcaaaatcctgggtattctggcactcatagatgaaggggaaaccgactggaaactgatcgccattaatgctaacgatccagaagcaagcaaattccatgacatcgatgatgtcaaaaaatttaagcccggatatctggaggcaaccctgaattggttccgcctctataaagttcctgacggtaagcccgaaaatcagtttgcctttaacggcgaattcaaaaataaggctttcgccctggaggtgataaaatctacacaccagtgctggaaggcactgctgatgaaaaaatgcaacggaggagccatcaattgtactaacgtgcagatttcagactcaccttttcggtgtacccaggaggaggcccggtcattggtcgaaagtgtgagttcatccccaaataaagagtcaaacgaagaggaacaagtctggcacttcctgggcaaatag

SEQ ID NO: 168935 - DNA, 918 bp, Artificial Sequence
  derived and/or modified sequence
atgagcgccttattgcgtctgttgcggactggcgctcccgctgctgcctgtttgcggttgggtacgagcgctggtacaggcagccgccgtgccatggctctgtatcacacggaggagaggggacagccatgttctcagaactaccggttgttctttaaaaatgtgacgggacattatatctcgcctttccacgacattcctttaaaggtgaactcgaaagaagagaacggaatccccatgaaaaaggccagaaacgacgagtacgagaatttgtttaatatgatcgttgagatccccaggtggaccaacgcaaagatggaaatcgccactaaggaaccaatgaatcccattaaacagtacgtgaaggatggaaaactccggtacgtggctaacatcttcccctataaaggttatatttggaactacgggacccttccccagatactctcttgcggcgaagttattcacgtgaagatactagggattttggctcttattgatgagggcgagactgactggaagcttatagcgatcaacgctaatgatccggaggcctcaaagtttcacgacatagacgatgtcaagaaatttaagccaggctatttggaagcaacgctcaactggttccgcctgtataaggtccccgacggcaaacccgaaaaccagtttgcattcaatggagagttcaaaaacaaagcgttcgcactggaagtgattaaatcaacccaccagtgttggaaggcacttctgatgaagaagtgtaacggcggagctatcaactgcactaatgtccagatctcagattctccttttcggtgcactcaggaggaagctaggtccctggtcgaaagcgtgagcagctcaccaaacaaggagagtaacgaagaagagcaagtgtggcatttcctggggaagtag

SEQ ID NO: 168936 - DNA, 1414 bp, Artificial Sequence
  derived and/or modified sequence
ccgtcattgacgccatgagcgcgctgctgcggctgctgcgcacgggtgccccagccgctgcgtgcctgcggttggggaccagtgcagggaccgggtcgcgccgtgctatggccctgtaccacactgaggagcgcggccagccctgctcgcagaattaccgcctcttctttaagaatgtaactggtcactacatttccccctttcatgatattcctctgaaggtgaactctaaagaggaaaatggcattcctatgaagaaagcacgaaatgatgaatatgagaatctgtttaatatgattgtagaaatacctcggtggacaaatgctaaaatggagattgccaccaaggagccaatgaatcccattaaacaatatgtaaaggatggaaagctacgctatgtggcgaatatcttcccttacaagggttatatatggaattatggtaccctccctcagattctttcttgtggagaagttattcatgtgaagatccttggaattttggctcttattgatgaaggtgaaacagattggaaattaattgctatcaatgcgaatgatcctgaagcctcaaagtttcatgatattgatgatgttaagaagttcaaaccgggttacctggaagctactcttaattggtttagattatataaggtaccagatggaaaaccagaaaaccagtttgcttttaatggagaattcaaaaacaaggcttttgctcttgaagttattaaatccactcatcaatgttggaaagcattgcttatgaagaagtgtaatggaggagctataaattgcacaaacgtgcagatatctgatagccctttccgttgcactcaagaggaagcaagatcattagttgaatcggtatcatcttcaccaaataaagaaagtaatgaagaagagcaagtgtggcacttccttggcaagtgattgaaacatctgaaattctgctgtcaagattcccatctctaaggactccaagtgctagagacaagggggtctatgagcatttactgacttcctgttaaaacttcattttttcaaactttttgagctatgcaatatataaataaacagtaagaattttaaattactctcctttggacatttattgatataaaaagaagattttggccaggcacggtggctcatgcctgtaatttcagcactttgggaggccgaggtgggcagatcacaaggtcaggagttcaagaccagcctggccagtatgttgaaaccccatctctattaaaaatacaaaaattagccaggcgtggtggtgcatgcctgtagacccagctactcaggaggctgaggcagaagaactgcttgagcccaggaggcagaggttgcagtgagcagagattgtgccactgcactccagcctaggcgacagagagagactccgtctc

SEQ ID NO: 168937 - DNA, 918 bp, Artificial Sequence
  derived and/or modified sequence
atgagcgccctgctgagactgctgagaaccggcgcccccgccgccgcctgcctgagactgggcaccagcgccggcaccggcagcagaagagccatggccctgtaccacaccgaggagagaggccagccctgcagccagaactacagactgttcttcaagaacgtgaccggccactacatcagccccttccacgacatccccctgaaggtgaacagcaaggaggagaacggcatccccatgaagaaggccagaaacgacgagtacgagaacctgttcaacatgatcgtggagatccccagatggaccaacgccaagatggagatcgccaccaaggagcccatgaaccccatcaagcagtacgtgaaggacggcaagctgagatacgtggccaacatcttcccctacaagggctacatctggaactacggcaccctgccccagatcctgagctgcggcgaggtgatccacgtgaagatcctgggcatcctggccctgatcgacgagggcgagaccgactggaagctgatcgccatcaacgccaacgaccccgaggccagcaagttccacgacatcgacgacgtgaagaagttcaagcccggctacctggaggccaccctgaactggttcagactgtacaaggtgcccgacggcaagcccgagaaccagttcgccttcaacggcgagttcaagaacaaggccttcgccctggaggtgatcaagagcacccaccagtgctggaaggccctgctgatgaagaagtgcaacggcggcgccatcaactgcaccaacgtgcagatcagcgacagccccttcagatgcacccaggaggaggccagaagcctggtggagagcgtgagcagcagccccaacaaggagagcaacgaggaggagcaggtgtggcacttcctgggcaagtag

SEQ ID NO: 168938 - protein, 4127 aa, Artificial Sequence
  derived and/or modified sequence
MAGSGAGVRCSLLRLQETLSAADRCGAALAGHQLIRGLGQECVLSSSPAVLALQTSLVFSRDFGLLVFVRKSLNSIEFRECREEILKFLCIFLEKMGQKIAPYSVEIKNTCTSVYTKDRAAKCKIPALDLLIKLLQTFRSSRLMDEFKIGELFSKFYGELALKKKIPDTVLEKVYELLGLLGEVHPSEMINNAENLFRAFLGELKTQMTSAVREPKLPVLAGCLKGLSSLLCNFTKSMEEDPQTSREIFNFVLKAIRPQIDLKRYAVPSAGLRLFALHASQFSTCLLDNYVSLFEVLLKWCAHTNVELKKAALSALESFLKQVSNMVAKNAEMHKNKLQYFMEQFYGIIRNVDSNNKELSIAIRGYGLFAGPCKVINAKDVDFMYVELIQRCKQMFLTQTDTGDDRVYQMPSFLQSVASVLLYLDTVPEVYTPVLEHLVVMQIDSFPQYSPKMQLVCCRAIVKVFLALAAKGPVLRNCISTVVHQGLIRICSKPVVLPKGPESESEDHRASGEVRTGKWKVPTYKDYVDLFRHLLSSDQMMDSILADEAFFSVNSSSESLNHLLYDEFVKSVLKIVEKLDLTLEIQTVGEQENGDEAPGVWMIPTSDPAANLHPAKPKDFSAFINLVEFCREILPEKQAEFFEPWVYSFSYELILQSTRLPLISGFYKLLSITVRNAKKIKYFEGVSPKSLKHSPEDPEKYSCFALFVKFGKEVAVKMKQYKDELLASCLTFLLSLPHNIIELDVRAYVPALQMAFKLGLSYTPLAEVGLNALEEWSIYIDRHVMQPYYKDILPCLDGYLKTSALSDETKNNWEVSALSRAAQKGFNKVVLKHLKKTKNLSSNEAISLEEIRIRVVQMLGSLGGQINKNLLTVTSSDEMMKSYVAWDREKRLSFAVPFREMKPVIFLDVFLPRVTELALTASDRQTKVAACELLHSMVMFMLGKATQMPEGGQGAPPMYQLYKRTFPVLLRLACDVDQVTRQLYEPLVMQLIHWFTNNKKFESQDTVALLEAILDGIVDPVDSTLRDFCGRCIREFLKWSIKQITPQQQEKSPVNTKSLFKRLYSLALHPNAFKRLGASLAFNNIYREFREEESLVEQFVFEALVIYMESLALAHADEKSLGTIQQCCDAIDHLCRIIEKKHVSLNKAKKRRLPRGFPPSASLCLLDLVKWLLAHCGRPQTECRHKSIELFYKFVPLLPGNRSPNLWLKDVLKEEGVSFLINTFEGGGCGQPSGILAQPTLLYRGPFSLQATLCWLDLLLAALECYNTFIGERTVGALQVLGTEAQSSLLKAVAFFLESIAMHDIIAAEKCFGTGAAGNRTSPQEGERYNYSKCTVVVRIMEFTTTLLNTSPEGWKLLKKDLCNTHLMRVLVQTLCEPASIGFNIGDVQVMAHLPDVCVNLMKALKMSPYKDILETHLREKITAQSIEELCAVNLYGPDAQVDRSRLAAVVSACKQLHRAGLLHNILPSQSTDLHHSVGTELLSLVYKGIAPGDERQCLPSLDLSCKQLASGLLELAFAFGGLCERLVSLLLNPAVLSTASLGSSQGSVIHFSHGEYFYSLFSETINTELLKNLDLAVLELMQSSVDNTKMVSAVLNGMLDQSFRERANQKHQGLKLATTILQHWKKCDSWWAKDSPLETKMAVLALLAKILQIDSSVSFNTSHGSFPEVFTTYISLLADTKLDLHLKGQAVTLLPFFTSLTGGSLEELRRVLEQLIVAHFPMQSREFPPGTPRFNNYVDCMKKFLDALELSQSPMLLELMTEVLCREQQHVMEELFQSSFRRIARRGSCVTQVGLLESVYEMFRKDDPRLSFTRQSFVDRSLLTLLWHCSLDALREFFSTIVVDAIDVLKSRFTKLNESTFDTQITKKMGYYKILDVMYSRLPKDDVHAKESKINQVFHGSCITEGNELTKTLIKLCYDAFTENMAGENQLLERRRLYHCAAYNCAISVICCVFNELKFYQGFLFSEKPEKNLLIFENLIDLKRRYNFPVEVEVPMERKKKYIEIRKEAREAANGDSDGPSYMSSLSYLADSTLSEEMSQFDFSTGVQSYSYSSQDPRPATGRFRRREQRDPTVHDDVLELEMDELNRHECMAPLTALVKHMHRSLGPPQGEEDSVPRDLPSWMKFLHGKLGNPIVPLNIRLFLAKLVINTEEVFRPYAKHWLSPLLQLAASENNGGEGIHYMVVEIVATILSWTGLATPTGVPKDEVLANRLLNFLMKHVFHPKRAVFRHNLEIIKTLVECWKDCLSIPYRLIFEKFSGKDPNSKDNSVGIQLLGIVMANDLPPYDPQCGIQSSEYFQALVNNMSFVRYKEVYAAAAEVLGLILRYVMERKNILEESLCELVAKQLKQHQNTMEDKFIVCLNKVTKSFPPLADRFMNAVFFLLPKFHGVLKTLCLEVVLCRVEGMTELYFQLKSKDFVQVMRHRDDERQKVCLDIIYKMMPKLKPVELRELLNPVVEFVSHPSTTCREQMYNILMWIHDNYRDPESETDNDSQEIFKLAKDVLIQGLIDENPGLQLIIRNFWSHETRLPSNTLDRLLALNSLYSPKIEVHFLSLATNFLLEMTSMSPDYPNPMFEHPLSECEFQEYTIDSDWRFRSTVLTPMFVETQASQGTLQTRTQEGSLSARWPVAGQIRATQQQHDFTLTQTADGRSSFDWLTGSSTDPLVDHTSPSSDSLLFAHKRSERLQRAPLKSVGPDFGKKRLGLPGDEVDNKVKGAAGRTDLLRLRRRFMRDQEKLSLMYARKGVAEQKREKEIKSELKMKQDAQVVLYRSYRHGDLPDIQIKHSSLITPLQAVAQRDPIIAKQLFSSLFSGILKEMDKFKTLSEKNNITQKLLQDFNRFLNTTFSFFPPFVSCIQDISCQHAALLSLDPAAVSAGCLASLQQPVGIRLLEEALLRLLPAELPAKRVRGKARLPPDVLRWVELAKLYRSIGEYDVLRGIFTSEIGTKQITQSALLAEARSDYSEAAKQYDEALNKQDWVDGEPTEAEKDFWELASLDCYNHLAEWKSLEYCSTASIDSENPPDLNKIWSEPFYQETYLPYMIRSKLKLLLQGEADQSLLTFIDKAMHGELQKAILELHYSQELSLLYLLQDDVDRAKYYIQNGIQSFMQNYSSIDVLLHQSRLTKLQSVQALTEIQEFISFISKQGNLSSQVPLKRLLNTWTNRYPDAKMDPMNIWDDIITNRCFFLSKIEEKLTPLPEDNSMNVDQDGDPSDRMEVQEQEEDISSLIRSCKFSMKMKMIDSARKQNNFSLAMKLLKELHKESKTRDDWLVSWVQSYCRLSHCRSRSQGCSEQVLTVLKTVSLLDENNVSSYLSKNILAFRDQNILLGTTYRIIANALSSEPACLAEIEEDKARRILELSGSSSEDSEKVIAGLYQRAFQHLSEAVQAAEEEAQPPSWSCGPAAGVIDAYMTLADFCDQQLRKEEENASVIDSAELQAYPALVVEKMLKALKLNSNEARLKFPRLLQIIERYPEETLSLMTKEISSVPCWQFISWISHMVALLDKDQAVAVQHSVEEITDNYPQAIVYPFIISSESYSFKDTSTGHKNKEFVARIKSKLDQGGVIQDFINALDQLSNPELLFKDWSNDVRAELAKTPVNKKNIEKMYERMYAALGDPKAPGLGAFRRKFIQTFGKEFDKHFGKGGSKLLRMKLSDFNDITNMLLLKMNKDSKPPGNLKECSPWMSDFKVEFLRNELEIPGQYDGRGKPLPEYHVRIAGFDERVTVMASLRRPKRIIIRGHDEREHPFLVKGGEDLRQDQRVEQLFQVMNGILAQDSACSQRALQLRTYSVVPMTSRLGLIEWLENTVTLKDLLLNTMSQEEKAAYLSDPRAPPCEYKDWLTKMSGKHDVGAYMLMYKGANRTETVTSFRKRESKVPADLLKRAFVRMSTSPEAFLALRSHFASSHALICISHWILGIGDRHLNNFMVAMETGGVIGIDFGHAFGSATQFLPVPELMPFRLTRQFINLMLPMKETGLMYSIMVHALRAFRSDPGLLTNTMDVFVKEPSFDWKNFEQKMLKKGGSWIQEINVAEKNWYPRQKICYAKRKLAGANPAVITCDELLLGHEKAPAFRDYVAVARGSKDHNIRAQEPESGLSEETQVKCLMDQATDPNILGRTWEGWEPWM

SEQ ID NO: 168939 - DNA, 12384 bp, Artificial Sequence
  derived and/or modified sequence
atggccggcagcggcgccggcgtgagatgcagcctgctgagactgcaggagaccctgagcgccgccgacagatgcggcgccgccctggccggccaccagctgatcagaggcctgggccaggagtgcgtgctgagcagcagccccgccgtgctggccctgcagaccagcctggtgttcagcagagacttcggcctgctggtgttcgtgagaaagagcctgaacagcatcgagttcagagagtgcagagaggagatcctgaagttcctgtgcatcttcctggagaagatgggccagaagatcgccccctacagcgtggagatcaagaacacctgcaccagcgtgtacaccaaggacagagccgccaagtgcaagatccccgccctggacctgctgatcaagctgctgcagaccttcagaagcagcagactgatggacgagttcaagatcggcgagctgttcagcaagttctacggcgagctggccctgaagaagaagatccccgacaccgtgctggagaaggtgtacgagctgctgggcctgctgggcgaggtgcaccccagcgagatgatcaacaacgccgagaacctgttcagagccttcctgggcgagctgaagacccagatgaccagcgccgtgagagagcccaagctgcccgtgctggccggctgcctgaagggcctgagcagcctgctgtgcaacttcaccaagagcatggaggaggacccccagaccagcagagagatcttcaacttcgtgctgaaggccatcagaccccagatcgacctgaagagatacgccgtgcccagcgccggcctgagactgttcgccctgcacgccagccagttcagcacctgcctgctggacaactacgtgagcctgttcgaggtgctgctgaagtggtgcgcccacaccaacgtggagctgaagaaggccgccctgagcgccctggagagcttcctgaagcaggtgagcaacatggtggccaagaacgccgagatgcacaagaacaagctgcagtacttcatggagcagttctacggcatcatcagaaacgtggacagcaacaacaaggagctgagcatcgccatcagaggctacggcctgttcgccggcccctgcaaggtgatcaacgccaaggacgtggacttcatgtacgtggagctgatccagagatgcaagcagatgttcctgacccagaccgacaccggcgacgacagagtgtaccagatgcccagcttcctgcagagcgtggccagcgtgctgctgtacctggacaccgtgcccgaggtgtacacccccgtgctggagcacctggtggtgatgcagatcgacagcttcccccagtacagccccaagatgcagctggtgtgctgcagagccatcgtgaaggtgttcctggccctggccgccaagggccccgtgctgagaaactgcatcagcaccgtggtgcaccagggcctgatcagaatctgcagcaagcccgtggtgctgcccaagggccccgagagcgagagcgaggaccacagagccagcggcgaggtgagaaccggcaagtggaaggtgcccacctacaaggactacgtggacctgttcagacacctgctgagcagcgaccagatgatggacagcatcctggccgacgaggccttcttcagcgtgaacagcagcagcgagagcctgaaccacctgctgtacgacgagttcgtgaagagcgtgctgaagatcgtggagaagctggacctgaccctggagatccagaccgtgggcgagcaggagaacggcgacgaggcccccggcgtgtggatgatccccaccagcgaccccgccgccaacctgcaccccgccaagcccaaggacttcagcgccttcatcaacctggtggagttctgcagagagatcctgcccgagaagcaggccgagttcttcgagccctgggtgtacagcttcagctacgagctgatcctgcagagcaccagactgcccctgatcagcggcttctacaagctgctgagcatcaccgtgagaaacgccaagaagatcaagtacttcgagggcgtgagccccaagagcctgaagcacagccccgaggaccccgagaagtacagctgcttcgccctgttcgtgaagttcggcaaggaggtggccgtgaagatgaagcagtacaaggacgagctgctggccagctgcctgaccttcctgctgagcctgccccacaacatcatcgagctggacgtgagagcctacgtgcccgccctgcagatggccttcaagctgggcctgagctacacccccctggccgaggtgggcctgaacgccctggaggagtggagcatctacatcgacagacacgtgatgcagccctactacaaggacatcctgccctgcctggacggctacctgaagaccagcgccctgagcgacgagaccaagaacaactgggaggtgagcgccctgagcagagccgcccagaagggcttcaacaaggtggtgctgaagcacctgaagaagaccaagaacctgagcagcaacgaggccatcagcctggaggagatcagaatcagagtggtgcagatgctgggcagcctgggcggccagatcaacaagaacctgctgaccgtgaccagcagcgacgagatgatgaagagctacgtggcctgggacagagagaagagactgagcttcgccgtgcccttcagagagatgaagcccgtgatcttcctggacgtgttcctgcccagagtgaccgagctggccctgaccgccagcgacagacagaccaaggtggccgcctgcgagctgctgcacagcatggtgatgttcatgctgggcaaggccacccagatgcccgagggcggccagggcgccccccccatgtaccagctgtacaagagaaccttccccgtgctgctgagactggcctgcgacgtggaccaggtgaccagacagctgtacgagcccctggtgatgcagctgatccactggttcaccaacaacaagaagttcgagagccaggacaccgtggccctgctggaggccatcctggacggcatcgtggaccccgtggacagcaccctgagagacttctgcggcagatgcatcagagagttcctgaagtggagcatcaagcagatcaccccccagcagcaggagaagagccccgtgaacaccaagagcctgttcaagagactgtacagcctggccctgcaccccaacgccttcaagagactgggcgccagcctggccttcaacaacatctacagagagttcagagaggaggagagcctggtggagcagttcgtgttcgaggccctggtgatctacatggagagcctggccctggcccacgccgacgagaagagcctgggcaccatccagcagtgctgcgacgccatcgaccacctgtgcagaatcatcgagaagaagcacgtgagcctgaacaaggccaagaagagaagactgcccagaggcttcccccccagcgccagcctgtgcctgctggacctggtgaagtggctgctggcccactgcggcagaccccagaccgagtgcagacacaagagcatcgagctgttctacaagttcgtgcccctgctgcccggcaacagaagccccaacctgtggctgaaggacgtgctgaaggaggagggcgtgagcttcctgatcaacaccttcgagggcggcggctgcggccagcccagcggcatcctggcccagcccaccctgctgtacagaggccccttcagcctgcaggccaccctgtgctggctggacctgctgctggccgccctggagtgctacaacaccttcatcggcgagagaaccgtgggcgccctgcaggtgctgggcaccgaggcccagagcagcctgctgaaggccgtggccttcttcctggagagcatcgccatgcacgacatcatcgccgccgagaagtgcttcggcaccggcgccgccggcaacagaaccagcccccaggagggcgagagatacaactacagcaagtgcaccgtggtggtgagaatcatggagttcaccaccaccctgctgaacaccagccccgagggctggaagctgctgaagaaggacctgtgcaacacccacctgatgagagtgctggtgcagaccctgtgcgagcccgccagcatcggcttcaacatcggcgacgtgcaggtgatggcccacctgcccgacgtgtgcgtgaacctgatgaaggccctgaagatgagcccctacaaggacatcctggagacccacctgagagagaagatcaccgcccagagcatcgaggagctgtgcgccgtgaacctgtacggccccgacgcccaggtggacagaagcagactggccgccgtggtgagcgcctgcaagcagctgcacagagccggcctgctgcacaacatcctgcccagccagagcaccgacctgcaccacagcgtgggcaccgagctgctgagcctggtgtacaagggcatcgcccccggcgacgagagacagtgcctgcccagcctggacctgagctgcaagcagctggccagcggcctgctggagctggccttcgccttcggcggcctgtgcgagagactggtgagcctgctgctgaaccccgccgtgctgagcaccgccagcctgggcagcagccagggcagcgtgatccacttcagccacggcgagtacttctacagcctgttcagcgagaccatcaacaccgagctgctgaagaacctggacctggccgtgctggagctgatgcagagcagcgtggacaacaccaagatggtgagcgccgtgctgaacggcatgctggaccagagcttcagagagagagccaaccagaagcaccagggcctgaagctggccaccaccatcctgcagcactggaagaagtgcgacagctggtgggccaaggacagccccctggagaccaagatggccgtgctggccctgctggccaagatcctgcagatcgacagcagcgtgagcttcaacaccagccacggcagcttccccgaggtgttcaccacctacatcagcctgctggccgacaccaagctggacctgcacctgaagggccaggccgtgaccctgctgcccttcttcaccagcctgaccggcggcagcctggaggagctgagaagagtgctggagcagctgatcgtggcccacttccccatgcagagcagagagttcccccccggcacccccagattcaacaactacgtggactgcatgaagaagttcctggacgccctggagctgagccagagccccatgctgctggagctgatgaccgaggtgctgtgcagagagcagcagcacgtgatggaggagctgttccagagcagcttcagaagaatcgccagaagaggcagctgcgtgacccaggtgggcctgctggagagcgtgtacgagatgttcagaaaggacgaccccagactgagcttcaccagacagagcttcgtggacagaagcctgctgaccctgctgtggcactgcagcctggacgccctgagagagttcttcagcaccatcgtggtggacgccatcgacgtgctgaagagcagattcaccaagctgaacgagagcaccttcgacacccagatcaccaagaagatgggctactacaagatcctggacgtgatgtacagcagactgcccaaggacgacgtgcacgccaaggagagcaagatcaaccaggtgttccacggcagctgcatcaccgagggcaacgagctgaccaagaccctgatcaagctgtgctacgacgccttcaccgagaacatggccggcgagaaccagctgctggagagaagaagactgtaccactgcgccgcctacaactgcgccatcagcgtgatctgctgcgtgttcaacgagctgaagttctaccagggcttcctgttcagcgagaagcccgagaagaacctgctgatcttcgagaacctgatcgacctgaagagaagatacaacttccccgtggaggtggaggtgcccatggagagaaagaagaagtacatcgagatcagaaaggaggccagagaggccgccaacggcgacagcgacggccccagctacatgagcagcctgagctacctggccgacagcaccctgagcgaggagatgagccagttcgacttcagcaccggcgtgcagagctacagctacagcagccaggaccccagacccgccaccggcagattcagaagaagagagcagagagaccccaccgtgcacgacgacgtgctggagctggagatggacgagctgaacagacacgagtgcatggcccccctgaccgccctggtgaagcacatgcacagaagcctgggccccccccagggcgaggaggacagcgtgcccagagacctgcccagctggatgaagttcctgcacggcaagctgggcaaccccatcgtgcccctgaacatcagactgttcctggccaagctggtgatcaacaccgaggaggtgttcagaccctacgccaagcactggctgagccccctgctgcagctggccgccagcgagaacaacggcggcgagggcatccactacatggtggtggagatcgtggccaccatcctgagctggaccggcctggccacccccaccggcgtgcccaaggacgaggtgctggccaacagactgctgaacttcctgatgaagcacgtgttccaccccaagagagccgtgttcagacacaacctggagatcatcaagaccctggtggagtgctggaaggactgcctgagcatcccctacagactgatcttcgagaagttcagcggcaaggaccccaacagcaaggacaacagcgtgggcatccagctgctgggcatcgtgatggccaacgacctgcccccctacgacccccagtgcggcatccagagcagcgagtacttccaggccctggtgaacaacatgagcttcgtgagatacaaggaggtgtacgccgccgccgccgaggtgctgggcctgatcctgagatacgtgatggagagaaagaacatcctggaggagagcctgtgcgagctggtggccaagcagctgaagcagcaccagaacaccatggaggacaagttcatcgtgtgcctgaacaaggtgaccaagagcttcccccccctggccgacagattcatgaacgccgtgttcttcctgctgcccaagttccacggcgtgctgaagaccctgtgcctggaggtggtgctgtgcagagtggagggcatgaccgagctgtacttccagctgaagagcaaggacttcgtgcaggtgatgagacacagagacgacgagagacagaaggtgtgcctggacatcatctacaagatgatgcccaagctgaagcccgtggagctgagagagctgctgaaccccgtggtggagttcgtgagccaccccagcaccacctgcagagagcagatgtacaacatcctgatgtggatccacgacaactacagagaccccgagagcgagaccgacaacgacagccaggagatcttcaagctggccaaggacgtgctgatccagggcctgatcgacgagaaccccggcctgcagctgatcatcagaaacttctggagccacgagaccagactgcccagcaacaccctggacagactgctggccctgaacagcctgtacagccccaagatcgaggtgcacttcctgagcctggccaccaacttcctgctggagatgaccagcatgagccccgactaccccaaccccatgttcgagcaccccctgagcgagtgcgagttccaggagtacaccatcgacagcgactggagattcagaagcaccgtgctgacccccatgttcgtggagacccaggccagccagggcaccctgcagaccagaacccaggagggcagcctgagcgccagatggcccgtggccggccagatcagagccacccagcagcagcacgacttcaccctgacccagaccgccgacggcagaagcagcttcgactggctgaccggcagcagcaccgaccccctggtggaccacaccagccccagcagcgacagcctgctgttcgcccacaagagaagcgagagactgcagagagcccccctgaagagcgtgggccccgacttcggcaagaagagactgggcctgcccggcgacgaggtggacaacaaggtgaagggcgccgccggcagaaccgacctgctgagactgagaagaagattcatgagagaccaggagaagctgagcctgatgtacgccagaaagggcgtggccgagcagaagagagagaaggagatcaagagcgagctgaagatgaagcaggacgcccaggtggtgctgtacagaagctacagacacggcgacctgcccgacatccagatcaagcacagcagcctgatcacccccctgcaggccgtggcccagagagaccccatcatcgccaagcagctgttcagcagcctgttcagcggcatcctgaaggagatggacaagttcaagaccctgagcgagaagaacaacatcacccagaagctgctgcaggacttcaacagattcctgaacaccaccttcagcttcttcccccccttcgtgagctgcatccaggacatcagctgccagcacgccgccctgctgagcctggaccccgccgccgtgagcgccggctgcctggccagcctgcagcagcccgtgggcatcagactgctggaggaggccctgctgagactgctgcccgccgagctgcccgccaagagagtgagaggcaaggccagactgccccccgacgtgctgagatgggtggagctggccaagctgtacagaagcatcggcgagtacgacgtgctgagaggcatcttcaccagcgagatcggcaccaagcagatcacccagagcgccctgctggccgaggccagaagcgactacagcgaggccgccaagcagtacgacgaggccctgaacaagcaggactgggtggacggcgagcccaccgaggccgagaaggacttctgggagctggccagcctggactgctacaaccacctggccgagtggaagagcctggagtactgcagcaccgccagcatcgacagcgagaacccccccgacctgaacaagatctggagcgagcccttctaccaggagacctacctgccctacatgatcagaagcaagctgaagctgctgctgcagggcgaggccgaccagagcctgctgaccttcatcgacaaggccatgcacggcgagctgcagaaggccatcctggagctgcactacagccaggagctgagcctgctgtacctgctgcaggacgacgtggacagagccaagtactacatccagaacggcatccagagcttcatgcagaactacagcagcatcgacgtgctgctgcaccagagcagactgaccaagctgcagagcgtgcaggccctgaccgagatccaggagttcatcagcttcatcagcaagcagggcaacctgagcagccaggtgcccctgaagagactgctgaacacctggaccaacagataccccgacgccaagatggaccccatgaacatctgggacgacatcatcaccaacagatgcttcttcctgagcaagatcgaggagaagctgacccccctgcccgaggacaacagcatgaacgtggaccaggacggcgaccccagcgacagaatggaggtgcaggagcaggaggaggacatcagcagcctgatcagaagctgcaagttcagcatgaagatgaagatgatcgacagcgccagaaagcagaacaacttcagcctggccatgaagctgctgaaggagctgcacaaggagagcaagaccagagacgactggctggtgagctgggtgcagagctactgcagactgagccactgcagaagcagaagccagggctgcagcgagcaggtgctgaccgtgctgaagaccgtgagcctgctggacgagaacaacgtgagcagctacctgagcaagaacatcctggccttcagagaccagaacatcctgctgggcaccacctacagaatcatcgccaacgccctgagcagcgagcccgcctgcctggccgagatcgaggaggacaaggccagaagaatcctggagctgagcggcagcagcagcgaggacagcgagaaggtgatcgccggcctgtaccagagagccttccagcacctgagcgaggccgtgcaggccgccgaggaggaggcccagccccccagctggagctgcggccccgccgccggcgtgatcgacgcctacatgaccctggccgacttctgcgaccagcagctgagaaaggaggaggagaacgccagcgtgatcgacagcgccgagctgcaggcctaccccgccctggtggtggagaagatgctgaaggccctgaagctgaacagcaacgaggccagactgaagttccccagactgctgcagatcatcgagagataccccgaggagaccctgagcctgatgaccaaggagatcagcagcgtgccctgctggcagttcatcagctggatcagccacatggtggccctgctggacaaggaccaggccgtggccgtgcagcacagcgtggaggagatcaccgacaactacccccaggccatcgtgtaccccttcatcatcagcagcgagagctacagcttcaaggacaccagcaccggccacaagaacaaggagttcgtggccagaatcaagagcaagctggaccagggcggcgtgatccaggacttcatcaacgccctggaccagctgagcaaccccgagctgctgttcaaggactggagcaacgacgtgagagccgagctggccaagacccccgtgaacaagaagaacatcgagaagatgtacgagagaatgtacgccgccctgggcgaccccaaggcccccggcctgggcgccttcagaagaaagttcatccagaccttcggcaaggagttcgacaagcacttcggcaagggcggcagcaagctgctgagaatgaagctgagcgacttcaacgacatcaccaacatgctgctgctgaagatgaacaaggacagcaagccccccggcaacctgaaggagtgcagcccctggatgagcgacttcaaggtggagttcctgagaaacgagctggagatccccggccagtacgacggcagaggcaagcccctgcccgagtaccacgtgagaatcgccggcttcgacgagagagtgaccgtgatggccagcctgagaagacccaagagaatcatcatcagaggccacgacgagagagagcaccccttcctggtgaagggcggcgaggacctgagacaggaccagagagtggagcagctgttccaggtgatgaacggcatcctggcccaggacagcgcctgcagccagagagccctgcagctgagaacctacagcgtggtgcccatgaccagcagactgggcctgatcgagtggctggagaacaccgtgaccctgaaggacctgctgctgaacaccatgagccaggaggagaaggccgcctacctgagcgaccccagagcccccccctgcgagtacaaggactggctgaccaagatgagcggcaagcacgacgtgggcgcctacatgctgatgtacaagggcgccaacagaaccgagaccgtgaccagcttcagaaagagagagagcaaggtgcccgccgacctgctgaagagagccttcgtgagaatgagcaccagccccgaggccttcctggccctgagaagccacttcgccagcagccacgccctgatctgcatcagccactggatcctgggcatcggcgacagacacctgaacaacttcatggtggccatggagaccggcggcgtgatcggcatcgacttcggccacgccttcggcagcgccacccagttcctgcccgtgcccgagctgatgcccttcagactgaccagacagttcatcaacctgatgctgcccatgaaggagaccggcctgatgtacagcatcatggtgcacgccctgagagccttcagaagcgaccccggcctgctgaccaacaccatggacgtgttcgtgaaggagcccagcttcgactggaagaacttcgagcagaagatgctgaagaagggcggcagctggatccaggagatcaacgtggccgagaagaactggtaccccagacagaagatctgctacgccaagagaaagctggccggcgccaaccccgccgtgatcacctgcgacgagctgctgctgggccacgagaaggcccccgccttcagagactacgtggccgtggccagaggcagcaaggaccacaacatcagagcccaggagcccgagagcggcctgagcgaggagacccaggtgaagtgcctgatggaccaggccaccgaccccaacatcctgggcagaacctgggagggctgggagccctggatgtag

SEQ ID NO: 168940 - DNA, 12384 bp, Artificial Sequence
  derived and/or modified sequence
atggctggctcaggagcaggcgtccgatgctctctcctcagactgcaggagactctcagtgctgcagaccgctgcggcgcggccctggcggggcaccagttaatccggggcctgggccaggaatgcgttctttctagcagccccgcagtcttagcccttcagacatctctcgtgttttcccgcgacttcgggttactcgtgtttgtgcgtaaatcgttgaactctatcgaattccgagaatgccgagaggagatcctaaagtttctgtgtatctttcttgagaagatgggtcagaaaattgcaccatacagtgtcgagatcaaaaatacttgtacatcagtttataccaaggatagggcggccaagtgcaagattcccgccctcgatttactgattaaactgctgcagacgttcagatcctccagactgatggatgagttcaaaatcggtgagctgttctctaagttttacggcgaactcgctctaaaaaaaaagatccccgataccgttctggaaaaagtctatgaactgttgggtctgctcggggaggtccatcctagtgagatgattaacaatgctgagaacctcttcagggcctttctgggcgagctgaaaacccagatgacctccgctgtgcgtgaaccaaaactgcctgtcctcgccgggtgtctgaagggcctatcttctctactctgtaactttaccaagagcatggaggaggacccccaaacgtccagggaaattttcaattttgtgctgaaagccatcagaccacaaatcgatctcaagaggtatgccgtgccttccgcaggtttacgcctgttcgccctgcacgcttcgcagttcagcacctgcctgctggacaactacgtcagtctttttgaggtgctgctaaagtggtgcgcccatactaatgttgagttaaaaaaggcggccctgtctgccctggaatccttcttgaaacaggtatctaacatggttgcaaagaatgccgagatgcataagaataaactccaatactttatggagcaattttacggaattatccggaacgttgacagtaataacaaagaattgtctattgctatacgaggctacggtctgtttgcaggtccctgcaaggtcattaatgccaaggatgtggactttatgtacgtggagctgatacagcggtgcaagcagatgtttctgacacagaccgacacaggcgacgatagggtttaccagatgccaagctttttacagtccgtcgcttcagtactgctgtatctcgataccgtccccgaggtgtatacgcccgtcctggaacatttagtcgttatgcagattgattccttcccccaatactctcctaagatgcagctggtgtgctgcagggctatcgttaaagtgtttctcgctttggccgctaagggccccgtgctaagaaattgtatctccacggtagtgcaccagggattaatacgtatttgctcaaaaccagtggtcctgcccaaaggtcccgaaagcgaatctgaagatcacagagcgtccggtgaggtacgaacgggaaaatggaaggttccaacttacaaggattacgtggatctgtttaggcatctgctctcttccgaccagatgatggattcaatccttgccgacgaggcctttttcagtgtgaactctagctccgagtcactgaatcacctactttacgatgaattcgtcaagtccgtccttaaaatagtcgaaaaactggatttgaccctggagattcagacagtcggggagcaggagaatggtgatgaagcgccaggggtgtggatgatcccaacaagtgaccccgctgctaacctgcatcctgcgaagcctaaggatttcagcgcgtttatcaatctcgttgagttttgcagggaaatactgcccgaaaaacaagctgaatttttcgagccctgggtgtatagcttctcttacgaattgatactccagagcacacgcctaccgctgatttccggattctataaactcctgtcaattactgttcggaatgcaaagaagatcaaatattttgaaggggtctcccctaaatccctcaaacattcccccgaggaccccgaaaagtacagctgttttgcgttatttgttaaatttggcaaagaggttgctgttaagatgaaacagtacaaggatgaactcctagctagttgtctgacattcctcttgtcattgccccacaatattattgagctcgatgtcagagcctatgtgcctgctctgcagatggcttttaagctgggcctctcatacaccccactggctgaggtcggcttgaacgcgctagaggagtggagcatctacattgaccgtcacgtgatgcagccatactacaaggatatcctcccatgcctggacggctacctcaaaacatctgcactgtccgatgagacaaagaataattgggaagttagcgctctgagccgagcagcccagaagggattcaataaggttgtcctgaaacacttgaaaaagacgaagaacctatcctcaaatgaggctatatcactggaagagatccgaatccgcgtggttcagatgctgggttctttgggcgggcagatcaacaagaatttattaaccgttacctcaagcgatgagatgatgaaaagctacgtagcttgggacagggagaaacgactgtccttcgctgtgccttttcgcgaaatgaagcccgtcattttccttgatgtattcttaccacgtgttacggagcttgccctgactgccagtgaccgtcagactaaagtggcagcctgcgagttgctacacagtatggtgatgtttatgttgggaaaagctacccaaatgccggagggggggcagggagcaccaccaatgtaccagctttacaaaaggactttccccgttttactgagactggcatgtgatgtcgatcaagtaacccggcagctatatgaacctctcgtgatgcaactgatacactggtttactaataacaagaagttcgagagtcaggatactgtcgccttgctggaggcaattctagacgggattgtggaccccgttgattctaccttacgtgatttctgcggcagatgcatacgagagttcttgaaatggtccatcaagcagattacccctcagcagcaggagaagtccccagtcaatacgaaaagtctgttcaaacggctgtactctcttgcccttcatccgaatgccttcaagaggctcggggcctcccttgccttcaacaacatttaccgtgagtttagagaggaggaatccctggtcgagcaattcgtatttgaagcattagtcatttacatggagtccttagcactggctcacgctgatgaaaagtccttaggcaccatccagcagtgttgcgatgcaatcgaccatctctgcagaataatcgagaaaaaacacgtgtcactgaataaagccaaaaagcggcggcttccgcggggatttcccccgtctgcttcactctgtctgttagacctcgtcaagtggttactcgcccattgcggaaggcctcaaaccgagtgccggcataagtctattgagcttttttacaaattcgtgcctctgctgccaggtaaccgatcccctaatctctggctgaaggacgtgcttaaagaggagggagtgagctttttaattaacacttttgaaggcggggggtgcggacagccctcaggaatactggcccagccgacgctcctgtacagaggtccattcagcctccaggccacactgtgctggctggaccttctcctcgcagcccttgagtgttataacacattcataggagaaaggactgttggcgctttacaggtcctggggactgaggcgcagagtagcctgctgaaggcagtggccttcttcctggagagtatcgccatgcacgacatcatagcggccgaaaagtgttttggtaccggagctgctggaaaccgaaccagcccacaggagggcgaacgctataattactcaaagtgtactgtggttgtgaggattatggagtttaccaccacattactcaacacatcgcctgaagggtggaaattgctgaagaaggacttgtgtaacacccacctgatgagagtgttagttcagaccctatgcgagccagcctccatcggtttcaacatcggagatgtacaagtgatggcacacctgccggatgtgtgtgtaaacctaatgaaggcactgaagatgtcgccatacaaagacattctggaaacccatctgcgcgaaaaaataacagcgcagagcattgaggaactttgcgcggtgaatctctacggcccagatgctcaggtggatcggtcgagacttgctgcagtggtctctgcctgcaagcagctgcaccgcgccgggctactacataacatccttccatctcaaagcactgacctgcaccatagcgtgggaacggagctgttgagtttggtttacaagggtatcgcccctggagacgaaaggcagtgcctgccgtcattggatctgtcttgtaagcagctggcatctgggctgctcgagttggcctttgcattcggaggcctctgtgagcgactggtatctctcttgctgaatccagccgtgctatccaccgcgagcctaggcagttcacaaggatccgtgattcatttttctcacggtgaatacttttacagtttgttcagtgaaaccatcaacacagaattgctgaagaatttagacctcgctgtcctggaactgatgcagtcgtctgtagacaacaccaaaatggtctcagccgttctgaatgggatgctggatcaaagctttagggaacgagcgaaccagaagcaccagggcttaaagctagccacaacgattctccagcattggaaaaaatgcgattcctggtgggccaaggattcgccgcttgagactaaaatggcagttctggcactgttggcgaaaatcttgcaaattgattctagcgttagcttcaatacctcacacggcagcttcccagaggtgttcaccacttacataagtctgctggctgatacaaaactggatctccacctgaaaggacaggcagtcaccctcctgccgtttttcacaagcctgacagggggatctctcgaggaactgaggcgagtcctggaacagctcatagtggctcacttcccaatgcagagtcgggaatttccacccggcaccccaaggttcaataactatgtggactgtatgaagaaattccttgacgcactcgagctgtcgcaaagtcctatgctactcgagttaatgacagaggtgttgtgtcgggagcagcagcacgtcatggaggagctcttccaatcttctttcaggaggatcgcgcggcgggggtcttgtgtgacacaggtggggctgctggagagcgtttacgaaatgttccgcaaagatgaccctcgattatctttcacgaggcagtctttcgttgataggagcttgctgacactgctgtggcactgcagtctagatgcactccgcgagttcttcagcactattgttgtggacgcaattgacgtgttgaaaagtcgcttcactaaattaaatgagtcaacgtttgacacccagatcacaaagaagatgggttactacaaaattctggacgttatgtattctcgcttgcctaaggatgacgtgcacgctaaagaatcaaaaatcaaccaggtgttccacggcagctgcattacagaaggtaacgagttaactaagacattaatcaagctgtgttacgacgccttcacagaaaatatggcgggagaaaatcagctgcttgaacgtcgtaggctgtaccactgcgccgcttacaattgcgcaattagcgtgatttgttgcgtgttcaacgaattgaagttctaccagggcttcttattctcggaaaagccagaaaagaatctgctgatatttgagaatctaatcgatctgaaacgcaggtacaatttccccgtggaggtggaagtgcccatggagcgaaaaaagaaatatatagagatcagaaaagaggctagagaggctgccaatggcgactccgacggaccttcttatatgtcgtctctctcctacctcgcggactcgacactgtcagaagagatgtcacagtttgatttttcaacgggtgtccagagttacagttatagctcgcaggatcctaggcctgccacaggaagatttagaaggcgagagcagagagatcccactgtgcatgacgatgtgctcgagctggaaatggatgagctcaataggcacgagtgcatggccccactgactgccctggtcaagcacatgcacagaagcttaggtccccctcaaggtgaggaggactctgttccccgagacctgccatcctggatgaagtttttgcacgggaagctggggaaccctatagtgccactcaacatccggctttttcttgcgaaactggtgatcaatacggaagaagtcttccgtccatacgctaaacattggctgagcccccttttgcagctcgccgcatccgagaataacggcggcgagggtatccactacatggttgtcgaaattgtcgctaccattctgagttggaccggactcgctactcctacaggtgtgcccaaagacgaggtgctggccaaccgactcctgaacttcctcatgaaacacgtctttcaccctaagagggccgtgttccgccacaacctcgagatcattaaaaccctggtggagtgctggaaggactgtctctccatcccatacagattaatcttcgagaaattctctggtaaggatccaaatagtaaggacaactccgtcggaattcaactgttaggaattgtgatggccaacgatctgcccccctacgacccccagtgcggaattcagtccagcgaatatttccaagccttggttaacaatatgtcctttgtgagatataaggaagtatatgcagcggctgccgaagtgctgggcttaattcttcggtacgtcatggagaggaagaatattctggaagaatcactctgtgagcttgtcgcaaagcaactcaagcagcatcaaaacacaatggaggacaagttcatcgtctgtctgaataaggtcacgaagtccttcccaccactcgccgaccgcttcatgaatgccgtgttttttctgcttcccaagtttcatggggtactgaagacactctgcctggaagtggttctatgccgcgtagaaggaatgaccgaactgtattttcagctcaaatccaaagattttgtacaggtgatgcggcacagagacgatgagaggcagaaagtgtgccttgatatcatctataaaatgatgcctaagctgaagcctgttgagctccgggagctgctaaatcccgtggtggaatttgttagtcaccccagtaccacgtgtagggaacagatgtataacattctgatgtggatacacgacaattaccgcgaccccgaatcagaaacggataatgatagccaagaaatctttaagctggccaaagatgtgctgatccagggcttgattgacgagaatcccggcctccagctaattatacgcaatttctggtcacatgaaacaagattgccttccaatactctcgatcgcctgttggccctgaatagcctgtacagccctaagatcgaagtccatttcctgtccctggctacaaatttcctgctggagatgacttcaatgtctcctgattatcctaaccccatgttcgagcacccactgagtgagtgcgagtttcaagagtacacgattgattccgactggaggttccggagtaccgttttgaccccgatgttcgtggagacccaggcctcccaaggcactctccaaactagaactcaggagggcagcctgtcggcccggtggcccgtggcaggacagatcagggcaactcaacagcaacatgattttacccttacacagacagccgacggcagatcatcctttgactggctgaccggatccagcacagaccccctggtggaccataccagtccatccagcgacagtctcttgtttgcacacaagcgctcagagagactgcaaagggcccctctgaagagcgttggtcccgattttggcaagaagcgactgggactgccgggagacgaggtagacaataaggtgaaaggcgcggcaggccgaacagacctgctgcgcctgcgtcgaaggttcatgcgggatcaggagaaactctctttaatgtacgcccgaaagggagtggccgagcagaaaagagagaaagagatcaaaagcgagcttaagatgaagcaggacgcccaggtggtgctctataggtcgtatcggcacggtgatctgccagacattcagatcaagcactccagccttataactccactgcaggcggtggcccagcgcgatccaattattgccaaacagttgttcagttccctgttctcgggaatcctgaaagaaatggacaagtttaaaaccctgtctgagaagaataacattacacagaagttgttacaggattttaatcgttttctcaacaccactttctctttttttccaccgtttgtttcatgcatacaggacatttcctgtcagcacgcagccctactgagtctggaccccgccgcagtcagcgctggctgcctggcctcactgcagcagcccgtgggaatccgattactcgaggaagctttgctgcgcttgctgcctgccgaactaccagcgaagcgagtgcgtgggaaagcacgactgccacctgatgtactgcgctgggtcgaactagccaaactgtatcgaagtattggggaatatgacgtactaagaggtatcttcaccagcgaaatcggtactaaacagatcacgcagagtgccttgctggcagaggctagatccgactattccgaggcggcgaagcagtacgacgaagccctgaacaagcaggattgggttgacggcgaaccaacagaggctgaaaaggatttctgggaactcgctagtcttgattgctacaaccatctcgccgagtggaaatctctggaatactgctccacagcgtccattgacagcgaaaaccctcctgacctgaataaaatctggagtgagccattctaccaggagacatacctcccttacatgatacgtagtaaactcaaacttctactgcaaggtgaggcagaccagagtctgcttaccttcattgacaaggcaatgcatggcgagcttcaaaaggctatcttagaattgcattattctcaggagctctcgctgctgtacctgctccaggatgatgttgaccgcgccaaatattacattcagaacggcattcagtcttttatgcagaactattcctctattgacgttctgctacatcagtctaggctgaccaaactgcagagcgttcaggctcttaccgaaatacaggagttcatcagttttatttcaaagcaggggaatctgtccagccaagtgcctcttaagcgactcttgaatacctggaccaaccgttaccccgacgcgaagatggaccccatgaatatatgggacgatataatcacaaaccggtgtttctttctatcaaagattgaggaaaagttgaccccactccctgaggataatagcatgaacgtagatcaggacggcgacccctccgatagaatggaggtccaggagcaagaagaagacattagcagtctcattcggagctgcaagttctcgatgaagatgaaaatgatcgattctgctagaaaacagaataattttagccttgcaatgaaactcttgaaagagctgcacaaagaatctaagacgcgggacgattggctggtttcttgggttcaatcatactgtcggctttcgcactgccgcagtcggtcacagggctgtagcgaacaggtcctgaccgtcttaaaaaccgtttcccttctggacgaaaacaatgtgtcttcctatctcagtaaaaatatactcgcctttagagatcaaaatattctcttgggcaccacatatagaattattgctaacgcacttagcagcgagcctgcctgcctggcagaaattgaggaggacaaagcgcgacgcatcctggagctgtcggggagtagctccgaagattccgaaaaagttatagccgggctataccagcgcgcctttcagcacctctccgaggcagtacaggcagctgaagaggaggcccaaccaccgtcttggagctgcggacctgccgccggcgtcatagatgcttacatgaccctggcagacttttgtgaccagcagttgaggaaagaggaggaaaacgcgtctgttattgattctgcagaacttcaggcgtatcctgccctcgtcgttgaaaagatgctaaaagctctgaaactgaattccaatgaggcacgccttaagttccctaggttgctgcaaatcattgagaggtaccctgaggagaccctgtcattaatgacaaaggagataagctcagtaccttgctggcagttcattagctggataagtcacatggtcgccctgctggataaggatcaggctgtggccgtccaacactccgtcgaagagattaccgacaactacccccaagccatcgtatacccctttatcatcagcagcgaaagttactcttttaaggatacctctaccgggcataagaataaagagttcgtagcccggatcaagtctaagcttgatcaaggcggggtaatccaggactttatcaacgctctcgatcagcttagcaatccagaactgctgttcaaggattggtcaaacgacgtgcgggcagaactggccaaaacccctgtaaacaagaagaatatagaaaagatgtacgaaagaatgtatgccgccctaggtgacccaaaggcccccggactgggtgcttttagaagaaagttcattcagacgttcggcaaagagttcgataagcactttggaaaaggcggtagcaaattactgcgcatgaaactctcagactttaatgatatcaccaatatgctgctgctgaagatgaacaaggactcaaagcccccggggaacctgaaggagtgctccccttggatgagcgacttcaaggttgagtttctgcgtaacgaactggagattcccggccagtacgatggcaggggtaagccgttgcctgagtatcatgttcggatcgcggggtttgacgagcgggtcaccgtgatggcaagcttgagaaggcctaagcggatcataatccggggacatgatgagagggaacatccatttcttgttaaggggggtgaggatctgcggcaggatcagagagtggagcaattattccaggttatgaatggaatactcgcgcaggactctgcctgcagccagcgagccttgcagctgcgcacttatagcgttgtgcccatgaccagtaggctcggattgatcgagtggctggagaacacagttaccctcaaggatctgctgctaaatacgatgtcccaagaggaaaaggcagcttacctgagcgacccaagagcgcccccttgcgaatataaggactggttaacaaaaatgagcggtaagcatgacgtcggcgcttatatgttgatgtacaaaggagccaatcggacagagacagttacttctttccgcaagagggagtcgaaagtgccagccgacctgctcaaacgagcattcgttcgaatgtccacatctcccgaagcattccttgcactcaggtctcacttcgcctcctctcacgcccttatttgcatctctcactggattttaggaattggggaccgtcacctgaataattttatggtggcgatggagactggcggcgtgattgggatagatttcggccatgcatttggcagcgccacacagttcttgcccgtaccagaactgatgcctttcaggctcacaagacagtttattaacctgatgcttccaatgaaggagacgggtctgatgtattccatcatggtgcacgcccttagagcttttcggtccgatccaggccttctcaccaataccatggatgttttcgtgaaagagccctcatttgactggaaaaactttgaacagaaaatgcttaagaaggggggcagctggatacaggagattaacgtggctgagaaaaactggtatccccggcagaaaatttgctacgcaaagcgcaaattagccggagcaaaccccgctgtgattacgtgcgatgaactactgctgggtcacgagaaggccccggcttttagggattacgttgctgtggcgcggggatccaaggatcacaacattcgtgctcaggagcctgagagcggcttgtcagaagagactcaggtgaaatgtcttatggatcaggctaccgatcccaatatactcggtcggacctgggaagggtgggaaccttggatgtag

SEQ ID NO: 168941 - DNA, 12384 bp, Artificial Sequence
  derived and/or modified sequence
atggccggcagcggggccggcgtgcgctgcagcctgctgcggctgcaggagaccctgtctgctgctgacagatgtggggccgccctggccggccaccagctgatccggggcctgggccaggagtgtgtgctgagcagcagccctgctgtgctggccctgcagaccagcctggtgttcagccgggactttggcctgctggtgtttgtgaggaagagcctgaacagcattgagttccgggagtgccgggaggagatcctgaagttcctgtgcatcttcctggagaagatgggccagaagatcgccccctacagcgtggagatcaagaacacctgcacctctgtgtacaccaaggaccgggccgccaagtgcaagatcccagccctggacctgctgatcaagctgctgcagaccttccgcagcagccggctgatggatgagttcaagattggagagctgttcagcaagttctatggagagctggccctgaagaagaagatcccagacacagtgctggagaaggtgtatgagctgctgggcctgctgggggaggtgcaccccagcgagatgatcaacaatgctgagaacctcttccgggccttcctgggggagctgaagacccagatgaccagcgctgtgcgggagcccaagctgcctgtgctggccggctgcctgaagggcctgagcagcctgctgtgcaacttcaccaagtccatggaggaggacccccagaccagccgggagatcttcaactttgtgctgaaggccatccggccccagattgacctgaagagatatgctgtgcccagcgctggcctgcggctgtttgccctgcacgccagccagttcagcacctgcctgctggacaactacgtgtccctgtttgaggtgctgctgaagtggtgtgcccacaccaacgtggagctgaagaaggccgccctgagcgccctggagagcttcctgaagcaggtgagcaacatggtggccaagaatgctgagatgcacaagaacaagctgcagtacttcatggagcagttctacggcatcatcagaaatgtggacagcaacaacaaggagctgagcatcgccatccggggctacggcctgtttgctggcccctgcaaggtgatcaatgccaaggatgtggacttcatgtatgtggagctgatccagcgctgcaagcagatgttcctgacccagacagacacaggagatgacagagtgtaccagatgcccagcttcctgcagagcgtggcctctgtgctgctgtacctggacacagtgcctgaggtgtacacccctgtgctggagcacctggtggtgatgcagattgacagcttcccccagtacagccccaagatgcagctggtgtgctgccgggccatcgtgaaggtgttcctggccctggccgccaagggccctgtgctgaggaactgcatcagcacagtggtgcaccagggcctcatccgcatctgcagcaagcctgtggtgctgcccaagggccctgagagcgagagcgaggaccaccgggccagcggggaggtgaggacaggcaagtggaaggtgcccacctacaaggactatgtggacctcttccgccacctgctgagcagtgaccagatgatggacagcatcctggctgatgaggccttcttctctgtgaacagcagcagcgagagcctgaaccacctgctgtatgatgaatttgtgaagtctgtgctgaagatcgtggagaagctggacctgaccctggagatccagacagtgggggagcaggagaatggagatgaggcccctggggtgtggatgatccccaccagtgaccctgctgccaacctgcacccagccaagcccaaggacttcagcgccttcatcaacctggtggagttctgccgggagatcctgcctgagaagcaggccgagttctttgagccctgggtgtacagcttctcctatgagctgatcctgcagagcacccggctgcccctcatcagcggcttctacaagctgctgagcatcaccgtgagaaatgccaagaagatcaagtactttgaaggagtgagccccaagagcctgaagcacagccctgaggaccctgagaagtacagctgctttgccctgtttgtgaagtttgggaaggaggtggccgtgaagatgaagcagtacaaggatgagctgctggccagctgcctgaccttcctgctgagcctgccccacaacatcatcgagctggatgtgcgggcctacgtgcctgccctgcagatggccttcaagctgggcctgagctacacccccctggccgaggtgggcctgaatgccctggaggagtggagcatctacatcgacagacatgtgatgcagccctactacaaggacatcctgccctgcctggatggctacctgaagaccagcgccctgagtgatgagaccaagaacaactgggaggtgtctgccctgagcagagctgcccagaagggcttcaacaaggtggtgctgaagcacctgaagaagaccaagaacctgagcagcaatgaggccatcagcctggaggagatccgcatccgggtggtgcagatgctgggcagcctgggcggccagatcaacaagaacctgctgactgtgaccagcagtgatgagatgatgaagagctatgtggcctgggaccgggagaagaggctgagctttgctgtgcccttccgggagatgaagcctgtgatcttcctggatgtgttcctgccccgggtgacagagctggccctgacagccagtgaccggcagaccaaggtggccgcctgtgagctgctgcacagcatggtgatgttcatgctgggcaaggccacccagatgcctgagggcggccagggcgccccacccatgtaccagctgtacaagaggaccttccctgtgctgctgcggctggcctgtgatgtggaccaggtgacccggcagctgtatgagcccctggtgatgcagctgatccactggttcaccaacaacaagaagtttgagagccaggacacagtggccctgctggaggccatcctggatggcatcgtggaccctgtggacagcaccctgcgggacttctgtggccgctgcatccgggagttcctgaagtggagcatcaagcagatcaccccccagcagcaggagaagagccctgtgaacaccaagagcctcttcaagaggctgtacagcctggccctgcaccccaatgccttcaagaggctgggcgccagcctggccttcaacaacatctaccgggagttccgggaggaggagagcctggtggagcagtttgtgtttgaggccctggtgatctacatggagagcctggccctggcccacgcagatgagaagagcctgggcaccatccagcagtgctgtgatgccatcgaccacctgtgccgcatcatcgagaagaagcacgtgtccctgaacaaggccaagaagaggcggctgccccggggcttcccccccagcgccagcctgtgcctgctggacctggtgaagtggctgctggcccactgcggccggccccagacagagtgccgccacaagagcattgagctgttctacaagtttgtgcccctgctgcccggcaacagaagccccaacctgtggctgaaggatgtgctgaaggaggagggcgtgtccttcctgatcaacacctttgagggcggcggctgcggccagcccagcggcatcctggcccagcccaccctgctgtaccggggccccttcagcctgcaggccaccctgtgctggctggacctgctgctggccgccctggagtgctacaacaccttcatcggggagaggacagtgggcgccctgcaggtgctgggcacagaggcccagagcagcctgctgaaggctgtggccttcttcctggagagcatcgccatgcatgacatcatcgctgctgagaagtgcttcggcaccggggctgctggcaacagaaccagcccccaggagggggagcgctacaactacagcaaatgtactgtggtggtgcgcatcatggagttcaccaccaccctgctgaacaccagccctgagggctggaagctgctgaagaaggacctgtgcaacacccacctgatgagggtgctggtgcagaccctgtgtgagcccgccagcatcggcttcaacattggagatgtgcaggtgatggcccacctgcctgatgtgtgtgtgaacctgatgaaggccctgaagatgagcccctacaaggacatcctggagacccacctgcgggagaagatcacagcccagagcattgaggagctgtgtgctgtgaacctgtatggcccagatgcccaggtggacaggagccggctggccgctgtggtgtctgcctgcaagcagctgcaccgggccggcctgctgcacaacatcctgcccagccagagcacagacctgcaccacagcgtgggcacagagctgctgagcctggtgtacaagggcatcgcccctggagatgagcggcagtgcctgcccagcctggacctgagctgcaagcagctggccagcggcctgctggagctggcctttgccttcggcggcctgtgtgagcggctggtgtccctgctgctgaacccagctgtgctgagcacagccagcctgggcagcagccagggcagcgtcatccacttcagccacggggagtacttctacagcctcttcagcgagaccatcaacacagagctgctgaagaacctggacctggccgtgctggagctgatgcagagctctgtggacaacaccaagatggtgtctgctgtgctgaatggcatgctggaccagagcttccgggagcgggccaaccagaagcaccagggcctgaagctggccaccaccatcctgcagcactggaagaagtgtgacagctggtgggccaaggacagccccctggagaccaagatggctgtgctggccctgctggccaagatcctgcagattgacagctctgtgtccttcaacaccagccacggcagcttccctgaggtgttcaccacctacatcagcctgctggccgacaccaagctggacctgcacctgaagggccaggccgtgaccctgctgcccttcttcaccagcctgaccggcggcagcctggaggagctgcggcgggtgctggagcagctgattgtggcccacttccccatgcagagccgggagttccccccaggcaccccccgcttcaacaactacgtggactgcatgaagaagttcctggatgccctggagctgagccagagccccatgctgctggagctgatgacagaggtgctgtgccgggagcagcagcacgtgatggaggagctgttccagagcagcttccgccgcatcgcccggcggggcagctgtgtgacccaggtgggcctgctggagagcgtgtatgagatgttcaggaaggatgacccccggctgtccttcacccggcagagctttgtggacaggagcctgctgaccctgctgtggcactgcagcctggatgccctgcgggagttcttcagcaccatcgtggtggatgccattgatgtgctgaagagccgcttcaccaagctgaatgaaagcacctttgacacccagatcaccaagaagatgggctactacaagatcctggatgtgatgtacagccggctgcccaaggatgatgtgcacgccaaggagagcaagatcaaccaggtgttccacggcagctgcatcacagagggcaatgagctgaccaagaccctcatcaagctgtgctatgatgccttcacagagaacatggccggggagaaccagctgctggagcggcggcggctgtaccactgtgccgcctacaactgtgccatcagcgtcatctgctgcgtgttcaatgagctgaagttctaccagggcttcctgttcagcgagaagccagagaagaacctgctgatctttgagaacctgattgacctgaagaggcgctacaacttccctgtggaggtggaggtgcccatggagaggaagaagaagtacatcgagatcaggaaggaggcccgggaggccgccaatggagacagtgatggccccagctacatgagcagcctgagctacctggccgacagcaccctgtctgaggagatgagccagtttgacttcagcactggagtgcagagctacagctacagcagccaggaccccaggcctgccaccggccgcttcagaagaagagagcagagggaccccaccgtgcatgatgatgtgctggagctggagatggatgagctgaacagacatgagtgcatggcccccctgacagccctggtgaagcacatgcacaggagcctgggccccccccagggcgaggaggacagcgtgccccgggacctgcccagctggatgaagttcctgcacggcaagctgggcaaccccatcgtgcccctgaacatccgcctcttcctggccaagctggtgatcaacacagaggaggtgttccggccctatgccaagcactggctgagccccctgctgcagctggccgccagcgagaacaacggcggggagggcatccactacatggtggtggagatcgtggccaccatcctgtcctggacaggcctggccacccccaccggggtgcccaaggatgaggtgctggccaaccggctgctgaacttcctgatgaagcacgtgttccaccccaagagagctgtgttccgccacaacctggagatcatcaagaccctggtggagtgctggaaggactgcctgagcatcccctaccgcctcatctttgagaagttcagcggcaaggaccccaacagcaaggacaacagcgtgggcatccagctgctgggcatcgtgatggccaatgacctgcccccctatgacccccagtgtggcatccagagcagcgagtacttccaggccctggtgaacaacatgagctttgtgcgctacaaggaggtgtatgctgctgctgctgaggtgctgggcctcatcctgcgctacgtgatggagaggaagaacatcctggaggagagcctgtgtgagctggtggccaagcagctgaagcagcaccagaacaccatggaggacaagttcatcgtgtgcctgaacaaggtgaccaagagcttcccccccctggccgaccgcttcatgaatgctgtgttcttcctgctgcccaagttccatggagtgctgaagaccctgtgcctggaggtggtgctgtgccgggtggagggcatgacagagctgtacttccagctgaagagcaaggactttgtgcaggtgatgaggcacagagatgatgagcggcagaaggtgtgcctggacatcatctacaagatgatgcccaagctgaagcctgtggagctgcgggagctgctgaaccctgtggtggagtttgtgagccaccccagcaccacctgccgggagcagatgtacaacatcctgatgtggattcatgacaactacagagatcctgagagcgagacagacaatgacagccaggagatcttcaagctggccaaggatgtgctgatccagggcctgattgatgagaaccctggcctgcagctgatcatccggaacttctggagccatgagacccggctgcccagcaacaccctggaccggctgctggccctgaacagcctgtacagccccaagattgaggtgcacttcctgagcctggccaccaacttcctgctggagatgacctccatgagcccagactaccccaaccccatgtttgagcaccccctgtctgaatgtgagttccaggagtacaccatcgacagcgactggaggttccgcagcacagtgctgacccccatgtttgtggagacccaggccagccagggcaccctgcagaccaggacccaggagggcagcctgagcgcccgctggcctgtggccggccagatccgggccacccagcagcagcacgacttcaccctgacccagacagcagatggccgcagcagctttgactggctgaccggcagcagcacagaccccctggtggaccacaccagccccagcagtgacagcctgctgtttgcccacaagaggtctgagcggctgcagagggcccccctgaagtctgtgggccctgactttgggaagaagaggctgggcctgcctggagatgaggtggacaacaaggtgaagggagctgctggccgcacagacctgctgcggctgcggcggcgcttcatgagggaccaggagaagctgagcctgatgtatgccaggaaaggagtggccgagcagaagcgggagaaggagatcaagtctgagctgaagatgaagcaggatgcccaggtggtgctgtaccgcagctaccgccacggggacctgcctgacatccagatcaagcacagcagcctcatcacccccctgcaggccgtggcccagagggaccccatcatcgccaagcagctgttcagcagcctcttcagcggcatcctgaaggagatggacaagttcaagaccctgtctgagaagaacaacatcacccagaagctgctgcaggacttcaaccgcttcctgaacaccaccttctccttcttccccccatttgtgtcctgcatccaggacatcagctgccagcacgccgccctgctgagcctggaccctgctgctgtgtctgctggctgcctggccagcctgcagcagcctgtgggcatccggctgctggaggaggccctgctgcggctgctgcctgctgagctgcctgccaagagggtgcggggcaaggcccggctgcccccagatgtgctgcgctgggtggagctggccaagctgtaccgcagcatcggggagtatgatgtgctgcggggcatcttcaccagcgagatcggcaccaagcagatcacccagagcgccctgctggccgaggcccggagtgactacagcgaggccgccaagcagtatgatgaggccctgaacaagcaggactgggtggatggagagcccacagaggccgagaaggacttctgggagctggccagcctggactgctacaaccacctggccgagtggaagagcctggagtactgcagcacagccagcattgacagtgaaaatcctccagacctgaacaagatctggagcgagcccttctaccaggagacctacctgccctacatgatccgcagcaagctgaagctgctgctgcagggcgaggccgaccagagcctgctgaccttcatcgacaaggccatgcatggagagctgcagaaggccatcctggagctgcactacagccaggagctgagcctgctgtacctgctgcaggatgatgtggaccgggccaagtactacatccagaatggcatccagagcttcatgcagaactacagcagcattgatgtgctgctgcaccagagccggctgaccaagctgcagagcgtgcaggccctgacagagatccaggagttcatctccttcatcagcaagcagggcaacctgagcagccaggtgcccctgaagaggctgctgaacacctggaccaaccgctacccagatgccaagatggaccccatgaacatctgggatgacatcatcaccaaccgctgcttcttcctgagcaagattgaggagaagctgacccccctgcctgaggacaacagcatgaatgtggaccaggatggagaccccagcgacaggatggaggtgcaggagcaggaggaggacatcagcagcctcatccgcagctgcaagttctccatgaagatgaagatgattgacagcgccaggaagcagaacaacttcagcctggccatgaagctgctgaaggagctgcacaaggagagcaagaccagagatgactggctggtgtcctgggtgcagagctactgccgcctgagccactgccgcagccgcagccagggctgcagcgagcaggtgctgactgtgctgaagacagtgtccctgctggatgagaacaacgtgtcctcctacctgagcaagaacatcctggccttccgggaccagaacatcctgctgggcaccacctaccgcatcatcgccaatgccctgagcagcgagcccgcctgcctggccgagattgaggaggacaaggcccggcgcatcctggagctgagcggcagcagcagtgaagattctgagaaggtgattgctggcctgtaccagagggccttccagcacctgtctgaggccgtgcaggccgctgaggaggaggcccagcccccatcctggagctgtggccctgctgctggggtgattgatgcctacatgaccctggccgacttctgtgaccagcagctgaggaaggaggaggagaatgcctctgtgattgattctgctgagctgcaggcctacccagccctggtggtggagaagatgctgaaggccctgaagctgaacagcaatgaggcccggctgaagttcccccggctgctgcagatcatcgagcgctacccagaggagaccctgagcctgatgaccaaggagatcagctctgtgccctgctggcagttcatctcctggatcagccacatggtggccctgctggacaaggaccaggccgtggccgtgcagcacagcgtggaggagatcacagacaactacccccaggccatcgtgtaccccttcatcatcagcagcgagagctacagcttcaaggacaccagcacaggccacaagaacaaggagtttgtggcccgcatcaagagcaagctggaccagggcggcgtcatccaggacttcatcaatgccctggaccagctgagcaaccctgagctgctcttcaaggactggagcaatgatgtgcgggcagagctggccaagacccctgtgaacaagaagaacatcgagaagatgtatgaaagaatgtatgctgccctgggggaccccaaggcccctggcctgggcgccttccggaggaagttcatccagaccttcggcaaggagtttgacaagcactttggaaaaggaggcagcaagctgctgaggatgaagctgagtgacttcaatgacatcaccaacatgctgctgctgaagatgaacaaggacagcaagcccccaggcaacctgaaggaatgtagcccctggatgtctgacttcaaggtggagttcctgagaaatgagctggagatccctggccagtatgatggccggggcaagcccctgcctgagtaccacgtgagaattgctggctttgatgagcgggtgacagtgatggccagcctgcggcggcccaagaggatcatcatccggggccatgatgagcgggagcaccccttcctggtgaagggaggagaggacctgcggcaggaccagagggtggagcagctgttccaggtgatgaatggcatcctggcccaggacagcgcctgcagccagagggccctgcagctgcggacctacagcgtggtgcccatgaccagccggctgggcctcatcgagtggctggagaacacagtgaccctgaaggacctgctgctgaacaccatgagccaggaggagaaggccgcctacctgagtgacccccgggccccaccctgtgagtacaaggactggctgaccaagatgtctgggaagcatgatgtgggcgcctacatgctgatgtacaagggggccaacagaacagagaccgtgaccagcttcaggaagcgggagagcaaggtgcctgctgacctgctgaagagggcctttgtgaggatgagcaccagccctgaggccttcctggccctgcggagccactttgccagcagccacgccctgatctgcatcagccactggatcctgggcattggagacagacacctgaacaacttcatggtggccatggagactggaggagtgattggaattgactttggacatgcctttggaagtgccacccagttcctgcctgtgcctgagctgatgcccttccggctgacccggcagttcatcaacctgatgctgcccatgaaggagaccggcctgatgtacagcatcatggtgcacgccctgcgggccttcagaagtgaccccggcctgctgaccaacaccatggatgtgtttgtgaaggagcccagctttgactggaagaactttgagcagaagatgctgaagaagggcggctcctggatccaggagatcaacgtggccgagaagaactggtacccccggcagaagatctgctacgccaagaggaagctggccggggccaacccagctgtgatcacctgtgatgagctgctgctgggccacgagaaggccccagccttccgggactatgtggccgtggcccggggcagcaaggaccacaacatccgggcccaggagcctgagagcggcctgtctgaggagacccaggtgaagtgcctgatggaccaggccacagaccccaacatcctgggccgcacctgggagggctgggagccctggatgtag

SEQ ID NO: 168942 - DNA, 12384 bp, Artificial Sequence
  derived and/or modified sequence
atggccggcagcggcgccggcgtgcggtgcagcctgctgcggctgcaggaaaccctgtcggcagcggatagatgcggagctgctctcgcaggccaccagctcattcggggactggggcaagagtgtgtactgtctagtagccccgcagtcctggccctgcagacctctttggtgttttcacgtgatttcggattgctggtcttcgtgaggaagagcctgaactccatcgagttcagggagtgtcgggaggaaattttgaagttcctgtgcatctttttggaaaaaatgggccaaaagatcgccccttattccgtcgaaattaagaatacctgtacttcagtctacaccaaggatcgcgctgctaaatgcaagattccggccctggacctgttgattaagctgctgcaaactttcagatcgtctcggctgatggatgaattcaaaattggagaactgttttctaagttctatggtgagctggcactgaaaaagaaaatccccgacactgtgttggagaaggtgtacgagttactagggctgttgggcgaggtgcatccaagtgagatgattaacaacgcagagaacctgtttcgggcttttctgggcgaactgaagactcagatgaccagcgctgtgcgagaacccaagctgcccgtgctggcaggatgtctgaagggcctgtcttctctcctgtgcaatttcactaagtccatggaggaagacccccagaccagcagggagatcttcaactttgttttaaaggctattcggcctcagattgacttgaaaaggtacgctgtaccatcagccggactccggttgtttgccctgcatgcatcacagttctcgacgtgcctgcttgacaattatgtgtctctttttgaggttctcctgaagtggtgcgcccacacaaacgtagagctaaagaaggctgctctgagtgctttggagagtttccttaagcaagtgagcaatatggtggctaagaacgctgaaatgcacaaaaacaaactgcagtacttcatggagcaattttatggcatcatacggaatgtggatagtaacaataaggaactctcaatcgctatccggggctatggcttatttgccgggccttgtaaggttatcaatgccaaggatgtggatttcatgtatgtggagttgatacagagatgcaaacagatgttcctcacccagactgatactggagatgacagggtttatcagatgcccagcttcttacagtctgtggcttctgtcctgctctacctggacaccgtgcctgaggtctatacccctgtcctggagcatctggtagtgatgcagatagactcgttccctcagtactcaccaaagatgcagctggtgtgttgccgggctatcgtgaaagtgttcctcgctctggcggcaaaaggacccgtgcttaggaactgtatatccaccgtagttcaccaaggtctgattaggatatgttcaaaaccagtggtcttgccaaaaggacccgagtcagagagtgaggaccacagggcctctggcgaagtgcgcaccgggaaatggaaggttcccacctataaagactatgtggaccttttccgtcatctgctgtcttcggaccaaatgatggacagcatcctggcagacgaagcatttttcagtgttaatagcagctccgagagcttgaatcacctgttgtatgatgagttcgtcaagagtgttctaaaaattgttgaaaagttagacctgacacttgagatccaaaccgtcggagagcaggaaaacggcgatgaggcgcccggggtttggatgatccccacctcggaccccgctgctaatctgcatccggctaagcccaaagacttttctgccttcattaatttggtggagttttgcagagaaatcttgccagaaaagcaggctgagttcttcgagccgtgggtgtactctttttcctatgagctcatcctccagtccacccggctcccgctcataagtgggttctataagctcctatcaattacggtgcgaaatgccaagaagataaagtactttgagggggtgtccccaaaatccctgaaacactcacctgaggacccagagaagtactcctgcttcgctttgttcgtcaaatttgggaaagaagtcgcagtgaaaatgaaacagtataaggatgagctgctggcatcttgtttgacattcctgctgtccttacctcataatatcatagagctggacgtgcgtgcatacgtgcccgccctacagatggctttcaaactcggcctctcttataccccgctcgccgaggtgggacttaacgcattggaggaatggtcaatctatattgatagacacgtcatgcagccttattacaaggacatacttccttgtctcgacggctacttaaagacaagcgctctgagcgatgaaactaaaaacaattgggaggtctctgcactctcccgcgcagcacaaaaagggtttaacaaagttgtcctcaaacaccttaagaaaacgaagaatttgtcatccaatgaggcgatctctttggaggaaatccggatccgggtggtccagatgctgggaagtcttggggggcagatcaataagaacctccttactgttacttcttcagatgaaatgatgaaaagttatgttgcctgggatcgcgaaaagcgtttgagcttcgcggtcccttttcgtgagatgaaaccggttatatttctcgatgtcttcctgccgcgggttaccgagctggcccttaccgctagcgacagacagacaaaggtggcagcttgcgagttactgcacagtatggtgatgtttatgctcgggaaagcgacacaaatgccagaagggggacagggagcccctcctatgtaccaactctataagcggacatttcccgttctgcttcgcctcgcctgcgacgtggaccaggttactagacagttgtacgaacctcttgtcatgcagttaatccactggtttactaacaacaaaaaattcgagtcccaggatactgttgccctcctggaggcaattcttgacgggattgtggatcctgtggacagtaccctcagagatttctgcggcaggtgtatcagagaattcctcaagtggagcattaagcagataactccccagcagcaggagaagagccctgtgaatactaagtcccttttcaagcggctgtactcactggccctccaccctaacgcgtttaagcgtctgggcgccagtctggccttcaataacatttacagagagtttcgcgaggaagaaagccttgtcgagcagttcgtattcgaggccctggtcatatacatggaatcacttgcgctcgcccacgccgatgagaagagtttggggacaattcagcagtgctgtgatgccattgatcatctgtgtcggatcattgagaaaaaacatgtctctctcaataaagcaaagaaacgtcggctaccaaggggcttcccaccaagcgccagcttgtgtctccttgacctggtgaaatggcttttggctcattgtggccggccccagacagagtgtcgacataagagcatcgaattgttttacaagttcgtgccgctattgcctgggaaccgctccccaaatctctggctgaaagatgttcttaaggaagaaggagtgagttttttaattaatacttttgagggcggtgggtgcgggcagccgtccggaattttagcccaaccaaccctcctttatcggggccccttcagtttacaagcaacattgtgctggctggatctcttgctcgccgcgttggagtgttacaacacctttataggagagcgaactgtgggtgctctgcaggttctaggcactgaagcccagtcctcgctgctgaaggctgttgcatttttccttgagagtattgcgatgcatgacattattgcggcagagaaatgcttcggcaccggcgccgctggaaatcggacgagcccacaggagggtgaacgatacaactacagtaaatgcacagtcgtggtgcgcatcatggagttcactacaacattactgaatacctcccccgaaggctggaagctactgaaaaaagatctgtgtaacacccacctgatgagagtgctagttcagaccctatgtgaaccagcttctataggcttcaacattggggatgtgcaggtgatggcacatctgcccgacgtatgtgttaacctaatgaaggctctgaagatgtccccatataaggatatcctggaaacccacctgcgcgaaaagattaccgcacagtccatcgaagagttgtgtgccgtgaatctgtacggccccgacgcacaagtggaccgtagccgcttagccgcggtggtgtctgcatgcaagcagctgcaccgtgcgggcttactgcataatattctcccatcccagtctactgatctccaccacagcgtggggacagagctactcagcctggtctataaagggatagcccctggcgacgagagacaatgcctgccaagcctggatctgagctgcaagcagctggcttcaggcctccttgagcttgcttttgccttcggcggcctgtgtgaaaggctagtgtcccttctccttaacccggcagtcctgtcgaccgcctctttagggagctctcagggatccgtaatccatttctcccacggagaatacttttactccctgttttcagagaccataaatactgagcttttaaagaatctggacctggccgtgctggaactgatgcaatcttcagttgataacacgaagatggtgtctgccgtgctgaatggcatgctcgaccaaagtttcagagagagggccaaccaaaaacaccaggggctcaagttggcaacaactattctgcagcactggaagaagtgtgactcctggtgggctaaggattccccattggaaactaaaatggccgtgcttgctctacttgccaagattctccagatcgactcttctgtgtctttcaatacttcacatggaagctttcctgaagtctttaccacttacatttccttactggcagacaccaagttggacctgcacctgaagggtcaggccgttaccttgctgcctttttttacaagtctcactggcgggagcctcgaagagctcagacgtgtactcgaacagctgatcgtagcacacttcccgatgcaatcgcgcgaatttccaccagggaccccccgatttaacaactacgtcgactgcatgaaaaagtttctggacgctctggaactgtctcagagccccatgctcctcgaattgatgactgaggtgctgtgcagggaacagcagcacgtgatggaggaactttttcagagttctttcagaaggatagcaaggaggggatcctgcgtcactcaagtcggcttgctggaatccgtttacgaaatgttccgaaaagatgacccacgcctcagttttacaagacaaagctttgtagatagaagcctcctaacattgctgtggcactgctccttggacgcactccgagaattcttttcaacgattgttgttgatgccattgacgtcctgaaaagcagattcaccaaactcaacgaatcaaccttcgacacacagatcaccaagaagatgggatattacaaaattctggacgtcatgtacagtaggctccctaaggatgacgtgcatgccaaggaaagtaagatcaaccaagtgtttcatgggtcgtgtatcaccgagggaaacgaactgacaaagaccttgatcaagctttgctatgacgccttcactgaaaatatggcgggcgagaatcagctgcttgagcgccggcgattgtaccactgtgcagcctacaattgtgccattagcgtgatttgctgcgttttcaatgagttgaagttctatcaaggttttctttttagtgaaaagccagagaagaacctgctaatctttgagaatctaatcgatcttaaacggaggtataattttcctgtagaggttgaggtacccatggaaaggaaaaaaaagtatatcgagatacgaaaggaggctagagaagcggctaacggtgattctgatggccccagttacatgtcgagtctctcctacctggcagactccaccctgtcagaggaaatgtctcagtttgacttttccacaggggtgcagtcttactcctactcttctcaggaccccagacctgccacaggacgcttccgaaggagagagcagcgcgatccaactgttcacgatgatgttctggagcttgaaatggacgagctgaatcgacatgaatgcatggctcctttaactgccctcgtgaagcacatgcacaggtcccttgggcctcctcaaggcgaggaggatagcgtgccccgagacctaccttcttggatgaagttcctgcatgggaagcttggcaatcccattgtgcctctaaatattcggctgttcctggctaagctcgtgatcaatacagaagaagtatttcggccctacgccaaacactggctcagccccctcctccaactggctgctagcgagaataacggcggcgaaggaatacactacatggtggtggagatagtggcaactattctatcttggactgggctcgctactcccactggagtgcccaaagacgaagtgcttgccaacagacttctcaacttcctgatgaaacatgttttccaccctaagcgcgccgtgttccgccataatctggaaattatcaagacactggtggaatgctggaaagactgtctgtcaatcccgtaccgcctgatctttgagaagttcagtggcaaagatcccaacagtaaagataactctgttggcatccagttgctggggatcgtcatggcaaacgacctccctccttacgatccccagtgtggcatccagagctcagagtacttccaggctctcgtgaataatatgagcttcgtgcgctataaggaagtgtacgcggccgcggccgaagtgttaggactgattcttcgttacgtcatggagcgtaaaaatattttggaagagtctctctgtgaactggtggccaagcaattgaaacaacatcagaacacaatggaggacaagtttattgtgtgcttgaataaggtgacaaaatctttccccccgctggcagatagattcatgaatgccgtgttctttctcctcccgaaattccacggcgtgctgaagaccctgtgtctggaggtcgttctctgccgagtagagggcatgacagagttatactttcagctcaagagcaaggattttgtgcaggttatgcgtcatagagatgacgagcgtcaaaaggtgtgcctcgatatcatatataagatgatgcctaagcttaaaccagtggagctccgcgaactcctgaatccagttgtggagtttgtatctcatccgtcaactacctgccgagaacagatgtataacatcctcatgtggatacacgacaactatcgagatcctgagtccgaaacagataatgactctcaggaaatctttaaactagccaaggatgtgcttattcaaggacttatagacgagaatcctggactgcagctgataatccgcaatttctggtcacacgaaacccgcctgccctccaacacgcttgaccgcctactagcgctcaatagcctgtactcgcccaagattgaggttcacttcctctcactcgctacgaacttcctgcttgagatgacaagcatgtctccagactaccctaacccaatgttcgaacaccctttatctgagtgtgaatttcaggaatacaccatcgactctgactggcggttccgcagcactgtgctcacccccatgtttgtggagacccaggcctcacaggggacgctccaaaccaggacccaagagggatccctgtctgcaaggtggccggttgctggacagatccgagcgactcagcaacagcatgatttcactctcacccagacagccgacggtcgaagctcctttgactggctgactgggagctctaccgacccactggtggatcatactagcccaagtagtgattcgttgctgtttgcacataagcggtcagagaggttgcagagagcccctctgaagtccgttggaccagattttggaaaaaagagacttggcctaccaggagatgaagtagataacaaggtcaagggcgcagccggaaggacagacctgcttcgcctgagaagacggtttatgagagatcaggagaaactgtcactcatgtacgctaggaagggcgttgcagaacaaaaaagagagaaagagatcaagtctgagcttaagatgaaacaagatgcccaagtggtgctttacaggagctataggcacggggacctgccggatattcaaatcaaacattcctcactaattacgcccttgcaagctgtggctcagagagatcccattatcgccaaacagttattttcctccctgtttagcggcatactgaaagagatggacaaatttaaaacccttagtgagaaaaacaacattacacagaagctgctgcaagatttcaatcggtttctcaacacgactttttcatttttcccaccatttgtcagctgtatacaagatatctcctgccagcatgccgccctcttgtctcttgacccagctgcggtatccgcaggctgtcttgcctcgttacaacagccggtcggaattcgcctgctggaagaagcccttctaaggcttctaccagctgagctgccagccaaaagggtacggggcaaggcccgactgccaccagacgtgcttcggtgggtcgaacttgccaagctgtatcggagcattggagagtatgacgttttacgcggaattttcacatctgagatcgggacaaaacagatcacccagtcagccctgttggctgaggcacgcagcgactactctgaggctgctaagcagtacgatgaggcactgaataagcaagattgggtcgacggagaaccaacagaagcggagaaggacttttgggaactggcctctttggactgctataaccatcttgcagaatggaaaagccttgagtactgcagtaccgcctccatcgatagtgagaacccccctgatcttaacaagatctggtcagaacctttttaccaggaaacctacctgccatatatgatccggagcaagctaaagctattgctgcagggcgaggctgaccagtccctgttgacattcatcgataaggcgatgcatggggagcttcagaaggcgattctggaactacattattctcaggagttaagtctcctctatttgctgcaggatgatgtggaccgcgccaagtactacattcagaacggcattcagtcctttatgcagaattatagttctatcgatgtgctgctgcatcagtcccgcttgacgaagctgcagtcagtgcaggcactcacagagattcaggagttcatctccttcatatctaaacaggggaacctcagcagccaggtgccactcaagcgtcttcttaacacctggacaaacaggtaccccgacgcaaagatggatcccatgaacatctgggacgatataattacaaatcgatgcttttttctttccaaaatcgaagagaaacttactccactacccgaggacaatagcatgaatgtcgatcaggatggggacccctctgatcgaatggaggtgcaggaacaggaggaggacatctcctctctgatccggagttgtaagttttctatgaaaatgaagatgattgatagtgcccgaaaacaaaataattttagtcttgccatgaaattactcaaagaactgcacaaggagtccaagacccgcgacgactggttggtgtcctgggtgcagagttactgtcggctgtcccattgccgatctaggagccaggggtgttccgagcaggtgttaaccgtgctaaagacagtgtcactgctcgatgaaaacaacgtgtcatcatatttgtcgaagaatatcctcgcttttcgggaccaaaacatcctgctcgggacaacgtaccgcatcattgctaatgcgttgagttccgagccagcttgcttggccgaaattgaagaagataaagcaaggcggatcctcgagctgtccggatctagtagtgaagattctgaaaaagtcatcgctgggctgtaccagagggccttccagcatctgtctgaagctgtccaagccgctgaggaagaggcccagccaccctcttggagttgcggccctgcagccggcgttattgacgcatatatgactctggccgatttttgtgaccagcaactgcgcaaggaggaggagaatgccagcgtcattgacagcgcggagctgcaggcatatcctgcactggtggtcgaaaaaatgctgaaagcccttaaactgaattcgaacgaggctcggttgaagttcccccgcctcttacagattatcgaacgatatcccgaagaaactctgagcttgatgaccaaagagatctcatccgtgccttgttggcaattcataagctggatttctcatatggtcgcactgcttgacaaagaccaggccgtcgccgtccagcacagcgtggaggaaattactgataattaccctcaggccatcgtttacccctttatcatttcttcggaatcttactcgtttaaggatacatccaccggccacaagaacaaagagttcgtcgcccggatcaagagtaagctggaccaggggggtgtaatccaggatttcattaacgcattagaccagctttccaatcctgagctgctgtttaaagactggtcgaatgatgtgagagccgagctcgccaagacacccgttaacaaaaagaatatcgagaagatgtatgagaggatgtatgctgctctcggcgatccaaaagcgcccggcctcggagcctttcgccggaagtttatccagaccttcggtaaggaattcgacaagcactttggaaaagggggatccaagctgctcagaatgaagctaagcgactttaatgacattacaaatatgctgctgctgaagatgaacaaagacagtaaaccacccggcaacctgaaggagtgtagtccttggatgtccgattttaaagttgagttcttaaggaatgaattggagatacctggccagtacgatggaaggggaaagccgttgccagaatatcacgttaggatcgctggtttcgacgaacgggtgacagtcatggcttccctgcgcagacccaagagaattatcattagggggcacgacgaaagagagcacccattcctggtgaagggtggtgaggacctccgccaggaccagcgggttgagcagctgttccaggtgatgaacggaattctggcgcaggatagcgcctgctcacagagagccctccagctccgaacgtattccgtggttccaatgacttcgagactcgggctgatagagtggctagaaaacacggtcaccctgaaggacttactccttaatactatgtcgcaggaagaaaaagcagcctacttaagcgatcctcgggcccccccatgcgagtacaaggactggctgacaaagatgagcggcaaacatgatgtcggtgcctacatgctgatgtacaaaggagctaaccgcactgagacagttacctctttccgcaaacgggagtcaaaagtgccagccgatctgttgaaacgggcgtttgttcgcatgtcaacatcacctgaagcctttttagccctgcgaagccactttgcttctagtcacgccctgatttgtatttctcactggatattgggtataggagatagacacctcaacaatttcatggtagcgatggagacgggtggggttattggcattgattttggacatgcattcggctctgcaacgcagtttctgccggtgccggaactaatgcccttcaggttaacacgacaattcattaacctgatgttaccaatgaaggagactggcctcatgtactctatcatggtccatgccctgagggcattcaggtccgaccctggccttttaacaaataccatggacgttttcgttaaggagccatccttcgattggaaaaattttgaacagaagatgctcaaaaaggggggtagttggattcaagagatcaacgtggctgaaaaaaactggtatccacgccagaaaatatgttacgcaaagcggaagcttgccggcgccaacccagccgtcatcacctgcgacgaattgctcctgggccacgagaaagcacctgctttcagagattacgtggctgtcgcaagaggctctaaggaccacaacatcagagcgcaggagccggaatccgggctttctgaggaaactcaggttaagtgcctgatggaccaagccaccgacccaaacatcctagggcgcacgtgggagggttgggagccgtggatgtag

SEQ ID NO: 168943 - DNA, 12384 bp, Artificial Sequence
  derived and/or modified sequence
atggctgggtccggagccggtgttcggtgttcccttctgcggctgcaggagacactgagcgccgctgaccgatgtggagccgctctcgccggacaccagctgatcaggggactggggcaagagtgtgtgttgtcgtcctctccagcagtcctggcactccagaccagcctcgttttctcaagggattttggtctgctggtgtttgtgaggaagagcctgaattcaatcgaattcagggagtgtcgagaagagattctaaagtttctgtgcatttttctggagaaaatgggccaaaaaatcgctccttactctgtggaaattaagaacacttgcacgagcgtgtacaccaaggatcgagcagcaaagtgtaaaatcccagctctggatctcctgattaaactgctacagacattcaggtctagccgcctgatggacgagttcaagattggcgagttattctccaaattttatggggagctggccttgaagaaaaaaattcctgacaccgtactggagaaagtgtacgagttgctcggcctattgggggaagtccacccctctgagatgattaacaacgctgaaaatttgttcagagcctttctgggggagcttaaaactcagatgactagtgccgtccgggaacccaagcttcccgtactggccggatgcctgaaagggctttcttctcttctctgtaattttactaaatctatggaagaggatccacagacctcacgggagattttcaattttgtgctgaaagcaatccgccctcagatagaccttaaaagatatgccgtgccaagcgcaggacttcgtctgtttgcactccacgcgagccagtttagtacatgcctgctcgataactacgtttctctatttgaagttcttctcaaatggtgcgcccatacgaatgttgaactgaaaaaggcagcactcagcgcccttgaatcattcctgaagcaggtgagcaacatggttgcgaagaatgccgaaatgcataaaaataagttgcagtattttatggagcaattttatggcattatcaggaacgtggacagtaataacaaggaacttagcatcgccattcgagggtacggattatttgcagggccttgtaaagtaattaatgctaaggacgttgactttatgtacgtagagttaattcagagatgtaagcagatgttcttgacccagacagatactggcgacgatcgcgtttaccagatgccttctttcttgcaaagcgtcgctagtgtgctgctgtaccttgatacggtccctgaggtttacactcccgttctggagcacctcgtggtgatgcagatcgattctttccctcagtactctcccaagatgcagctcgtttgttgtcgtgctatcgtaaaagtatttctggctctggcagccaagggtcccgtgcttcgcaattgcatctccaccgtggtccatcaggggttaatccgaatctgtagtaagccagtggtgctgccaaagggtcctgaatcagaatccgaggaccacagagccagcggagaagtgcgaacaggcaaatggaaggtccctacctacaaggactatgtcgatctatttcgtcacctactgagctctgatcagatgatggattctattttggcagacgaagcattcttttcagttaatagtagttcagaaagcctaaaccatctgttatatgatgaattcgtgaagagtgtgcttaagatcgtggaaaaactcgatctgacactggaaatccagacagtcggggagcaggaaaatggtgatgaggcccctggagtgtggatgataccgactagcgatccagctgccaaccttcatccggctaagccaaaagatttttcagcctttattaatctcgttgaattctgtcgcgagattctgcccgaaaagcaggcagaatttttcgagccatgggtgtactcttttagctacgagctcatcctccaatcaacccgtctcccgcttatctcggggttctataagctcctgtctataactgttcgaaacgccaaaaaaatcaaatattttgaaggcgtctcgccaaaatccctgaaacactcacccgaggatcctgagaagtattcatgcttcgcactgttcgtcaagtttggtaaggaggtggccgtaaaaatgaaacagtataaagacgaactcctcgcctcttgtctgacttttctgctgtccttgccacataatattattgagcttgatgtgcgtgcctacgtaccagcgctacagatggccttcaaactgggattaagctatactcctcttgccgaggttgggcttaacgccttggaagaatggagcatttatatcgataggcatgtgatgcagccatactacaaagacattctcccttgcctcgacgggtacctgaagacctctgccctttccgatgaaaccaaaaacaattgggaggtgtctgccctctctcgggctgctcagaaaggcttcaacaaagtggtcttgaagcacctcaagaagacaaaaaacctgtccagcaatgaagccatatcccttgaagaaatccgaattcgcgtggttcagatgttgggcagtctggggggacaaattaataagaacctgctgacagtcacctcatccgacgagatgatgaaatcctacgtggcctgggaccgggagaaaagactgtcgtttgctgtgccctttcgtgagatgaagcccgttatatttctagatgtgttcttacctcgggtgacagagctggccctcactgcctctgatcgtcagacaaaagtggctgcatgcgaactgctacattctatggtcatgttcatgctgggcaaggccacgcaaatgcccgagggcggacagggagcccctccaatgtaccagctgtacaagcgcaccttccctgtgctcttacgcctggcctgcgacgtggatcaggtaacaagacagctctacgagccactggtaatgcagctgatacactggtttacgaacaacaaaaagttcgagagccaggacaccgtcgctctgctcgaagccattctggatgggattgtagaccccgtcgactccactctccgtgatttttgtggcagatgtattcgggagtttttgaagtggtcaatcaagcagattacaccccagcaacaggaaaagtccccagttaatacaaagtccctcttcaaaaggctgtacagcctggctctgcacccaaatgccttcaagagactgggcgcaagccttgcatttaataatatatatagggagtttcgggaggaggagagtctggtggaacaattcgtgtttgaggctctggtaatatatatggagtcactcgcccttgcgcacgccgatgagaagagcctgggcacgatccagcagtgttgcgatgccatagaccatctgtgcaggattatagagaagaaacatgtttctttgaataaagccaaaaaaaggcgccttcctcgcggtttccctccctcggctagtttatgtctcctcgacctggtgaagtggttactcgctcactgtgggagaccccagactgaatgtaggcacaagagtattgagctgttttacaaattcgtacccctgttgccagggaaccggagcccaaatctatggctgaaagatgtgttgaaagaagagggtgtgtcgtttctcattaacacattcgagggagggggatgcggtcagccatccggaatccttgcccaacctaccctgctgtaccgtggccctttctcgctccaggcaactctatgctggctggacctactcctggctgcactagaatgctacaatacattcattggcgagagaaccgtgggagctctgcaagtgttgggaaccgaagcacaaagcagcctccttaaggctgtcgcattcttcctggagtctattgccatgcatgatatcatagccgctgagaaatgctttggaaccggagcagccggaaatagaacatcaccgcaggagggcgagagatacaactattcgaagtgcacagttgtggttagaataatggagttcaccactactctgctcaatacatctcctgaaggctggaaattactgaagaaggacctgtgtaacactcatttgatgagggtcctggtccagacactgtgcgagcccgctagtatcggatttaatatcggagacgtgcaggttatggcccatttgccagatgtctgcgtgaatctgatgaaagcactgaagatgagcccttataaggacattctggaaactcatttacgcgagaagatcacagcacagtccatcgaggaattatgcgccgtaaacctgtacggccctgacgctcaggtggaccgtagtcgactggcggcagttgttagcgcgtgtaagcaactccatagggccggtctcttgcacaatattctcccatctcagagcacagatctgcaccatagtgtagggacagagctgttaagcttggtgtataaagggatagcgccaggagatgaacgacagtgtctgccctcacttgatctctcatgcaagcaactggcaagtggtttgctggaactggcctttgcgttcggcggtctgtgcgaacggctggttagcctactactcaaccctgcggtgctctctaccgccagtctgggaagctcccaggggtcagtaatccacttctctcatggcgaatacttttactcactcttttccgagacgatcaatacagagctgctcaaaaaccttgacctggctgtgctcgagttgatgcaatcctcagtcgacaacacaaaaatggtgtccgccgtcctcaatggcatgctagaccagtcatttagggagagggcaaatcaaaaacaccaggggctgaaactggccaccacaatcctccaacactggaagaagtgcgactcctggtgggccaaggattcccctctggaaaccaagatggccgttcttgctcttttagccaagattctgcaaatcgactcttctgttagttttaatacctcacacgggagctttcctgaggtttttacaacgtacatcagcctgctggcagacaccaaattagaccttcatttgaaaggtcaggctgttactctgcttccatttttcaccagtttaactggcggaagtctagaggaactgagacgggtattggagcagcttatcgtagcccattttcccatgcagtctcgggagtttcctcctggaactcctagattcaataactatgtggattgtatgaagaagtttctcgacgccctagaactcagccagtcgcctatgctcctagaactgatgacggaggtgttgtgcagggaacagcaacatgtcatggaagagttattccagtccagcttccgaagaattgcgcgtaggggatcctgcgtaacccaggttggattgctagaatccgtctatgagatgttccgcaaagatgatccacggctctccttcacacggcagagcttcgtggatcgctctctgctcacattgttgtggcattgcagccttgacgctctgagggaatttttttccacaattgtggtcgatgctattgatgtgctgaaaagcaggttcactaagctgaacgaatcaacattcgacacacaaatcacaaaaaaaatgggatactacaaaattttggacgtcatgtactcaagactgccaaaggatgatgtacatgctaaagagtctaaaatcaaccaggtgttccacggatcgtgtattactgaagggaacgaactgacaaagactctcatcaagctatgctacgatgccttcacagaaaacatggccggagagaatcaactgttggaacggaggcgcctctatcattgcgcagcttacaactgtgctataagtgtgatctgttgcgtgttcaatgaacttaagttttaccagggcttcctgtttagtgagaaacctgagaaaaaccttctgatattcgagaacctaattgatctgaagaggcggtacaatttcccagtagaggtcgaagtgcctatggagcgaaagaaaaagtatatcgagataaggaaagaagcaagggaagctgctaatggagatagcgatggcccatcttatatgtctagcctttcctatttggcagacagtactcttagtgaggagatgagccagttcgacttctcgacaggcgtgcagtcctacagctacagctctcaagatccacgtccggctaccgggaggtttaggcgaagggagcagcgcgaccctaccgtgcatgatgatgtgctggaattggagatggacgaacttaacagacatgagtgcatggcccctcttacggcactggttaagcacatgcatcggtcactgggaccccctcaaggagaagaggatagcgttcctagagacctgccgtcttggatgaagttcctccacggtaaactgggcaatccaatcgtcccattaaacatcaggctctttctggctaagctcgtgattaacacggaagaggtgtttcggccttacgccaagcattggttatcacctcttctccagctggcagcatccgaaaacaatggtggcgaaggcatccactatatggtggtagagatcgtcgctacaattctttcatggaccgggctcgcaactccgactggagttccgaaagatgaagtgctggctaaccgacttctgaatttcttgatgaaacatgtgttccatcccaagagggctgttttccgtcacaacttggaaataattaagaccctggttgaatgttggaaagactgcctgtccattccataccgtctgatctttgaaaagttctccgggaaggatcctaactccaaggataattcagttggcattcaacttcttgggatcgttatggccaacgatctcccaccctacgacccccaatgcggaatccagtccagcgaatacttccaggccctggtgaacaacatgagcttcgtgcggtataaagaggtatatgccgctgccgcagaggtacttgggcttatattgagatacgttatggagcgtaaaaacattctggaagaatcattgtgcgaactagtggctaagcagctgaagcagcaccagaataccatggaagacaaattcatcgtgtgcttgaacaaagttaccaaatcatttcctcctctagccgataggtttatgaacgcggtcttttttttgctcccgaaattccatggagtcctgaagactctatgcctggaagtggttttgtgccgcgtggagggcatgaccgagctatactttcagctgaaatcaaaggactttgttcaggtgatgagacaccgggacgatgagcgacaaaaggtgtgtcttgacatcatttacaaaatgatgcccaaacttaaacccgtggaactaagagaattgctgaacccagtggtggaattcgtttcacatcctagcaccacctgcagggagcagatgtataacatactaatgtggattcacgataattaccgagaccccgagtcggaaacggataatgatagccaagaaatctttaagctagctaaagatgtgctgatccagggactaatcgatgagaaccccggattacagttaattatccgcaatttttggtcgcatgagaccaggttgccatcaaatacactggaccgcctcttggccttgaactcactgtactcacccaagatcgaggttcatttcctgagccttgctacgaactttctgctggagatgacctctatgagtccagattatcctaaccccatgttcgagcacccactcagcgagtgcgagttccaggagtacacaattgatagcgactggaggttcagatccacagtgctcacacccatgttcgtagagactcaggcttctcagggcacgctacagacaaggacacaagaagggagccttagcgcacgttggcccgtggctgggcagatccgtgccactcagcaacaacatgatttcacacttacacaaaccgctgatggaaggtctagcttcgattggctaacaggcagctctaccgatccacttgtcgatcatacgtctccctcaagcgactctctactgtttgctcacaagaggtcggagagactccaacgggctcctctgaaatcggtgggcccagattttggaaaaaagcggttgggactgcccggtgacgaagtggacaacaaagtaaagggagccgcagggcgtacagacctgcttagacttcgtagaaggttcatgcgagatcaggaaaaactctctctgatgtacgcgaggaagggtgtcgcagaacagaaacgcgaaaaggagatcaagagtgaactgaaaatgaaacaagacgcacaagtcgtgttataccggagctacaggcacggggacctgcctgacatccaaatcaagcactcgtcactaatcacacccttgcaggccgtggcccagagggatccaattatcgcgaagcagctgttctcctcattgtttagcgggattctgaaggaaatggataaatttaaaacattgagcgaaaagaacaatatcacccagaaactccttcaggactttaacagattcctgaatactacattctccttttttccccctttcgtcagctgtatacaggacatctcttgtcagcatgccgctctacttagtctggatccagccgctgtaagcgctggctgcctcgcgtcccttcagcagccagtgggaatccggctcctagaggaggcccttctccggttgttgccggctgagcttcccgcaaagagggtgcgaggtaaggcacggctacccccagatgtactgcggtgggtcgaattagccaagctctaccggagcattggcgagtatgatgtgctaagggggatctttactagtgagattgggaccaagcagatcactcagtcagcactgctcgctgaagccaggtccgactactctgaagctgccaaacaatatgatgaggcactcaacaaacaggattgggtggatggtgagcctacggaggcagagaaggacttctgggaactggcgtctttggattgctacaatcacttggcagagtggaagtcccttgagtattgcagcacagcatctatcgacagcgaaaatccacctgatcttaataaaatctggtctgaaccattttatcaggaaacatatctgccctatatgatcaggtccaagctgaaactcctgctgcaaggggaggcagaccagtctctgctaaccttcatagataaagccatgcatggggaactccaaaaggccattctggagttacactattctcaggaactgagtctattatacctgctgcaggatgatgttgacagggcgaagtattatatacagaacggaatacagagctttatgcaaaattacagcagtatcgatgtgctcctgcaccagtctcgcctcaccaagcttcagtccgtccaagcactgacagaaatccaggagtttatttcattcataagtaaacagggcaatctgagctcccaggtgccgctgaaacgcttactgaatacctggacgaacagatatcctgatgccaaaatggatccaatgaacatctgggacgacatcattaccaatagatgtttcttcttgtccaaaatagaagaaaagttaactcctctccccgaagacaatagcatgaacgtggaccaggacggggatcctagtgacaggatggaagtgcaggagcaggaggaggacatcagtagtctgattcggtcttgcaagttctccatgaagatgaaaatgatcgactccgcgagaaaacagaacaatttctcgctggccatgaagctcttgaaagagttgcacaaggaatcaaagactcgggatgattggctggtcagctgggtacagtcttactgtaggctgtcccactgcagaagccgcagccaggggtgcagcgagcaggttcttactgtgctgaagaccgtgtctctgcttgacgagaataacgtgtctagttacttgtcaaagaatatactggccttccgcgaccagaatatactgctcggcactacatatcggattatcgctaatgccctgagcagcgaacctgcttgcctagctgaaatcgaggaggataaagcacggagaatcctagagttgtccggcagttcttctgaggattcagaaaaggtgatagccggactctaccagcgcgcttttcagcacctctcagaagcggtacaggcggcagaggaagaggctcagcctccatcatggtcatgtgggcctgctgcaggcgtgattgatgcctatatgactcttgccgacttctgcgatcaacagctgcggaaggaggaggagaacgcttctgtgatagattccgccgagctgcaggcataccccgctctcgtggtggaaaaaatgcttaaagctctgaagctgaatagcaatgaagctaggctgaagttcccgcgattattacagatcattgagaggtatccggaagaaaccctatccttgatgactaaggaaatctcatctgtgccctgttggcagtttattagctggatcagtcacatggtcgctctgcttgataaggatcaggccgtagctgtgcagcattccgtggaagagatcactgataattacccacaggccattgtttacccttttatcatctcgagtgaatcttattcctttaaggacacttcaactggacacaagaacaaagagtttgtcgccagaattaagagtaaacttgaccaaggaggagtgatacaggacttcatcaacgctctggaccagttaagcaacccagagttgcttttcaaagattggagcaacgacgtgcgggctgagttagctaagacccccgttaataagaagaatattgagaagatgtatgaaagaatgtacgcagccctgggagaccccaaggcccctgggttgggggctttcaggaggaaattcattcaaaccttcggtaaggagtttgacaaacattttggcaagggcggatctaagctacttaggatgaagctgagcgatttcaacgatattacaaacatgctcttattaaagatgaataaggactccaagccacctggcaatctcaaggaatgttccccctggatgtcggactttaaggtggagtttctgcggaacgaactggaaatccccggtcagtacgacggaagaggtaaaccattaccagaatatcatgttcgtatcgccggattcgacgagagggtcacagtgatggcctcgctgaggagacccaagaggattattattcgtggacatgatgagagagagcaccccttcttggtcaaagggggtgaagacctccgccaggaccagcgggtggaacaactgttccaagtgatgaacggcatactggcccaggactccgcctgtagtcagcgagccctgcagctcagaacatacagtgtcgtgccgatgacaagtagactggggctgatcgagtggctcgaaaataccgtcactcttaaggacctgttgctgaatacgatgtctcaagaagaaaaggcagcttatctctcggaccccagggctccaccctgcgagtacaaggactggcttaccaaaatgagtggcaaacatgatgtcggtgcctatatgctgatgtacaagggagctaatcggacagaaactgtgacaagcttcagaaaacgcgagtcaaaggttccagccgatctgttgaagcgggcattcgtgcggatgagtacctcgccagaggcttttttagcactgcgcagtcactttgcgtcgtctcatgccctgatctgtattagtcactggatcctcggtattggcgatcgacacttgaacaactttatggtcgccatggaaacaggcggtgtgataggcattgactttggccatgcgttcggaagcgccacccagttcttgcctgtgccagaattgatgccctttcggctaactaggcaatttattaaccttatgcttccgatgaaagagaccggtttgatgtactccattatggtgcatgctctcagggcctttcggtctgacccaggactgttgaccaatacaatggatgtgttcgttaaggaaccctcatttgactggaagaacttcgagcaaaaaatgctgaaaaaaggcggttcatggatccaggaaataaatgtagctgagaagaattggtacccgagacagaagatatgctatgcaaagagaaagttggccggagctaaccctgctgtgattacctgcgatgagttgctcttaggccacgagaaggcgcctgcgtttagagactacgtggctgtggccagggggagcaaagaccacaacatccgcgctcaggagccggaaagcggactgtcagaagagacccaggtgaagtgtctgatggaccaggcaaccgatcccaacattctggggaggacctgggaggggtgggagccctggatgtac

SEQ ID NO: 168944 - DNA, 13506 bp, Artificial Sequence
  derived and/or modified sequence
ggggcatttccgggtccgggccgagcgggcgcacgcgcgggagcgggactcggcggcatggcgggctccggagccggtgtgcgttgctccctgctgcggctgcaggagaccttgtccgctgcggaccgctgcggtgctgccctggccggtcatcaactgatccgcggcctggggcaggaatgcgtcctgagcagcagccccgcggtgctggcattacagacatctttagttttttccagagatttcggtttgcttgtatttgtccggaagtcactcaacagtattgaatttcgtgaatgtagagaagaaatcctaaagtttttatgtattttcttagaaaaaatgggccagaagatcgcaccttactctgttgaaattaagaacacttgtaccagtgtttatacaaaagatagagctgctaaatgtaaaattccagccctggaccttcttattaagttacttcagacttttagaagttctagactcatggatgaatttaaaattggagaattatttagtaaattctatggagaacttgcattgaaaaaaaaaataccagatacagttttagaaaaagtatatgagctcctaggattattgggtgaagttcatcctagtgagatgataaataatgcagaaaacctgttccgcgcttttctgggtgaacttaagacccagatgacatcagcagtaagagagcccaaactacctgttctggcaggatgtctgaaggggttgtcctcacttctgtgcaacttcactaagtccatggaagaagatccccagacttcaagggagatttttaattttgtactaaaggcaattcgtcctcagattgatctgaagagatatgctgtgccctcagctggcttgcgcctatttgccctgcatgcatctcagtttagcacctgccttctggacaactacgtgtctctatttgaagtcttgttaaagtggtgtgcccacacaaatgtagaattgaaaaaagctgcactttcagccctggaatcctttctgaaacaggtttctaatatggtggcgaaaaatgcagaaatgcataaaaataaactgcagtactttatggagcagttttatggaatcatcagaaatgtggattcgaacaacaaggagttatctattgctatccgtggatatggactttttgcaggaccgtgcaaggttataaacgcaaaagatgttgacttcatgtacgttgagctcattcagcgctgcaagcagatgttcctcacccagacagacactggtgacgaccgtgtttatcagatgccaagcttcctccagtctgttgcaagcgtcttgctgtaccttgacacagttcctgaggtgtatactccagttctggagcacctcgtggtgatgcagatagacagtttcccacagtacagtccaaaaatgcagctggtgtgttgcagagccatagtgaaggtgttcctagctttggcagcaaaagggccagttctcaggaattgcattagtactgtggtgcatcagggtttaatcagaatatgttctaaaccagtggtccttccaaagggccctgagtctgaatctgaagaccaccgtgcttcaggggaagtcagaactggcaaatggaaggtgcccacatacaaagactacgtggatctcttcagacatctcctgagctctgaccagatgatggattctattttagcagatgaagcatttttctctgtgaattcctccagtgaaagtctgaatcatttactttatgatgaatttgtaaaatccgttttgaagattgttgagaaattggatcttacacttgaaatacagactgttggggaacaagagaatggagatgaggcgcctggtgtttggatgatcccaacttcagatccagcggctaacttgcatccagctaaacctaaagatttttcggctttcattaacctggtggaattttgcagagagattctccctgagaaacaagcagaattttttgaaccatgggtgtactcattttcatatgaattaattttgcaatctacaaggttgcccctcatcagtggtttctacaaattgctttctattacagtaagaaatgccaagaaaataaaatatttcgagggagttagtccaaagagtctgaaacactctcctgaagacccagaaaagtattcttgctttgctttatttgtgaaatttggcaaagaggtggcagttaaaatgaagcagtacaaagatgaacttttggcctcttgtttgacctttcttctgtccttgccacacaacatcattgaactcgatgttagagcctacgttcctgcactgcagatggctttcaaactgggcctgagctatacccccttggcagaagtaggcctgaatgctctagaagaatggtcaatttatattgacagacatgtaatgcagccttattacaaagacattctcccctgcctggatggatacctgaagacttcagccttgtcagatgagaccaagaataactgggaagtgtcagctctttctcgggctgcccagaaaggatttaataaagtggtgttaaagcatctgaagaagacaaagaacctttcatcaaacgaagcaatatccttagaagaaataagaattagagtagtacaaatgcttggatctctaggaggacaaataaacaaaaatcttctgacagtcacgtcctcagatgagatgatgaagagctatgtggcctgggacagagagaagcggctgagctttgcagtgccctttagagagatgaaacctgtcattttcctggatgtgttcctgcctcgagtcacagaattagcgctcacagccagtgacagacaaactaaagttgcagcctgtgaacttttacatagcatggttatgtttatgttgggcaaagccacgcagatgccagaagggggacagggagccccacccatgtaccagctctataagcggacgtttcctgtgctgcttcgacttgcgtgtgatgttgatcaggtgacaaggcaactgtatgagccactagttatgcagctgattcactggttcactaacaacaagaaatttgaaagtcaggatactgttgccttactagaagctatattggatggaattgtggaccctgttgacagtactttaagagatttttgtggtcggtgtattcgagaattccttaaatggtccattaagcaaataacaccacagcagcaggagaagagtccagtaaacaccaaatcgcttttcaagcgactttatagccttgcgcttcaccccaatgctttcaagaggctgggagcatcacttgcctttaataatatctacagggaattcagggaagaagagtctctggtggaacagtttgtgtttgaagccttggtgatatacatggagagtctggccttagcacatgcagatgagaagtccttaggtacaattcaacagtgttgtgatgccattgatcacctatgccgcatcattgaaaagaagcatgtttctttaaataaagcaaagaaacgacgtttgccgcgaggatttccaccttccgcatcattgtgtttattggatctggtcaagtggcttttagctcattgtgggaggccccagacagaatgtcgacacaaatccattgaactcttttataaattcgttcctttattgccaggcaacagatcccctaatttgtggctgaaagatgttctcaaggaagaaggtgtctcttttctcatcaacacctttgaggggggtggctgtggccagccctcgggcatcctggcccagcccaccctcttgtaccgggggccattcagcctgcaggccacgctatgctggctggacctgctcctggccgcgttggagtgctacaacacgttcattggcgagagaactgtaggagcgctccaggtcctaggtactgaagcccagtcttcacttttgaaagcagtggctttcttcttagaaagcattgccatgcatgacattatagcagcagaaaagtgctttggcactggggcagcaggtaacagaacaagcccacaagagggagaaaggtacaactacagcaaatgcaccgttgtggtccggattatggagtttaccacgactctgctaaacacctccccggaaggatggaagctcctgaagaaggacttgtgtaatacacacctgatgagagtcctggtgcagacgctgtgtgagcccgcaagcataggtttcaacatcggagacgtccaggttatggctcatcttcctgatgtttgtgtgaatctgatgaaagctctaaagatgtccccatacaaagatatcctagagacccatctgagagagaaaataacagcacagagcattgaggagctttgtgccgtcaacttgtatggccctgacgcgcaagtggacaggagcaggctggctgctgttgtgtctgcctgtaaacagcttcacagagctgggcttctgcataatatattaccgtctcagtccacagatttgcatcattctgttggcacagaacttctttccctggtttataaaggcattgcccctggagatgagagacagtgtctgccttctctagacctcagttgtaagcagctggccagcggacttctggagttagcctttgcttttggaggactgtgtgagcgccttgtgagtcttctcctgaacccagcggtgctgtccacggcgtccttgggcagctcacagggcagcgtcatccacttctcccatggggagtatttctatagcttgttctcagaaacgatcaacacggaattattgaaaaatctggatcttgctgtattggagctcatgcagtcttcagtggataataccaaaatggtgagtgccgttttgaacggcatgttagaccagagcttcagggagcgagcaaaccagaaacaccaaggactgaaacttgcgactacaattctgcaacactggaagaagtgtgattcatggtgggccaaagattcccctctcgaaactaaaatggcagtgctggccttactggcaaaaattttacagattgattcatctgtatcttttaatacaagtcatggttcattccctgaagtctttacaacatatattagtctacttgctgacacaaagctggatctacatttaaagggccaagctgtcactcttcttccattcttcaccagcctcactggaggcagtctggaggaacttagacgtgttctggagcagctcatcgttgctcacttccccatgcagtccagggaatttcctccaggaactccgcggttcaataattatgtggactgcatgaaaaagtttctagatgcattggaattatctcaaagccctatgttgttggaattgatgacagaagttctttgtcgggaacagcagcatgtcatggaagaattatttcaatccagtttcaggaggattgccagaaggggttcatgtgtcacacaagtaggccttctggaaagcgtgtatgaaatgttcaggaaggatgacccccgcctaagtttcacacgccagtcctttgtggaccgctccctcctcactctgctgtggcactgtagcctggatgctttgagagaattcttcagcacaattgtggtggatgccattgatgtgttgaagtccaggtttacaaagctaaatgaatctacctttgatactcaaatcaccaagaagatgggctactataagattctagacgtgatgtattctcgccttcccaaagatgatgttcatgctaaggaatcaaaaattaatcaagttttccatggctcgtgtattacagaaggaaatgaacttacaaagacattgattaaattgtgctacgatgcatttacagagaacatggcaggagagaatcagctgctggagaggagaagactttaccattgtgcagcatacaactgcgccatatctgtcatctgctgtgtcttcaatgagttaaaattttaccaaggttttctgtttagtgaaaaaccagaaaagaacttgcttatttttgaaaatctgatcgacctgaagcgccgctataattttcctgtagaagttgaggttcctatggaaagaaagaaaaagtacattgaaattaggaaagaagccagagaagcagcaaatggggattcagatggtccttcctatatgtcttccctgtcatatttggcagacagtaccctgagtgaggaaatgagtcaatttgatttctcaaccggagttcagagctattcatacagctcccaagaccctagacctgccactggtcgttttcggagacgggagcagcgggaccccacggtgcatgatgatgtgctggagctggagatggacgagctcaatcggcatgagtgcatggcgcccctgacggccctggtcaagcacatgcacagaagcctgggcccgcctcaaggagaagaggattcagtgccaagagatcttccttcttggatgaaattcctccatggcaaactgggaaatccaatagtaccattaaatatccgtctcttcttagccaagcttgttattaatacagaagaggtctttcgcccttacgcgaagcactggcttagccccttgctgcagctggctgcttctgaaaacaatggaggagaaggaattcactacatggtggttgagatagtggccactattctttcatggacaggcttggccactccaacaggggtccctaaagatgaagtgttagcaaatcgattgcttaatttcctaatgaaacatgtctttcatccaaaaagagctgtgtttagacacaaccttgaaattataaagacccttgtcgagtgctggaaggattgtttatccatcccttataggttaatatttgaaaagttttccggtaaagatcctaattctaaagacaactcagtagggattcaattgctaggcatcgtgatggccaatgacctgcctccctatgacccacagtgtggcatccagagtagcgaatacttccaggctttggtgaataatatgtcctttgtaagatataaagaagtgtatgccgctgcagcagaagttctaggacttatacttcgatatgttatggagagaaaaaacatactggaggagtctctgtgtgaactggttgcgaaacaattgaagcaacatcagaatactatggaggacaagtttattgtgtgcttgaacaaagtgaccaagagcttccctcctcttgcagacaggttcatgaatgctgtgttctttctgctgccaaaatttcatggagtgttgaaaacactctgtctggaggtggtactttgtcgtgtggagggaatgacagagctgtacttccagttaaagagcaaggacttcgttcaagtcatgagacatagagatgatgaaagacaaaaagtatgtttggacataatttataagatgatgccaaagttaaaaccagtagaactccgagaacttctgaaccccgttgtggaattcgtttcccatccttctacaacatgtagggaacaaatgtataatattctcatgtggattcatgataattacagagatccagaaagtgagacagataatgactcccaggaaatatttaagttggcaaaagatgtgctgattcaaggattgatcgatgagaaccctggacttcaattaattattcgaaatttctggagccatgaaactaggttaccttcaaataccttggaccggttgctggcactaaattccttatattctcctaagatagaagtgcactttttaagtttagcaacaaattttctgctcgaaatgaccagcatgagcccagattatccaaaccccatgttcgagcatcctctgtcagaatgcgaatttcaggaatataccattgattctgattggcgtttccgaagtactgttctcactccgatgtttgtggagacccaggcctcccagggcactctccagacccgtacccaggaagggtccctctcagctcgctggccagtggcagggcagataagggccacccagcagcagcatgacttcacactgacacagactgcagatggaagaagctcatttgattggctgaccgggagcagcactgacccgctggtcgaccacaccagtccctcatctgactccttgctgtttgcccacaagaggagtgaaaggttacagagagcacccttgaagtcagtggggcctgattttgggaaaaaaaggctgggccttccaggggacgaggtggataacaaagtgaaaggtgcggccggccggacggacctactacgactgcgcagacggtttatgagggaccaggagaagctcagtttgatgtatgccagaaaaggcgttgctgagcaaaaacgagagaaggaaatcaagagtgagttaaaaatgaagcaggatgcccaggtcgttctgtacagaagctaccggcacggagaccttcctgacattcagatcaagcacagcagcctcatcaccccgttacaggccgtggcccagagggacccaataattgcaaaacagctctttagcagcttgttttctggaattttgaaagagatggataaatttaagacactgtctgaaaaaaacaacatcactcaaaagttgcttcaagacttcaatcgttttcttaataccaccttctctttctttccaccctttgtctcttgtattcaggacattagctgtcagcacgcagccctgctgagcctcgacccagcggctgttagcgctggttgcctggccagcctacagcagcccgtgggcatccgcctgctagaggaggctctgctccgcctgctgcctgctgagctgcctgccaagcgagtccgtgggaaggcccgcctccctcctgatgtcctcagatgggtggagcttgctaagctgtatagatcaattggagaatacgacgtcctccgtgggatttttaccagtgagataggaacaaagcaaatcactcagagtgcattattagcagaagccagaagtgattattctgaagctgctaagcagtatgatgaggctctcaataaacaagactgggtagatggtgagcccacagaagccgagaaggatttttgggaacttgcatcccttgactgttacaaccaccttgctgagtggaaatcacttgaatactgttctacagccagtatagacagtgagaaccccccagacctaaataaaatctggagtgaaccattttatcaggaaacatatctaccttacatgatccgcagcaagctgaagctgctgctccagggagaggctgaccagtccctgctgacatttattgacaaagctatgcacggggagctccagaaggcgattctagagcttcattacagtcaagagctgagtctgctttacctcctgcaagatgatgttgacagagccaaatattacattcaaaatggcattcagagttttatgcagaattattctagtattgatgtcctcttacaccaaagtagactcaccaaattgcagtctgtacaggctttaacagaaattcaggagttcatcagctttataagcaaacaaggcaatttatcatctcaagttccccttaagagacttctgaacacctggacaaacagatatccagatgctaaaatggacccaatgaacatctgggatgacatcatcacaaatcgatgtttctttctcagcaaaatagaggagaagcttacccctcttccagaagataatagtatgaatgtggatcaagatggagaccccagtgacaggatggaagtgcaagagcaggaagaagatatcagctccctgatcaggagttgcaagttttccatgaaaatgaagatgatagacagtgcccggaagcagaacaatttctcacttgctatgaaactactgaaggagctgcataaagagtcaaaaaccagagacgattggctggtgagctgggtgcagagctactgccgcctgagccactgccggagccggtcccagggctgctctgagcaggtgctcactgtgctgaaaacagtctctttgttggatgagaacaacgtgtcaagctacttaagcaaaaatattctggctttccgtgaccagaacattctcttgggtacaacttacaggatcatagcgaatgctctcagcagtgagccagcctgccttgctgaaatcgaggaggacaaggctagaagaatcttagagctttctggatccagttcagaggattcagagaaggtgatcgcgggtctgtaccagagagcattccagcacctctctgaggctgtgcaggcggctgaggaggaggcccagcctccctcctggagctgtgggcctgcagctggggtgattgatgcttacatgacgctggcagatttctgtgaccaacagctgcgcaaggaggaagagaatgcatcagttattgattctgcagaactgcaggcgtatccagcacttgtggtggagaaaatgttgaaagctttaaaattaaattccaatgaagccagattgaagtttcctagattacttcagattatagaacggtatccagaggagactttgagcctcatgacaaaagagatctcttccgttccctgctggcagttcatcagctggatcagccacatggtggccttactggacaaagaccaagccgttgctgttcagcactctgtggaagaaatcactgataactacccgcaggctattgtttatcccttcatcataagcagcgaaagctattccttcaaggatacttctactggtcataagaataaggagtttgtggcaaggattaaaagtaagttggatcaaggaggagtgattcaagattttattaatgccttagatcagctctctaatcctgaactgctctttaaggattggagcaatgatgtaagagctgaactagcaaaaacccctgtaaataaaaaaaacattgaaaaaatgtatgaaagaatgtatgcagccttgggtgacccaaaggctccaggcctgggggcctttagaaggaagtttattcagacttttggaaaagaatttgataaacattttgggaaaggaggttctaaactactgagaatgaagctcagtgacttcaacgacattaccaacatgctacttttaaaaatgaacaaagactcaaagccccctgggaatctgaaagaatgttcaccctggatgagcgacttcaaagtggagttcctgagaaatgagctggagattcccggtcagtatgacggtaggggaaagccattgccagagtaccacgtgcgaatcgccgggtttgatgagcgggtgacagtcatggcgtctctgcgaaggcccaagcgcatcatcatccgtggccatgacgagagggaacaccctttcctggtgaagggtggcgaggacctgcggcaggaccagcgcgtggagcagctcttccaggtcatgaatgggatcctggcccaagactccgcctgcagccagagggccctgcagctgaggacctatagcgttgtgcccatgacctccaggttaggattaattgagtggcttgaaaatactgttaccttgaaggaccttcttttgaacaccatgtcccaagaggagaaggcggcttacctgagtgatcccagggcaccgccgtgtgaatataaagattggctgacaaaaatgtcaggaaaacatgatgttggagcttacatgctaatgtataagggcgctaatcgtactgaaacagtcacgtcttttagaaaacgagaaagtaaagtgcctgctgatctcttaaagcgggccttcgtgaggatgagtacaagccctgaggctttcctggcgctccgctcccacttcgccagctctcacgctctgatatgcatcagccactggatcctcgggattggagacagacatctgaacaactttatggtggccatggagactggcggcgtgatcgggatcgactttgggcatgcgtttggatccgctacacagtttctgccagtccctgagttgatgccttttcggctaactcgccagtttatcaatctgatgttaccaatgaaagaaacgggccttatgtacagcatcatggtacacgcactccgggccttccgctcagaccctggcctgctcaccaacaccatggatgtgtttgtcaaggagccctcctttgattggaaaaattttgaacagaaaatgctgaaaaaaggagggtcatggattcaagaaataaatgttgctgaaaaaaattggtacccccgacagaaaatatgttacgctaagagaaagttagcaggtgccaatccagcagtcattacttgtgatgagctactcctgggtcatgagaaggcccctgccttcagagactatgtggctgtggcacgaggaagcaaagatcacaacattcgtgcccaagaaccagagagtgggctttcagaagagactcaagtgaagtgcctgatggaccaggcaacagaccccaacatccttggcagaacctgggaaggatgggagccctggatgtgaggtctgtgggagtctgcagatagaaagcattacattgtttaaagaatctactatactttggttggcagcattccatgagctgattttcctgaaacactaaagagaaatgtcttttgtgctacagtttcgtagcatgagtttaaatcaagattatgatgagtaaatgtgtatgggttaaatcaaagataaggttatagtaacatcaaagattaggtgaggtttatagaaagatagatatccaggcttaccaaagtattaagtcaagaatataatatgtgatcagctttcaaagcatttacaagtgctgcaagttagtgaaacagctgtctccgtaaatggaggaaatgtggggaagccttggaatgcccttctggttctggcacattggaaagcacactcagaaggcttcatcaccaagattttgggagagtaaagctaagtatagttgatgtaacattgtagaagcagcataggaacaataagaacaataggtaaagctataattatggcttatatttagaaatgactgcatttgatattttaggatatttttctaggttttttcctttcattttattctcttctagttttgacattttatgatagatttgctctctagaaggaaacgtctttatttaggagggcaaaaattttggtcatagcattcacttttgctattccaatctacaactggaagatacataaaagtgctttgcattgaatttgggataacttcaaaaatcccatggttgttgttagggatagtactaagcatttcagttccaggagaataaaagaaattcctatttgaaatgaattcctcatttggaggaaaaaaagcatgcattctagcacaacaagatgaaattatggaatacaaaagtggctccttcccatgtgcagtccctgtccccccccgccagtcctccacacccaaactgtttctgattggcttttagctttttgttgtttttttttttccttctaacacttgtatttggaggctcttctgtgattttgagaagtatactcttgagtgtttaataaagtttttttccaaaagta

SEQ ID NO: 168945 - protein, 426 aa, Artificial Sequence
  derived and/or modified sequence
MGTLSAPPCTQRIKWKGLLLTASLLNFWNLPTTAQVTIEAEPTKVSEGKDVLLLVHNLPQNLTGYIWYKGQMRDLYHYITSYVVDGEIIIYGPAYSGRETAYSNASLLIQNVTREDAGSYTLHIIKGDDGTRGVTGRFTFTLHLETPKPSISSSNLNPRETMEAVSLTCDPETPDASYLWWMNGQSLPMTHSLKLSETNRTLFLLGVTKYTAGPYECEIRNPVSASRSDPVTLNLLPKLPKPYITINNLNPRENKDVLNFTCEPKSENYTYIWWLNGQSLPVSPRVKRPIENRILILPSVTRNETGPYQCEIRDRYGGIRSDPVTLNVLYGPDLPRIYPSFTYYRSGEVLYLSCSADSNPPAQYSWTINEKFQLPGQKLFIRHITTKHSGLYVCSVRNSATGKESSKSMTVEVSGKWIPASLAIGF

SEQ ID NO: 168946 - DNA, 1281 bp, Artificial Sequence
  derived and/or modified sequence
atgggcacactcagtgcacctccctgcacccagaggatcaaatggaagggtctgcttctaaccgcctcattacttaacttttggaacctcccaaccacagcacaggttactatagaagccgagccaactaaggtcagtgagggaaaggacgtcctgctgttagttcacaaccttccccaaaatctgacagggtatatctggtacaaagggcagatgcgtgatctctaccactacatcaccagctacgttgtagatggcgagatcatcatttatggcccggcatattcaggaagggagaccgcttactcgaatgccagtctcctgatccaaaacgtgaccagagaggacgccgggagctacacactccacattatcaaaggagacgatgggaccaggggggtgaccggacggtttactttcaccttacatctcgaaacccccaagccttccatatcttcatctaatttaaacccacgcgaaactatggaggccgtaagtctgacttgcgaccccgagacgcctgatgcctcttacctctggtggatgaacggacaatctctccccatgacccactctttgaagctgtctgagaccaatagaactctcttcctgttgggcgtaacaaaatatactgccggaccctacgaatgcgaaattaggaatccagtgagtgcttcccgttctgatccggtgaccttgaacttattgcccaaacttccgaaaccttacatcacgattaacaacctgaaccctagagagaataaggatgtactgaacttcacatgtgaaccgaaaagtgaaaactatacttacatctggtggcttaatggacagtcactgcctgtcagtccccgcgtcaaaagaccaattgagaatcgaatcttaattctccccagtgtgactagaaacgagacgggtccctaccaatgcgagatccgggatagatacggcggtatcagaagcgaccctgttactttaaacgttctgtacgggccggacctacctcggatctatcccagctttacatattatcgctctggagaggtactctatctgtcctgttctgccgattccaaccccccagctcaatattcgtggaccatcaatgagaagttccagctgccagggcagaagctgttcattaggcatataacaacaaagcacagcgggctgtatgtttgctcggtacgcaatagcgccacaggcaaggaatcttctaagtctatgacagtggaagtttctggcaaatggattcctgcctccctggccatcggcttttag

SEQ ID NO: 168947 - DNA, 1281 bp, Artificial Sequence
  derived and/or modified sequence
atgggcaccctgagcgccccaccctgcacccagaggatcaagtggaagggcctgctgctgacagccagcctgctgaacttctggaacctgcccaccacagcccaggtgaccatcgaggccgagcccaccaaggtgtctgagggcaaggatgtgctgctgctggtgcacaacctgccccagaacctgaccggctacatctggtacaagggccagatgagggacctgtaccactacatcaccagctatgtggtggatggagagatcatcatctacggccctgcctacagcggccgggagacagcctacagcaatgccagcctgctgatccagaatgtgaccagagaagatgctggcagctacaccctgcacatcatcaagggagatgatggcacccggggcgtgacaggccgcttcaccttcaccctgcacctggagacccccaagcccagcatcagcagcagcaacctgaacccccgggagaccatggaggccgtgtccctgacctgtgaccctgagaccccagatgccagctacctgtggtggatgaatggccagagcctgcccatgacccacagcctgaagctgtctgagaccaacagaaccctcttcctgctgggcgtgaccaagtacacagctggcccctatgaatgtgagatccggaaccctgtgtctgccagcagaagtgaccctgtgaccctgaacctgctgcccaagctgcccaagccctacatcaccatcaacaacctgaacccccgggagaacaaggatgtgctgaacttcacctgtgagcccaagtctgagaactacacctacatctggtggctgaatggccagagcctgcctgtgagcccccgggtgaagaggcccattgaaaatcgcatcctgatcctgcccagcgtgaccagaaatgaaacaggcccctaccagtgtgagatccgggacagatatggaggcatccgcagtgaccctgtgaccctgaatgtgctgtatggccctgacctgccccgcatctaccccagcttcacctactaccgcagcggggaggtgctgtacctgagctgcagcgctgacagcaaccccccagcccagtacagctggaccatcaatgagaagttccagctgcccggccagaagctgttcatccgccacatcaccaccaagcacagcggcctgtatgtgtgcagcgtgagaaattctgccaccgggaaggagagcagcaagtccatgacagtggaggtgtctgggaagtggatcccagccagcctggccatcggcttctag

SEQ ID NO: 168948 - DNA, 1281 bp, Artificial Sequence
  derived and/or modified sequence
atgggcaccctgagcgcccccccctgcacccagcggatcaagtggaaggggctcctccttaccgcgtcactgctaaacttctggaacctcccaaccacggcccaggtaactatcgaagccgaacccaccaaggtatcagaaggcaaagacgtcttgcttctggtgcataatctcccccagaatctaacagggtacatctggtacaagggacagatgcgagacttgtatcactatattacgtcgtatgtcgttgacggtgaaatcatcatctacgggccggcttacagcggaagagagacagcttactccaacgcctcactgctcatccagaatgtgacccgcgaggatgccggcagttacacccttcatattatcaagggagacgacggtacccgtggcgtgaccgggaggtttaccttcaccctgcatcttgagactcccaaaccaagcatctcgtcttcaaacctgaacccacgagaaaccatggaagccgtgtcactcacctgcgaccctgagactccggacgcatcttacttgtggtggatgaatggccagagtctcccaatgacgcactccctcaagctatcagaaacaaatcggactctgtttctactgggcgtgaccaaatatactgcaggaccttacgaatgtgagatacgaaaccccgtgagcgccagtcgatcagatccagttacattaaatctgctcccgaagctgcccaagccatacatcaccatcaacaacctgaaccccagagaaaataaagatgtgctgaactttacctgtgaacccaagtccgagaattatacctacatctggtggctcaatgggcagtcactaccagtgtctccacgagtgaagagacctatcgaaaacagaatcctgattctgccatcagttacacgaaacgagaccggcccttaccagtgcgagatcagggatcggtatggaggaatccgaagtgaccctgtaaccctgaacgtgctttacggaccagacttgccccgaatatacccgtccttcacgtactaccgaagcggagaggtcttgtacctgtcctgttccgccgatagtaatccccctgcccagtactcctggacaatcaatgaaaagttccagcttccaggccaaaagcttttcatacgccacatcactactaagcactccggcttgtacgtttgttctgtcagaaactcagccaccggcaaagagagcagcaagagcatgacagtggaggtaagcggtaaatggatacctgcaagccttgccattggattttag

SEQ ID NO: 168949 - DNA, 2276 bp, Artificial Sequence
  derived and/or modified sequence
gagcttgagaattgctcctgccctgggaagaggctcagcacagaaagaggaaggacagcacagctgacagccgtgctcagagagtttctggatcctaggcttatctccacagaggagaacacacaagcagcagagaccatgggaaccctctcagcccctccctgcacacagcgcatcaaatggaaggggctcctgctcacagcatcacttttaaacttctggaacctgcccaccactgcccaagtcacgattgaagccgagccaaccaaagtttccgaggggaaggatgttcttctacttgtccacaatttgccccagaatcttaccggctacatctggtacaaagggcaaatgagggacctctaccattacattacatcatatgtagtagacggtgaaataattatatatgggcctgcatatagtggacgagaaacagcatattccaatgcatccctgctgatccagaatgtcacccgggaggacgcaggatcctacaccttacacatcataaagggagatgatgggactagaggagtaactggacgtttcaccttcaccttacacctggagactcctaagccctccatctccagcagcaacttaaatcccagggagaccatggaggctgtgagcttaacctgtgaccctgagactccagacgcaagctacctgtggtggatgaatggtcagagcctccctatgactcacagcttgaagctgtccgaaaccaacaggaccctctttctattgggtgtcacaaagtatactgcaggaccctatgaatgtgaaatacggaacccagtgagtgccagccgcagtgacccagtcaccctgaatctcctcccgaagctgcccaagccctacatcaccatcaacaacttaaaccccagggagaataaggatgtcttaaacttcacctgtgaacctaagagtgagaactacacctacatttggtggctaaatggtcagagcctcccggtcagtcccagggtaaagcgacccattgaaaacaggatcctcattctacccagtgtcacgagaaatgaaacaggaccctatcaatgtgaaatacgggaccgatatggtggcatccgcagtgacccagtcaccctgaatgtcctctatggtccagacctccccagaatttacccttcattcacctattaccgttcaggagaagtcctctacttgtcctgttctgcggactctaacccaccggcacagtattcttggacaattaatgaaaagtttcagctaccaggacaaaagctctttatccgccatattactacaaagcatagcgggctctatgtttgctctgttcgtaactcagccactggcaaggaaagctccaaatccatgacagtcgaagtctctggtaagtggatcccagcatcgttggcaatagggttttaggtggagtctatctggcattcagagaagagtcaggaaaacaattgtattcccagcctgtgtcccatgggcacaagcaaatcccaaattctcctcctgaaccctccaaatttgtctaagaacttcgaaaactttaacaaacaggctgatatcttcataatattcccagcctagaccaagcaggaagaacattgatttcattgaaataattgataataatgaagataatgtttttatgatttttatttgaaaatttgctgattctttaaatggtttgttttctacattgatggaatttttctcttttaatctatctacagcttatagcagttcaataaactatacttctgggaaccgtaattgaaacatttacttttgctttctacctgactgccccagaattgggcaactattcatgagaattgatatgtttatggtaatacacatatttgcacaagtacagtaacaatctgctttctttgtaacatgacacatttgaaatcattggttatattaccaatgctttgattcggatgttatattaaaaacatagatagaatgaaccaatatgaactgcaggcaaagtctgaagtcagccttggtttggcttcctattctcaagaggtttgtgaagatttaatctcagattccttataaaaacttagagaaaagaaaattttagaagacagcctacatggtccattgctactcttgctgcacttatgtaaacaatcagaccacatttgaagaaactccacctattttgcaaacaaacttattctactgaaattatcattggtaaaagtagagatgcccatagagggaaaaattatgtggaaaataaaaactgtagtatacct

SEQ ID NO: 168950 - DNA, 1281 bp, Artificial Sequence
  derived and/or modified sequence
atgggaacactgtcagccccaccatgtacacaacggattaaatggaagggtctgctgctgacggcttctttactgaacttctggaatttgcctacgactgcacaggtgaccattgaagcggagcccacaaaagtatccgaggggaaggacgttcttcttttggttcataatctcccccagaacctcaccggatacatttggtataaagggcagatgagggatctctaccactatatcaccagttatgtggtcgacggtgaaataatcatttacggtcccgcatacagtggtcgcgagactgcatactcaaacgcatctttactgatccagaacgttacgcgggaggacgccggttcctacacactgcacattatcaagggcgacgacggcacacggggtgtcaccggccgttttacatttactttgcatctagagaccccaaagccttcaatctcctcttccaacctgaaccccagagagacaatggaggccgtgtccctgacatgtgacccagagacgcctgacgcaagctacctttggtggatgaatggacagtctctgcctatgacccattcgcttaagctttctgagacaaatcggacgctgttcctcctgggggtcacaaagtatacagccggtccctacgagtgtgagatacgtaaccctgtgtccgctagccgatctgatcccgtgaccttgaatctgctgcccaaactccctaagccctatatcactatcaacaaccttaatccgcgtgaaaacaaagatgtgctaaatttcacctgtgagcccaaaagcgagaattacacttacatctggtggctcaatggccagagcctgccggtgtctccccgtgtcaagcggcctatcgaaaatcggatactgatcctccccagcgttacccgcaatgaaactgggccttatcaatgcgagataagagataggtatgggggtataaggtcagatccagtgacattgaatgttctgtacgggccagacctcccccgtatttatccatcgtttacttactatcgctcaggggaggtgctgtatctttcttgttccgcggacagcaacccccctgcccagtactcttggaccattaacgagaagttccagctgcccggacagaagctgttcatcagacatataacaaccaaacactcaggcctctatgtgtgcagtgtcagaaattccgcaacaggcaaggagtcaagcaagagcatgaccgtcgaagtctcaggaaaatggattcccgcatctttggccataggcttctag

SEQ ID NO: 168951 - DNA, 1281 bp, Artificial Sequence
  derived and/or modified sequence
atgggcaccctgagcgcccccccctgcacccagagaatcaagtggaagggcctgctgctgaccgccagcctgctgaacttctggaacctgcccaccaccgcccaggtgaccatcgaggccgagcccaccaaggtgagcgagggcaaggacgtgctgctgctggtgcacaacctgccccagaacctgaccggctacatctggtacaagggccagatgagagacctgtaccactacatcaccagctacgtggtggacggcgagatcatcatctacggccccgcctacagcggcagagagaccgcctacagcaacgccagcctgctgatccagaacgtgaccagagaggacgccggcagctacaccctgcacatcatcaagggcgacgacggcaccagaggcgtgaccggcagattcaccttcaccctgcacctggagacccccaagcccagcatcagcagcagcaacctgaaccccagagagaccatggaggccgtgagcctgacctgcgaccccgagacccccgacgccagctacctgtggtggatgaacggccagagcctgcccatgacccacagcctgaagctgagcgagaccaacagaaccctgttcctgctgggcgtgaccaagtacaccgccggcccctacgagtgcgagatcagaaaccccgtgagcgccagcagaagcgaccccgtgaccctgaacctgctgcccaagctgcccaagccctacatcaccatcaacaacctgaaccccagagagaacaaggacgtgctgaacttcacctgcgagcccaagagcgagaactacacctacatctggtggctgaacggccagagcctgcccgtgagccccagagtgaagagacccatcgagaacagaatcctgatcctgcccagcgtgaccagaaacgagaccggcccctaccagtgcgagatcagagacagatacggcggcatcagaagcgaccccgtgaccctgaacgtgctgtacggccccgacctgcccagaatctaccccagcttcacctactacagaagcggcgaggtgctgtacctgagctgcagcgccgacagcaacccccccgcccagtacagctggaccatcaacgagaagttccagctgcccggccagaagctgttcatcagacacatcaccaccaagcacagcggcctgtacgtgtgcagcgtgagaaacagcgccaccggcaaggagagcagcaagagcatgaccgtggaggtgagcggcaagtggatccccgccagcctggccatcggcttctag

SEQ ID NO: 168952 - protein, 565 aa, Artificial Sequence
  derived and/or modified sequence
MNYEGARSERENHAADDSEGGALDMCCSERLPGLPQPIVMEALDEAEGLQDSQREMPPPPPPSPPSDPAQKPPPRGAGSHSLTVRSSLCLFAASQFLLACGVLWFSGYGHIWSQNATNLVSSLLTLLKQLEPTAWLDSGTWGVPSLLLVFLSVGLVLVTTLVWHLLRTPPEPPTPLPPEDRRQSVSRQPSFTYSEWMEEKIEDDFLDLDPVPETPVFDCVMDIKPEADPTSLTVKSMGLQERRGSNVSLTLDMCTPGCNEEGFGYLMSPREESAREYLLSASRVLQAEELHEKALDPFLLQAEFFEIPMNFVDPKEYDIPGLVRKNRYKTILPNPHSRVCLTSPDPDDPLSSYINANYIRGYGGEEKVYIATQGPIVSTVADFWRMVWQEHTPIIVMITNIEEMNEKCTEYWPEEQVAYDGVEITVQKVIHTEDYRLRLISLKSGTEERGLKHYWFTSWPDQKTPDRAPPLLHLVREVEEAAQQEGPHCAPIIVHCSAGIGRTGCFIATSICCQQLRQEGVVDILKTTCQLRQDRGGMIQTCEQYQFVHHVMSLYEKQLSHQSPE

SEQ ID NO: 168953 - DNA, 1698 bp, Artificial Sequence
  derived and/or modified sequence
atgaattacgagggggcaaggagtgagcgagaaaatcatgcagccgacgattctgagggtggcgcccttgacatgtgctgtagcgagcggctgccaggcttgccgcagccaattgtcatggaagcactcgatgaggcagagggcctgcaggatagtcagcgggagatgcccccccctccccccccaagcccaccaagcgacccggctcagaagcccccaccgcgaggtgctggctcccactccctcaccgtgcggtccagtctctgcttgttcgctgcttctcaattccttctggcctgtggggtgctctggttctcaggttacggacacatctggagtcagaacgccaccaacctcgtgagcagtttgcttaccctgctgaaacagctggagccgactgcatggctcgattctggcacttggggagtgccgtcccttctgctggtgttcctgtcggttggcctggtattggtaacgacactagtttggcatctgttgcggacacctcctgaacctccaacccccctgccacctgaagacaggcgacagtccgtgagcaggcagccgagctttacatattcagagtggatggaggaaaaaattgaggacgatttcctggacctagatccggtacctgagacacctgtcttcgattgcgtgatggatataaaacccgaggccgaccctactagtctcaccgtaaagtctatggggcttcaggagcggcgaggcagcaatgtgtctcttaccctcgacatgtgcactcccgggtgcaacgaagaagggtttggctaccttatgtcccctcgggaagaatccgcacgggaatacttgttgtctgctagcagagtgttacaggccgaagagttacacgaaaaagctctggacccattccttctgcaggccgaatttttcgagataccaatgaatttcgttgaccccaaggagtacgatattcctgggctcgtgcggaagaataggtacaagaccatactgccaaatccccatagccgggtctgcctgaccagccccgatccagatgaccctctgtcctcatatatcaatgctaattatattcgcgggtacggtggtgaagaaaaagtatatattgcaacccagggtcctatagtgtccaccgtcgctgatttttggcgtatggtctggcaagagcacactccaattatcgtaatgattactaacattgaggagatgaatgaaaaatgtacggaatactggcccgaagaacaggtggcctacgacggcgtggagattaccgtccagaaagtaattcatacggaggactatcgacttcgcctcattagtctcaagtctggtactgaagaaaggggactaaaacactactggttcacaagctggcctgaccagaagacaccggatagggcgcctccattgctacacctggttcgggaggtcgaagaggcggctcaacaggaagggcctcattgtgccccaatcatcgtgcattgctctgcagggatcggcagaacaggttgcttcattgccacctccatatgttgtcagcagcttagacaggagggggtggttgatattctgaaaaccacttgtcagctgcgacaggatcggggcggcatgatccagacgtgcgaacagtatcagttcgtccaccatgttatgagcctgtatgaaaagcaactcagccaccaaagcccagaatag

SEQ ID NO: 168954 - DNA, 1698 bp, Artificial Sequence
  derived and/or modified sequence
atgaactacgaaggcgctagatctgaaagagagaaccacgccgctgacgacagtgaaggaggggctctggacatgtgttgttccgagagactgccaggactgcctcagccgattgtgatggaagccttggatgaagccgagggtctgcaggactcgcaacgcgaaatgcctcctcctccccccccatcaccaccttctgaccccgctcaaaagcctccccctaggggcgccggatcccatagccttaccgtacgctcgtccctctgcctcttcgccgcatctcaattcctcctggcctgcggtgtcctgtggttcagcggatatggccacatctggagtcagaacgccaccaatcttgtcagctcgctgctcaccctattaaaacagctcgaacctacagcatggctggattctggtacttggggcgttccctccttgctgctggttttcttgtccgttggcctcgtgctggtgactacactcgtctggcatcttctgcggacccctcccgagcctccaacgccactccctccagaggatcggagacagagcgtcagtaggcagccgtctttcacatattcagaatggatggaggaaaagatagaggacgacttcctggatttggatccggtacctgaaacaccggtgttcgactgtgtgatggacattaagcccgaggccgatcccacaagtctgacagtgaagagtatgggactgcaggagcgcagggggtcgaacgtcagtctgacactggacatgtgcacccctgggtgcaacgaggaggggttcggctaccttatgtctccgcgagaggagagcgctcgcgaataccttctgtccgcaagccgggtgcttcaggccgaggaattgcacgaaaaagcactcgatccctttctcctgcaggccgaatttttcgagattcccatgaactttgtggacccgaaggagtatgacattcccggtttggttcgcaagaaccgctacaaaacaatcctccccaaccctcacagtcgcgtctgcttaacctcacccgacccggacgatcctctttcctcatacatcaatgctaattacattcggggctacggcggtgaggagaaggtatatatcgctacacaaggccctatagtgagcacagtcgctgacttttggagaatggtgtggcaggaacatacgcccattatcgtgatgataacgaacatcgaggagatgaatgaaaagtgtacggagtattggcccgaagaacaggtcgcctatgacggtgtggaaataacagtacagaaagtaattcacaccgaggattacagactgaggctgataagtctcaaatctggcactgaagaacggggactcaagcattattggttcacgtcttggcccgaccagaaaactcccgatcgcgcaccccctcttctccacttagtccgcgaggtggaggaggctgcccagcaggaagggcctcactgcgcacccatcatagtgcactgctctgccggaattgggcggacaggttgtttcattgctacaagtatctgttgccagcagctgcgccaggagggggtggtggatattctcaaaacgacttgccaactgcgtcaggataggggtgggatgatccagacctgtgagcagtaccaattcgtgcatcacgtgatgtcgttgtacgagaagcagctatcgcaccaaagccctgagtag

SEQ ID NO: 168955 - DNA, 1698 bp, Artificial Sequence
  derived and/or modified sequence
atgaactatgaaggagcccggagtgaaagagaaaatcatgctgctgatgacagcgagggcggggccctggacatgtgctgcagcgagcggctgcccggcctgccccagcccatcgtgatggaggccctggatgaggccgagggcctgcaggacagccagcgggagatgcctcctcctcctccacccagcccccccagcgaccctgcccagaagcccccaccaagaggagctggcagccacagcctgactgtgcgcagcagcctgtgcctgtttgctgccagccagttcctgctggcctgtggggtgctgtggttcagcggctacggccacatctggagccagaatgccaccaacctggtgagcagcctgctgaccctgctgaagcagctggagcccacagcctggctggacagcggcacctggggcgtgcccagcctgctgctggtgttcctgtctgtgggcctggtgctggtgaccaccctggtgtggcacctgctgcggaccccacctgagccccccacccccctgcccccagaagatcggcggcagagcgtgtcccggcagcccagcttcacctacagcgagtggatggaggagaagattgaagatgacttcctggacctggaccctgtgcctgagacccctgtgtttgactgtgtgatggacatcaagccagaggccgaccccaccagcctgactgtgaagtccatgggcctgcaggagcggcggggcagcaatgtgtccctgaccctggacatgtgcaccccaggctgcaatgaggagggcttcggctacctgatgagcccccgggaggagagcgcccgggagtacctgctgagcgccagccgggtgctgcaggccgaggagctgcacgagaaggccctggaccccttcctgctgcaggccgagttctttgagatccccatgaactttgtggaccccaaggagtatgacatccctggcctggtgaggaagaaccgctacaagaccatcctgcccaacccccacagccgggtgtgcctgaccagcccagaccctgatgaccccctgagcagctacatcaatgccaactacatccggggctacggcggggaggagaaggtgtacatcgccacccagggccccatcgtgtccacagtggccgacttctggaggatggtgtggcaggagcacacccccatcatcgtgatgatcaccaacatcgaggagatgaatgaaaaatgtacagagtactggccagaggagcaggtggcctatgatggagtggagatcaccgtgcagaaggtgatccacacagaggactaccgcctgcggctcatcagcctgaagagcggcacagaggagcggggcctgaagcactactggttcacctcctggccagaccagaagaccccagaccgggccccacccctgctgcacctggtgcgggaggtggaggaggccgcccagcaggagggcccccactgtgcccccatcatcgtgcactgcagcgctggcatcggccgcacaggctgcttcatcgccaccagcatctgctgccagcagctgcggcaggagggcgtggtggacatcctgaagaccacctgccagctgcggcaggaccggggcggcatgatccagacctgtgagcagtaccagtttgtgcaccacgtgatgagcctgtatgagaagcagctgagccaccagagccctgagtag

SEQ ID NO: 168956 - DNA, 1698 bp, Artificial Sequence
  derived and/or modified sequence
atgaactacgagggcgcccggagcgagcgggagaaccacgccgccgacgactcagaggggggcgccctagacatgtgctgttctgagcgacttcctggcctaccacagcctatcgtaatggaggcactcgatgaagccgaaggactccaagattcccaaagggaaatgcctccaccccctcctccaagtcccccgtcagatcctgcacaaaagccgccaccccgaggcgctggcagccattccctaacggtcagaagctccttatgtctgtttgcggcgtcacagtttctcctggcatgtggtgtgttgtggtttagcggatatggccatatctggtcacagaacgctaccaacttggtgagctctcttctgactctcctaaaacagctcgagcctaccgcctggctggacagtggaacctggggcgtcccgagccttctcctggtgttcctgtcagttggtctcgtcctggtaacgacactggtttggcacctcctaagaacccctcccgagcctcctacaccactccctcctgaagaccgtcgccagtccgtctctaggcagccttcctttacctacagcgagtggatggaagagaaaattgaggacgactttttagacctcgaccccgttcccgagacaccggtttttgattgcgttatggacattaagcctgaggccgacccgacgtcgcttaccgtgaagtctatgggtttacaagagagacgcgggtccaacgtgtccctcactctggatatgtgtaccccaggttgcaatgaggagggctttggatatcttatgtcaccccgcgaggaatccgcgagggagtacttgctgagtgccagccgcgttctgcaggccgaggagctccatgagaaggcgcttgatccattcctactccaggccgagttcttcgaaattcctatgaatttcgtcgacccaaaggaatacgacatcccgggtctggtaaggaaaaatagatacaagacgattctgccaaaccctcatagtagggtgtgtctcaccagccccgaccccgacgacccactgtcaagttacattaacgctaactacatcaggggatacgggggtgaagagaaggtttatattgccacacagggacctatcgtgagtacagtggccgatttttggcgcatggtctggcaggagcataccccaatcatagtgatgattaccaatattgaagaaatgaatgaaaagtgtacggagtactggcccgaggagcaggtcgcctacgacggcgtcgagatcaccgtgcagaaggttatccatacagaggactacaggttgagactgatttccctcaagtcagggaccgaggagaggggactcaagcactattggtttacatcttggcccgatcaaaaaactccggacagagctccacctctcctacatctggtgcgcgaagtggaggaagccgcgcagcaggagggaccgcactgtgcgccaatcatcgtgcattgttctgcgggaatcggtagaaccgggtgtttcattgcaacgtccatttgctgtcagcagttacgtcaagaaggtgtggttgacatcctcaagacgacatgtcagctgcgccaggaccgcgggggaatgattcaaacctgcgagcaatatcagttcgtccaccacgtcatgagcctttacgaaaaacagctttctcaccaatctcccgaatag

SEQ ID NO: 168957 - DNA, 1698 bp, Artificial Sequence
  derived and/or modified sequence
atgaactacgagggcgcccggagcgagcgggagaaccacgccgccgatgactccgagggcggagccctggacatgtgttgcagtgagcgcctccccggtctgccccagcccattgtgatggaggcattagacgaggccgaaggcttacaagactcccagcgagagatgccaccaccaccccctcccagcccaccaagcgaccctgcccagaagcccccaccccggggggcaggaagccacagtctgactgtgagaagcagcctgtgtttattcgcggcatcgcagttcctgctagcctgcggagttctctggttttccggatatggacatatttggagccagaacgcaacgaatctggtgtcttccttactgactctgctcaaacagctggaacccacagcttggttggacagcggcacatggggtgtgccgtccttactactggtgttcctctctgtcggcctagtgctggttactacacttgtgtggcacttgcttcgaacccctcccgaaccgcctacgcccctcccaccagaagaccggaggcaaagcgtctccagacagcctagtttcacttattcggagtggatggaagagaaaattgaggatgattttctggacctggatcccgtacctgagacgccggtgtttgattgcgtcatggacataaaaccggaagctgatccaacatcattgaccgtaaaatctatgggactccaagagagacgtgggtcaaatgtgtccctgaccctggacatgtgtacacctggctgcaacgaggaaggatttggatatctgatgtctcctagggaggaatccgccagagagtacctactgtccgccagtagagtgctgcaggcagaggagcttcacgagaaagcccttgaccccttcctcctgcaggccgaattcttcgaaattccaatgaatttcgtcgaccccaaggagtatgatattccaggcttagtgcggaaaaatcgctacaaaaccatccttcctaacccacattctcgcgtgtgtctgacgtctcctgaccctgacgatcccctttcttcatacataaacgcaaattacatcaggggatacggtggtgaggagaaggtgtacatagccacccagggtcccatcgtgagcacagtagcagatttttggagaatggtctggcaggaacatacacctataatcgtgatgatcactaatatcgaagagatgaacgagaagtgcactgaatactggccagaggagcaggttgcttacgatggggtcgagattaccgtccaaaaggtgattcacacggaggattatagactgaggttaatttccttgaagtcaggcactgaggaaagaggtttgaaacactactggtttacatcatggcccgatcaaaagacgccggatcgggctcccccactgctccacctggtccgggaagtggaagaagccgcccagcaggagggtcctcattgcgctcccattatagtgcattgcagcgctggcataggacgcacgggctgttttatcgcaaccagtatatgttgccagcagctgagacaggagggagtggtcgacatattgaaaaccacatgccagctgcggcaggataggggcggtatgatccagacatgtgagcaatatcagttcgttcaccatgtaatgagcctgtatgagaaacaattatcacaccagtccccagaatag

SEQ ID NO: 168958 - DNA, 1698 bp, Artificial Sequence
  derived and/or modified sequence
atgaattacgaaggcgcacggtctgagcgagagaaccacgctgctgatgacagcgaggggggtgcccttgacatgtgctgctctgagcgcttgccaggcctgccccagccaattgtcatggaagccctcgatgaggccgagggactccaggactcgcagcgggagatgcctcccccaccgccaccgtccccaccatccgatccagcacagaaaccacctcccaggggcgctggctcccattccctgaccgtcaggagctctttgtgtctattcgccgcttcccagtttctgctcgcatgtggcgttctgtggttctctgggtacgggcacatctggtcccagaacgcaactaacctggtgtcttccctgctcacactgttgaaacagctcgagccaacagcatggctggactcaggaacttggggagtacctagtttgttgttagtcttcttaagcgtcggtttagtcctggtgactaccctggtatggcacctcctgcggacccctccagagccacccactcccttgccccctgaagaccggcgacaaagcgttagccggcagccgtccttcacatactcagagtggatggaggagaagatcgaggatgatttcttagacttggatcctgtccctgaaacacccgtgttcgactgtgtaatggatatcaaacccgaggcagatcccactagtttaaccgttaagagcatgggtctgcaggaaaggcgtggatcaaatgtgtccctgacgctggacatgtgcacacccggatgcaacgaagagggctttggctacttgatgtccccaagagaagagagtgcacgagagtatctcctctctgcaagcagagtactgcaggcagaggagctacacgagaaagccctggatccatttctgttacaggctgagttcttcgaaatacctatgaactttgttgatcctaaagaatatgatataccgggactggtccggaaaaatagatataaaacaatcctgccgaacccgcacagcagagtgtgcctgacaagccctgacccagacgatccattgagctcttatataaatgcaaattatattagaggatatggcggagaggaaaaggtgtacattgcaactcaggggcctatcgtgagcactgtggcagatttttggcggatggtctggcaggagcacaccccaatcatcgttatgatcacgaacattgaggagatgaatgagaagtgtactgagtactggcctgaggaacaagtagcatacgacggagtcgagatcactgtccagaaagtgatccatactgaggactacaggctgagactaatcagccttaagtcaggtacggaggagcgcggtcttaaacattattggttcacatcctggccagatcagaagacgccagatagagcgcctccactgcttcatttggtgagggaggtggaagaggccgcacagcaagaaggccctcactgtgctccgattatcgtgcactgttccgcgggaattggtagaaccgggtgcttcattgctacgtcaatctgttgccaacagctgaggcaagaaggagttgtggacatattaaaaaccacttgccagctcaggcaggaccgtgggggaatgattcaaacctgcgaacaatatcaattcgtccatcatgtgatgtcattatatgagaaacagttaagccaccagtcccctgagtag

SEQ ID NO: 168959 - DNA, 1698 bp, Artificial Sequence
  derived and/or modified sequence
atgaactacgaaggagctaggtctgagcgagagaaccacgctgccgacgatagtgagggcggtgctcttgacatgtgctgcagcgagagactaccaggcctgcctcagcctatcgtgatggaggccctggacgaggcagaaggactccaagatagtcagcgggagatgccccctccacctcccccatcccccccatctgaccccgcacagaagccccctcctaggggtgcaggcagccactcattgacggtgcggtctagcctgtgcctgttcgctgcctctcagtttctgctggcatgcggtgtgttgtggttctccggctacggacatatttggagtcagaatgctaccaatctcgtgtcgtccctcctgacgctgctgaaacagcttgaacctactgcctggcttgactcagggacgtggggggtgcctagtctgctgcttgtgtttctgagtgtgggcctcgttcttgtcactacactggtctggcacttactcaggactcctccagaacccccaaccccactacctccggaggaccgcagacagtccgtttctcgccagccaagtttcacgtacagcgagtggatggaggaaaagattgaggatgactttctcgacttggatcctgtaccagagactccagttttcgactgtgttatggacatcaaacccgaagccgaccctacgagtctgacagtgaagtcgatgggcttacaggaaagaagaggcagcaatgtcagtctgacgctcgatatgtgcaccccaggctgtaatgaggagggttttggatatcttatgtctccacgtgaagagagcgcgcgtgaatatttgctgtctgccagccgggtgctacaggccgaagaactgcatgagaaagccctggatccatttttactgcaagccgaattctttgaaattccgatgaacttcgttgaccccaaagaatacgatattcccggactcgtgcgcaagaacagatataagactatcttgccaaatcctcatagtagagtgtgtttgacttcccccgacccagacgaccctctctcgagttatatcaatgcaaactacatcaggggatatggcggagaggaaaaagtgtacatagcaacccagggcccaatcgtgtccaccgtggctgatttctggagaatggtctggcaagaacatacccctattatagtcatgattaccaacatcgaggaaatgaacgaaaaatgtaccgaatattggcccgaggagcaggttgcatatgatggcgtggagatcaccgtgcaaaaagtgatacataccgaagactacagactgaggctgatctctttgaagagcggcacagaagaaagagggcttaaacattactggttcactagttggcccgaccaaaaaacacccgatcgcgctccacccctcctgcacctagttcgagaagttgaagaagcagctcaacaggaagggcctcattgcgcccctattatcgtacactgtagtgcagggatcggacggaccggatgtttcatcgctacgagcatttgctgtcagcagctccgacaggaaggagttgtcgacatcctgaaaacgacgtgtcagctgcgtcaggaccgcggaggtatgatacagacatgtgagcaataccagttcgtccaccacgtgatgagcctctatgagaagcaactgtcccatcagtctccagagtag

SEQ ID NO: 168960 - DNA, 3135 bp, Artificial Sequence
  derived and/or modified sequence
gccggggctggggggtgccaaacccacccggcggctgcgccagcgactctgcagctgaagcgcatttggtgaggcggtcgggcgagggagcgcgcacggagcgcgggacggagcgccaggcggacggaccgaaggacggaggcaccgaaggacggacgcccccgcacacgcagacgcacagagctcggcgcggcccccgtcgcatacacactggcacagacacaagcagggacacacgcagacacacgcacactcgcgcgcgcatcctcccgccagcctgcccgcctgctcgccggcgcccggagcccgctctggccgctggatgatctgaagctgccctctctccttcatttatatcaccagcttgctttttgctgagaaagcttcctgccctggaagatggcacccttccccatccagacaccttgggaatgaattatgagggagccaggagtgagagagagaaccacgctgctgatgactccgagggaggggccctggacatgtgctgcagtgagaggctaccgggtctcccccagccgatagtgatggaggcactggacgaggctgaagggctccaggactcacagagagagatgccgccaccccctcctccctcgccgccctcagatccagctcagaagccaccacctcgaggcgctgggagccactccctcactgtcaggagcagcctgtgcctgttcgctgcctcacagttcctgcttgcctgtggggtgctctggttcagcggttatggccacatctggtcacagaacgccacaaacctcgtctcctctttgctgacgctcctgaaacagctggaacccacggcctggcttgactctgggacgtggggagtccccagtctgctgctggtctttctgtccgtgggcctggtcctcgttaccaccctggtgtggcacctcctgaggacacccccagagccacccaccccactgccccctgaggacaggcgccagtcagtgagccgccagccctccttcacctactcagagtggatggaggagaagatcgaggatgacttcctggacctcgacccggtgcccgagactcctgtgtttgattgtgtgatggacatcaagcctgaggctgaccccacctcactcaccgtcaagtccatgggtctgcaggagaggaggggttccaatgtctccctgaccctggacatgtgcactccgggctgcaacgaggagggctttggctatctcatgtccccacgtgaggagtccgcccgcgagtacctgctcagcgcctcccgtgtcctccaagcagaagagcttcatgaaaaggccctggaccctttcctgctgcaggcggaattctttgaaatccccatgaactttgtggatccgaaagagtacgacatccctgggctggtgcggaagaaccggtacaaaaccatacttcccaaccctcacagcagagtgtgtctgacctcaccagaccctgacgaccctctgagttcctacatcaatgccaactacatccggggctatggtggggaggagaaggtgtacatcgccactcagggacccatcgtcagcacggtcgccgacttctggcgcatggtgtggcaggagcacacgcccatcattgtcatgatcaccaacatcgaggagatgaacgagaaatgcaccgagtattggccggaggagcaggtggcgtacgacggtgttgagatcactgtgcagaaagtcattcacacggaggattaccggctgcgactcatctccctcaagagtgggactgaggagcgaggcctgaagcattactggttcacatcctggcccgaccagaagaccccagaccgggcccccccactcctgcacctggtgcgggaggtggaggaggcagcccagcaggaggggccccactgtgcccccatcatcgtccactgcagtgcagggattgggaggaccggctgcttcattgccaccagcatctgctgccagcagctgcggcaggagggtgtggtggacatcctgaagaccacgtgccagctccgtcaggacaggggcggcatgatccagacatgcgagcagtaccagtttgtgcaccacgtcatgagcctctacgaaaagcagctgtcccaccagtccccagaatgactgcgcttctcctacaaggttctctgggcactgcccagcctgagtctcggccctcacccagggccctgcctcgggtcctgggcctgctccccgcttcctccccttcagtcagctccctctgtcctctgtcagcctggcctgacccctaccctccagcattgctcttcctactgtacatattggggagtggggggcagggtcgggaagggacatgccaggccaggcctggggccccggggcctgacccacaccacgcagaccccgggctccagtttttaacgatggttccatcaatacctgatccagaatgtttccgtgctacactttgtgtcctgctgcaatgtgttctgtctgtccatccatctctgccctctgtaccggacactgtgtctcctcagccaggaaggggtaatgagctccagcccctaagcaaccggacttgcctgcctcggcctcacccgcacttctcccaaaaggcagatgacggggagttaggcatggggagctccagaaggtcaccagagagctttcagctgagggagagttctctaggttggagtgggcatcacagccagggtggcctctgggtgtcagatgctctcaggagggtgcccagcctgtgaggcactggcaaggtagggggcagatggggcatggagaacccagaggatctaggccctgttggggaggggaggggagctcaaggtttgggtggggactcagcccagatctacgtgagacatttttctgtgtcactgtgggaaagccttcccagaagtctcactgcgtgttgctctgcgtgtgttcccatgtccatgcgtgtgttgagagcccatcaggagggcatgcatgactctttggcaacatgtattatcttggagccacgtgtttttattgctgactttaaatatttatcccacggcagacagagacatttggtgtctttttataattcgctcgtggtcattgaatagagcaataaacggagcattttgagcaaaactaa

SEQ ID NO: 168961 - DNA, 3088 bp, Artificial Sequence
  derived and/or modified sequence
gccggggctggggggtgccaaacccacccggcggctgcgccagcgactctgcagctgaagcgcatttggtgaggcggtcgggcgagggagcgcgcacggagcgcgggacggagcgccaggcggacggaccgaaggacggaggcaccgaaggacggacgcccccgcacacgcagacgcacagagctcggcgcggcccccgtcgcatacacactggcacagacacaagcagggacacacgcagacacacgcacactcgcgcgcgcatcctcccgccagcctgcccgcctgctcgccggcgcccggagcccgctctggccgcttgctttttgctgagaaagcttcctgccctggaagatggcacccttccccatccagacaccttgggaatgaattatgagggagccaggagtgagagagagaaccacgctgctgatgactccgagggaggggccctggacatgtgctgcagtgagaggctaccgggtctcccccagccgatagtgatggaggcactggacgaggctgaagggctccaggactcacagagagagatgccgccaccccctcctccctcgccgccctcagatccagctcagaagccaccacctcgaggcgctgggagccactccctcactgtcaggagcagcctgtgcctgttcgctgcctcacagttcctgcttgcctgtggggtgctctggttcagcggttatggccacatctggtcacagaacgccacaaacctcgtctcctctttgctgacgctcctgaaacagctggaacccacggcctggcttgactctgggacgtggggagtccccagtctgctgctggtctttctgtccgtgggcctggtcctcgttaccaccctggtgtggcacctcctgaggacacccccagagccacccaccccactgccccctgaggacaggcgccagtcagtgagccgccagccctccttcacctactcagagtggatggaggagaagatcgaggatgacttcctggacctcgacccggtgcccgagactcctgtgtttgattgtgtgatggacatcaagcctgaggctgaccccacctcactcaccgtcaagtccatgggtctgcaggagaggaggggttccaatgtctccctgaccctggacatgtgcactccgggctgcaacgaggagggctttggctatctcatgtccccacgtgaggagtccgcccgcgagtacctgctcagcgcctcccgtgtcctccaagcagaagagcttcatgaaaaggccctggaccctttcctgctgcaggcggaattctttgaaatccccatgaactttgtggatccgaaagagtacgacatccctgggctggtgcggaagaaccggtacaaaaccatacttcccaaccctcacagcagagtgtgtctgacctcaccagaccctgacgaccctctgagttcctacatcaatgccaactacatccggggctatggtggggaggagaaggtgtacatcgccactcagggacccatcgtcagcacggtcgccgacttctggcgcatggtgtggcaggagcacacgcccatcattgtcatgatcaccaacatcgaggagatgaacgagaaatgcaccgagtattggccggaggagcaggtggcgtacgacggtgttgagatcactgtgcagaaagtcattcacacggaggattaccggctgcgactcatctccctcaagagtgggactgaggagcgaggcctgaagcattactggttcacatcctggcccgaccagaagaccccagaccgggcccccccactcctgcacctggtgcgggaggtggaggaggcagcccagcaggaggggccccactgtgcccccatcatcgtccactgcagtgcagggattgggaggaccggctgcttcattgccaccagcatctgctgccagcagctgcggcaggagggtgtggtggacatcctgaagaccacgtgccagctccgtcaggacaggggcggcatgatccagacatgcgagcagtaccagtttgtgcaccacgtcatgagcctctacgaaaagcagctgtcccaccagtccccagaatgactgcgcttctcctacaaggttctctgggcactgcccagcctgagtctcggccctcacccagggccctgcctcgggtcctgggcctgctccccgcttcctccccttcagtcagctccctctgtcctctgtcagcctggcctgacccctaccctccagcattgctcttcctactgtacatattggggagtggggggcagggtcgggaagggacatgccaggccaggcctggggccccggggcctgacccacaccacgcagaccccgggctccagtttttaacgatggttccatcaatacctgatccagaatgtttccgtgctacactttgtgtcctgctgcaatgtgttctgtctgtccatccatctctgccctctgtaccggacactgtgtctcctcagccaggaaggggtaatgagctccagcccctaagcaaccggacttgcctgcctcggcctcacccgcacttctcccaaaaggcagatgacggggagttaggcatggggagctccagaaggtcaccagagagctttcagctgagggagagttctctaggttggagtgggcatcacagccagggtggcctctgggtgtcagatgctctcaggagggtgcccagcctgtgaggcactggcaaggtagggggcagatggggcatggagaacccagaggatctaggccctgttggggaggggaggggagctcaaggtttgggtggggactcagcccagatctacgtgagacatttttctgtgtcactgtgggaaagccttcccagaagtctcactgcgtgttgctctgcgtgtgttcccatgtccatgcgtgtgttgagagcccatcaggagggcatgcatgactctttggcaacatgtattatcttggagccacgtgtttttattgctgactttaaatatttatcccacggcagacagagacatttggtgtctttttataattcgctcgtggtcattgaatagagcaataaacggagcattttgagcaaaact

SEQ ID NO: 168962 - DNA, 1698 bp, Artificial Sequence
  derived and/or modified sequence
atgaactacgagggcgccagaagcgagagagagaaccacgccgccgacgacagcgagggcggcgccctggacatgtgctgcagcgagagactgcccggcctgccccagcccatcgtgatggaggccctggacgaggccgagggcctgcaggacagccagagagagatgccccccccccccccccccagcccccccagcgaccccgcccagaagcccccccccagaggcgccggcagccacagcctgaccgtgagaagcagcctgtgcctgttcgccgccagccagttcctgctggcctgcggcgtgctgtggttcagcggctacggccacatctggagccagaacgccaccaacctggtgagcagcctgctgaccctgctgaagcagctggagcccaccgcctggctggacagcggcacctggggcgtgcccagcctgctgctggtgttcctgagcgtgggcctggtgctggtgaccaccctggtgtggcacctgctgagaaccccccccgagccccccacccccctgccccccgaggacagaagacagagcgtgagcagacagcccagcttcacctacagcgagtggatggaggagaagatcgaggacgacttcctggacctggaccccgtgcccgagacccccgtgttcgactgcgtgatggacatcaagcccgaggccgaccccaccagcctgaccgtgaagagcatgggcctgcaggagagaagaggcagcaacgtgagcctgaccctggacatgtgcacccccggctgcaacgaggagggcttcggctacctgatgagccccagagaggagagcgccagagagtacctgctgagcgccagcagagtgctgcaggccgaggagctgcacgagaaggccctggaccccttcctgctgcaggccgagttcttcgagatccccatgaacttcgtggaccccaaggagtacgacatccccggcctggtgagaaagaacagatacaagaccatcctgcccaacccccacagcagagtgtgcctgaccagccccgaccccgacgaccccctgagcagctacatcaacgccaactacatcagaggctacggcggcgaggagaaggtgtacatcgccacccagggccccatcgtgagcaccgtggccgacttctggagaatggtgtggcaggagcacacccccatcatcgtgatgatcaccaacatcgaggagatgaacgagaagtgcaccgagtactggcccgaggagcaggtggcctacgacggcgtggagatcaccgtgcagaaggtgatccacaccgaggactacagactgagactgatcagcctgaagagcggcaccgaggagagaggcctgaagcactactggttcaccagctggcccgaccagaagacccccgacagagccccccccctgctgcacctggtgagagaggtggaggaggccgcccagcaggagggcccccactgcgcccccatcatcgtgcactgcagcgccggcatcggcagaaccggctgcttcatcgccaccagcatctgctgccagcagctgagacaggagggcgtggtggacatcctgaagaccacctgccagctgagacaggacagaggcggcatgatccagacctgcgagcagtaccagttcgtgcaccacgtgatgagcctgtacgagaagcagctgagccaccagagccccgagtag

SEQ ID NO: 168963 - protein, 192 aa, Artificial Sequence
  derived and/or modified sequence
MQAIKCVVVGDGAVGKTCLLISYTTNAFPGEYIPTVFDNYSANVMVDGKPVNLGLWDTAGQEDYDRLRPLSYPQTDVFLICFSLVSPASFENVRAKWYPEVRHHCPNTPIILVGTKLDLRDDKDTIEKLKEKKLTPITYPQGLAMAKEIGAVKYLECSALTQRGLKTVFDEAIRAVLCPPPVKKRKRKCLLL

SEQ ID NO: 168964 - DNA, 579 bp, Artificial Sequence
  derived and/or modified sequence
atgcaggccatcaagtgcgtggtggtgggcgacggcgccgtgggcaagacctgcctgctgatcagctacaccaccaacgccttccccggcgagtacatccccaccgtgttcgacaactacagcgccaacgtgatggtggacggcaagcccgtgaacctgggcctgtgggacaccgccggccaggaggactacgacagactgagacccctgagctacccccagaccgacgtgttcctgatctgcttcagcctggtgagccccgccagcttcgagaacgtgagagccaagtggtaccccgaggtgagacaccactgccccaacacccccatcatcctggtgggcaccaagctggacctgagagacgacaaggacaccatcgagaagctgaaggagaagaagctgacccccatcacctacccccagggcctggccatggccaaggagatcggcgccgtgaagtacctggagtgcagcgccctgacccagagaggcctgaagaccgtgttcgacgaggccatcagagccgtgctgtgccccccccccgtgaagaagagaaagagaaagtgcctgctgctgtag

SEQ ID NO: 168965 - DNA, 579 bp, Artificial Sequence
  derived and/or modified sequence
atgcaggcaataaagtgcgtagtcgttggcgacggagcagtaggcaagacttgtctgctgatttcctatactacaaacgccttcccaggtgagtacattcccactgtttttgacaattatagcgcaaacgtgatggtggatggaaagcctgtgaatttaggtctctgggacactgccggccaggaggactacgaccgactccggcctctttcctaccctcagactgatgtcttcctaatatgcttctctcttgtatccccagcatcgtttgagaatgtccgcgccaagtggtaccctgaggtgcggcatcactgtcctaataccccgatcatcttagtggggactaagctggacctccgtgatgacaaagacacgattgaaaaactgaaagagaagaaacttactccgatcacctacccacagggccttgccatggcaaaagaaattggcgcagtcaagtatttggaatgcagcgcactcacccagcgaggcctcaaaacggtctttgatgaagctattagggccgtgttgtgcccacctccggtcaagaagcgcaagcggaaatgtctcctgctgtag

SEQ ID NO: 168966 - DNA, 579 bp, Artificial Sequence
  derived and/or modified sequence
atgcaggccatcaagtgtgtggtggtgggagatggagctgtgggcaagacctgcctgctgatctcctacaccaccaatgccttccctggagagtacatccccaccgtgtttgacaactacagcgccaacgtgatggtggatggcaagcctgtgaacctgggcctgtgggacacagctggccaggaggactatgaccggctgcggcccctgagctacccccagacagatgtgttcctgatctgcttcagcctggtgtccccagccagctttgaaaatgtgcgggccaagtggtacccagaggtgcgccaccactgccccaacacccccatcatcctggtgggcaccaagctggacctgagagatgacaaggacaccatcgagaagctgaaggagaagaagctgacccccatcacctacccccagggcctggccatggccaaggagattggagctgtgaagtacctggagtgcagcgccctgacccagaggggcctgaagacagtgtttgatgaggccatccgggctgtgctgtgccccccacctgtgaagaagaggaagaggaagtgcctgctgctgtag

SEQ ID NO: 168967 - DNA, 579 bp, Artificial Sequence
  derived and/or modified sequence
atgcaggccatcaagtgcgtggtggtgggcgacggcgccgtgggcaaaacctgcctcctcataagctacacaaccaatgccttccccggggaatatatcccaacagtgtttgacaactacagcgccaatgtgatggtggatggcaagccagtcaatctggggttatgggacaccgccgggcaggaagactacgaccggctccggccactctcctatccccagaccgacgtatttctaatttgcttttctctagtcagcccagcatctttcgagaatgtccgcgcaaaatggtatccagaggtcagacaccattgccctaacaccccaatcatactggtggggaccaagctcgacctcagagacgacaaagacaccattgaaaaacttaaagagaagaaacttactcctatcacatatccacaggggctcgctatggccaaagaaatcggagcagtcaaatacttggagtgcagtgcactgacacagcggggactgaaaacagtcttcgacgaagccattagagccgtgctgtgcccaccaccggtaaagaagcggaaacggaagtgcctgcttctgtag

SEQ ID NO: 168968 - DNA, 579 bp, Artificial Sequence
  derived and/or modified sequence
atgcaggctatcaagtgcgtggttgtgggagacggtgccgtaggcaagacgtgcctgcttatcagttacaccacaaacgctttccccggagagtacatcccgaccgtgttcgacaactactccgctaacgttatggtggatggcaagcccgtaaatctgggcctctgggacacggctgggcaggaggactatgacagactgcggccactttcgtatccccagacagatgtgtttctaatttgtttctccctggtgtctcccgcatccttcgaaaatgtacgggctaagtggtacccggaggtccgccaccactgccccaatacacccattattctcgtaggaacgaagttggatttaagagacgataaggataccattgagaaactgaaagagaagaagctaactcccatcacttatccacaggggctggccatggctaaagaaataggcgctgtgaagtacctggaatgttccgccctgacccagcgcggactgaaaaccgtgttcgacgaagccatccgtgccgtcctgtgtcctcctcccgtgaagaaacgaaagcgtaagtgtctgctcctgtag

SEQ ID NO: 168969 - DNA, 2323 bp, Artificial Sequence
  derived and/or modified sequence
tttcctgtttctctgcagttttcctcagctttgggtggtggccgctgccgggcatcggcttccagtccgcggagggcgaggcggcgtggacagcggccccggcacccagcgccccgccgcccgcaagccgcgcgcccgtccgccgcgccccgagcccgccgcttcctatctcagcgccctgccgccgccgccgcggcccagcgagcggccctgatgcaggccatcaagtgtgtggtggtgggagacggagctgtaggtaaaacttgcctactgatcagttacacaaccaatgcatttcctggagaatatatccctactgtctttgacaattattctgccaatgttatggtagatggaaaaccggtgaatctgggcttatgggatacagctggacaagaagattatgacagattacgccccctatcctatccgcaaacagatgtgttcttaatttgcttttcccttgtgagtcctgcatcatttgaaaatgtccgtgcaaagtggtatcctgaggtgcggcaccactgtcccaacactcccatcatcctagtgggaactaaacttgatcttagggatgataaagacacgatcgagaaactgaaggagaagaagctgactcccatcacctatccgcagggtctagccatggctaaggagattggtgctgtaaaatacctggagtgctcggcgctcacacagcgaggcctcaagacagtgtttgacgaagcgatccgagcagtcctctgcccgcctcccgtgaagaagaggaagagaaaatgcctgctgttgtaaatgtctcagcccctcgttcttggtcctgtcccttggaacctttgtacgctttgctcaaaaaaaaacaaaaaaaaaaaacaaaaaaaaaaaacaacggtggagccttcgcactcaatgccaactttttgttacagattaatttttccataaaaccattttttgaaccaatcagtaattttaaggttttgtttgttctaaatgtaagagttcagactcacattctattaaaatttagccctaaaatgacaagccttcttaaagccttatttttcaaaagcgccccccccattcttgttcagattaagagttgccaaaataccttctgaactacactgcattgttgtgccgagaacaccgagcactgaactttgcaaagaccttcgtctttgagaagacggtagcttctgcagttaggaggtgcagacacttgctctcctatgtagttctcagatgcgtaaagcagaacagcctcccgaatgaagcgttgccattgaactcaccagtgagttagcagcacgtgttcccgacataacattgtactgtaatggagtgagcgtagcagctcagctctttggatcagtctttgtgatttcatagcgagttttctgaccagcttttgcggagattttgaacagaactgctatttcctctaatgaagaattctgtttagctgtgggtgtgccgggtggggtgtgtgtgatcaaaggacaaagacagtattttgacaaaatacgaagtggagatttacactacattgtacaaggaatgaaagtgtcacgggtaaaaactctaaaaggttaatttctgtcaaatgcagtagatgatgaaagaaaggttggtattatcaggaaatgttttcttaagcttttcctttctcttacacctgccatgcctccccaaattgggcatttaattcatctttaaactggttgttctgttagtcgctaacttagtaagtgcttttcttatagaaccccttctgactgagcaatatgcctccttgtattataaaatctttctgataatgcattagaaggtttttttgtcgattagtaaaagtgctttccatgttactttattcagagctaataagtgctttccttagttttctagtaactaggtgtaaaaatcatgtgttgcagctttatagtttttaaaatattttagataattcttaaactatgaaccttcttaacatcactgtcttgccagattaccgacactgtcacttgaccaatactgaccctctttacctcgcccacgcggacacacgcctcctgtagtcgctttgcctattgatgttcctttgggtctgtgaggttctgtaaactgtgctagtgctgacgatgttctgtacaacttaactcactggcgagaatacagcgtgggacccttcagccactacaacagaattttttaaattgacagttgcagaattgtggagtgtttttacattgatcttttgctaatgcaattagcattatgttttgcatgtatgacttaataaatccttgaatcatacgactggtaa

SEQ ID NO: 168970 - protein, 1237 aa, Artificial Sequence
  derived and/or modified sequence
MQKSVRYNEGHALYLAFLARKEGTKRGFLSKKTAEASRWHEKWFALYQNVLFYFEGEQSCRPAGMYLLEGCSCERTPAPPRAGAGQGGVRDALDKQYYFTVLFGHEGQKPLELRCEEEQDGKEWMEAIHQASYADILIEREVLMQKYIHLVQIVETEKIAANQLRHQLEDQDTEIERLKSEIIALNKTKERMRPYQSNQEDEDPDIKKIKKVQSFMRGWLCRRKWKTIVQDYICSPHAESMRKRNQIVFTMVEAESEYVHQLYILVNGFLRPLRMAASSKKPPISHDDVSSIFLNSETIMFLHEIFHQGLKARIANWPTLILADLFDILLPMLNIYQEFVRNHQYSLQVLANCKQNRDFDKLLKQYEANPACEGRMLETFLTYPMFQIPRYIITLHELLAHTPHEHVERKSLEFAKSKLEELSRVMHDEVSDTENIRKNLAIERMIVEGCDILLDTSQTFIRQGSLIQVPSVERGKLSKVRLGSLSLKKEGERQCFLFTKHFLICTRSSGGKLHLLKTGGVLSLIDCTLIEEPDASDDDSKGSGQVFGHLDFKIVVEPPDAAAFTVVLLAPSRQEKAAWMSDISQCVDNIRCNGLMTIVFEENSKVTVPHMIKSDARLHKDDTDICFSKTLNSCKVPQIRYASVERLLERLTDLRFLSIDFLNTFLHTYRIFTTAAVVLGKLSDIYKRPFTSIPVRSLELFFATSQNNRGEHLVDGKSPRLCRKFSSPPPLAVSRTSSPVRARKLSLTSPLNSKIGALDLTTSSSPTTTTQSPAASPPPHTGQIPLDLSRGLSSPEQSPGTVEENVDNPRVDLCNKLKRSIQKAVLESAPADRAGVESSPAADTTELSPCRSPSTPRHLRYRQPGGQTADNAHCSVSPASAFAIATAAAGHGSPPGFNNTERTCDKEFIIRRTATNRVLNVLRHWVSKHAQDFELNNELKMNVLNLLEEVLRDPDLLPQERKAAANILRALSQDDQDDIHLKLEDIIQMTDCMKAECFESLSAMELAEQITLLDHVIFRSIPYEEFLGQGWMKLDKNERTPYIMKTSQHFNDMSNLVASQIMNYADVSSRANAIEKWVAVADICRCLHNYNGVLEITSALNRSAIYRLKKTWAKVSKQTKALMDKLQKTVSSEGRFKNLRETLKNCNPPAVPYLGMYLTDLAFIEEGTPNFTEEGLVNFSKMRMISHIIREIRQFQQTSYRIDHQPKVAQYLLDKDLIIDEDTLYELSLKIEPRLPA

SEQ ID NO: 168971 - DNA, 3714 bp, Artificial Sequence
  derived and/or modified sequence
atgcaaaaatctgtcaggtacaatgaaggtcacgctctatacctcgcattcctggctagaaaagaaggaacgaagcgaggtttcctgtcaaaaaagacagctgaggcgtccaggtggcacgagaaatggtttgcactttaccagaacgtcttattctattttgaaggagaacagtcatgtagaccggccggaatgtacctactggagggttgcagttgtgagcggactcccgctccaccaagggcaggagcgggccagggaggggtaagagatgcacttgataaacagtattatttcacggttcttttcgggcacgagggtcagaagccactcgagctccggtgcgaggaagaacaggatggcaaggaatggatggaggcgattcaccaagcatcttatgcagatattcttatcgagagagaagtactgatgcagaagtatatccacctggttcagattgtggagacagagaagattgcggcgaatcagcttcgtcatcaactggaggatcaagacacggagatcgagcgcctaaaatccgagatcatcgccctaaacaaaactaaggagagaatgcgaccttatcagtcaaaccaggaggacgaggacccggatatcaagaagatcaagaaggtacagagttttatgcgcgggtggctgtgcagaaggaaatggaagactattgtgcaagactatatctgttctcctcatgcagagtctatgcgaaagagaaaccaaatcgtctttacaatggtggaagccgagtcagagtacgtgcatcaactctatatactggtgaacggctttctgcggccactgagaatggcggcgtcctctaagaaacctccaatatcacatgatgatgtctcgtccatctttctgaattcagagaccatcatgtttctgcacgaaatcttccaccagggccttaaggcacggatagctaactggccgacactgattttagcggatttattcgacattttgctgcctatgctcaacatttaccaggagttcgtacgcaaccatcaatactccctgcaggttctggccaattgtaagcaaaatcgggattttgataagttgctgaagcaatatgaggccaatcccgcgtgtgaaggtagaatgctcgaaacctttttaacttatccaatgttccaaatcccaagatacatcatcacgctccacgagttgctagcccacaccccgcacgaacacgtggaacgcaaatcactcgaattcgcgaaatccaaactcgaagaactgtctcgggtgatgcatgatgaagttagtgatacagagaacatccggaagaatcttgctattgaaagaatgatcgtcgagggttgtgatattctgctcgatacttcccagactttcattcgccagggaagcttgatccaggtgcccagtgttgaacggggcaaactatccaaggtgcgcttgggcagtttgagcctgaaaaaagagggagaaagacagtgcttcctcttcactaagcatttcttaatttgtacacggtcaagcggtggtaagttgcatctccttaaaaccggcggtgtgcttagtctgattgactgcaccctgattgaagagcctgatgcctcagatgacgactcgaagggcagcggacaggtcttcggtcatcttgacttcaagatcgtggttgaacctcccgacgccgccgcattcactgtcgtcttgctggctccaagtcgacaggagaaagccgcctggatgtctgacatctctcagtgtgttgataacattcggtgtaatggtctgatgaccatcgtgtttgaggagaacagtaaagtcactgttccacacatgatcaagtcagatgctaggctacataaggacgacacagacatttgcttctccaagacactcaacagttgcaaggttccacagatccgctacgcctcggtagaacggctgctcgaacgccttacagacttgaggtttcttagcatcgatttcttaaatacattcctccacacatatcgcatctttaccaccgcagccgtggtgctggggaaattgtctgacatctacaaacgacctttcaccagtattcccgtccgttctcttgaactgttttttgcgacatcacagaataacagaggcgaacacctggtggacggtaagtccccaagactctgtagaaaattcagttctccgccacctctggcagtgagccggacttccagccccgtgagagcccgaaaactatctctgacctcgcctctgaattcaaagatcggcgccttagatctcacgacctccagtagccccacaaccacaacgcagtctccagctgcgtccccaccaccccacactgggcagatcccgctggacttgtctaggggcttgtccagccctgaacaaagccctggaactgttgaagagaatgtcgataacccccgggtcgacctgtgcaataagttgaaacgctctattcaaaaggcagtcttagaatcagcacccgcagaccgcgccggcgttgagtctagtcctgctgcagacaccactgagttgagcccgtgtagatcccccagcaccccaaggcaccttcgataccgacagccagggggccagacagcagacaatgctcactgttccgtcagtccggcatcggcgtttgccatagctactgctgccgccggccatggaagcccccccggctttaacaatacagaacgaacatgtgacaaagagttcatcatccggcggactgcaacaaatagagtactgaacgtcctgaggcattgggtttccaagcatgcccaggattttgaactgaacaatgaactgaagatgaacgtgttaaacctgttagaggaggtgctgagagacccagacttgctgcctcaggagcgcaaggcagccgcaaatatacttcgcgcgctatcgcaggatgaccaagacgatattcacttgaagttggaggacatcatccagatgaccgactgtatgaaggccgagtgctttgaatccctcagtgcgatggaactcgctgaacagattaccctccttgaccacgttattttccgatccattccatacgaggagttcctgggacaaggctggatgaaacttgataagaacgaacgcaccccatacatcatgaaaacaagccagcacttcaacgacatgtccaacctcgtggcctctcaaatcatgaactatgccgacgtttcctccagagccaacgcgatcgagaaatgggtggccgtggctgatatttgtcggtgtctccacaactataatggagtgctggaaatcacttccgctctcaatagatcagctatctatcgcctgaagaagacctgggcgaaggtgagcaaacaaacaaaagcccttatggacaagctgcaaaagactgtgtcatctgagggacgctttaagaacctacgggaaacactgaaaaattgcaacccacccgccgtgccatatctgggcatgtatctgacagatcttgccttcatcgaagagggaacccccaatttcacagaagaaggtctggtcaactttagcaaaatgcgaatgatttcccacataatccgggagattcggcagttccaacaaacatcctaccgaatcgaccaccagcccaaggtcgctcagtacttactggataaagatctgataatcgacgaggatacactgtacgaacttagcctgaagatcgagcccaggctgcccgcctag

SEQ ID NO: 168972 - DNA, 3714 bp, Artificial Sequence
  derived and/or modified sequence
atgcagaagtctgtgcgctacaatgaaggacatgccctgtacctggccttcctggccaggaaggagggcaccaagaggggcttcctgagcaagaagacagctgaggccagccgctggcatgagaagtggtttgccctgtaccagaatgtgctcttctactttgaaggagagcagagctgcaggcctgctggcatgtacctgctggagggctgcagctgtgagaggaccccagccccaccccgggccggggccggccagggcggcgtgagagatgccctggacaagcagtactacttcaccgtgctgtttggacatgagggccagaagcccctggagctgcgctgtgaggaggagcaggacggcaaggagtggatggaggccatccaccaggccagctatgctgacatcctgattgaaagagaggtgctgatgcagaagtacatccacctggtgcagatcgtggagacagagaagattgctgccaaccagctgcggcaccagctggaggaccaggacacagaaattgagcggctgaagtctgagatcatcgccctgaacaagaccaaggagaggatgaggccctaccagagcaaccaggaggatgaggaccctgacatcaagaagatcaagaaggtgcagagcttcatgaggggctggctgtgcaggaggaagtggaagaccatcgtgcaggactacatctgcagcccccacgccgagagcatgaggaagaggaaccagatcgtgttcaccatggtggaggccgagagtgaatatgtgcaccagctgtacatcctggtgaatggcttcctgcggcccctgaggatggccgccagcagcaagaagccacccatcagccatgatgatgtgagcagcatcttcctgaacagcgagaccatcatgttcctgcacgagatcttccaccagggcctgaaggcccgcatcgccaactggcccaccctcatcctggccgacctgtttgacatcctgctgcccatgctgaacatctaccaggagtttgtgaggaaccaccagtacagcctgcaggtgctggccaactgcaagcagaacagagactttgacaagctgctgaagcagtatgaggccaacccagcctgtgagggccgcatgctggagaccttcctgacctaccccatgttccagatcccccgctacatcatcaccctgcacgagctgctggcccacacccctcatgagcacgtggagaggaagagcctggagtttgccaagagcaagctggaggagctgagccgggtgatgcatgatgaggtgtctgacacagagaacatcaggaagaacctggccatcgagaggatgattgtggagggctgtgacatcctgctggacaccagccagaccttcatccggcagggcagcctcatccaggtgcccagcgtggagcggggcaagctgagcaaggtgcggctgggcagcctgagcctgaagaaggagggggagcggcagtgcttcctgttcaccaagcacttcctgatctgcaccaggagcagcggcggcaagctgcacctgctgaagacaggaggagtgctgagcctgattgactgcaccctcatcgaggagccagatgccagtgatgatgacagcaaaggaagtggccaggtgtttggccacctggacttcaagatcgtggtggagcccccagatgctgctgccttcaccgtggtgctgctggcccccagccggcaggagaaggccgcctggatgtctgacatcagccagtgtgtggacaacatccgctgcaatggcctgatgaccatcgtgtttgaggagaacagcaaggtgacagtgccccacatgatcaagagtgatgcccggctgcacaaggatgacacagacatctgcttcagcaagaccctgaacagctgcaaggtgccccagatccgctatgcctctgtggagcggctgctggagcggctgacagacctgcgcttcctgagcattgacttcctgaacaccttcctgcacacctaccgcatcttcaccacagctgctgtggtgctgggcaagctgagtgacatctacaagaggcccttcaccagcatccctgtgcgcagcctggagctgttctttgccaccagccagaacaacagaggagagcacctggtggatggcaagagcccccggctgtgcaggaagttcagcagccccccacccctggccgtgtccaggaccagcagccctgtgcgggccaggaagctgagcctgaccagccccctgaacagcaagattggagccctggacctgaccaccagcagcagccccaccaccaccacccagagccctgctgccagccccccaccccacacaggccagatccccctggacctgagccggggcctgagcagccctgagcagagccctggcaccgtggaggagaatgtggacaacccccgggtggacctgtgcaacaagctgaagaggagcatccagaaggctgtgctggagagcgccccagctgaccgggccggcgtggagagcagccctgctgctgacaccacagagctgagcccctgccgcagccccagcacccccaggcacctgcgctaccggcagcccggcggccagacagctgacaatgcccactgcagcgtgtccccagccagcgcctttgccatcgccacagctgctgctggccacggcagccccccaggcttcaacaacacagagaggacctgtgacaaggagttcatcatcagaagaacagccaccaacagagtgctgaatgtgctgcggcactgggtgtccaagcacgcccaggactttgagctgaacaatgagctgaagatgaatgtgctgaacctgctggaggaggtgctgcgggaccctgacctgctgccccaggagaggaaggccgccgccaacatcctgcgggccctgagccaggatgaccaggatgacatccacctgaagctggaggacatcatccagatgacagactgcatgaaggccgagtgctttgagagcctgagcgccatggagctggccgagcagatcaccctgctggaccacgtgatcttccgcagcatcccctatgaggagttcctgggccagggctggatgaagctggacaagaatgaaagaacaccctacatcatgaagaccagccagcacttcaatgacatgagcaacctggtggccagccagatcatgaactatgcagatgtgagcagccgggccaatgccatcgagaagtgggtggccgtggccgacatctgccgctgcctgcacaactacaatggagtgctggagatcaccagcgccctgaacagaagtgccatctaccgcctgaagaagacctgggccaaggtgtccaagcagaccaaggccctgatggacaagctgcagaagacagtgagcagcgagggccgcttcaagaacctgcgggagaccctgaagaactgcaaccccccagctgtgccctacctgggcatgtacctgacagacctggccttcatcgaggagggcacccccaacttcacagaggagggcctggtgaacttcagcaagatgaggatgatcagccacatcatccgggagatccggcagttccagcagaccagctacagaattgaccaccagcccaaggtggcccagtacctgctggacaaggacctgatcattgatgaggacaccctgtatgagctgagcctgaagattgagccccggctgcctgcctag

SEQ ID NO: 168973 - DNA, 3714 bp, Artificial Sequence
  derived and/or modified sequence
atgcagaagagcgtgcggtacaacgagggccacgccctgtacctggcttttctggccaggaaggagggtacaaaacgtggcttcctgtcaaaaaaaaccgctgaagcctcgcgctggcatgagaaatggttcgcactgtaccagaatgtactgttttacttcgaaggtgaacagtcctgtcggcccgccgggatgtacctgttggagggatgtagttgcgagaggactccggccccaccacgcgcaggcgccgggcagggcggagtccgagacgccctggacaagcagtattattttacagtgttgttcggccacgaaggtcagaagcccctggaactgcgttgcgaggaggagcaggatggcaaagagtggatggaggccatacaccaagcctcctacgccgacatcttgattgaacgggaagttttaatgcagaagtatattcatcttgtccagatcgttgagaccgaaaagatcgccgccaaccaattacggcaccagctggaagatcaggataccgagatcgagcggctgaaatcagagattatcgctcttaataagaccaaagagaggatgagaccgtaccagtcgaatcaggaagatgaagaccccgacataaagaaaattaaaaaggtgcagtcctttatgcgtggctggctgtgccgacggaaatggaaaactattgtccaagattatatctgttcaccccacgccgagagtatgaggaaacggaaccagatagtctttacaatggtggaggcagaatccgagtacgtgcaccagttgtacatcctggtcaatggatttctgcgccctctgaggatggcggccagtagcaagaaaccacctatatcacacgacgacgtttcgagcatatttttaaacagtgagactatcatgttcttacatgaaattttccatcagggcttgaaagccaggatcgcgaattggccaaccttgatcttagcggacttattcgacatcctgttgccaatgctgaatatttaccaggaatttgtgaggaatcatcagtactctctgcaggtccttgccaactgcaagcaaaatcgcgacttcgataagcttctgaagcaatatgaggctaaccctgcctgtgagggacggatgctggaaacatttctgacctatcctatgttccagatccctcgctacataattactctgcacgagctgttggctcacacaccacatgagcacgtggaaagaaagagtttagaatttgccaaaagtaagctcgaggagctctccagggtcatgcatgatgaagtgtccgacaccgagaacatccgaaaaaatctggctatcgaacgaatgatagtggagggctgcgacatactgttagacacctcccaaacattcatccgccagggtagcctgatccaggtcccatcagttgagagaggcaaactttctaaagtgaggctcggttctctgagcctgaaaaaggaaggagaacgtcaatgctttttatttaccaagcacttcctgatatgtactcgttcaagcggaggcaagctacacctcctcaaaacggggggcgtgctcagtctgatcgattgtaccctcatcgaagaacccgacgcctctgatgacgattcaaagggttctgggcaggtgtttggtcatttagactttaagatcgtcgtggagccaccagatgcagccgctttcacagtggttctcctggcaccttctcggcaggaaaaggcggcctggatgagcgatatttctcagtgcgtggataacattaggtgcaacggcttaatgaccatcgtttttgaggaaaactcaaaggttacagtgcctcacatgatcaaaagtgacgcccggctccataaggatgacaccgacatctgcttttccaagacgttaaattcctgcaaggtaccccagataaggtacgcctcagtggagaggcttctcgagcggctgacggatctccgctttctctcaatcgacttcttaaacacatttctgcacacatatcggatctttaccacggctgccgtggtactcgggaaactgtccgacatttataaacgcccctttacctcgatccccgtgcggtccttagaactgttctttgcaacaagccaaaacaataggggtgagcacctggtggatggaaaaagtccacgcctgtgtagaaagttctcaagtcctcccccactggctgtttcccggaccagctctcccgtgcgcgctaggaaattgagtcttacatcccctctgaactctaaaatcggagcactggatttaacaacgtcttctagtccgacaaccacaacacagtcaccagccgcatcccctcctccgcacaccgggcagatcccactcgatctttcaaggggactgtcgtcaccagaacagtctccaggcaccgtcgaggagaatgtggacaacccaagagtcgacctgtgtaacaagttaaagcggagcattcagaaagcagtactggagtccgctcctgccgatcgcgccggagttgagtccagcccagcggctgacaccaccgagctgtccccttgtagatcaccgagcacccccaggcatctgcggtaccgccagcccggagggcagacagctgacaacgcgcactgctcagtctcaccagcctccgcattcgctattgctaccgctgccgccgggcatggatcccctccaggattcaataataccgagcgcacctgcgataaagaatttattattcgacgtaccgccaccaaccgtgttttgaacgtgctcaggcactgggtgagcaaacacgcccaggacttcgagctgaacaacgagctcaaaatgaacgttcttaatttgcttgaagaagtcttgcgcgaccctgatctcctacctcaagaaaggaaggccgctgccaatattttgagggccctgtcccaagacgaccaggatgacattcacctgaagctcgaggatattattcaaatgaccgattgtatgaaagcagaatgtttcgaaagtctgagtgccatggaattagctgaacagatcactctactcgaccatgtaatattccgaagcatcccttacgaagaatttctggggcagggatggatgaaactcgacaaaaatgagcgcacaccttatataatgaagacttcccagcattttaatgacatgagcaacctggtcgcctctcaaattatgaattacgcagacgtgagctcaagagccaatgcaatcgaaaagtgggtagccgttgctgacatatgccgatgcctgcacaactataatggagttctggagatcacgagcgcgctgaacaggtccgcaatctaccggttgaagaagacctgggccaaagtttccaagcaaacaaaggctctgatggacaaactgcaaaaaaccgtgagcagtgagggacgttttaagaacctgagggaaaccctgaaaaattgcaacccccctgctgtaccctatctgggtatgtatctaactgacctggctttcattgaggaggggactcccaattttactgaggagggcctggtgaacttcagcaaaatgaggatgattagccacatcattagagaaatcaggcagttccagcagacgagctatcgcattgaccatcagcccaaggtcgctcaatatctgctcgacaaggacctcattatcgacgaagacaccctgtatgaactgagtttaaaaattgaacctcgcctccccgcctag

SEQ ID NO: 168974 - DNA, 3714 bp, Artificial Sequence
  derived and/or modified sequence
atgcagaagtcggtgcgttataatgagggccacgccctgtacttagcattccttgccagaaaagagggaactaagagagggttcctcagcaagaagaccgccgaggcctctaggtggcatgagaaatggttcgccctgtatcagaatgtgttgttctattttgagggtgagcagtcctgccgccctgctggaatgtacctgttggaaggatgtagttgcgaacgcacccctgctccaccacgggcaggcgctggccagggtggcgtcagagacgccctagacaagcaatattatttcactgtgctcttcggccatgaaggccagaaacctttggagctcagatgcgaggaggagcaagacggaaaggaatggatggaagcgatccatcaggccagctatgccgatatcctgatcgaaagagaagtcctgatgcagaaatacattcacttggtgcagatcgtagagactgagaaaatagccgctaaccaacttcgacatcagttggaagaccaagacaccgaaatcgagcgtttgaagtctgaaattatagccctcaataagactaaagagcggatgaggccctaccagagtaaccaagaggatgaagacccagacataaaaaaaattaagaaagtccagagcttcatgagaggatggctctgccggcgtaaatggaagacaatagtgcaggattatatttgcagcccccacgctgagagcatgaggaaaagaaaccagatagtgtttacaatggtggaagcagaatctgagtatgtgcaccagctctatatcctggtaaacgggtttcttcgtcctcttagaatggctgctagtagtaagaaacctccaatttcccacgatgatgtgtcttccatctttttaaacagcgagaccatcatgtttctgcatgagatcttccaccagggtctgaaagcacgaatcgcgaattggccaaccctaatcctggctgatctatttgacatcctgctccctatgttgaatatctaccaggaatttgtgagaaatcatcagtactctctccaggtgctcgcgaactgcaaacagaatagggatttcgacaaactgctgaaacagtatgaagccaatcccgcatgtgagggacgcatgctagaaacctttctgacatatcccatgttccagataccacggtacataatcaccctgcacgagcttctggcacataccccacacgagcacgtcgaaaggaagtcactcgagttcgccaagtcgaaactcgaagagctttcacgggttatgcacgacgaggtatccgacactgagaatattcgaaagaatctcgctatcgaaagaatgatcgtcgaagggtgtgatatcctcctggatacctcccagacatttatcagacaggggagtctgatccaggtccccagcgtggaaaggggcaagttgagcaaggttcgtcttgggagcctgtctttgaagaaagagggagagcgacagtgcttcctgttcaccaagcacttcttgatttgtactcggagttccggagggaaactgcacttgcttaagacaggtggcgtcttgtctctaattgactgtacacttatcgaagagcctgacgcttctgatgatgacagcaagggcagcgggcaggtgttcgggcatctggacttcaagatcgttgtcgagccacccgatgcggcagctttcactgttgtgttactggccccaagccggcaagagaaagctgcctggatgtctgatatttcccagtgcgtggacaacatcaggtgcaacgggctaatgacaattgttttcgaggagaattccaaagtgaccgttcctcacatgattaaatcagacgctcgcctgcacaaggatgatactgatatctgcttttccaaaacactgaattcgtgcaaggtgccccagattcgctatgcttcagtggagcgcctgcttgagagactaacggatttacgttttctgtctatcgattttcttaacacatttttgcatacatacaggatattcacaaccgctgccgtggtgctgggcaagctgtccgatatttacaaacggccatttacatccatccctgtgagatccctggagttgttctttgctacgagccaaaataatcgtggcgaacaccttgttgatgggaagtctccgcgactttgcaggaagtttagctctccgcctccattggctgtatctcgcacttcttcccccgtgagggccaggaaattgtcattgacctcacctcttaattctaaaatcggggcactcgatctgaccacctcatcttcacctaccaccacaacgcagagtccagctgcgtcaccccctcctcataccgggcagatccccctggacctgtctcgagggctgtcttccccagagcagtcaccaggcactgtggaggagaatgttgacaatcccagagtcgacttatgtaacaaactgaaacggagcattcaaaaggccgtgcttgaaagtgctccagctgaccgggcaggagtagaatcttcacctgctgccgatacaactgagctatcaccctgtcgcagcccctcgacgcctcgtcacctacggtacagacagcctgggggacagactgctgacaacgcacactgctctgtgagccctgcatccgcctttgcgatagctacagctgcagctggtcatggttctccccctgggtttaataacacagagcgcacatgtgataaggaattcattatcagacgtacagctactaatcgcgtcttgaatgtgctgagacactgggtctctaagcatgctcaggacttcgaactgaacaatgagctgaaaatgaacgtcctaaatctcctggaggaggtcctccgcgaccccgaccttctgccccaggagagaaaggccgctgccaatatcctccgcgctctcagtcaggatgaccaggatgacatccacctcaagctcgaggacatcatccagatgacagattgtatgaaggctgagtgcttcgagagtctgtccgctatggaactggctgagcagatcaccttgctcgatcacgtgatcttccgctcaatcccatatgaggagttcctgggacaagggtggatgaagctggacaagaacgagcgcactccttatattatgaagacgtcacagcacttcaatgacatgtccaatctcgtggcatcccagattatgaactatgcggatgtcagcagtcgcgcaaacgctatagaaaaatgggtcgcggtggctgatatctgccgttgcctgcacaactataatggggtgctggaaattacctccgccctgaatagatcagcaatttaccggctgaagaaaacctgggccaaagtcagcaaacagacgaaagcattgatggacaaacttcagaaaactgtgtcttctgagggcaggttcaagaacctgcgggaaactctgaaaaactgtaacccgccagccgtcccatacttgggtatgtacctcaccgaccttgcgtttattgaggagggaactcccaacttcacagaagaaggactggtcaacttttcgaagatgcggatgatctcacatatcattcgtgaaatccggcaatttcagcaaacaagttaccgaatagatcaccagccaaaagttgcccagtatttgttagataaggacctgataattgacgaggacactctatacgagctgtccctgaaaattgaaccgagactaccggcttag

SEQ ID NO: 168975 - DNA, 8167 bp, Artificial Sequence
  derived and/or modified sequence
agctgggccatggccgcgaggcaggggtgagaccggcggccacccgtgagccctccgcacccgcaccatgcagaagagcgtgcgctacaacgaggggcacgccctgtacctggcctttctggcgcgcaaggagggcaccaagcgcggcttcctgagtaagaagacggccgaggcgagccgctggcacgagaagtggttcgccctctaccagaatgtgctcttctacttcgagggcgagcagagctgccgcccggcgggcatgtacctcctggagggctgcagctgcgaacgaacgcccgcgccacccagggccggcgccgggcagggaggcgtccgagacgcgctggacaagcagtattactttactgttctttttggccatgaaggtcagaagccactggagctgcgctgtgaggaggagcaggatggtaaagagtggatggaggccattcaccaagccagttatgcagacattttgattgagagggaagtattaatgcagaagtacattcatctagttcagatcgtagagacagaaaaaattgcagctaaccaactccgacatcaacttgaagatcaagacacagaaatcgaaaggcttaaatcagagattattgctcttaataaaaccaaagaacgaatgcgaccttaccaaagcaaccaagaagacgaagatccagacatcaagaagattaaaaaggttcagagcttcatgcgaggatggttgtgcagaaggaaatggaagaccatcgtgcaggattacatttgttctcctcatgctgaaagtatgaggaagagaaaccagattgtgttcaccatggtggaggcagagtcagagtacgttcaccagctctacatcctggtcaatggctttctccggcccctgcgtatggccgccagctccaagaagccccccatcagccacgacgacgtcagcagtatttttcttaacagtgaaacaatcatgtttcttcatgaaatatttcatcaaggactaaaggcaaggatagcaaactggcccactttaattttagctgatctgtttgatattttgctccccatgctgaacatttatcaagaatttgtgcgtaatcaccagtacagcctgcaagttctcgccaattgtaagcaaaacagagattttgacaaactcttaaaacagtatgaagccaatccagcctgtgaggggaggatgctggagacattcttgacctatcccatgtttcagatccccagatatatcatcacactccatgagctccttgctcacacaccccatgagcatgtggaaaggaaaagcctggagtttgccaaatcaaagctagaggaactatccagagtaatgcacgatgaagtcagcgacactgaaaacataaggaaaaaccttgccatcgaaagaatgatcgtggagggctgtgacatcttgctggacaccagccaaacgttcatccgccaaggttctcttattcaagtaccttccgttgagagggggaaacttagtaaagttcgcctgggttcgttgtctttgaaaaaggaaggagagagacaatgcttcttatttacaaaacactttttaatatgtacaagaagttcaggagggaagcttcatctgctcaagacaggtggggttctgtctctaatagactgcacattgattgaggagccagatgcaagcgatgatgactctaaaggttctgggcaagtgtttgggcacctggattttaaaatagtggtggagcctcctgacgctgccgccttcactgttgtcttgttagcaccctcacgccaggagaaagctgcctggatgagtgacatcagtcagtgtgtggacaatatacgatgtaatggtttaatgactatagtgtttgaagagaattccaaagtcactgtgccacatatgattaagtctgatgcccgtcttcataaagacgacactgacatttgcttcagtaaaacactcaactcctgcaaagtgccccagatccgttatgccagcgtggagcgcctcttggaacgactgacagacttgcggtttcttagtattgatttcctcaacacctttctgcacacctatcgtattttcactactgccgctgtggtgctggggaaactctccgacatatacaagaggcctttcacctccatccctgtcaggtcattggaattgttttttgctaccagccagaacaacagaggtgaacatttggtggatggcaaatccccacgtctgtgtcgcaaattctcttccccgccaccactggctgtgtccagaacatcttccccagtgagggccagaaagctgtctttgacttctcccttgaactcaaagataggagcattggacctgacaacttccagcagtcccaccaccaccacccagagtcccgctgcgtctccaccaccacacactggtcagataccactggatctcagcagaggcctctcttctccagagcaaagcccgggaacggtagaagagaatgtcgataacccacgcgtggatctgtgtaacaagctaaaacgaagtattcaaaaagcagtcctagagtctgcaccagcggaccgagcaggagtggaaagctcccctgcagcggacaccacagaactttcaccttgcagatccccctcaactcctcggcacctccgctatcgacagcctggaggacagacggcggacaatgcccactgctctgtttcaccggcttctgcttttgcaatagccacagctgcagcaggacatgggagtccaccaggctttaacaacaccgagagaacatgtgataaagagtttattatacggagaacggctaccaatcgagttctgaacgtcctccgtcactgggtctcaaagcacgcacaggatttcgaactcaacaatgaactaaagatgaatgtcctaaatttgctagaagaagttttgcgagacccagaccttcttccccaagaaaggaaagccgccgcgaatatcctcagggccctttcacaagatgaccaagatgacatccacctaaaattagaggatataattcaaatgactgactgcatgaaggccgaatgctttgagtccttgtcggccatggagctggcagaacagatcaccctcctggaccatgtcattttcagaagcattccctacgaggagtttcttgggcaggggtggatgaagctggataaaaacgaaagaactccttacattatgaaaaccagccaacacttcaatgacatgagtaacctggtggcctcccagataatgaactatgctgatgtcagctcccgtgccaacgccatcgagaaatgggtggcagtggcggacatctgccgatgcctgcacaactacaacggcgtgctggagatcacctcggccttaaacagaagtgccatctacaggctgaagaaaacctgggccaaggtctctaagcagacaaaagctctaatggacaaacttcaaaagactgtttcctctgaaggaagatttaaaaatcttagagaaacccttaaaaattgtaaccctcctgcagttccttatcttgggatgtacttgacagacctggcatttattgaagaaggaacaccaaactttactgaggaaggccttgtcaatttctccaaaatgagaatgatatcacacatcatcagagagatacgccagttccagcagacttcctacagaatagatcatcagccaaaggtcgcacagtacttgcttgacaaagaccttatcatagatgaagatacgctatatgagctgtcactaaaaattgaacctcgactccctgcttgaagatctggccttgcccctgagtccacgggatgttcatggaaagcaggacagacagaattgtgtatgccttgcctatcacggtacagcacgaagccaggctcctttctccaccaaagaagatggaaccagactggaattctgtctccagagagaaacccagctgtttgggtcaaagacagatgcttcagacttgggtgggaaggtgaaagatggctatttagaaagctggtggcacgttttacataagggaatgtcagatgggagatgctagttgccattttaacaaagcaggtaaatcggtaaattttaaactctgtccatgttctgttagaactcagggacaaggatccatgaaaaagacctgtgatgtttctctggcgctttactggcctgggcacacctaccaatcttctaggatttgactggttccattacatttccttttggtataagcttcacagaaaagctgacacttcctctacagagatggaccaaaacataagcaatttcagtctacagcatgtgcatggttgtcagtgcattctaaatatttctatgtgaggaatggtaccttctgaaactgcctttccagtctttaggcaatgggataggaaagaaagaatgaaacacaaatggatttgtatgtaacatttccttaattaaatgcagtaggctgtgccccagaggattccagacagtggctggctgaggtgggtggggagcttttccttgagactgttggtcctaagaagccagcccttttggagaggcagctgcaaaaaggtgcacgcccatctcaccgacaaaactgtggaacagaaggccaccaagtgctgtggggaatcatgggtttcagtgctgagtgaaaatctatacctaaaaatcatctctgcaccttgctttgtttgttttctttccccactcatagtactgcaggaatctattctcatttacacagacctttttttaggcttactatgaacattggctgtattttttttaaacagtttagtgaaattttcttttcaaaacccacacttccatatgctgttcgtagatctctttctttaaaaactgatgttgagagatctctgagaatattataagtgcatgggaaatgggcccaaccaccgaacagctcttacattacaaaaccaaatgcaagggttagtcctgctacctgaggctggggaagtgaccttccttttcccaagattgtcagttgttgaagaaatagggctatctcattgtttacctccctcttctcttctcagggagactgctgctttaaaagaaggaagagaaaaaatatagttctatttccctgaacctgttgcacctgacattttctcttagcagcatgaaacttattgatgctgacaatgaaaaatggatctgtctggctgctttccctctttccttgcactttaattatgttgctagagctaacagactaataaattccacctgctggctcttaagactcagtgaaagagctagcattggtaatgcaccatagaggtagagaatgtacactttctgcacggtaagtgccatctctgtatgtaactatatagtgaaatatcaactaagtaaaagaaaatataatatttgaagaccattcccaaaatattttcaatagttcatattagccaacagtgtagcactcaacccaaggagggttccttatggatgctttctttttcttttttaaagttgcttgtttgttctctttagtttcaaataagaggttgacgcatcttgatgcatgatgagaagcatgggctgtttggatcctaacaacgcataacttgtgatttatttctcagtgctccagaaactgagggtttgaaataatatgtatcagttgcaccaaacacctcaaggtcttgcagaagaaaagtaaaggttagctttcatggctcaaaagcatagtcctgaagggtgaactaaaaccgggacaaatctgtgagaggaccacacacatactagtttcgggccaaacaacacgtggaaaggtgcatgcattctactctgccttggagttgccagagtccttcagagggaaagggatggttctgtgtgcactttttctggaagttcggactcatttctttgacccaaatgttccagagacactgcagccattcttattaacaaaaaataagacaggagtttccaaatgctccttcccttttggatcgcagcttttcttcaactagtgacaaagcttttgcgcctatttcctgcaggatgttggaactgccccgcactggtcatattaggcactgtcaattgctatgctgacttttagggggtttttgtttgtttgaaaaacagggtctcaccatgttgcccaggctggtctcgaactcctggactcaagcaatcttcctgcctcagcctctcaagcagctgggactgcaggggtgtgccactcactagcctttcgcatttttgtttgagaattacaccactttctggagtctgcagccttcctggagctgcaagagggcaagagagagagctccacctctgagggagtgtctgttgatgacctgcactattcgtgtgccagctgggagaggaatgcacattttaaaatcccttcaatttggtcaaattaaaaatccccaagagcaatttgcagtgttttttctggtcgttaaagtacccatcctcttctgcctacacacaaagcatgcattcccagctgcatctgcctctagtccattatggagacccatttctaagaggagatgggaggtcaacctctaacagccaagtagcgaacatgtatactgtaaaattaacctagaaaatcagaagaaaaatccaatttcatgctttcgaatgaatgcccacattttgtactgtcaacgaaattatcttggagcttttaggggatgccttttcgttattaactgagacatctagttttgctacagggacaaatctcttacctaatccaatatattatttgacagattcaggcatgaagtaaaacgtcgtcacttttccttagtgcttttctgaaggaatttaaagacggaattttaaacggccattgcaatattttcaagtggctctcataccaagtcccattactgtttgttaaatttcagtacgtcttaaagtactacttataaacaaatgaaactcagagaaactgaatcacctggaagagaaaaatccattatggtcccatgtggagtgaataatgatggatcagcaccctttctctcatgttattgtataagacgagacttttgggccagcagcgattgggcagcttttaaattcttaactgaaaagagtaatgcaatacagggattattcccaataaaattaacttttatttaaaagcaagagattttacttagcttttttttttcaaagtttgattttatccccttgaaaaaaaatctcttcactttaaagtataaaggtttttaaaaatccaattgcaaaatgtattatttttacaactatcgaaaaggcataaaagagaacatactatttatggctgaagggtatagccaggctaatgtgcacagagggaatcaataaataaaactctttttcatttcagtaagaaatcagattgtaagtttaatggctccattatagataccaccgtgtaatagaagacttaagtcaatgaaatctaatcagtgtgtcatttctcagcggccattggtgacttaaaattaagatgaggcagagccaaaatggaaaacagtcattttgttgtaggtataaacacatgaacgattcagaaaattattcatctcagctgccatgcagcatgacattaacattaggattgatagcactagtctgatctgctcaaggaaaataatagttctattatacttaatgatgttggtttttacacagctcatttcatttttcactagaaagccagttatgaaagagagctggcctaggcatcccggccctgagtcctaggcccagtctccaactggaaaaccttaggctggtgtttacacatccctgagcctcagtttcctcatctgcaaaacggtgtgaatagtaatccctgtgctgcttatctcacagggctattgtgaggaccaaatggattagactgtaaactgcaaagtgctgtccgcacatgaggtcatctgattactgtcctcagatctcttttgtagaggatttcaatgtatttctttatcatttgagtgtgtgtgtgatggacgaatatgtgtgtgagtttgagaagcatatcgttcgtgtccagttactttgcaaatttgtggacatttgtgattggacagaggggtttgtgctgtggcctaacacttgccaagtgaggtgtaggttatgcctatatgcaaattaaacttcacctttcttgaa

SEQ ID NO: 168976 - DNA, 3714 bp, Artificial Sequence
  derived and/or modified sequence
atgcagaagagcgtgagatacaacgagggccacgccctgtacctggccttcctggccagaaaggagggcaccaagagaggcttcctgagcaagaagaccgccgaggccagcagatggcacgagaagtggttcgccctgtaccagaacgtgctgttctacttcgagggcgagcagagctgcagacccgccggcatgtacctgctggagggctgcagctgcgagagaacccccgccccccccagagccggcgccggccagggcggcgtgagagacgccctggacaagcagtactacttcaccgtgctgttcggccacgagggccagaagcccctggagctgagatgcgaggaggagcaggacggcaaggagtggatggaggccatccaccaggccagctacgccgacatcctgatcgagagagaggtgctgatgcagaagtacatccacctggtgcagatcgtggagaccgagaagatcgccgccaaccagctgagacaccagctggaggaccaggacaccgagatcgagagactgaagagcgagatcatcgccctgaacaagaccaaggagagaatgagaccctaccagagcaaccaggaggacgaggaccccgacatcaagaagatcaagaaggtgcagagcttcatgagaggctggctgtgcagaagaaagtggaagaccatcgtgcaggactacatctgcagcccccacgccgagagcatgagaaagagaaaccagatcgtgttcaccatggtggaggccgagagcgagtacgtgcaccagctgtacatcctggtgaacggcttcctgagacccctgagaatggccgccagcagcaagaagccccccatcagccacgacgacgtgagcagcatcttcctgaacagcgagaccatcatgttcctgcacgagatcttccaccagggcctgaaggccagaatcgccaactggcccaccctgatcctggccgacctgttcgacatcctgctgcccatgctgaacatctaccaggagttcgtgagaaaccaccagtacagcctgcaggtgctggccaactgcaagcagaacagagacttcgacaagctgctgaagcagtacgaggccaaccccgcctgcgagggcagaatgctggagaccttcctgacctaccccatgttccagatccccagatacatcatcaccctgcacgagctgctggcccacaccccccacgagcacgtggagagaaagagcctggagttcgccaagagcaagctggaggagctgagcagagtgatgcacgacgaggtgagcgacaccgagaacatcagaaagaacctggccatcgagagaatgatcgtggagggctgcgacatcctgctggacaccagccagaccttcatcagacagggcagcctgatccaggtgcccagcgtggagagaggcaagctgagcaaggtgagactgggcagcctgagcctgaagaaggagggcgagagacagtgcttcctgttcaccaagcacttcctgatctgcaccagaagcagcggcggcaagctgcacctgctgaagaccggcggcgtgctgagcctgatcgactgcaccctgatcgaggagcccgacgccagcgacgacgacagcaagggcagcggccaggtgttcggccacctggacttcaagatcgtggtggagccccccgacgccgccgccttcaccgtggtgctgctggcccccagcagacaggagaaggccgcctggatgagcgacatcagccagtgcgtggacaacatcagatgcaacggcctgatgaccatcgtgttcgaggagaacagcaaggtgaccgtgccccacatgatcaagagcgacgccagactgcacaaggacgacaccgacatctgcttcagcaagaccctgaacagctgcaaggtgccccagatcagatacgccagcgtggagagactgctggagagactgaccgacctgagattcctgagcatcgacttcctgaacaccttcctgcacacctacagaatcttcaccaccgccgccgtggtgctgggcaagctgagcgacatctacaagagacccttcaccagcatccccgtgagaagcctggagctgttcttcgccaccagccagaacaacagaggcgagcacctggtggacggcaagagccccagactgtgcagaaagttcagcagccccccccccctggccgtgagcagaaccagcagccccgtgagagccagaaagctgagcctgaccagccccctgaacagcaagatcggcgccctggacctgaccaccagcagcagccccaccaccaccacccagagccccgccgccagcccccccccccacaccggccagatccccctggacctgagcagaggcctgagcagccccgagcagagccccggcaccgtggaggagaacgtggacaaccccagagtggacctgtgcaacaagctgaagagaagcatccagaaggccgtgctggagagcgcccccgccgacagagccggcgtggagagcagccccgccgccgacaccaccgagctgagcccctgcagaagccccagcacccccagacacctgagatacagacagcccggcggccagaccgccgacaacgcccactgcagcgtgagccccgccagcgccttcgccatcgccaccgccgccgccggccacggcagcccccccggcttcaacaacaccgagagaacctgcgacaaggagttcatcatcagaagaaccgccaccaacagagtgctgaacgtgctgagacactgggtgagcaagcacgcccaggacttcgagctgaacaacgagctgaagatgaacgtgctgaacctgctggaggaggtgctgagagaccccgacctgctgccccaggagagaaaggccgccgccaacatcctgagagccctgagccaggacgaccaggacgacatccacctgaagctggaggacatcatccagatgaccgactgcatgaaggccgagtgcttcgagagcctgagcgccatggagctggccgagcagatcaccctgctggaccacgtgatcttcagaagcatcccctacgaggagttcctgggccagggctggatgaagctggacaagaacgagagaaccccctacatcatgaagaccagccagcacttcaacgacatgagcaacctggtggccagccagatcatgaactacgccgacgtgagcagcagagccaacgccatcgagaagtgggtggccgtggccgacatctgcagatgcctgcacaactacaacggcgtgctggagatcaccagcgccctgaacagaagcgccatctacagactgaagaagacctgggccaaggtgagcaagcagaccaaggccctgatggacaagctgcagaagaccgtgagcagcgagggcagattcaagaacctgagagagaccctgaagaactgcaacccccccgccgtgccctacctgggcatgtacctgaccgacctggccttcatcgaggagggcacccccaacttcaccgaggagggcctggtgaacttcagcaagatgagaatgatcagccacatcatcagagagatcagacagttccagcagaccagctacagaatcgaccaccagcccaaggtggcccagtacctgctggacaaggacctgatcatcgacgaggacaccctgtacgagctgagcctgaagatcgagcccagactgcccgcctag

SEQ ID NO: 168977 - protein, 1792 aa, Artificial Sequence
  derived and/or modified sequence
MSCVHYKFSSKLNYDTVTFDGLHISLCDLKKQIMGREKLKAADCDLQITNAQTKEEYTDDNALIPKNSSVIVRRIPIGGVKSTSKTYVISRTEPAMATTKAIDDSSASISLAQLTKTANLAEANASEEDKIKAMMSQSGHEYDPINYMKKPLGPPPPSYTCFRCGKPGHYIKNCPTNGDKNFESGPRIKKSTGIPRSFMMEVKDPNMKGAMLTNTGKYAIPTIDAEAYAIGKKEKPPFLPEEPSSSSEEDDPIPDELLCLICKDIMTDAVVIPCCGNSYCDECIRTALLESDEHTCPTCHQNDVSPDALIANKFLRQAVNNFKNETGYTKRLRKQLPPPPPPIPPPRPLIQRNLQPLMRSPISRQQDPLMIPVTSSSTHPAPSISSLTSNQSSLAPPVSGNPSSAPAPVPDITATVSISVHSEKSDGPFRDSDNKILPAAALASEHSKGTSSIAITALMEEKGYQVPVLGTPSLLGQSLLHGQLIPTTGPVRINTARPGGGRPGWEHSNKLGYLVSPPQQIRRGERSCYRSINRGRHHSERSQRTQGPSLPATPVFVPVPPPPLYPPPPHTLPLPPGVPPPQFSPQFPPGQPPPAGYSVPPPGFPPAPANLSTPWVSSGVQTAHSNTIPTTQAPPLSREEFYREQRRLKEEEKKKSKLDEFTNDFAKELMEYKKIQKERRRSFSRSKSPYSGSSYSRSSYTYSKSRSGSTRSRSYSRSFSRSHSRSYSRSPPYPRRGRGKSRNYRSRSRSHGYHRSRSRSPPYRRYHSRSRSPQAFRGQSPNKRNVPQGETEREYFNRYREVPPPYDMKAYYGRSVDFRDPFEKERYREWERKYREWYEKYYKGYAAGAQPRPSANRENFSPERFLPLNIRNSPFTRGRREDYVGGQSHRSRNIGSNYPEKLSARDGHNQKDNTKSKEKESENAPGDGKGNKHKKHRKRRKGEESEGFLNPELLETSRKSREPTGVEENKTDSLFVLPSRDDATPVRDEPMDAESITFKSVSEKDKRERDKPKAKGDKTKRKNDGSAVSKKENIVKPAKGPQEKVDGERERSPRSEPPIKKAKEETPKTDNTKSSSSSQKDEKITGTPRKAHSKSAKEHQETKPVKEEKVKKDYSKDVKSEKLTTKEEKAKKPNEKNKPLDNKGEKRKRKTEEKGVDKDFESSSMKISKLEVTEIVKPSPKRKMEPDTEKMDRTPEKDKISLSAPAKKIKLNRETGKKIGSTENISNTKEPSEKLESTSSKVKQEKVKGKVRRKVTGTEGSSSTLVDYTSTSSTGGSPVRKSEEKTDTKRTVIKTMEEYNNDNTAPAEDVIIMIQVPQSKWDKDDFESEEEDVKSTQPISSVGKPASVIKNVSTKPSNIVKYPEKESEPSEKIQKFTKDVSHEIIQHEVKSSKNSASSEKGKTKDRDYSVLEKENPEKRKNSTQPEKESNLDRLNEQGNFKSLSQSSKEARTSDKHDSTRASSNKDFTPNRDKKTDYDTREYSSSKRRDEKNELTRRKDSPSRNKDSASGQKNKPREERDLPKKGTGDSKKSNSSPSRDRKPHDHKATYDTKRPNEETKSVDKNPCKDREKHVLEARNNKESSGNKLLYILNPPETQVEKEQITGQIDKSTVKPKPQLSHSSRLSSDLTRETDEAAFEPDYNESDSESNVSVKEEESSGNISKDLKDKIVEKAKESLDTAAVVQVGISRNQSHSSPSVSPSRSHSPSGSQTRSHSSSASSAESQDSKKKKKKKEKKKHKKHKKHKKHKKHAGTEVELEKSQKHKHKKKKSKKNKDKEKEKEKDDQKVKSVTV

SEQ ID NO: 168978 - protein, 952 aa, Artificial Sequence
  derived and/or modified sequence
MSCVHYKFSSKLNYDTVTFDGLHISLCDLKKQIMGREKLKAADCDLQITNAQTKEEYTDDNALIPKNSSVIVRRIPIGGVKSTSKTYVISRTEPAMATTKAIDDSSASISLAQLTKTANLAEANASEEDKIKAMMSQSGHEYDPINYMKKPLGPPPPSYTCFRCGKPGHYIKNCPTNGDKNFESGPRIKKSTGIPRSFMMEVKDPNMKGAMLTNTGKYAIPTIDAEAYAIGKKEKPPFLPEEPSSSSEEDDPIPDELLCLICKDIMTDAVVIPCCGNSYCDECIRTALLESDEHTCPTCHQNDVSPDALIANKFLRQAVNNFKNETGYTKRLRKQLPPPPPPIPPPRPLIQRNLQPLMRSPISRQQDPLMIPVTSSSTHPAPSISSLTSNQSSLAPPVSGNPSSAPAPVPDITATVSISVHSEKSDGPFRTSSTGGSPVRKSEEKTDTKRTVIKTMEEYNNDNTAPAEDVIIMIQVPQSKWDKDDFESEEEDVKSTQPISSVGKPASVIKNVSTKPSNIVKYPEKESEPSEKIQKFTKDVSHEIIQHEVKSSKNSASSEKGKTKDRDYSVLEKENPEKRKNSTQPEKESNLDRLNEQGNFKSLSQSSKEARTSDKHDSTRASSNKDFTPNRDKKTDYDTREYSSSKRRDEKNELTRRKDSPSRNKDSASGQKNKPREERDLPKKGTGDSKKSNSSPSRDRKPHDHKATYDTKRPNEETKSVDKNPCKDREKHVLEARNNKESSGNKLLYILNPPETQVEKEQITGQIDKSTVKPKPQLSHSSRLSSDLTRETDEAAFEPDYNESDSESNVSVKEEESSGNISKDLKDKIVEKAKESLDTAAVVQVGISRNQSHSSPSVSPSRSHSPSGSQTRSHSSSASSAESQDSKKKKKKKEKKKHKKHKKHKKHKKHAGTEVELEKSQKHKHKKKKSKKNKDKEKEKEKDDQKVKSVTV

SEQ ID NO: 168979 - protein, 185 aa, Artificial Sequence
  derived and/or modified sequence
MPRLFLFHLLEFCLLLNQFSRAVAAKWKDDVIKLCGRELVRAQIAICGMSTWSKRSLSQEDAPQTPRPVAEIVPSFINKDTETIIIMLEFIANLPPELKAALSERQPSLPELQQYVPALKDSNLSFEEFKKLIRNRQSEAADSNPSELKYLGLDTHSQKKRRPYVALFEKCCLIGCTKRSLAKYC

SEQ ID NO: 168980 - DNA, 558 bp, Artificial Sequence
  derived and/or modified sequence
atgcccagactgttcctgttccacctgctggagttctgcctgctgctgaaccagttcagcagagccgtggccgccaagtggaaggacgacgtgatcaagctgtgcggcagagagctggtgagagcccagatcgccatctgcggcatgagcacctggagcaagagaagcctgagccaggaggacgccccccagacccccagacccgtggccgagatcgtgcccagcttcatcaacaaggacaccgagaccatcatcatcatgctggagttcatcgccaacctgccccccgagctgaaggccgccctgagcgagagacagcccagcctgcccgagctgcagcagtacgtgcccgccctgaaggacagcaacctgagcttcgaggagttcaagaagctgatcagaaacagacagagcgaggccgccgacagcaaccccagcgagctgaagtacctgggcctggacacccacagccagaagaagagaagaccctacgtggccctgttcgagaagtgctgcctgatcggctgcaccaagagaagcctggccaagtactgctag

SEQ ID NO: 168981 - DNA, 558 bp, Artificial Sequence
  derived and/or modified sequence
atgccacgattgttcctttttcatctgttagagttttgtctcctgctgaaccagttcagtagagccgtggcagctaagtggaaagatgacgtgatcaagctttgcggacgagagctggtgagagcccaaatcgccatttgtggtatgagcacttggagcaagcgctctttaagccaggaagatgcgcctcagacaccacgacctgttgctgagatcgtcccatcgtttatcaacaaagacactgaaaccatcattattatgttggagtttatcgcaaacctaccgcccgagctgaaggctgctctgagtgaaaggcagccctctttacccgagttgcaacagtatgttccagccctcaaagatagcaatctgtcattcgaagagtttaaaaaactaatccgcaacaggcagtctgaagcagcggactcgaaccccagtgagctcaagtatctgggtctcgatacccactcccagaagaagaggagaccatacgttgctctgtttgagaagtgttgtctcatcgggtgcactaaaagatccctcgctaagtactgctag

SEQ ID NO: 168982 - DNA, 558 bp, Artificial Sequence
  derived and/or modified sequence
atgcccaggctcttcctgttccacctgctggagttctgcctgctgctgaaccagttcagcagagctgtggccgccaagtggaaggatgatgtgatcaagctgtgtggccgggagctggtgcgggcccagatcgccatctgtggcatgagcacctggagcaagaggagcctgagccaggaggatgccccccagacccccaggcctgtggccgagatcgtgcccagcttcatcaacaaggacacagagaccatcatcatcatgctggagttcatcgccaacctgcccccagagctgaaggccgccctgtctgagcggcagcccagcctgcctgagctgcagcagtatgtgcctgccctgaaggacagcaacctgagctttgaggagttcaagaagctgatccggaaccggcagagcgaggccgctgacagcaaccccagcgagctgaagtacctgggcctggacacccacagccagaagaagagaagaccctacgtggccctgtttgagaagtgctgcctgattggctgcaccaagaggagcctggccaagtactgctag

SEQ ID NO: 168983 - DNA, 558 bp, Artificial Sequence
  derived and/or modified sequence
atgccccggctgttcctgttccacctgctggagttctgcctgctgctaaatcaattctcccgcgccgtcgctgcaaaatggaaagatgacgtgatcaaactctgcggacgggagctcgtgcgcgctcagatcgcaatttgtggaatgagcacatggtctaaacggagcctgtcacaggaagatgcgccccaaacccctcggcctgtcgccgagatcgtcccgagttttatcaataaagataccgaaacaatcatcattatgctggaattcatcgctaatctgccccccgaattaaaagcggcactgtccgagcggcaaccctccctgcccgaactgcagcaatatgttccagcactcaaagattctaatctgagctttgaggaattcaagaagcttatacgtaacagacagtcagaagctgccgactccaatccctcggagctgaaatatcttggactggatacccacagccagaaaaaacgacggccctacgtggcgctatttgaaaaatgttgccttattggctgcaccaagagatcactggcaaagtactgctag

SEQ ID NO: 168984 - DNA, 558 bp, Artificial Sequence
  derived and/or modified sequence
atgcctcggctgtttctgtttcatctcctagagttttgccttttgctgaaccagttctcccgagctgtcgccgctaagtggaaagacgacgtcatcaagctgtgcggtagggagcttgtcagggctcagatagctatttgcggtatgtccacttggtccaaacgctctctttcccaggaggatgctccccaaacgcctaggcctgtagcagaaatcgttcctagctttattaacaaagatactgagactattattataatgttggaatttattgccaatcttccaccagagctaaaggcggcattgagcgaaagacaaccctctttgcccgaactccagcagtatgtcccagccctgaaggactccaacctcagttttgaggagtttaaaaagctgatacgcaaccgtcagagtgaggccgcagattcaaacccctctgaattaaagtatttaggtctggatacacatagtcagaaaaagcgcagaccttacgtggccctgtttgaaaagtgctgcctcatcggctgcacaaaacggtccctcgccaaatactgttag

SEQ ID NO: 168985 - DNA, 1068 bp, Artificial Sequence
  derived and/or modified sequence
ggttgagccgggtagggaaagcagcctaaagcccgggacaggcacacaggcccaggtgtgtaggccacagcagccgcagtcctgaaaggctgcaacacccagacctccaggagagaccaggcccaggatgcctcgcctgttcttgttccacctgctagaattctgtttactactgaaccaattttccagagcagtcgcggccaaatggaaggacgatgttattaaattatgcggccgcgaattagttcgcgcgcagattgccatttgcggcatgagcacctggagcaaaaggtctctgagccaggaagatgctcctcagacacctagaccagtggcaggtgattttattcaaacagtctcactgggaatctcaccggacggagggaaagcactgagaacaggaagctgcttcacccgagagttccttggtgccctttccaaattgtaccatccttcatcaacaaagatacagaaactataattatcatgttggaattcattgctaatttgccaccggagctgaaggcagccctatctgagaggcaaccatcattaccagagctacagcagtatgtacctgcattaaaggattccaatcttagctttgaagaatttaagaaacttattcgcaataggcaaagtgaagccgcagacagcaatccttcagaattaaaatacttaggcttggatactcattctcaaaaaaagagacgaccctacgtggcactgtttgagaaatgttgcctaattggttgtaccaaaaggtctcttgctaaatattgctgagatgaagctaattgtgcacatcttgtctaattttcacacatagtcttgatgacatttcactgatgcttctgtcaggtcccactaattattagaatataagaaatctttattaatgtttagatttttcatttggtgtgtaagaaaatattctttgtatgattgtagtttctgtaaatgacactttctatgctgaagtctttttgtctttttattaacagtataattgtgttgattctttttaatgctgttaacttaaaattacaataaaacctttgccacttt

SEQ ID NO: 168986 - DNA, 967 bp, Artificial Sequence
  derived and/or modified sequence
ggttgagccgggtagggaaagcagcctaaagcccgggacaggcacacaggcccaggtgtgtaggccacagcagccgcagtcctgaaaggctgcaacacccagacctccaggagagaccaggcccaggatgcctcgcctgttcttgttccacctgctagaattctgtttactactgaaccaattttccagagcagtcgcggccaaatggaaggacgatgttattaaattatgcggccgcgaattagttcgcgcgcagattgccatttgcggcatgagcacctggagcaaaaggtctctgagccaggaagatgctcctcagacacctagaccagtggcagaaattgtaccatccttcatcaacaaagatacagaaactataattatcatgttggaattcattgctaatttgccaccggagctgaaggcagccctatctgagaggcaaccatcattaccagagctacagcagtatgtacctgcattaaaggattccaatcttagctttgaagaatttaagaaacttattcgcaataggcaaagtgaagccgcagacagcaatccttcagaattaaaatacttaggcttggatactcattctcaaaaaaagagacgaccctacgtggcactgtttgagaaatgttgcctaattggttgtaccaaaaggtctcttgctaaatattgctgagatgaagctaattgtgcacatcttgtctaattttcacacatagtcttgatgacatttcactgatgcttctgtcaggtcccactaattattagaatataagaaatctttattaatgtttagatttttcatttggtgtgtaagaaaatattctttgtatgattgtagtttctgtaaatgacactttctatgctgaagtctttttgtctttttattaacagtataattgtgttgattctttttaatgctgttaacttaaaattacaataaaacctttgccacttt

SEQ ID NO: 168987 - protein, 219 aa, Artificial Sequence
  derived and/or modified sequence
MDSGTRPVGSCCSSPAGLSREYKLVMLGAGGVGKSAMTMQFISHRFPEDHDPTIEDAYKIRIRIDDEPANLDILDTAGQAEFTAMRDQYMRAGEGFIICYSITDRRSFHEVREFKQLIYRVRRTDDTPVVLVGNKSDLKQLRQVTKEEGLALAREFSCPFFETSAAYRYYIDDVFHALVREIRRKEKEAVLAMEKKSKPKNSVWKRLKSPFRKKKDSVT

SEQ ID NO: 168988 - protein, 183 aa, Artificial Sequence
  derived and/or modified sequence
MTMQFISHRFPEDHDPTIEDAYKIRIRIDDEPANLDILDTAGQAEFTAMRDQYMRAGEGFIICYSITDRRSFHEVREFKQLIYRVRRTDDTPVVLVGNKSDLKQLRQVTKEEGLALAREFSCPFFETSAAYRYYIDDVFHALVREIRRKEKEAVLAMEKKSKPKNSVWKRLKSPFRKKKDSVT

SEQ ID NO: 168989 - DNA, 660 bp, Artificial Sequence
  derived and/or modified sequence
atggacagcggcaccagacccgtgggcagctgctgcagcagccccgccggcctgagcagagagtacaagctggtgatgctgggcgccggcggcgtgggcaagagcgccatgaccatgcagttcatcagccacagattccccgaggaccacgaccccaccatcgaggacgcctacaagatcagaatcagaatcgacgacgagcccgccaacctggacatcctggacaccgccggccaggccgagttcaccgccatgagagaccagtacatgagagccggcgagggcttcatcatctgctacagcatcaccgacagaagaagcttccacgaggtgagagagttcaagcagctgatctacagagtgagaagaaccgacgacacccccgtggtgctggtgggcaacaagagcgacctgaagcagctgagacaggtgaccaaggaggagggcctggccctggccagagagttcagctgccccttcttcgagaccagcgccgcctacagatactacatcgacgacgtgttccacgccctggtgagagagatcagaagaaaggagaaggaggccgtgctggccatggagaagaagagcaagcccaagaacagcgtgtggaagagactgaagagccccttcagaaagaagaaggacagcgtgacctag

SEQ ID NO: 168990 - DNA, 660 bp, Artificial Sequence
  derived and/or modified sequence
atggactctggcacaagacctgttgggtcatgttgtagtagccccgcaggccttagcagggagtacaaattagtgatgttgggcgctggcggtgttggaaagtctgctatgaccatgcagtttatcagccataggtttcctgaggatcatgatccaacaatcgaggatgcctacaaaatccgtatccgcatcgacgatgaaccggcgaacctggacatcctggacacagccggccaagcagaatttactgccatgcgagatcaatatatgagggccggcgaagggttcataatctgctactctatcactgaccggagatcattccacgaggtcagggagttcaaacagctcatctacagggtgcggcgtacagatgacacacccgtggtcctcgttgggaacaaatctgacttgaagcagctgcggcaagtgaccaaagaggaaggattagcactcgctcgcgaattcagctgcccctttttcgagacttctgctgcctataggtactacatcgacgacgtgttccacgctcttgtacgcgagatccgccgcaaagaaaaggaagccgtgctggccatggaaaagaaaagtaaaccgaaaaattctgtgtggaaacgccttaaaagccctttccgaaaaaagaaggacagtgtgacttag

SEQ ID NO: 168991 - DNA, 660 bp, Artificial Sequence
  derived and/or modified sequence
atggattctggcaccaggcctgtgggcagctgctgcagcagccctgctggcctgagccgggagtacaagctggtgatgctgggcgctgggggcgtgggcaagagcgccatgaccatgcagttcatcagccaccgcttccctgaggaccatgaccccaccattgaagatgcctacaagatccgcatcagaattgatgatgagcccgccaacctggacatcctggacacagctggccaggccgagttcaccgccatgagggaccagtacatgagagctggggagggcttcatcatctgctacagcatcacagacagaagaagcttccacgaggtgcgggagttcaagcagctgatctacagagtgcggaggacagatgacacccctgtggtgctggtgggcaacaagagtgacctgaagcagctgcggcaggtgaccaaggaggagggcctggccctggcccgggagttcagctgccccttctttgagaccagcgctgcctaccgctactacattgatgatgtgttccacgccctggtgcgggagatccggaggaaggagaaggaggccgtgctggccatggagaagaagagcaagcccaagaacagcgtgtggaagaggctgaagagccccttcaggaagaagaaggacagcgtgacctag

SEQ ID NO: 168992 - DNA, 660 bp, Artificial Sequence
  derived and/or modified sequence
atggacagcggcacccggcccgtgggcagctgctgcagcagccccgccggactgtctcgggaatacaaattggttatgttaggggctggaggtgtgggcaaaagcgccatgactatgcaattcatttcgcaccgatttccggaagaccatgatcctaccattgaagatgcatataaaatccgcattcggatagacgacgaaccggccaacctggacatcctggacacagccggtcaggccgagttcactgccatgcgtgatcagtacatgcgcgctggggagggattcattatctgttatagcattactgatcgccgcagcttccacgaagtgcgagagttcaagcagctcatttatagggtacggagaactgatgacacacccgtcgttctggtcggaaacaagtccgatctgaagcaactccggcaggtaaccaaggaagagggtctcgcattggccagagagttcagctgtcctttcttcgaaacctcagccgcctatcgttattacattgatgacgtctttcacgctctggtgcgtgagatcaggcgtaaggagaaggaagcggtgctggctatggagaaaaagtccaagcccaagaattctgtttggaaacgcttgaaatcaccatttaggaagaagaaggatagcgtcacctag

SEQ ID NO: 168993 - DNA, 660 bp, Artificial Sequence
  derived and/or modified sequence
atggactccggtacccgccctgtcggatcttgctgctcatccccagccggattgtctagggaatataaattagtgatgcttggcgctggcggagtggggaagtctgccatgactatgcagttcattagccatcgattccccgaagaccatgatcctacgatcgaggacgcatataaaatccggattaggatcgatgacgaacccgctaatctggacatcttggacaccgccggacaggccgagttcacggcaatgcgggaccagtacatgcgtgctggcgaaggctttattatctgctatagtataacagatcggagaagctttcacgaagtgcgcgaatttaagcagctgatttaccgcgtgagacgcaccgatgacaccccagtggtcctggtgggaaataaaagtgatctcaaacaattgcgtcaagtgaccaaggaagaaggattggcgttagctcgtgaattctcttgcccgtttttcgaaacttcggccgcataccgttattatatcgatgatgtgttccatgccttagtgagagaaatccgcaggaaggaaaaagaggctgtgctggccatggagaaaaaatctaaacctaaaaattctgtgtggaaacgcttaaaatcaccttttagaaaaaaaaaggactccgtgacttag

SEQ ID NO: 168994 - DNA, 919 bp, Artificial Sequence
  derived and/or modified sequence
gactcgggcgccggtggcgccatcttactcggttgcgggaggggtcacaggtcagtgccggagcctccgcgagtgaaggaagacgaagtgcgtgacccgaccggctgtggtgttccagtccccactgaccagtaggagcagcagggcgtcggcttgtgagccatgaccatgcagttcatcagccaccgattcccagaagatcatgatcccaccattgaagatgcttataagatcaggatccgtattgatgatgagcctgccaatctggacattttggatacagctggacaggcagagtttacagccatgcgggaccagtatatgagggcaggagaagggtttatcatctgttactctatcacggatcgtcgaagtttccatgaagttcgtgagtttaaacagcttatttatcgagtccgacgtactgacgatacacctgtggttcttgtgggaaacaagtcagacctcaaacagctaagacaggtcaccaaggaagaaggattggccttggcccgagaattcagctgtcccttttttgagacatctgctgcataccgctactatattgatgatgttttccatgcccttgtacgggagatacgtaggaaagaaaaggaggcagtactggccatggagaaaaaatctaagcccaaaaacagtgtatggaagaggctaaaatcaccattccggaagaagaaagattcagtaacttgaagagaagatgtgaagtgtttatctgtgaactgcagtgctgtatcaaagcagtccagtaacctgcagtactgagtatggtgcttgctctttcacttaactgataagagggacatgcctactaggagtttttaatgatgtggtatttaaagtattgtctcttagttaagtatgatttattaacccagtggagcactgtctgctttta

SEQ ID NO: 168995 - protein, 180 aa, Artificial Sequence
  derived and/or modified sequence
MAAAEEEDGGPEGPNRERGGAGATFECNICLETAREAVVSVCGHLYCWPCLHQWLETRPERQECPVCKAGISREKVVPLYGRGSQKPQDPRLKTPPRPQGQRPAPESRGGFQPFGDTGGFHFSFGVGAFPFGFFTTVFNAHEPFRRGTGVDLGQGHPASSWQDSLFLFLAIFFFFWLLSI

SEQ ID NO: 168996 - protein, 182 aa, Artificial Sequence
  derived and/or modified sequence
MAAAEEEDGGPEGPNRERGGAGATFECNICLETAREAVVSVCGHLYCWPCLHQWLETRPERQECPVCKAGISREKVVPLYGRGSQKPQDPRLKTPPRPQGQRPAPESRGGFQPFGDTGGFHFSFGVGAFPFGFFTTVFNAHEPFRRGTGPFSTSPAFFHYLIGNTSREFRGRIYNFWLPRNL

SEQ ID NO: 168997 - DNA, 543 bp, Artificial Sequence
  derived and/or modified sequence
atggccgctgctgaggaggaagacggggggcccgaggggccgaacagggagagggggggcgccggggccacatttgaatgcaatatctgcttggaaaccgctcgcgaggctgtagtctctgtttgcgggcacctgtactgctggccctgcctgcaccagtggctggaaactagacccgagcgtcaagagtgtcctgtttgtaaagccggaatcagtagagagaaggtggtgcccctatatggcagaggtagtcagaagccccaggacccacgactaaaaacccctccgagacctcagggacagcgcccggcacctgagtcccgcggcggatttcaaccgtttggagacaccggaggatttcatttctccttcggagtgggcgctttcccctttgggtttttcacaaccgtgtttaacgcccatgaacctttccgtcgcggcacaggggtcgatctgggccagggccatccagcctcatcttggcaggacagcctgttcctttttcttgcaatattctttttcttttggctcctgtctatctag

SEQ ID NO: 168998 - DNA, 543 bp, Artificial Sequence
  derived and/or modified sequence
atggccgccgctgaggaggaagatggcggtcccgaggggcctaacagggagcgagggggagcaggcgcaacgtttgaatgtaatatttgtttagaaacagctcgcgaggcagtggtctcggtgtgtggccatctctattgctggccctgtcttcatcagtggttagaaacccgccctgagcgccaggaatgtcccgtctgtaaagctggaattagtcgcgagaaagtcgttcccctctatggacgcggatctcagaagccccaagatccccgacttaagacccctcccaggccccagggtcagcggccagcccccgagagccgagggggattccagccctttggcgatacaggcggattccacttcagttttggggtgggggccttcccattcggctttttcaccaccgtgttcaatgctcacgagccctttagacggggaaccggcgtggaccttggccaagggcatcccgcaagttcatggcaggatagcctcttcctcttccttgctatatttttcttcttctggctattgagtatttag

SEQ ID NO: 168999 - DNA, 549 bp, Artificial Sequence
  derived and/or modified sequence
atggcagccgcagaggaagaagatggcgggccagaggggcccaaccgtgagaggggaggagcgggagccaccttcgagtgtaacatctgcctggaaacggcccgcgaggcggtcgttagtgtctgcggccacttgtattgttggccctgcttgcatcaatggctggagacgcgccccgaaagacaggaatgccctgtttgcaaggcagggatctctcgcgagaaagttgttcctctatatggtagaggtagccagaaaccccaggaccctcgactgaagacccccccacgaccacaaggtcagcgacctgcccctgaatcacgcggtgggttccagccatttggggatacagggggcttccacttctcgttcggtgtgggggcctttccattcggatttttcaccactgtgtttaatgcccacgaaccctttcggaggggcactgggccattctctacttccccagcatttttccactacctgatcggaaataccagcagggaatttcgcggtaggatctataacttctggttgccccgcaacctgtag

SEQ ID NO: 169000 - DNA, 543 bp, Artificial Sequence
  derived and/or modified sequence
atggcggccgccgaagaggaggacggtggccctgaaggacctaacagggagaggggaggtgcaggcgctacatttgagtgcaatatctgccttgagacggctcgggaggccgtcgtgtctgtgtgtggacatctgtattgctggccttgcctgcaccagtggctggagaccaggcccgagagacaggagtgtccagtctgtaaagccggtatcagccgcgaaaaggtcgtgcctctttacggaaggggcagccagaagccgcaggatccccgccttaagaccccaccaaggcctcaagggcagagacccgcaccggagagccgaggtgggtttcagccatttggggatacgggaggattccacttttctttcggggtcggggctttcccgtttgggtttttcacgaccgtgttcaacgctcatgagccctttcgacggggcacaggcgtcgacctgggccagggacatccagctagttcctggcaggacagtctttttttgtttcttgccattttcttttttttctggctcctctcaatctag

SEQ ID NO: 169001 - DNA, 543 bp, Artificial Sequence
  derived and/or modified sequence
atggcagctgccgaagaagaggatggaggtccagagggaccaaatagggaaaggggaggtgcaggtgccacatttgaatgcaacatctgtctcgaaacagccagggaggccgtggtcagcgtctgcggtcacctctattgctggccctgcttacaccagtggcttgaaacgaggcctgaaaggcaggaatgtcccgtatgcaaggccggcatttctcgggagaaggtggttccactgtacggtcggggcagccaaaagccacaggatcctagactgaagaccccccccagaccacagggtcagcgcccagcccccgaaagcaggggcggctttcaaccatttggggatacaggtggattccacttctctttcggcgtcggcgctttcccgtttggcttcttcaccacagtctttaacgcccatgaaccatttcggaggggcactggggtagatctgggacagggtcatcctgcaagttcatggcaagacagtttgtttctgttccttgcgattttcttcttcttttggttacttagcatctag

SEQ ID NO: 169002 - DNA, 543 bp, Artificial Sequence
  derived and/or modified sequence
atggccgcagccgaggaggaggatggggggccggagggccctaacagagagagggggggtgctggcgcaacttttgagtgcaacatctgtctagaaaccgctagggaggccgtagtgagcgtgtgtggccacctctattgctggccgtgccttcaccagtggctcgagacaagaccggagcggcaggagtgccctgtgtgtaaggccgggatatctcgcgagaaagtggtgccgctttatgggcgcggcagccagaagccgcaggacccacggctgaagacacctcctagaccacagggccagaggcccgcgcctgagtctcgcgggggatttcagcccttcggagacaccggaggcttccacttctcatttggagtgggcgcattcccctttggcttcttcacaaccgtttttaacgcacacgagcccttcagacgcggaacaggggtggacctcggccagggccatcccgcaagctcctggcaggactcactgtttttgtttctggcgatcttttttttcttctggctgctcagtatctag

SEQ ID NO: 169003 - DNA, 543 bp, Artificial Sequence
  derived and/or modified sequence
atggctgccgcagaggaggaggacgggggcccggaggggcccaacagagaacgcggcggggccggcgccaccttcgaatgcaacatatgcttagagactgcaagggaagccgtcgttagtgtttgtggacatctgtattgctggccctgtttacaccagtggctcgaaaccagacctgaacggcaggagtgccccgtgtgcaaggccggaatatcacgagaaaaggtcgttccactttatggtcgagggtcacaaaagcctcaggacccgagactgaaaaccccgccacggccgcagggtcagcggccagctccagagagccggggagggttccagcccttcggcgatacagggggcttccacttttcgttcggggtcggcgccttccccttcgggttttttacaactgtgtttaacgctcacgagcctttccgaaggggaaccggagtggacctgggccaaggacatcccgcgagtagctggcaggatagtttgtttcttttccttgctattttctttttcttctggttactgtctatctag

SEQ ID NO: 169004 - DNA, 543 bp, Artificial Sequence
  derived and/or modified sequence
atggcagctgccgaagaagaggacggaggccccgagggccccaatcgcgagcgcgggggcgctggcgccacatttgaatgtaatatctgcctggaaacagccagagaggcagtggtgtccgtctgcggtcatctttattgctggccctgcctgcatcagtggctggaaacaagacccgagaggcaggagtgtcccgtgtgcaaagccggcatttcccgcgagaaggtggtgcctctatacggacgtggatctcagaaacctcaggatcctaggctcaagacacctcccagacctcagggtcagagacccgctcctgagagtcggggtggcttccagcccttcggggacaccggcgggttccacttcagttttggcgtgggagcgttccctttcggattcttcaccacagttttcaacgcccatgagccgttccgtcggggcactggcgtagatctgggacaagggcaccctgcttcatcttggcaagacagcctgtttttgttcctggctatttttttcttcttttggctactgtctatttag

SEQ ID NO: 169005 - DNA, 549 bp, Artificial Sequence
  derived and/or modified sequence
atggccgcggccgaggaagaagatggtgggccagagggtcccaatcgggaaagaggcggggccggggccacattcgagtgcaacatctgtctggagaccgccagggaagctgtggtcagcgtgtgcgggcacctgtactgttggccctgccttcatcagtggctcgagacaaggccagagagacaggagtgtcctgtgtgtaaggccggaatctcgcgggagaaggttgtccccctgtatggtagaggaagtcagaagccccaggacccccgcctcaaaacccctcctaggcctcagggacagaggccggcccccgagtccagggggggtttccaacccttcggagacacagggggcttccactttagctttggagttggtgcttttccttttggattttttaccacggtgttcaatgcacatgagccctttcggagggggacagggcctttttcaacaagccccgctttcttccactatctgatcggcaatacatcccgagaattcagagggcgtatctacaacttttggctccctcgcaacctatag

SEQ ID NO: 169006 - DNA, 549 bp, Artificial Sequence
  derived and/or modified sequence
atggccgcagctgaggaggaggatggaggcccggagggcccaaatagagaaagaggtggggctggggcgacgtttgaatgtaatatatgcttagagactgccagggaggcagtggtgtccgtgtgcggccatttgtactgttggccatgtctccaccaatggctggaaacgaggcccgaacgccaagagtgtccagtgtgcaaggctggaatatcaagggagaaagtagtgccactgtacgggagaggctcccagaagcctcaggaccctaggttgaagacaccaccccgcccgcaggggcagaggcctgcccccgaatctaggggggggttccagcctttcggggacaccggggggttccattttagcttcggggtgggtgcatttccatttggattcttcacaaccgtattcaatgcacatgaaccctttagacgcggtaccggtccctttagtacctcccctgcctttttccattacttgatcggcaacacgagccgagagttccgcggcaggatctataatttctggctcccccgaaatctatag

SEQ ID NO: 169007 - DNA, 549 bp, Artificial Sequence
  derived and/or modified sequence
atggcggccgctgaagaggaagatggcgggccagagggcccaaatcgggaaagggggggggcaggtgctacttttgagtgcaatatttgtctcgaaacagcgcgggaggctgtcgtcagcgtctgcggtcatctgtattgttggccttgcctccaccagtggctggagacaaggccagaaagacaggaatgtccagtctgcaaagccggcatttcacgagaaaaggtggtccccctctacggacggggatcccagaaacctcaggatccccgtctgaaaactccgccacggccgcagggacagcgcccagcgccagagagcaggggcggtttccagccgtttggtgatactggcgggttccacttctcttttggagtgggtgctttccccttcggcttctttaccactgtttttaatgctcacgagccttttcggaggggaacaggcccgttcagtacgtccccagcattcttccactatctgataggtaacacttcccgagagttccgagggcgcatctataatttctggctccctcgtaacctttag

SEQ ID NO: 169008 - DNA, 549 bp, Artificial Sequence
  derived and/or modified sequence
atggccgcggcagaggaggaggacggcggacccgaggggcctaaccgcgagcgcggaggtgccggcgctacttttgagtgtaacatctgtttagaaacggcgcgagaggcagttgtctcagtgtgcggccacttgtactgttggccatgtctgcaccagtggcttgagactaggccggaaaggcaggagtgcccagtctgcaaagcaggcatttcaagggagaaagtggtcccactctatggcagaggcagccagaagccacaggacccgcggctcaaaactccccccagacctcagggacaacgaccagctccggaatctaggggcgggttccagcccttcggcgacaccggtgggtttcatttttcctttggcgtgggagccttcccatttgggttttttaccactgtcttcaacgcccatgaacccttcagacgcgggacaggcccattctccacctcaccagcattcttccactatctgatcggcaatacctcccgcgagttccgtggccggatctataacttttggcttcctcgaaacttatag

SEQ ID NO: 169009 - DNA, 549 bp, Artificial Sequence
  derived and/or modified sequence
atggccgccgctgaagaggaggatgggggacccgagggtccaaatagggagagagggggcgccggcgcaacattcgaatgcaacatatgtctcgaaacagcacgagaggctgtcgtgtccgtgtgcggacatctttactgctggccctgtcttcaccagtggttggagacccgccccgaaaggcaggagtgccctgtgtgcaaggctgggatctcccgggaaaaggtggtgcccttgtatggccggggatcccagaaaccccaagaccctcgtctgaagacgccacctcgcccacaaggtcagcggcccgctccggagtctagggggggctttcagccattcggcgacaccggcggattccatttcagtttcggcgtgggggcgttccccttcgggttcttcacaacggtgttcaatgcgcacgaaccctttcggcgcggaacagggcctttttccactagtccagccttttttcattatctgattggtaacacaagccgcgaattccgcgggaggatctataacttctggttaccgcgtaatctgtag

SEQ ID NO: 169010 - DNA, 549 bp, Artificial Sequence
  derived and/or modified sequence
atggcagctgccgaggaagaagacggtgggcctgagggccccaatcgagagcggggtggggctggtgctacctttgagtgcaacatctgtctggagacagcccgagaggcagtagtgtccgtatgcggccacctttactgttggccctgcctgcaccagtggctagaaactcgtcccgagcggcaggaatgtccggtctgtaaagctggtatctctcgtgagaaagtcgtgcctttgtatggtcgtggctcccagaaacctcaagatcctaggctgaagacaccacctagacctcaaggccagcgccccgcacctgagtcccgaggcggctttcagcctttcggcgacacaggagggttccacttctctttcggggtgggagcctttccctttgggttctttacaaccgtcttcaacgctcatgagccttttcgcagaggaaccggccctttctctactagccccgctttttttcactacctcatcggcaacaccagccgcgagtttcggggtagaatctacaacttttggttgcctaggaacctctag

SEQ ID NO: 169011 - DNA, 543 bp, Artificial Sequence
  derived and/or modified sequence
atggctgctgctgaggaggaggatggcggccctgagggccccaaccgggagcggggcggggccggggccacctttgagtgcaacatctgcctggagacagcccgggaggccgtggtgtctgtgtgtggccacctgtactgctggccctgcctgcaccagtggctggagaccaggcctgagcggcaggagtgccctgtgtgcaaggccggcatcagccgggagaaggtggtgcccctgtatggccggggcagccagaagccccaggacccccggctgaagaccccaccccggccccagggccagaggcctgcccctgagagcagaggaggcttccagccctttggagacacaggaggcttccacttctcctttggagtgggcgccttccccttcggcttcttcaccaccgtcttcaatgcccacgagcccttcagaagaggcaccggggtggacctgggccagggccacccagccagctcctggcaggacagcctcttcctgttcctggccatcttcttcttcttctggctgctgagcatctag

SEQ ID NO: 169012 - DNA, 549 bp, Artificial Sequence
  derived and/or modified sequence
atggctgctgctgaggaggaggatggcggccctgagggccccaaccgggagcggggcggggccggggccacctttgagtgcaacatctgcctggagacagcccgggaggccgtggtgtctgtgtgtggccacctgtactgctggccctgcctgcaccagtggctggagaccaggcctgagcggcaggagtgccctgtgtgcaaggccggcatcagccgggagaaggtggtgcccctgtatggccggggcagccagaagccccaggacccccggctgaagaccccaccccggccccagggccagaggcctgcccctgagagcagaggaggcttccagccctttggagacacaggaggcttccacttctcctttggagtgggcgccttccccttcggcttcttcaccaccgtcttcaatgcccacgagcccttcagaagaggcaccggccccttcagcaccagccctgccttcttccactacctgattggcaacaccagccgggagttccggggccgcatctacaacttctggctgcccaggaacctgtag

SEQ ID NO: 169013 - DNA, 543 bp, Artificial Sequence
  derived and/or modified sequence
atggccgccgccgaggaggaggacggcggccccgagggccccaaccgggaaagagggggggccggcgcaacttttgaatgtaacatctgtctggagactgctcgagaagccgtagtttccgtctgcggtcatctgtactgttggccttgcttgcaccagtggctggagactaggcctgaacgtcaagaatgtcctgtctgcaaagctgggatatcgcgagaaaaggtggtaccactttatgggagaggctctcagaagccacaggatccccgtctgaaaacaccccccaggccacaaggacagaggcctgcccctgagtctaggggtggctttcagccattcggagatactggcggctttcacttctcttttggtgtgggagccttcccgtttggattctttacgaccgtgtttaatgctcatgagccattcagacggggaaccggcgtcgatctggggcaagggcatcctgcttcaagctggcaggacagcctgttcctcttcctcgccatttttttctttttttggctcctgtctatttag

SEQ ID NO: 169014 - DNA, 543 bp, Artificial Sequence
  derived and/or modified sequence
atggccgccgccgaggaggaggacggcggccccgagggccccaaccgcgagcggggaggagccggcgctacatttgagtgcaacatctgtttagaaacggccagagaggccgtggtctctgtctgtggccatctgtactgctggccatgcctccatcagtggctggagacccggcccgaacgccaagaatgcccagtgtgcaaggctggaatctcacgggagaaagttgtacctctgtatgggcgagggtcccagaaaccccaggacccccgtcttaagacccctccgagacctcagggccaacggcccgctcctgagagccgcgggggatttcaacccttcggtgacacagggggatttcacttttccttcggagttggtgccttcccatttggattttttactacagtgtttaacgcccacgaaccatttcgtcgcggtacgggagtggatctcggtcagggtcatccagccagttcgtggcaggattctttgttcctctttttagcgattttcttctttttctggctgttatccatttag

SEQ ID NO: 169015 - DNA, 549 bp, Artificial Sequence
  derived and/or modified sequence
atggccgccgccgaggaggaggacggcggccccgagggccccaacagagaacgcgggggagcgggcgccacatttgagtgtaacatctgcctcgagactgctcgtgaggccgtcgtgagcgtgtgcggacacctctactgttggccctgcctgcaccagtggctcgaaaccaggcctgaacgacaggagtgtcctgtgtgtaaggcaggcatctctagagaaaaggtggtcccgttgtatggaagaggtagccagaaaccacaggatcctcgtttgaaaactcccccgagaccacaaggccagaggcctgctccagaatctcgcggtgggttccagccctttggcgacacggggggattccatttctcatttggcgtgggagcattccccttcggtttttttacaactgtgttcaacgcccatgaaccattcagaagaggcactggtccttttagcacctctcccgccttttttcattatcttattggaaacacatccagggaattcaggggacggatctacaatttttggctgccaaggaatctgtag

SEQ ID NO: 169016 - DNA, 543 bp, Artificial Sequence
  derived and/or modified sequence
atggccgccgccgaggaggaggacggcggccccgagggccccaaccgcgagcgcgggggggcaggggccactttcgagtgcaatatctgtctagagaccgcacgcgaggctgttgtgtcggtgtgcgggcacctgtattgttggccttgcctgcatcaatggctggaaacccgccccgagcgtcaagagtgccccgtttgcaaggctggaattagcagagaaaaggttgtacccttgtacgggcgggggtcccagaagccacaggacccaaggctcaagactccgcctaggcctcaaggacagcgtcccgctccggaaagtagaggaggcttccaacctttcggagataccggcggcttccacttctctttcggtgtgggggcctttccttttggtttttttaccaccgttttcaatgcgcatgaacctttcaggagagggaccggagtggacttaggccagggtcaccccgcatccagctggcaagatagtctctttcttttcttggccatctttttctttttttggctcctgagtatatag

SEQ ID NO: 169017 - DNA, 543 bp, Artificial Sequence
  derived and/or modified sequence
atggccgccgccgaggaggaggacggcggccccgagggccccaaccgcgagagaggcggggctggcgccactttcgagtgtaatatatgtttagaaacagctcgcgaggcggtagtgtcagtgtgcgggcatctgtactgttggccttgtctacaccagtggctcgaaacccggcccgagcgtcaggagtgccctgtgtgtaaggccggcatctccagggaaaaagttgttccgctgtatggacgtggaagccagaagccgcaggatccccggctgaaaactccccctcgccctcaggggcagcgacccgccccggagagccggggagggttccagcctttcggggatacaggggggttccatttcagctttggggtcggagcattcccatttggattctttacaactgtgtttaatgcccatgaaccctttaggagaggcaccggcgtagatttaggccagggacacccagcttcaagctggcaggactcactcttcctgtttttggctattttttttttcttctggttactgagcatatag

SEQ ID NO: 169018 - DNA, 543 bp, Artificial Sequence
  derived and/or modified sequence
atggccgccgccgaggaggaggacggcggccccgagggccccaaccgagagaggggaggagctggggccacattcgagtgtaacatctgcctcgaaaccgccagagaggcagtcgtcagtgtctgcgggcatctgtactgttggccttgcttgcatcaatggctggaaacgaggccggagagacaagagtgtccagtttgtaaggctgggatctcacgcgagaaggtggtcccgctgtacgggaggggcagccaaaaaccacaggacccaaggttgaaaacgcccccccgccctcaaggccaaagaccagccccggaaagccgcggtggtttccagcccttcggggataccgggggattccacttttcgtttggggttggtgcattcccgtttggcttcttcactactgtttttaacgctcatgagccctttaggcggggtaccggcgttgatttagggcaaggacatcctgccagctcgtggcaggactctctattcctgtttctggccattttctttttcttctggctgctctccatctag

SEQ ID NO: 169019 - DNA, 543 bp, Artificial Sequence
  derived and/or modified sequence
atggccgccgccgaggaggaggacggcggccccgagggccccaaccgggaacgcgggggcgctggggccactttcgaatgtaacatatgcctggagaccgctcgggaggccgtggtgtcagtatgtggccacctgtattgctggccatgcctccaccagtggctggaaactcggcccgaaagacaggagtgccctgtgtgcaaggcgggaatcagccgagagaaggtggttcctttgtacggacgcggtagccagaaaccccaggacccaaggctgaaaactccaccccgcccacagggccagaggccagctcctgaatcccggggagggttccagccatttggcgataccggtggctttcatttttcattcggagtcggcgccttccctttcggcttttttacaaccgtgttcaatgcccacgagcctttccgtagaggaactggagttgatctgggccagggtcatccggccagttcttggcaggactcactcttcttgttcttggctatcttttttttcttctggctgctgagcatatag

SEQ ID NO: 169020 - DNA, 543 bp, Artificial Sequence
  derived and/or modified sequence
atggccgccgccgaggaggaggacggcggccccgagggccccaacagagaacgtggcggagccggtgctacctttgaatgcaacatctgcctcgagaccgcccgagaagcagtggtcagcgtttgtggccacctatattgctggccatgccttcaccaatggctggagacccgccctgaacgccaggagtgtccggtgtgcaaggccggaatctctcgtgaaaaggttgtgcccctctatggtcgaggtagtcagaaaccacaagatccacgtttgaagaccccccctcgaccacaggggcagcggccggcgcctgagagccgtggcgggttccaaccatttggcgacacggggggctttcatttttccttcggcgtaggcgccttccccttcgggttctttactacagtgtttaacgcacacgaacctttccgccggggtacaggggtggatcttgggcagggtcacccggcaagtagctggcaagatagcctcttcctgttcctcgctatattcttctttttttggctcctgagcatctag

SEQ ID NO: 169021 - DNA, 549 bp, Artificial Sequence
  derived and/or modified sequence
atggccgccgccgaggaggaggacggcggccccgagggccccaaccgggagcgggggggcgcgggagctacttttgagtgtaacatttgtttagagactgcaagggaggccgtcgtgtcggtttgtggccacctttattgctggccatgtctgcatcagtggcttgagacacgacccgaacggcaagagtgtcccgtgtgtaaagccggtatttcccgggaaaaagtcgtgcctctctatggacggggctctcagaaaccccaagatccccgccttaagacccctcccaggccacagggacagcgtcccgcccccgagtctagagggggctttcagcctttcggagacacaggaggttttcatttctcatttggcgtgggggccttcccattcggattttttacaactgtctttaatgcccatgagcctttccgtcggggaacgggccccttctccacatctccagcatttttccactacctcataggaaacacttcacgcgagttccgcgggcgaatatataacttttggctgccgagaaacctgtag

SEQ ID NO: 169022 - DNA, 549 bp, Artificial Sequence
  derived and/or modified sequence
atggccgccgccgaggaggaggacggcggccccgagggccccaaccgggagcgtggcggcgccggcgccacatttgaatgtaatatttgtctggagaccgccagagaggccgtggtctccgtatgcgggcacctgtactgttggccctgtctccaccagtggctcgagacccggccggagcgccaagagtgccctgtgtgcaaggcaggaattagccgggagaaagtcgtccctttatacggccggggaagccagaagccccaggatccaagactcaaaaccccccccagaccacaggggcagcggccggcaccagagagtcgcggagggtttcagcccttcggcgataccgggggctttcacttcagcttcggggtcggagcttttccattcggcttctttactactgtcttcaacgcgcatgaaccttttcggcgcggaactggccccttcagcactagtccagcttttttccattacttgattggcaatacatcacgcgagttccgcgggcgtatctataacttttggctgccacgtaatctctag

SEQ ID NO: 169023 - DNA, 549 bp, Artificial Sequence
  derived and/or modified sequence
atggccgccgccgaggaggaggacggcggccccgagggccccaaccgcgagcgggggggtgccggagccacattcgagtgtaacatttgcctcgagacagcgcgcgaggctgtcgtgtcagtttgtgggcacctgtattgctggccctgtttgcaccagtggctggaaactcgccccgagagacaggagtgcccagtgtgtaaagctgggatttctagagagaaagttgtgcccttatacggcagaggatcacagaaaccacaagaccctcgacttaagacacctcctcgacctcaaggccagcgccccgcccctgagtcaagaggaggcttccagccatttggagacacaggcggattccacttttcatttggtgtcggcgcgttccctttcggcttttttacaaccgtgtttaacgcacacgagcccttcagacgcggtactgggcctttcagtacatccccggcctttttccattacctaatcggcaacacaagtcgggagtttaggggtcgcatctataacttttggttgccacgcaatttgtag

SEQ ID NO: 169024 - DNA, 549 bp, Artificial Sequence
  derived and/or modified sequence
atggccgccgccgaggaggaggacggcggccccgagggccccaacagggaaaggggtggcgcgggcgccacttttgaatgtaatatatgcctggagactgctcgcgaagccgtagtctcagtgtgcggacatctttactgctggccttgcttgcaccagtggctcgagacgcggccggaaagacaggaatgccccgtctgcaaggccgggatttcaagggaaaaggtcgtcccgttgtatggtcgagggtcacagaaaccccaggatccccggctgaaaacccctcctcgtccccagggacaaagacctgcaccagagtcaagaggaggattccagccatttggcgatactgggggatttcacttctcatttggcgtgggggcttttccctttggcttttttaccacagtgttcaacgcgcacgagcctttccgacggggcactggcccattcagcactagtcccgcgttttttcactacctcatcggcaatacttctcgggagttcaggggccgtatctacaacttttggctgcctcgcaacctatag

SEQ ID NO: 169025 - DNA, 549 bp, Artificial Sequence
  derived and/or modified sequence
atggccgccgccgaggaggaggacggcggccccgagggccccaacagggagcggggcggagccggagctacatttgaatgcaacatctgccttgagaccgccagggaagctgtggtgtctgtgtgcgggcacttgtactgctggccctgcttgcaccagtggttggagactcgccccgaaaggcaggagtgcccagtctgcaaggccggtatttccagggagaaggtggtgccactgtacggacggggaagccagaagccccaagatcctcgacttaagacacctccaagaccccaaggccagaggcccgctccagagagccgcggtggatttcaaccatttggcgatactggggggtttcactttagttttggcgtcggggcctttccatttggattctttaccacagtgttcaacgcccacgagccatttagacgaggaactggaccatttagtacatcaccagccttcttccactacctgattggcaacacatcccgggaatttcgtgggcgcatctataacttttggttgccaaggaacctctag

SEQ ID NO: 169026 - DNA, 549 bp, Artificial Sequence
  derived and/or modified sequence
atggccgccgccgaggaggaggacggcggccccgagggccccaacagggagagaggcggggcaggggccacttttgagtgcaacatttgccttgagaccgcccgggaggcagttgtgagcgtgtgtggacacctgtactgctggccctgcctccaccagtggctggaaactcggcctgaaaggcaggagtgtccagtctgcaaggcaggcatttcccgggagaaagtggtccccctgtatggcagaggatcccagaagccacaggatccccgactcaagactcctcccagaccccagggacagaggccagcccccgagtcacgcggaggttttcagccgtttggcgacacaggaggcttccactttagctttggtgtgggggcctttcccttcggtttctttactacagtgtttaatgcccacgagccattccgccgtggcactggaccattcagcacaagcccggcgttttttcactatctcatcgggaacaccagtagggagttccgcggcaggatatataatttctggctacctcggaatctgtag

SEQ ID NO: 169027 - DNA, 543 bp, Artificial Sequence
  derived and/or modified sequence
atggctgctgcagaggaagaagatggtgggcctgaaggacccaaccgggagcgtggcggagccggagctacttttgaatgtaacatttgcttggaaacagcacgagaggccgtcgtgagcgtgtgtgggcatttatactgctggccctgcctccatcagtggttggaaacgcggcctgagcgccaggagtgtcctgtgtgtaaagccggtatctctcgggagaaagtggttcccctgtacggacggggaagtcagaaaccacaagatcctaggctaaaaactcctcctcgccctcagggacagagacctgctccggagtcccggggagggtttcagccgtttggggatacggggggtttccatttttctttcggggtaggggcattccccttcggtttctttactaccgtcttcaacgcccacgaaccattcaggagaggaacgggcgtggatctgggacagggccatcccgcatcttcgtggcaggactctctctttttgttcctcgcaattttcttttttttctggttgctgagcatttag

SEQ ID NO: 169028 - DNA, 543 bp, Artificial Sequence
  derived and/or modified sequence
atggcagccgctgaggaggaagatgggggtcctgaggggccaaatagggaacgtggcggagcaggggcaaccttcgagtgcaatatatgtctggagaccgccagagaggctgtagtgagtgtatgcgggcatttgtattgctggccttgcttgcatcagtggctggagacaaggccagaacgccaggagtgccccgtctgcaaagccggtatctcacgcgagaaagtagtacctctttacggtcggggttcccagaagcctcaggaccctcgcctcaagaccccaccaaggccccagggtcagcggcctgcccctgaaagtcgtggaggcttccagcctttcggggacacgggcggatttcatttctcctttggcgttggagctttcccattcgggttctttacaactgttttcaatgcacacgaaccattccgccgtggaaccggagtggacctgggtcagggccaccctgcttccagctggcaagatagcctgttcctgttcctcgctattttttttttcttctggctgctatccatttag

SEQ ID NO: 169029 - DNA, 549 bp, Artificial Sequence
  derived and/or modified sequence
atggctgccgctgaggaggaagatggtggcccagaaggcccaaacagagagagaggcggagcaggggcaacctttgaatgtaacatctgtctagaaaccgctagagaagctgtggtatctgtttgcggccacctatattgttggccatgcctgcatcaatggctggaaactcgaccagagcgtcaggaatgccctgtgtgcaaggcgggaatcagcagagagaaagtggtaccgctatatggtaggggctcccagaagccacaagacccacggttgaaaactccacctagaccacagggccagcggccagcgccagagagcagaggcggttttcagccatttggcgacacgggaggcttccatttttctttcggcgtgggagcattccctttcggatttttcaccacggtatttaacgcgcacgaacccttccgtcgcggaaccgggcctttctccacctcaccagctttcttccactacctgatcggaaatacttcgcgggagtttcggggtaggatatacaacttctggctgccaagaaacctttag

SEQ ID NO: 169030 - DNA, 543 bp, Artificial Sequence
  derived and/or modified sequence
atggccgctgctgaggaagaggacgggggtccagaaggccctaaccgagaaagaggcggtgccggagccactttcgagtgtaatatctgcctcgaaaccgccagagaggcggtcgtgagcgtgtgtggtcatctgtattgttggccctgtttacaccagtggttggagactcgcccagagcgacaggagtgtcctgtctgtaaggcgggtatttctcgcgagaaggtggtgcccctgtacggaaggggatctcagaaaccccaagatccgcgtctgaaaacgcccccacgcccacagggacagaggcctgctccagagagcaggggcggtttccagccttttggagacacgggaggtttccacttctcttttggggttggagcctttccatttggcttttttacaacagtctttaacgcgcatgagcccttccgccgaggaacgggcgttgatctcggtcaggggcaccccgctagcagctggcaagatagccttttcttattcctggctatctttttttttttttggctgttaagcatttag

SEQ ID NO: 169031 - DNA, 543 bp, Artificial Sequence
  derived and/or modified sequence
atggcagccgcagaagaggaggacggcggtcccgagggccctaacagggagcgcggaggtgccggtgctactttcgaatgtaacatctgtctcgagaccgcacgcgaagccgttgtgtccgtgtgtgggcacttgtactgttggccatgtctgcaccagtggctggagacaaggccagagcggcaagagtgtcctgtatgtaaagctggcatttcacgggagaaagttgtccccctttacggtagaggctcccagaagcctcaggatccccgtttgaaaactccaccgcgtccccaaggccagcggcctgctcccgagtccaggggcggattccagccattcggagatacagggggttttcacttttcgttcggcgttggagccttcccatttgggtttttcaccacagtgtttaatgcccacgagccctttaggagaggtaccggcgtggatctgggccaaggccatccagcatcctcatggcaagactctcttttcctgttcttagccatattcttcttcttttggctcctgagcatctag

SEQ ID NO: 169032 - DNA, 543 bp, Artificial Sequence
  derived and/or modified sequence
atggctgccgctgaggaagaggacggaggtcccgaagggccaaatcgggagaggggcggtgccggagctaccttcgaatgtaacatctgcctggagacggctcgcgaggccgtggttagcgtgtgcggacacctgtattgctggccatgcctccaccagtggctggagactcggcctgagcgacaggaatgcccagtgtgcaaagccggaatcagccgtgaaaaagtggtcccactttacggtaggggtagccagaagcctcaggaccctcggctgaagaccccaccacgtccccaagggcagcgcccagcccctgaatccagaggaggcttccagccattcggggacactggcggattccacttttcctttggggtgggggcatttcccttcgggttctttaccaccgtgttcaacgcgcacgagcctttccgcaggggaacgggcgtcgatctcggccagggccaccccgcttcctcctggcaggacagcctcttcttgtttctggccattttcttcttcttttggctgctaagcatctag

SEQ ID NO: 169033 - DNA, 543 bp, Artificial Sequence
  derived and/or modified sequence
atggccgctgcagaagaagaagatggcggacctgaaggcccaaatagggaacggggaggtgccggagcgacatttgagtgcaacatttgtctggaaaccgctagagaagccgtggtttcggtatgcgggcatctttactgctggccctgtctccaccagtggctcgaaaccaggcccgaaaggcaggagtgccccgtctgtaaggcagggatctcccgggagaaggttgttcccttgtacggcagagggagccagaagccacaagaccctcgacttaaaactcctcccagaccacaggggcagcgcccagctcctgaatctagaggaggctttcagcccttcggagacactggtggatttcatttttcctttggtgtaggcgcattcccatttggcttctttaccaccgtgtttaatgcacacgagccttttaggagagggaccggggtcgacctcgggcagggtcatccagcttctagctggcaggacagtctgttcctcttcctggccattttctttttcttttggctcttaagtatatag

SEQ ID NO: 169034 - DNA, 543 bp, Artificial Sequence
  derived and/or modified sequence
atggccgcagcggaggaagaggacggcggacccgaaggcccaaaccgcgaacgtggcggtgccggagctactttcgagtgtaacatttgtctggaaacagcaagagaagcagtggtcagcgtgtgcggtcacctctattgttggccttgcctgcaccagtggctcgaaacccggcctgaaaggcaggagtgtcccgtctgtaaagcagggatctctagagagaaggtagtgccattatatgggcgtggttcccaaaaaccccaagacccgaggctgaaaactcctccccgaccgcaggggcaacgccctgccccagagagcagaggagggttccagccatttggtgacactggcggtttccacttctccttcggtgtcggtgcgtttccctttgggtttttcaccacagtgttcaacgcccatgaaccattccggagaggcacgggggtcgacttgggtcagggccaccctgcctcaagttggcaggattccctcttcttgtttctggcaattttttttttcttttggctcctctccatctag

SEQ ID NO: 169035 - DNA, 549 bp, Artificial Sequence
  derived and/or modified sequence
atggccgcagcggaagaagaagacggaggtccggaaggtcctaaccgggagaggggaggggcaggggctactttcgagtgtaacatctgtctcgagactgcacgtgaagcagtggtatccgtgtgtggacatctgtactgttggccctgtctgcaccagtggctggagactcgcccagagaggcaggaatgtccggtgtgcaaagccggtatctcacgggaaaaagttgtaccactctatgggagggggtcccagaagccccaagaccctcgtctgaagactccacctcgccctcagggccaaagaccagctccggaaagccgcggagggtttcaacctttcggagatacaggcggtttccatttttcattcggggtgggggcattccccttcggatttttcacaaccgtgtttaatgcacatgagccgttccgcagaggcacaggccctttctcaaccagtcccgctttctttcattatctaattgggaacacttccagagaattccgcggaaggatctataatttttggctgccccgtaatctctag

SEQ ID NO: 169036 - DNA, 549 bp, Artificial Sequence
  derived and/or modified sequence
atggctgctgctgaggaggaggatggaggacctgaaggcccaaacagagagcggggaggcgctggggctactttcgagtgtaacatttgtctggaaacggccagagaggccgtggtatctgtatgtggtcatttatattgctggccctgcttgcatcagtggcttgagactcggcctgagagacaggagtgccccgtgtgcaaggctggcatctctcgcgaaaaagtggtgcccctttatggtcgaggatcgcagaaaccccaggacccccgattaaagaccccacccaggcctcaagggcagagaccggcaccagagtctaggggagggttccaaccctttggggatacagggggattccattttagtttcggcgtgggtgccttcccatttggtttctttaccactgtgttcaatgctcacgagcctttccgcagagggactggtcctttctcaactagcccagccttcttccactacctgatagggaatacttctcgggagtttagagggcgtatctacaatttctggttgccaaggaatctgtag

SEQ ID NO: 169037 - DNA, 549 bp, Artificial Sequence
  derived and/or modified sequence
atggccgctgccgaggaagaggacgggggtcctgagggccctaatagggagagggggggagctggagccacttttgagtgtaatatctgccttgaaactgccagagaggccgtggtgtccgtttgcggacacctatattgttggccgtgcctgcaccagtggttggagacgcgcccagagcggcaggaatgccctgtgtgcaaagccggaatctcacgagagaaggttgtgccactatatgggcgagggtcacaaaaaccccaggatcccaggctgaaaactccaccaaggccccagggtcagcgtcccgctcccgaaagcagagggggttttcagcccttcggagacaccgggggatttcactttagcttcggagtcggcgcattcccatttggtttctttacaaccgtattcaacgcacacgaaccttttagaagaggcacgggcccattctcaacatctccagctttcttccactatctcatcggcaacacctctcgagagtttcgcggacgcatatataatttttggttgcccagaaatctgtag

SEQ ID NO: 169038 - DNA, 549 bp, Artificial Sequence
  derived and/or modified sequence
atggctgctgcggaggaagaagatggaggcccagaggggcctaacagagaaagaggcggtgccggtgcaaccttcgagtgcaacatatgcttggaaaccgccagagaggcagtagtgtctgtgtgcggacatctttactgttggccttgtctgcaccagtggctagagacacgacctgagcggcaagaatgtcccgtgtgcaaggcaggtattagtagagagaaagtggtccctttatatggtcgcggtagccagaagccacaagatccacgtctcaagactccgccacgcccacagggtcagcgaccagccccagaaagtaggggcggttttcagccatttggcgataccggcggatttcacttcagctttggtgtcggtgccttcccatttgggtttttcactaccgtttttaatgctcacgagccctttagacggggaaccggcccattctctactagcccagccttcttccattatctgattggcaacacgagccgggaattccggggacgaatttacaacttttggttgccacggaacctgtag

SEQ ID NO: 169039 - DNA, 549 bp, Artificial Sequence
  derived and/or modified sequence
atggcggcagctgaggaggaggacggaggcccagagggaccgaatcgagagagggggggagccggtgcgacttttgaatgcaacatatgccttgagacggcacgggaagctgtggtgagcgtgtgtggtcacctatactgttggccttgcctgcatcagtggctggagacaaggccagaacgtcaggagtgtccagtgtgcaaagccggaatcagcagggagaaggtggtgccactctatgggaggggtagtcagaagccgcaggacccacgcctgaagacgccacccagacctcaaggacagcggcctgctcctgagtcaagaggcggttttcaaccattcggtgacacaggcggattccacttcagcttcggagtgggcgcattcccattcgggttctttactactgtctttaacgcccatgagccctttagacgtggcacagggcctttctctacaagccccgcttttttccactatttaatcggaaatacctcgcgcgaattcagagggcgtatctacaacttctggctgccacgcaacctgtag

SEQ ID NO: 169040 - DNA, 549 bp, Artificial Sequence
  derived and/or modified sequence
atggccgctgccgaggaagaggacggcggaccagaggggcctaatcgcgagagaggcggtgcgggagccacatttgagtgcaatatctgtctggagactgcgcgagaagccgtggtgtcagtttgcggccatctgtactgctggccctgtcttcaccagtggctggaaacacgcccagagagacaagaatgtcccgtttgtaaggccggaatttccagggagaaagtcgtccccttatatggtagaggtagtcagaagccccaggacccacgtcttaaaactccccctcggccacagggccagcgccctgccccagagagcagagggggtttccagccgttcggagataccggtggctttcatttcagcttcggtgttggcgcattcccattcggatttttcaccactgtgtttaatgctcatgagccgttccgaagggggaccggacctttctccacctctcccgctttcttccactacctaatcggtaatacttcccgggaatttcgtggcaggatttacaatttctggctgccgcgaaacctgtag

SEQ ID NO: 169041 - DNA, 1168 bp, Artificial Sequence
  derived and/or modified sequence
gaattctttgtgactggcaggcattcagaccaatagtgattaggaaaccttgaagcctgcccaacgatcgtgggcaggaggtggtttctggtttgttggggcgtgtgtatgtgtatttggggggactgaagggtacgtggggcgaaacaaaaccggccatggcagcagcggaggaggaggacgggggccccgaagggccaaatcgcgagcggggcggggcgggcgcgaccttcgaatgtaatatatgtttggagactgctcgggaagctgtggtcagtgtgtgtggccacctgtactgttggccatgtcttcatcagtggctggagacacggccagaacggcaagagtgtccagtatgtaaagctgggatcagcagagagaaggttgtcccgctttatgggcgagggagccagaagccccaggatcccagattaaaaactccaccccgcccccagggccagagaccagctccggagagcagagggggattccagccatttggtgataccgggggcttccacttctcatttggtgttggtgcttttccctttggctttttcaccaccgtcttcaatgcccatgagcctttccgccggggtacaggtgtggatctgggacagggtcacccagcctccagctggcaggattccctcttcctgtttctcgccatcttcttctttttttggctgctcagtatttgagctatgtctgcttcctgcccacctccagccagagaagaatcagtattgagggtccctgctgacccttccgtactcctggacccccttgacccctctatttctgttggctaaggccagccctggacattgtccaggaaggcctggggaggaggagtgaagtctgtgcatagatgggagagccttctgctcagaggctcactcagtaacgttgtttaattctctgccctggggaaggaggatggattgagagaatgtctttctcctctcctaagtctttgctttccctgatttcttgatttgatcttcaaaggtgggcaaagttccctctgactcttcccccactccccatcttactgatttaatttaatttttcactccccagagtctaatatggattctgactcttaagtgcttccgccccctcactacctcctttaatacaaattcaataaaaaaggtgaaatata

SEQ ID NO: 169042 - DNA, 1325 bp, Artificial Sequence
  derived and/or modified sequence
gaaacaaaaccggccatggcagcagcggaggaggaggacgggggccccgaagggccaaatcgcgagcggggcggggcgggcgcgaccttcgaatgtaatatatgtttggagactgctcgggaagctgtggtcagtgtgtgtggccacctgtactgttggccatgtcttcatcagtggctggagacacggccagaacggcaagagtgtccagtatgtaaagctgggatcagcagagagaaggttgtcccgctttatgggcgagggagccagaagccccaggatcccagattaaaaactccaccccgcccccagggccagagaccagctccggagagcagagggggattccagccatttggtgataccgggggcttccacttctcatttggtgttggtgcttttccctttggctttttcaccaccgtcttcaatgcccatgagcctttccgccggggtacagggccgttttctacttctcctgctttcttccactaccttattgggaacaccagccgtgagttcagaggcagaatctacaatttctggcttcccaggaatctctgaaggaggaaaaatccagtcagaggctgtaattgtgaaggttctcaaactctgtgtgtggaaatgaggccagtggaagtcagaggccctcatgggccaaggctggggttgaaggctttttcttaggtaagagggaggccttggagaagaccctggaattcttacggtagacacggactcggtagttggacttggtctcctttccattcctgttcattgcctggcaccggaaaatcccctcatcctggatcccgacagccggaaggaagagggagccgttgggaaggacacgagccacactgtcccaggggcctcctccctggggagacaggaccttccaagcttctgtccggcctgtgttctagaagcagagaagcagggcctaaacagtgcaaggcctttgggaaaggactgtgaggcagagtgacggggatccaaatcattgctggtctccctggaagttgggaggctgcaacaggagccccgcttaccagtttccattccagccgctggggtggtttcttgggggcccccttacacttcagcaccagtggctcgccaatccgggctgtgatgttttgagcacctactactgcccctgggagatagcaccatggtagaggggtaggaagggaatgagggctaacaaaatttggacagggtgggtgagggaccttgaaaggcacttcctcgggttctgggaaaagttctaggacgactggggtgtggggttaaagtgctttctgcagggagggtcagtgggg

SEQ ID NO: 169043 - DNA, 1162 bp, Artificial Sequence
  derived and/or modified sequence
tttgtgactggcaggcattcagaccaatagtgattaggaaaccttgaagcctgcccaacgatcgtgggcaggaggtggtttctggtttgttggggcgtgtgtatgtgtatttggggggactgaagggtacgtggggcgaaacaaaaccggccatggcagcagcggaggaggaggacgggggccccgaagggccaaatcgcgagcggggcggggcgggcgcgaccttcgaatgtaatatatgtttggagactgctcgggaagctgtggtcagtgtgtgtggccacctgtactgttggccatgtcttcatcagtggctggagacacggccagaacggcaagagtgtccagtatgtaaagctgggatcagcagagagaaggttgtcccgctttatgggcgagggagccagaagccccaggatcccagattaaaaactccaccccgcccccagggccagagaccagctccagagagcagagggggattccagccatttggtgataccgggggcttccacttctcatttggtgttggtgcttttccctttggctttttcaccaccgtcttcaatgcccatgagcctttccgccggggtacaggtgtggatctgggacagggtcacccggcctccagctggcaggattccctcttcctgtttctcgccatcttcttctttttttggctgctcagtatttgagctatgtctgcttcctgcccacctccagccagagaagaatcagtattgagggtccctgctgacccttccgtactcctggacccccttgacccctctatttctgttggctaaggccagccctggacattgtccaggaaggcctggggaggaggagtgaagtctgtgcatagatgggagagccttctgctcagaggctcactcagtaacgttgtttaattctctgccctggggaaggaggatggattgagagaatgtctttctcctctcctaagtctttgctttccctgatttcttgatttcatcttcaaaggtgggcaaagttccctctgactcttcccccactccccatcttactgatttaatttaatttttcactccccagagtctaatatggattctgactcttaagtgcttccgccccctcactacctcctttaatacaaattcaataaaaaaggtgaaatata

SEQ ID NO: 169044 - DNA, 1325 bp, Artificial Sequence
  derived and/or modified sequence
gaaacaaaaccggccatggcagcagcggaggaggaggacgggggccccgaagggccaaatcgcgagcggggcggggcgggcgcgaccttcgaatgtaatatatgtttggagactgctcgggaagctgtggtcagtgtgtgtggccacctgtactgttggccatgtcttcatcagtggctggagacacggccagaacggcaagagtgtccagtatgtaaagctgggatcagcagagagaaggttgtcccgctttatgggcgagggagccagaagccccaggatcccagattaaaaactccaccccgcccccagggccagagaccagctccggagagcagagggggattccagccatttggtgataccgggggcttccacttctcatttggtgttggtgcttttccctttggctttttcaccaccgtcttcaatgcccatgagcctttccgccggggtacagggccgttttctacttctcctgctttcttccactaccttattgggaacaccagccgtgagttcagaggcagaatctacaatttctggcttcccaggaatctctgaaggaggaaaaatccagtcagaggctgtaattgtgaaggttctcaaactctgtgtgtggaaatgaggccagtggaagtcagaggccctcatgggccaaggctggggttgaaggctttttcttaggtaagagggaggccttggagaagaccctggaattcttacggtagacacggactcggtagttggacttggtctcctttccattcctgttcattgcctggcaccggaaaatcccctcatcctggatcccgacagccggaaggaagagggagctgttgggaaggacacgagccacactgtcccaggggcctcctccctggggagacaggaccttccaagcttctgtccggcctgtgttctagaagcagagaagcagggcctaaacagtgcaaggcctttgggaaaggactgtgaggcagagtgacggggatccaaatcattgctggtctccctggaagttgggaggctgcaacaggagccccgcttaccagtttccattccagccgctggggtggtttcttgggggcccccttacacttcagcaccagtggctcgccaatccgggctgtgatgttttgagcacctactactgcccctgggagatagcaccatggtagaggggtaggaagggaatgagggctaacaaaatttggacagggtgggtgagggaccttgaaaggcacttcctcgggttctgggaaaagttctaggacgactggggtgtggggttaaagtgctttctgcagggagggtcagtgggg

SEQ ID NO: 169045 - DNA, 1325 bp, Artificial Sequence
  derived and/or modified sequence
gaaacaaaaccggccatggcagcagcggaggaggaggacgggggccccgaagggccaaatcgcgagcggggcggggcgggcgcgaccttcgaatgtaatatatgtttggagactgctcgggaagctgtggtcagtgtgtgtggccacctgtactgttggccatgtcttcatcagtggctggagacacggccagaacggcaagagtgtccagtatgtaaagctgggatcagcagagagaaggttgtcccgctttatgggcgagggagccagaagccccaggatcccagattaaaaactccaccccgcccccagggccagagaccagctccagagagcagagggggattccagccatttggtgataccgggggcttccacttctcatttggtgttggtgcttttccctttggctttttcaccaccgtcttcaatgcccatgagcctttccgccggggtacagggccgttttctacttctcctgctttcttccactaccttattgggaacaccagccgtgagttcagaggcagaatctacaatttctggcttcccaggaatctctgaaggaggaaaaatccagtcagaggctgtaattgtgaaggttctcaaactctgtgtgtggaaatgaggccagtggaagtcagaggccctcatgggccaaggctggggttgaaggctttttcttaggtaagagggaggccttggagaagaccctggaattcttacggtagacacggactcggtagttggacttggtctcctttccattcctgttcattgcctggcaccggaaaatcccctcatcctggatcccgacagccggaaggaagagggagccgttgggaaggacacgagccacactgtcccaggggcctcctccctggggagacaggaccttccaagcttctgtccggcctgtgttctagaagcagagaagcagggcctaaacagtgcaaggcctttgggaaaggactgtgaggcagagtgacggggatccaaatcattgctggtctccctggaagttgggaggctgcaacaggagccccgcttaccagtttccattccagccgctggggtggtttcttgggggcccccttacacttcagcaccagtggctcgccaatccgggctgtgatgttttgagcacctactactgcccctgggagatagcaccatggtagaggggtaggaagggaatgagggctaacaaaatttggacagggtgggtgagggaccttgaaaggcacttcctcgggttctgggaaaagttctaggacgactggggtgtggggttaaagtgctttctgcagggagggtcagtgggg

SEQ ID NO: 169046 - DNA, 1325 bp, Artificial Sequence
  derived and/or modified sequence
gaaacaaaaccggccatggcagcagcggaggaggaggacgggggccccgaagggccaaatcgcgagcggggcggggcgggcgcgaccttcgaatgtaatatatgtttggagactgctcgggaagctgtggtcagtgtgtgtggccacctgtactgttggccatgtcttcatcagtggctggagacacggccagaacggcaagagtgtccagtatgtaaagctgggatcagcagagagaaggttgtcccgctttatgggcgagggagccagaagccccaggatcccagattaaaaactccaccccgcccccagggccagagaccagctccggagagcagagggggattccagccatttggtgataccgggggcttccacttctcatttggtgttggtgcttttccctttggctttttcaccaccgtcttcaatgcccatgagcctttccgccggggtacagggccgttttctacttctcctgctttcttccactaccttattgggaacaccagccgtgagttcagaggcagaatctacaatttctggcttcccaggaatctctgaaggaggaaaaatccagtcagaggctgtaattgtgaaggttctcaaactctgtatgtggaaatgaggccagtggaagtcagaggccctcatgggccaaggctggggttgaaggctttttcttaggtaagagggaggccttggagaagaccctggaattcttacggtagacacggactcggtagttggacttggtctcctttccattcctgttcattgcctggcaccggaaaatcccctcatcctggatcccgacagccggaaggaagagggagccgttgggaaggacacgagccacactgtcccaggggcctcctccctggggagacaggaccttccaagcttctgtccggcctgtgttctagaagcagagaagcagggcctaaacagtgcaaggcctttgggaaaggactgtgaggcagagtgacggggatccaaatcattgctggtctccctggaagttgggaggctgcaacaggagccccgcttaccagtttccattccagccgctggggtggtttcttgggggcccccttacacttcagcaccagtggctcgccaatccgggctgtgatgttttgagcacctactactgcccctgggagatagcaccatggtagaggggtaggaagggaatgagggctaacaaaatttggacagggtgggtgagggaccttgaaaggcacttcctcgggttctgggaaaagttctaggacgactggggtgtggggttaaagtgctttctgcagggagggtcagtgggg

SEQ ID NO: 169047 - DNA, 543 bp, Artificial Sequence
  derived and/or modified sequence
atggccgccgccgaggaggaggacggcggccccgagggccccaacagagagagaggcggcgccggcgccaccttcgagtgcaacatctgcctggagaccgccagagaggccgtggtgagcgtgtgcggccacctgtactgctggccctgcctgcaccagtggctggagaccagacccgagagacaggagtgccccgtgtgcaaggccggcatcagcagagagaaggtggtgcccctgtacggcagaggcagccagaagccccaggaccccagactgaagaccccccccagaccccagggccagagacccgcccccgagagcagaggcggcttccagcccttcggcgacaccggcggcttccacttcagcttcggcgtgggcgccttccccttcggcttcttcaccaccgtgttcaacgcccacgagcccttcagaagaggcaccggcgtggacctgggccagggccaccccgccagcagctggcaggacagcctgttcctgttcctggccatcttcttcttcttctggctgctgagcatctag

SEQ ID NO: 169048 - DNA, 549 bp, Artificial Sequence
  derived and/or modified sequence
atggccgccgccgaggaggaggacggcggccccgagggccccaacagagagagaggcggcgccggcgccaccttcgagtgcaacatctgcctggagaccgccagagaggccgtggtgagcgtgtgcggccacctgtactgctggccctgcctgcaccagtggctggagaccagacccgagagacaggagtgccccgtgtgcaaggccggcatcagcagagagaaggtggtgcccctgtacggcagaggcagccagaagccccaggaccccagactgaagaccccccccagaccccagggccagagacccgcccccgagagcagaggcggcttccagcccttcggcgacaccggcggcttccacttcagcttcggcgtgggcgccttccccttcggcttcttcaccaccgtgttcaacgcccacgagcccttcagaagaggcaccggccccttcagcaccagccccgccttcttccactacctgatcggcaacaccagcagagagttcagaggcagaatctacaacttctggctgcccagaaacctgtag

SEQ ID NO: 169049 - protein, 459 aa, Artificial Sequence
  derived and/or modified sequence
MRAQIEVIPCKICGDKSSGIHYGVITCEGCKGFFRRSQQNNASYSCPRQRNCLIDRTNRNRCQHCRLQKCLALGMSRDAVKFGRMSKKQRDSLYAEVQKHQQRLQEQRQQQSGEAEALARVYSSSISNGLSNLNNETSGTYANGHVIDLPKSEGYYNVDSGQPSPDQSGLDMTGIKQIKQEPIYDLTSVPNLFTYSSFNNGQLAPGITMTEIDRIAQNIIKSHLETCQYTMEELHQLAWQTHTYEEIKAYQSKSREALWQQCAIQITHAIQYVVEFAKRITGFMELCQNDQILLLKSGCLEVVLVRMCRAFNPLNNTVLFEGKYGGMQMFKALGSDDLVNEAFDFAKNLCSLQLTEEEIALFSSAVLISPDRAWLIEPRKVQKLQEKIYFALQHVIQKNHLDDETLAKLIAKIPTITAVCNLHGEKLQVFKQSHPEIVNTLFPPLYKELFNPDCATGCK

SEQ ID NO: 169050 - protein, 470 aa, Artificial Sequence
  derived and/or modified sequence
MCENQLKTKADATAQIEVIPCKICGDKSSGIHYGVITCEGCKGFFRRSQQNNASYSCPRQRNCLIDRTNRNRCQHCRLQKCLALGMSRDAVKFGRMSKKQRDSLYAEVQKHQQRLQEQRQQQSGEAEALARVYSSSISNGLSNLNNETSGTYANGHVIDLPKSEGYYNVDSGQPSPDQSGLDMTGIKQIKQEPIYDLTSVPNLFTYSSFNNGQLAPGITMTEIDRIAQNIIKSHLETCQYTMEELHQLAWQTHTYEEIKAYQSKSREALWQQCAIQITHAIQYVVEFAKRITGFMELCQNDQILLLKSGCLEVVLVRMCRAFNPLNNTVLFEGKYGGMQMFKALGSDDLVNEAFDFAKNLCSLQLTEEEIALFSSAVLISPDRAWLIEPRKVQKLQEKIYFALQHVIQKNHLDDETLAKLIAKIPTITAVCNLHGEKLQVFKQSHPEIVNTLFPPLYKELFNPDCATGCK

SEQ ID NO: 169051 - DNA, 3604 bp, Artificial Sequence
  derived and/or modified sequence
tctctcccctctctttctctctcgctgctcccttcctccctgtaactgaacagtgaaaattcacattgtggatccgctaacaggcacagatgtcatgtgaaaacgcacatgctctgccatccacaccgcctttctttcttttctttctgtttccttttttcccccttgttccttctccctcttctttgtaactaacaaaaccaccaccaactcctcctcctgctgctgcccttcctcctcctcctcagtccaagtgatcacaaaagaaatcttctgagccggaggcggtggcattttttaaaaagcaagcacattggagagaaagaaaaagaaaaacaaaaccaaaacaaaacccaggcaccagacagccagaacatttttttttcacccttcctgaaaacaaacaaacaaacaaacaatcatcaaaacagtcaccaccaacatcaaaactgttaacatagcggcggcggcggcaaacgtcaccctgcagccacggcgtccgcctaaagggatggttttctcggcagagcagctcttcgccgaccaccttcttcactcgtgctgagcgggatttttgggctctccggggttcgggctgggagcagcttcatgactacgcggagcgggagagcggccacaccatgcgagcacaaattgaagtgataccatgcaaaatttgtggcgataagtcctctgggatccactacggagtcatcacatgtgaaggctgcaagggattctttaggaggagccagcagaacaatgcttcttattcctgcccaaggcagagaaactgtttaattgacagaacgaacagaaaccgttgccaacactgccgactgcagaagtgtcttgccctaggaatgtcaagagatgctgtgaagtttgggaggatgtccaagaagcaaagggacagcctgtatgctgaggtgcagaagcaccagcagcggctgcaggaacagcggcagcagcagagtggggaggcagaagcccttgccagggtgtacagcagcagcattagcaacggcctgagcaacctgaacaacgagaccagcggcacttatgccaacgggcacgtcattgacctgcccaagtctgagggttattacaacgtcgattccggtcagccgtcccctgatcagtcaggacttgacatgactggaatcaaacagataaagcaagaacctatctatgacctcacatccgtacccaacttgtttacctatagctctttcaacaatgggcagttagcaccagggataaccatgactgaaatcgaccgaattgcacagaacatcattaagtcccatttggagacatgtcaatacaccatggaagagctgcaccagctggcgtggcagacccacacctatgaagaaattaaagcatatcaaagcaagtccagggaagcactgtggcaacaatgtgccatccagatcactcacgccatccaatacgtggtggagtttgcaaagcggataacaggcttcatggagctctgtcaaaatgatcaaattctacttctgaagtcaggttgcttggaagtggttttagtgagaatgtgccgtgccttcaacccattaaacaacactgttctgtttgaaggaaaatatggaggaatgcaaatgttcaaagccttaggttctgatgacctagtgaatgaagcatttgactttgcaaagaatttgtgttccttgcagctgaccgaggaggagatcgctttgttctcatctgctgttctgatatctccagaccgagcctggcttatagaaccaaggaaagtccagaagcttcaggaaaaaatttattttgcacttcaacatgtgattcagaagaatcacctggatgatgagaccttggcaaagttaatagccaagataccaaccatcacggcagtttgcaacttgcacggggagaagctgcaggtatttaagcaatctcatccagagatagtgaatacactgtttcctccgttatacaaggagctctttaatcctgactgtgccaccggctgcaaatgaaggggacaagagaactgtctcatagtcatggaatgcatcaccattaagacaaaagcaatgtgttcatgaagacttaagaaaaatgtcactactgcaacattaggaatgtcctgcacttaatagaattatttttcaccgctacagtttgaagaatgtaaatatgcacctgagtggggctcttttatttgtttgtttgtttttgaaatgaccataaatatacaaatataggacactgggtgttatcctttttttaattttattcgggtatgttttgggagacaactgtttatagaattttattgtagatatatacaagaaaagagcggtactttacatgattacttttcctgttgattgttcaaatataatttaagaaaattccacttaataggcttacctatttctatgtttttaggtagttgatgcatgtgtaaatttgtagctgtcttggaaagtactgtgcatgtatgtaataagtatataatatgtgagaatattatatatgactattacttatacatgcacatgcactgtggcttaaataccatacctactagcaatggaggttcagtcaggctctcttctatgatttaccttctgtgttatatgttacctttatgttagacaatcaggattttgttttcccagccagagttttcatctatagtcaatggcaggacggtaccaactcagagttaagtctacaaaggaataaacataatgtgtggcctctatatacaaactctatttctgtcaatgacatcaaagccttgtcaagatggttcatattgggaaggagacagtattttaagccattttcctgtttcaagaattaggccacagataacattgcaaggtccaagacttttttgaccaaacagtagatattttctatttttcaccagaacacataaaaacactttttttcttttggatttctggttgtgaaacaagcttgatttcagtgcttattgtgtcttcaactgaaaaatacaatctgtggattatgactaccagcaatttttttctaggaaagttaaaagaataaatcagaacccagggcaacaatgccatttcatgtaaacattttctctctcaccatgttttggcaagaaaaggtagaaagagaagacccagagtgaagaagtaattctttatattcctttctttaatgtatttgttaggaaaagtggcaataaagggggaggcatattataaaatgctataatataaaaatgtagcaaaaacttgacagactagaaaaaaaaagatctgtgttattctagggaactaatgtaccccaaagccaaaactaattcctgtgaagtttacagttacatcatccatttaccctagaattatttttttagcaacttttagaaataaagaatacaactgtgacattaggatcagagattttagacttccttgtacaaattctcacttctccacctgctcaccaatgaaattaatcataagaaaagcatatattccaagaaatttgttctgcctgtgtcctggaggcctatacctctgttattttctgatacaaaataaaacttaaaaaaaagaaaacaagctaa

SEQ ID NO: 169052 - DNA, 1380 bp, Artificial Sequence
  derived and/or modified sequence
atgagagcccagatcgaggtgatcccctgcaagatctgcggcgacaagagcagcggcatccactacggcgtgatcacctgcgagggctgcaagggcttcttcagaagaagccagcagaacaacgccagctacagctgccccagacagagaaactgcctgatcgacagaaccaacagaaacagatgccagcactgcagactgcagaagtgcctggccctgggcatgagcagagacgccgtgaagttcggcagaatgagcaagaagcagagagacagcctgtacgccgaggtgcagaagcaccagcagagactgcaggagcagagacagcagcagagcggcgaggccgaggccctggccagagtgtacagcagcagcatcagcaacggcctgagcaacctgaacaacgagaccagcggcacctacgccaacggccacgtgatcgacctgcccaagagcgagggctactacaacgtggacagcggccagcccagccccgaccagagcggcctggacatgaccggcatcaagcagatcaagcaggagcccatctacgacctgaccagcgtgcccaacctgttcacctacagcagcttcaacaacggccagctggcccccggcatcaccatgaccgagatcgacagaatcgcccagaacatcatcaagagccacctggagacctgccagtacaccatggaggagctgcaccagctggcctggcagacccacacctacgaggagatcaaggcctaccagagcaagagcagagaggccctgtggcagcagtgcgccatccagatcacccacgccatccagtacgtggtggagttcgccaagagaatcaccggcttcatggagctgtgccagaacgaccagatcctgctgctgaagagcggctgcctggaggtggtgctggtgagaatgtgcagagccttcaaccccctgaacaacaccgtgctgttcgagggcaagtacggcggcatgcagatgttcaaggccctgggcagcgacgacctggtgaacgaggccttcgacttcgccaagaacctgtgcagcctgcagctgaccgaggaggagatcgccctgttcagcagcgccgtgctgatcagccccgacagagcctggctgatcgagcccagaaaggtgcagaagctgcaggagaagatctacttcgccctgcagcacgtgatccagaagaaccacctggacgacgagaccctggccaagctgatcgccaagatccccaccatcaccgccgtgtgcaacctgcacggcgagaagctgcaggtgttcaagcagagccaccccgagatcgtgaacaccctgttcccccccctgtacaaggagctgttcaaccccgactgcgccaccggctgcaagtag

SEQ ID NO: 169053 - DNA, 1413 bp, Artificial Sequence
  derived and/or modified sequence
atgtgcgagaaccagctgaagaccaaggccgacgccaccgcccagatcgaggtgatcccctgcaagatctgcggcgacaagagcagcggcatccactacggcgtgatcacctgcgagggctgcaagggcttcttcagaagaagccagcagaacaacgccagctacagctgccccagacagagaaactgcctgatcgacagaaccaacagaaacagatgccagcactgcagactgcagaagtgcctggccctgggcatgagcagagacgccgtgaagttcggcagaatgagcaagaagcagagagacagcctgtacgccgaggtgcagaagcaccagcagagactgcaggagcagagacagcagcagagcggcgaggccgaggccctggccagagtgtacagcagcagcatcagcaacggcctgagcaacctgaacaacgagaccagcggcacctacgccaacggccacgtgatcgacctgcccaagagcgagggctactacaacgtggacagcggccagcccagccccgaccagagcggcctggacatgaccggcatcaagcagatcaagcaggagcccatctacgacctgaccagcgtgcccaacctgttcacctacagcagcttcaacaacggccagctggcccccggcatcaccatgaccgagatcgacagaatcgcccagaacatcatcaagagccacctggagacctgccagtacaccatggaggagctgcaccagctggcctggcagacccacacctacgaggagatcaaggcctaccagagcaagagcagagaggccctgtggcagcagtgcgccatccagatcacccacgccatccagtacgtggtggagttcgccaagagaatcaccggcttcatggagctgtgccagaacgaccagatcctgctgctgaagagcggctgcctggaggtggtgctggtgagaatgtgcagagccttcaaccccctgaacaacaccgtgctgttcgagggcaagtacggcggcatgcagatgttcaaggccctgggcagcgacgacctggtgaacgaggccttcgacttcgccaagaacctgtgcagcctgcagctgaccgaggaggagatcgccctgttcagcagcgccgtgctgatcagccccgacagagcctggctgatcgagcccagaaaggtgcagaagctgcaggagaagatctacttcgccctgcagcacgtgatccagaagaaccacctggacgacgagaccctggccaagctgatcgccaagatccccaccatcaccgccgtgtgcaacctgcacggcgagaagctgcaggtgttcaagcagagccaccccgagatcgtgaacaccctgttcccccccctgtacaaggagctgttcaaccccgactgcgccaccggctgcaagtag

SEQ ID NO: 169054 - DNA, 1380 bp, Artificial Sequence
  derived and/or modified sequence
atgagggcccagatcgaggtgattccgtgcaaaatttgtggggataaatcaagcggaatccattacggggtgataacctgcgagggctgcaagggtttcttccggaggagtcagcagaataacgctagttattcttgccccagacagaggaattgtttgattgatcgaacaaacagaaaccgatgccagcattgccgtctgcaaaagtgcctggcgcttgggatgtccagagatgccgtgaaattcgggcgtatgagcaaaaagcagcgcgattccctgtatgccgaggtccagaaacatcagcaacgcctccaagaacagagacagcagcagtctggagaggctgaagccctcgcaagagtttacagctctagcatttctaacggactgagcaatcttaacaacgaaacctctggcacctatgctaacgggcatgtgattgacctgccgaagtccgagggctactacaacgtagacagtggccagccatccccagatcagtcaggcttggacatgaccgggatcaaacagattaagcaggaacctatttatgacctaacatctgttcctaacctctttacctatagtagtttcaataacggacaactcgctccaggcattactatgactgagatcgacagaattgcgcagaatatcatcaagtcccacctggagacctgccagtacacaatggaggagttacaccagttggcttggcagacacatacctacgaagaaatcaaggcctatcagtctaagtcccgtgaagctctgtggcagcagtgcgcaattcaaatcacccacgctattcagtacgtggtagaattcgccaaacgaattaccggcttcatggagctctgccagaacgaccagattcttctgctcaagtctgggtgcctggaggtagtactggtcagaatgtgtcgcgcctttaaccccctgaacaatacagtgcttttcgaagggaagtacggtggcatgcagatgttcaaggccctgggatcggatgacctggtgaatgaagctttcgatttcgcaaagaacctgtgtagcctccagctgaccgaggaagagattgcccttttttcttccgccgtgctcatctcccccgatcgcgcttggctaattgaaccaaggaaggtacagaagctccaggagaaaatctatttcgcactgcagcacgtgatccagaagaaccatctcgatgacgaaactcttgctaagctgatcgccaagattccaacaattactgcagtgtgcaatctgcacggggagaaactgcaagtctttaaacagtctcatcccgagatagtgaatacactcttcccccctctatataaggaacttttcaatcctgattgtgcgactgggtgcaagtag

SEQ ID NO: 169055 - DNA, 1413 bp, Artificial Sequence
  derived and/or modified sequence
atgtgcgagaaccagttaaaaacaaaagcagatgccacagcgcagatcgaagtcatcccatgcaagatttgcggagataagagcagcggcatccactatggtgtcattacatgcgagggctgcaaagggtttttccggcggtctcagcagaataatgcaagctatagctgccctaggcagcgtaattgtctgattgaccgaactaataggaatcggtgccaacactgtcgtctgcagaaatgcctggccctgggcatgagccgcgatgccgtgaagtttgggaggatgagtaagaagcagcgcgattccctttacgccgaggtgcagaagcatcagcagcgtctacaagaacagagacagcagcagagcggggaagctgaggcactcgctagagtatactcgtcaagcatttcaaacggcctctccaacttgaataatgaaacgagcggtacttacgccaatggacatgtgattgatttacccaagtcagaaggttattacaacgtggattccggccagcccagccccgatcagtccgggctagatatgactgggattaaacagatcaaacaggaaccaatctacgacctcacctccgtccctaaccttttcacttactccagttttaataatggtcagctggcgccaggaatcactatgactgagatcgatagaattgcccaaaatataattaagtcccatctcgagacttgccagtatactatggaggaactgcaccagctggcctggcaaacgcacacctacgaggagataaaggcttaccagtccaaaagcagagaagcgctctggcagcagtgcgccatccagatcacccacgccattcagtacgtggtcgagttcgcaaaacgaataactggcttcatggagctctgccagaatgatcagatcctactgctcaaaagcgggtgtctggaagttgttctggttcgaatgtgccgggccttcaatcctctgaacaatactgttctgttcgaaggtaaatatggcggaatgcaaatgttcaaagctctgggcagtgacgatcttgttaacgaagcgtttgattttgctaaaaatctgtgctccttacagctgacagaggaagagatcgccttgttctctagcgctgtgcttatcagccccgatagagcatggctcatcgagcctaggaaggttcagaagttgcaggaaaagatctactttgcgcttcaacacgtgatccagaagaatcatctggacgatgagaccttagcaaaactaatcgctaagattccgaccataactgctgtctgcaatctccacggcgaaaagctgcaagtatttaagcagtctcatcctgagatcgtgaacaccttgtttccacccctttataaggagctctttaatcctgactgcgcaaccgggtgtaaatag

SEQ ID NO: 169056 - DNA, 1380 bp, Artificial Sequence
  derived and/or modified sequence
atgagggcccagattgaagtcatcccctgcaagatctgtggggacaagagcagcggcatccactacggcgtcatcacctgtgagggctgcaagggcttcttcagaagaagccagcagaacaatgccagctacagctgcccccggcagaggaactgcctgattgacaggaccaacagaaaccgctgccagcactgccgcctgcagaagtgcctggccctgggcatgagcagagatgctgtgaagtttggccgcatgagcaagaagcagagggacagcctgtatgcagaggtgcagaagcaccagcagaggctgcaggagcagaggcagcagcagagcggggaggccgaggccctggcccgggtgtacagcagcagcatcagcaatggcctgagcaacctgaacaatgagaccagcggcacctacgccaatggacatgtgattgacctgcccaagtctgagggctactacaacgtggacagcggccagcccagcccagaccagagcggcctggacatgacaggcatcaagcagatcaagcaggagcccatctatgacctgacctctgtgcccaacctcttcacctacagcagcttcaacaacggccagctggcccctggcatcaccatgacagaaattgacagaattgcccagaacatcatcaagagccacctggagacctgccagtacaccatggaggagctgcaccagctggcctggcagacccacacctatgaggagatcaaggcctaccagagcaagagccgggaggccctgtggcagcagtgtgccatccagatcacccacgccatccagtatgtggtggagtttgccaagaggatcaccggcttcatggagctgtgccagaatgaccagatcctgctgctgaagagcggctgcctggaggtggtgctggtgaggatgtgccgggccttcaaccccctgaacaacacagtgctgtttgagggcaagtatggaggcatgcagatgttcaaggccctgggcagtgatgacctggtgaatgaggcctttgattttgccaagaacctgtgcagcctgcagctgacagaggaggagatcgccctcttcagcagcgctgtgctgatcagcccagaccgggcctggctgattgagcccaggaaggtgcagaagctgcaggagaagatctactttgccctgcagcacgtgatccagaagaaccacctggatgatgagaccctggccaagctgattgccaagatccccaccatcacagctgtgtgcaacctgcatggagagaagctgcaggtgttcaagcagagccaccctgagatcgtgaacaccctcttcccccccctgtacaaggagctgttcaacccagactgtgccaccggctgcaagtag

SEQ ID NO: 169057 - DNA, 1413 bp, Artificial Sequence
  derived and/or modified sequence
atgtgtgagaaccagctgaagaccaaggcagatgccacagcccagatcgaggtgatcccctgcaagatctgtggggacaagagcagcggcatccactatggagtcatcacctgtgagggctgcaagggcttcttccgccgcagccagcagaacaatgccagctacagctgcccccggcagaggaactgcctgattgacaggaccaacagaaaccgctgccagcactgccgcctgcagaagtgcctggccctgggcatgagcagagatgctgtgaagtttggaaggatgagcaagaagcagagggacagcctgtatgcagaggtgcagaagcaccagcagaggctgcaggagcagaggcagcagcagagcggggaggccgaggccctggcccgggtgtacagcagcagcatcagcaatggcctgagcaacctgaacaatgagaccagcggcacctacgccaacggccacgtgattgacctgcccaagtctgagggctactacaacgtggacagcggccagcccagcccagaccagagcggcctggacatgacaggcatcaagcagatcaagcaggagcccatctatgacctgacctctgtgcccaacctcttcacctacagcagcttcaacaacggccagctggcccctggcatcaccatgacagaaattgaccgcatcgcccagaacatcatcaagagccacctggagacctgccagtacaccatggaggagctgcaccagctggcctggcagacccacacctatgaggagatcaaggcctaccagagcaagagccgggaggccctgtggcagcagtgtgccatccagatcacccacgccatccagtatgtggtggagtttgccaagaggatcaccggcttcatggagctgtgccagaatgaccagatcctgctgctgaagagcggctgcctggaggtggtgctggtgaggatgtgccgggccttcaaccccctgaacaacacagtgctgtttgagggcaagtatggaggcatgcagatgttcaaggccctgggcagtgatgacctggtgaatgaggcctttgattttgccaagaacctgtgcagcctgcagctgacagaggaggagatcgccctcttcagcagcgctgtgctgatcagcccagaccgggcctggctgattgagcccaggaaggtgcagaagctgcaggagaagatctactttgccctgcagcacgtgatccagaagaaccacctggatgatgagaccctggccaagctgattgccaagatccccaccatcacagctgtgtgcaacctgcacggggagaagctgcaggtgttcaagcagagccaccctgagatcgtgaacaccctcttcccccccctgtacaaggagctgttcaacccagactgtgccaccggctgcaagtag

SEQ ID NO: 169058 - DNA, 1380 bp, Artificial Sequence
  derived and/or modified sequence
atgcgggcccagatcgaggtgatcccctgcaagatctgcggcgacaagtctagcgggattcattatggggtgataacctgtgaaggctgcaagggcttctttaggcgctctcagcagaacaatgctagttactcttgtcccaggcagcgcaattgcctcattgataggacgaatagaaatagatgtcagcactgcagactccagaagtgcctcgcacttggaatgtccagagacgcggtgaagttcgggcgcatgtcaaaaaagcagagagatagtctgtacgctgaagttcagaagcaccagcagaggcttcaggagcagcgacagcaacagtcaggggaagcagaggccctggcgcgggtatacagctcatccatctcaaacggtctgtcaaacctcaataacgagaccagtggaacctacgccaacggccacgtcattgacttacctaagtcggaaggatactacaatgttgacagcggccagccttcccctgaccagagcggactagacatgacagggatcaagcagatcaagcaggaacccatatacgatctgaccagcgtccccaacctgttcacatattccagctttaataatggccagcttgcaccagggatcactatgactgagatagacaggatcgcacagaatataattaagagtcacctggagacgtgtcagtataccatggaagaattgcatcagctggcttggcagacacacacttacgaagagatcaaagcgtatcaaagtaaatcacgcgaggccctgtggcagcagtgtgccatccagatcacacatgctatccaatacgttgtggagttcgctaagcgaatcactggcttcatggagctgtgtcaaaatgatcagatccttctgttgaagtccggatgtcttgaggtggtcctggtgaggatgtgccgcgcctttaatcccctgaacaacaccgttctgtttgaaggaaaatacgggggcatgcagatgtttaaggccttgggttccgatgatttggtgaatgaggcctttgattttgccaagaacctctgtagtttgcagttaaccgaggaggagattgctttgttctcttctgctgtactgatttctccggaccgggcttggcttatcgagcctagaaaagttcaaaagctgcaagagaagatttactttgcattgcagcacgtgatccagaaaaatcacctcgatgatgagaccctggctaagctgatagcgaaaataccaactattacagccgtctgcaatctgcacggggaaaagttgcaggtctttaaacaaagccacccagagatcgtcaataccctcttccctccactgtacaaagaactgttcaaccccgactgcgccactggatgcaaatag

SEQ ID NO: 169059 - DNA, 1413 bp, Artificial Sequence
  derived and/or modified sequence
atgtgcgagaaccagctgaagaccaaggccgacgccaccgcccagattgaggttatcccttgcaaaatctgtggcgacaagtcctcagggattcattatggcgtgatcacctgcgagggctgcaagggtttctttagacggtcccagcagaacaacgcatcttactcatgcccacgccagcggaattgcctcatagataggacaaaccgcaaccggtgtcagcattgtcggctgcaaaaatgcctggcactgggtatgtctagagatgctgtgaagtttggaagaatgtcaaaaaaacagcgggattctctttatgcggaggtacagaaacaccagcagcggttacaggagcagcgccagcagcaatccggcgaggccgaggcactagcccgtgtatattccagcagtatttccaatggtctgagcaatctcaataacgaaaccagcggcacatatgccaacggtcacgtgatcgaccttcccaagtctgaaggatactacaacgtggactccgggcagccctctcctgaccagagtggcctcgacatgactgggatcaaacagattaaacaggagccgatttatgacctgacttcagttccgaatctgtttacctacagctctttcaacaatggccagttggctccaggtattaccatgactgagatcgaccgaatcgcccagaacatcattaagtcccacctcgagacgtgccagtacaccatggaggaactgcaccagctcgcttggcagacacacacttacgaggaaattaaggcataccagagcaagagcagagaggcactctggcagcagtgtgcgatccagataacacacgcaatacagtacgtcgtggaattcgccaagaggattaccggcttcatggaattatgtcagaacgatcagatactgctgctaaagtcggggtgcctcgaagtcgtcctggtgaggatgtgcagagcctttaaccccctgaacaacaccgtccttttcgagggcaaatatggcggtatgcagatgttcaaagcattaggctctgacgatctagttaatgaggcctttgatttcgctaaaaacctgtgctccctgcagttgactgaggaggaaatcgccctcttcagcagcgctgtcctaattagtcccgaccgcgcctggctaatcgaaccccgcaaggtccagaaactgcaagaaaaaatttattttgctcttcaacatgtgattcagaagaaccacctggacgacgaaacccttgccaagttgattgcgaagatccctactatcactgccgtgtgtaacctgcacggtgaaaagctgcaagtgtttaaacagtcccatccagagatagtgaataccttattcccaccactctataaggagctgtttaatccagactgtgcaactggctgcaagtag

SEQ ID NO: 169060 - DNA, 1380 bp, Artificial Sequence
  derived and/or modified sequence
atgcgcgcacagatcgaagtcattccatgcaagatctgtggggataagagctctggcatacattatggagtcataacttgtgaagggtgcaaagggtttttcagacgctctcagcagaacaatgcgagttacagttgtccgagacagaggaactgcttgattgatagaaccaatcggaatcgctgtcaacattgccggctgcaaaagtgcctggcccttggaatgagtagggatgctgtgaaatttggacgaatgagtaagaagcaacgtgactccctctacgcagaggtgcagaagcaccagcagagactgcaggagcaacgccagcaacagagcggggaggccgaagctctggcgagggtgtatagctcttccattagcaacggactgtccaacctgaataatgaaaccagtggtacctatgcaaatgggcacgtgatcgatttgccaaagtccgagggctactacaacgtcgattccggacagcctagcccagaccagtccggattggacatgaccggtattaagcagattaaacaggaacccatttacgacctgacgtcagtgcctaatctgttcacgtatagcagtttcaataatgggcagctggcacccggtatcacgatgaccgaaatcgaccgaattgctcagaatattataaaaagccacttagaaacctgccagtatactatggaagaacttcaccagcttgcctggcagacgcatacttatgaagaaattaaggcataccaaagtaagtctagggaggccctgtggcagcaatgcgcaattcagatcactcacgcaatacaatatgtggtggaatttgccaagcgcatcactggatttatggagctctgccagaacgaccagatcttgctgcttaagtccggatgcctggaagtggttcttgtgcgcatgtgtcgcgcatttaaccctttgaataataccgtcctgttcgaaggtaaatatggcggaatgcaaatgttcaaagctctgggttccgacgacctggtgaatgaggcttttgatttcgcgaaaaacctgtgttctctacagctgactgaagaggagatcgccctatttagttccgcagtgctgatctcacctgatagagcctggttgattgaacctaggaaggtacagaaattgcaggagaagatatacttcgcgctccaacacgtgatacagaagaaccacttagatgacgagacactcgcaaagctgattgccaaaatccccacaattaccgcggtgtgtaatctgcatggagagaagctgcaggtttttaagcagtctcacccagagatcgtgaacactctcttccctcccttatataaggaactttttaaccccgattgcgccaccggctgcaagtag

SEQ ID NO: 169061 - DNA, 1413 bp, Artificial Sequence
  derived and/or modified sequence
atgtgcgaaaaccagctgaagactaaggctgatgcaacagctcaaatcgaggtgattccatgcaaaatctgcggcgacaaatcctcaggcattcattacggagtgatcacttgcgaaggttgtaagggtttttttcggagatcccaacagaacaacgcctcctattcttgccctagacagcggaattgcctgattgatcgcactaatagaaatcggtgccagcattgccggctgcagaaatgcctggccctggggatgtctagagatgccgtgaagtttggacgaatgagtaaaaaacagagagactcactgtacgcagaagtgcagaagcatcagcagaggcttcaggagcaacgacaacagcagtcaggagaggctgaggccctcgcgagggtgtacagttctagtatctctaatggtctgtctaatctgaacaatgagacatctggaacatatgctaatgggcatgttatagacctcccgaagagcgagggttactacaatgtcgattccgggcagccttctccagaccagagtggactggatatgacaggaatcaagcaaataaagcaggaacccatttatgacctgacatcagttcctaacctgttcacgtactcctcctttaataacggacagctggctcctggcatcactatgacggagattgaccggattgcgcagaatatcataaaatcccacctcgagacctgccagtacaccatggaagagctgcatcagttggcctggcagacacatacatacgaggagattaaggcctaccagtcaaaaagccgggaggctttatggcagcaatgcgctatccagattacccacgccatccagtacgtggtggagttcgctaagaggataacaggctttatggagttgtgtcagaatgaccagatactgcttctcaaaagcgggtgtctggaagtggtcctggtgcgcatgtgcagggccttcaatcccttaaataataccgtcttgttcgagggtaaatacgggggtatgcagatgtttaaggcccttggatctgacgacctagtaaacgaggcttttgattttgcaaagaatctgtgttcgttacaattaacagaagaagagatcgcactgttctcttccgctgtgctgatctccccagaccgtgcatggctcatcgagccccgtaaggtgcagaaactgcaggagaagatctatttcgcccttcagcacgtgatacaaaagaaccatctggacgatgagactctcgcgaaactgattgcgaagatcccaacaattaccgccgtttgcaatttgcacggagagaagctacaggtcttcaaacagtcccacccagaaatagtgaacacactgtttcccccactgtacaaggaactgttcaaccccgattgcgccaccggctgtaagtag

SEQ ID NO: 169062 - DNA, 3567 bp, Artificial Sequence
  derived and/or modified sequence
cccttcctccctgtaactgaacagtgaaaattcacattgtggatccgctaacaggcacagatgtcatgtgaaaacgcacatgctctgccatccacaccgcctttctttcttttctttctgtttccttttttcccccttgttccttctccctcttctttgtaactaacaaaaccaccaccaactcctcctcctgctgctgcccttcctcctcctcctcagtccaagtgatcacaaaagaaatcttctgagccggaggcggtggcattttttaaaaagcaagcacattggagagaaagaaaaagaaaaacaaaaccaaaacaaaacccaggcaccagacagccagaacatttttttttcacccttcctgaaaacaaacaaacaaacaaacaatcatcaaaacagtcaccaccaacatcaaaactgttaacatagcggcggcggcggcaaacgtcaccctgcagccacggcgtccgcctaaagggatggttttctcggcagagcagctcttcgccgaccaccttcttcactcgtgctgagcgggatttttgggctctccggggttcgggctgggagcagcttcatgactacgcggagcgggagagcggccacaccatgcgagcacaaattgaagtgataccatgcaaaatttgtggcgataagtcctctgggatccactacggagtcatcacatgtgaaggctgcaagggattctttaggaggagccagcagaacaatgcttcttattcctgcccaaggcagagaaactgtttaattgacagaacgaacagaaaccgttgccaacactgccgactgcagaagtgtcttgccctaggaatgtcaagagatgctgtgaagtttgggaggatgtccaagaagcaaagggacagcctgtatgctgaggtgcagaagcaccagcagcggctgcaggaacagcggcagcagcagagtggggaggcagaagcccttgccagggtgtacagcagcagcattagcaacggcctgagcaacctgaacaacgagaccagcggcacttatgccaacgggcacgtcattgacctgcccaagtctgagggttattacaacgtcgattccggtcagccgtcccctgatcagtcaggacttgacatgactggaatcaaacagataaagcaagaacctatctatgacctcacatccgtacccaacttgtttacctatagctctttcaacaatgggcagttagcaccagggataaccatgactgaaatcgaccgaattgcacagaacatcattaagtcccatttggagacatgtcaatacaccatggaagagctgcaccagctggcgtggcagacccacacctatgaagaaattaaagcatatcaaagcaagtccagggaagcactgtggcaacaatgtgccatccagatcactcacgccatccaatacgtggtggagtttgcaaagcggataacaggcttcatggagctctgtcaaaatgatcaaattctacttctgaagtcaggttgcttggaagtggttttagtgagaatgtgccgtgccttcaacccattaaacaacactgttctgtttgaaggaaaatatggaggaatgcaaatgttcaaagccttaggttctgatgacctagtgaatgaagcatttgactttgcaaagaatttgtgttccttgcagctgaccgaggaggagatcgctttgttctcatctgctgttctgatatctccagaccgagcctggcttatagaaccaaggaaagtccagaagcttcaggaaaaaatttattttgcacttcaacatgtgattcagaagaatcacctggatgatgagaccttggcaaagttaatagccaagataccaaccatcacggcagtttgcaacttgcacggggagaagctgcaggtatttaagcaatctcatccagagatagtgaatacactgtttcctccgttatacaaggagctctttaatcctgactgtgccaccggctgcaaatgaaggggacaagagaactgtctcatagtcatggaatgcatcaccattaagacaaaagcaatgtgttcatgaagacttaagaaaaatgtcactactgcaacattaggaatgtcctgcacttaatagaattatttttcaccgctacagtttgaagaatgtaaatatgcacctgagtggggctcttttatttgtttgtttgtttttgaaatgaccataaatatacaaatataggacactgggtgttatcctttttttaattttattcgggtatgttttgggagacaactgtttatagaattttattgtagatatatacaagaaaagagcggtactttacatgattacttttcctgttgattgttcaaatataatttaagaaaattccacttaataggcttacctatttctatgtttttaggtagttgatgcatgtgtaaatttgtagctgtcttggaaagtactgtgcatgtatgtaataagtatataatatgtgagaatattatatatgactattacttatacatgcacatgcactgtggcttaaataccatacctactagcaatggaggttcagtcaggctctcttctatgatttaccttctgtgttatatgttacctttatgttagacaatcaggattttgttttcccagccagagttttcatctatagtcaatggcaggacggtaccaactcagagttaagtctacaaaggaataaacataatgtgtggcctctatatacaaactctatttctgtcaatgacatcaaagccttgtcaagatggttcatattgggaaggagacagtattttaagccattttcctgtttcaagaattaggccacagataacattgcaaggtccaagacttttttgaccaaacagtagatattttctatttttcaccagaacacataaaaacactttttttcttttggatttctggttgtgaaacaagcttgatttcagtgcttattgtgtcttcaactgaaaaatacaatctgtggattatgactaccagcaatttttttctaggaaagttaaaagaataaatcagaacccagggcaacaatgccatttcatgtaaacattttctctctcaccatgttttggcaagaaaaggtagaaagagaagacccagagtgaagaagtaattctttatattcctttctttaatgtatttgttaggaaaagtggcaataaagggggaggcatattataaaatgctataatataaaaatgtagcaaaaacttgacagactagaaaaaaaaagatctgtgttattctagggaactaatgtaccccaaagccaaaactaattcctgtgaagtttacagttacatcatccatttaccctagaattatttttttagcaacttttagaaataaagaatacaactgtgacattaggatcagagattttagacttccttgtacaaattctcacttctccacctgctcaccaatgaaattaatcataagaaaagcatatattccaagaaatttgttctgcctgtgtcctggaggcctatacctctgttattttctgatacaaaataaaacttaaaaaaaagaaaa

SEQ ID NO: 169063 - DNA, 2996 bp, Artificial Sequence
  derived and/or modified sequence
atgtgtgagaaccagctcaaaactaaagctgacgccactgcacaaattgaagtgataccatgcaaaatttgtggcgataagtcctctgggatccactacggagtcatcacatgtgaaggctgcaagggattctttaggaggagccagcagaacaatgcttcttattcctgcccaaggcagagaaactgtttaattgacagaacgaacagaaaccgttgccaacactgccgactgcagaagtgtcttgccctaggaatgtcaagagatgctgtgaagtttgggaggatgtccaagaagcaaagggacagcctgtatgctgaggtgcagaagcaccagcagcggctgcaggaacagcggcagcagcagagtggggaggcagaagcccttgccagggtgtacagcagcagcattagcaacggcctgagcaacctgaacaacgagaccagcggcacttatgccaacgggcacgtcattgacctgcccaagtctgagggttattacaacgtcgattccggtcagccgtcccctgatcagtcaggacttgacatgactggaatcaaacagataaagcaagaacctatctatgacctcacatccgtacccaacttgtttacctatagctctttcaacaatgggcagttagcaccagggataaccatgactgaaatcgaccgaattgcacagaacatcattaagtcccatttggagacatgtcaatacaccatggaagagctgcaccagctggcgtggcagacccacacctatgaagaaattaaagcatatcaaagcaagtccagggaagcactgtggcaacaatgtgccatccagatcactcacgccatccaatacgtggtggagtttgcaaagcggataacaggcttcatggagctctgtcaaaatgatcaaattctacttctgaagtcaggttgcttggaagtggttttagtgagaatgtgccgtgccttcaacccattaaacaacactgttctgtttgaaggaaaatatggaggaatgcaaatgttcaaagccttaggttctgatgacctagtgaatgaagcatttgactttgcaaagaatttgtgttccttgcagctgaccgaggaggagatcgctttgttctcatctgctgttctgatatctccagaccgagcctggcttatagaaccaaggaaagtccagaagcttcaggaaaaaatttattttgcacttcaacatgtgattcagaagaatcacctggatgatgagaccttggcaaagttaatagccaagataccaaccatcacggcagtttgcaacttgcacggggagaagctgcaggtatttaagcaatctcatccagagatagtgaatacactgtttcctccgttatacaaggagctctttaatcctgactgtgccaccggctgcaaatgaaggggacaagagaactgtctcatagtcatggaatgcatcaccattaagacaaaagcaatgtgttcatgaagacttaagaaaaatgtcactactgcaacattaggaatgtcctgcacttaatagaattatttttcaccgctacagtttgaagaatgtaaatatgcacctgagtggggctcttttatttgtttgtttgtttttgaaatgaccataaatatacaaatataggacactgggtgttatcctttttttaattttattcgggtatgttttgggagacaactgtttatagaattttattgtagatatatacaagaaaagagcggtactttacatgattacttttcctgttgattgttcaaatataatttaagaaaattccacttaataggcttacctatttctatgtttttaggtagttgatgcatgtgtaaatttgtagctgtcttggaaagtactgtgcatgtatgtaataagtatataatatgtgagaatattatatatgactattacttatacatgcacatgcactgtggcttaaataccatacctactagcaatggaggttcagtcaggctctcttctatgatttaccttctgtgttatatgttacctttatgttagacaatcaggattttgttttcccagccagagttttcatctatagtcaatggcaggacggtaccaactcagagttaagtctacaaaggaataaacataatgtgtggcctctatatacaaactctatttctgtcaatgacatcaaagccttgtcaagatggttcatattgggaaggagacagtattttaagccattttcctgtttcaagaattaggccacagataacattgcaaggtccaagacttttttgaccaaacagtagatattttctatttttcaccagaacacataaaaacactttttttcttttggatttctggttgtgaaacaagcttgatttcagtgcttattgtgtcttcaactgaaaaatacaatctgtggattatgactaccagcaatttttttctaggaaagttaaaagaataaatcagaacccagggcaacaatgccatttcatgtaaacattttctctctcaccatgttttggcaagaaaaggtagaaagagaagacccagagtgaagaagtaattctttatattcctttctttaatgtatttgttaggaaaagtggcaataaagggggaggcatattataaaatgctataatataaaaatgtagcaaaaacttgacagactagaaaaaaaaagatctgtgttattctagggaactaatgtaccccaaagccaaaactaattcctgtgaagtttacagttacatcatccatttaccctagaattatttttttagcaacttttagaaataaagaatacaactgtgacattaggatcagagattttagacttccttgtacaaattctcacttctccacctgctcaccaatgaaattaatcataagaaaagcatatattccaagaaatttgttctgcctgtgtcctggaggcctatacctctgttattttctgatacaaaataaaacttaaaaaaaagaaaacaagctaa

SEQ ID NO: 169064 - protein, 350 aa, Artificial Sequence
  derived and/or modified sequence
MGCFFSKRRKADKESRPENEEERPKQYSWDQREKVDPKDYMFSGLKDETVGRLPGTVAGQQFLIQDCENCNIYIFDHSATVTIDDCTNCIIFLGPVKGSVFFRNCRDCKCTLACQQFRVRDCRKLEVFLCCATQPIIESSSNIKFGCFQWYYPELAFQFKDAGLSIFNNTWSNIHDFTPVSGELNWSLLPEDAVVQDYVPIPTTEELKAVRVSTEANRSIVPISRGQRQKSSDESCLVVLFAGDYTIANARKLIDEMVGKGFFLVQTKEVSMKAEDAQRVFREKAPDFLPLLNKGPVIALEFNGDGAVEVCQLIVNEIFNGTKMFVSESKETASGDVDSFYNFADIQMGI

SEQ ID NO: 169065 - DNA, 1053 bp, Artificial Sequence
  derived and/or modified sequence
atgggctgcttctttagtaaacggaggaaggctgacaaagaatcacgacccgaaaatgaagaagaacggcctaaacagtactcctgggatcaacgggagaaggtggaccctaaagattatatgttctccggcctcaaggacgagaccgttggccggttgccaggcacggtcgccggccaacaattcctcatccaagattgtgaaaactgcaatatttatatctttgatcactcagccacagtaactatcgacgattgcacgaattgcatcattttccttggaccagtgaaggggtccgtattttttcgcaactgccgtgattgtaagtgcacactggcctgccagcagttcagggtcagagattgccgcaaactggaggtgttcctatgctgtgctacccaacctattatcgagtcctcttcaaatattaagtttggctgttttcagtggtattaccctgagctggcctttcaattcaaggacgctggtcttagcattttcaacaacacatggtccaatattcacgactttaccccggtctctggggagctgaactggtccctattaccggaggacgcagttgttcaagattacgtgcctatccctaccactgaggaactgaaggccgtgcgagttagcaccgaggctaatagaagcatcgtacctatatctcgcgggcaacgacagaagtccagcgatgagagctgtctcgtggtgctatttgctggagactacaccatcgcgaacgcaaggaagttgattgacgaaatggtgggcaaagggttctttctcgtgcagaccaaggaagtgtctatgaaggctgaggacgcccaacgggtctttcgagaaaaagcaccagatttcctgccactcttgaacaaagggcccgttatcgccctcgaatttaatggtgacggggctgtcgaggtgtgtcaactgattgtcaacgaaatcttcaacggcacaaagatgttcgtgagtgagtctaaagaaactgcatcaggagacgttgactctttctataatttcgctgatatacaaatgggaatctag

SEQ ID NO: 169066 - DNA, 1053 bp, Artificial Sequence
  derived and/or modified sequence
atgggctgcttcttcagcaagaggaggaaggctgacaaggagagcaggccagaaaatgaggaggagcggcccaagcagtacagctgggaccagcgggagaaggtggaccccaaggactacatgttttctggcctgaaggatgaaacagtgggccgcctgcccggcaccgtggccggccagcagttcctgatccaggactgtgagaactgcaacatctacatctttgaccacagcgccaccgtgaccattgatgactgcaccaactgcatcatcttcctgggccctgtgaagggctctgtgttcttcaggaactgccgggactgcaagtgcaccctggcctgccagcagttccgggtgcgggactgcaggaagctggaggtgttcctgtgctgtgccacccagcccatcatcgagagcagcagcaacatcaagtttggctgcttccagtggtactacccagagctggccttccagttcaaggatgctggcctgagcatcttcaacaacacctggagcaacatccatgacttcacccctgtgtctggagagctgaactggagcctgctgcctgaagatgctgtggtgcaggactatgtgcccatccccaccacagaggagctgaaggctgtgcgggtgtccacagaggccaacagaagcatcgtgcccatcagccggggccagaggcagaagagcagtgatgagagctgcctggtggtgctgtttgctggggactacaccatcgccaatgccaggaagctgattgatgagatggtgggcaagggcttcttcctggtgcagaccaaggaggtgtccatgaaggcagaagatgcccagagggtcttccgggagaaggccccagacttcctgcccctgctgaacaagggccctgtgattgccctggagttcaatggagatggagctgtggaggtgtgccagctgattgtgaatgagatcttcaacggcaccaagatgtttgtgtctgagagcaaggagacagccagcggagatgtggacagcttctacaactttgctgacatccagatgggcatctag

SEQ ID NO: 169067 - DNA, 1053 bp, Artificial Sequence
  derived and/or modified sequence
atgggctgcttcttcagcaagcggcggaaggccgacaaggagagcagacccgagaacgaggaggaacgccccaaacagtactcctgggatcagagagaaaaggttgatccaaaggattatatgttcagcggactgaaggacgagacggtgggaaggctgcctgggacagtggcaggccaacagttcctgattcaggattgtgaaaattgcaatatatatatatttgaccactctgcaaccgtgaccatcgatgattgcactaattgtatcattttcctgggcccagtcaaagggagtgtgttcttccgtaactgccgggattgcaaatgtaccctggcttgccagcagtttcgtgtgcgggattgtcgaaaactggaagtgttcctttgttgcgctacccagcccattattgagtcatcctccaacatcaagtttgggtgttttcaatggtattaccctgaactggcctttcagttcaaggacgcaggcctcagcattttcaacaatacgtggagtaacatccacgatttcacgccggtaagtggcgaactcaactggtcgctgctaccagaagacgccgttgtccaggactatgtcccgatccctacaacggaagagcttaaggccgttagagtgagtacggaagccaataggagcattgtgccgatcagtaggggccagaggcaaaaaagctcagacgaaagttgcctagtcgtcctgttcgccggagactacaccatagctaacgcccgcaaactcattgatgaaatggtcgggaagggcttcttcctggtgcagacgaaggaagtctctatgaaagccgaggacgctcagcgagtgttccgcgagaaggcccccgacttcctgcccttactgaacaaggggccagtcattgctttggaatttaatggcgacggcgcggtggaggtgtgtcagctcattgtcaacgagatctttaacggcaccaagatgttcgtgagtgagagcaaagagaccgcatctggtgatgtggactcattctacaacttcgccgacattcaaatgggaatctag

SEQ ID NO: 169068 - DNA, 1053 bp, Artificial Sequence
  derived and/or modified sequence
atggggtgtttctttagtaagcggagaaaggccgataaggagagccgccctgagaatgaggaagagcgccctaaacagtattcttgggaccagcgcgagaaagtcgacccaaaagactatatgttcagcgggttgaaggacgagaccgttggacgcctccccggtactgtggccggacagcaatttctgattcaagactgtgagaactgtaacatctatatttttgaccatagcgctacggttactattgatgactgtaccaattgcatcatcttcttagggcctgtgaaggggtccgtgttcttccggaactgccgagactgcaagtgtacattggcctgtcaacaattcagagtgcgggattgccggaaacttgaggtgtttctgtgttgtgcaacacagccgatcatagagtcatcttctaatataaaattcggctgcttccagtggtactaccctgagttagccttccagttcaaggacgcaggcctgagtatcttcaacaacacctggtcaaatatccatgactttactccagtgtccggcgaattaaactggtctctgctgccggaagacgccgtggtacaagattatgtcccgattcctacaaccgaagagttgaaagctgtgagagtgagcacagaagctaatcgttcgatcgtgccaatttcgcggggtcaacgccagaaaagctccgacgaatcctgtcttgttgttctttttgctggcgattataccatcgctaatgcaagaaaactaatcgatgagatggtgggtaaaggctttttcctggtccagactaaagaagtgtcaatgaaggctgaagatgcccagcgggttttcagagaaaaggcaccagactttctgccactgctgaataagggacccgtgatcgccctcgagtttaacggcgacggggcagtggaggtatgccagctgatagtgaatgagatctttaatggcacaaagatgtttgtctccgaaagcaaagaaactgctagcggggacgtggattccttctataacttcgcagacatccagatgggaatctag
